United States Patent Application Publication US 2005/0228172 A9 - sequence listing, part 68

SEQ ID NO: 295094 - DNA, 595 bp, Homo sapiens
ttggtagcctgcggctaaaattttgcttatggacatgctttatttggttcataaaatataattttagaaaacagattttttcctggccaaaattcaaaatctagattttacctaagaatccagaggagatactttgccttttagataggccatgttctccctggttcagcttggcccccaatactccaacctcttaaaagtggctttttcctgcaagtatgttacctgtctgtcccctgaaggcatttgagtttgcagccttttctttacaggtattaaacttcaaatcatactaaaccctatattttattgtagcagaacctgttctggaattactccacctgcaatttccacttgaactaattatgctgtcacagcttatccayatggtgggttctgcaatcaatggaaacacagaagttatgattccaaactgcatgtgggtagataaatgatgggctgaaaatgatgggataggatagaaccacaaaataatgggataaatatctggagtttgataatacagatcctggcacatagttctagagtttaaacagttattgctgaaggtttgatggtgcacaggcagaggttt

SEQ ID NO: 295095 - DNA, 619 bp, Homo sapiens
ttactgctctttttaaagaccaggtcctgatcaatccagtcagcagtataatccatttcttacaggtttctttctgcgtctgtgtattttaacattgcatccgtaattaaatttactttctgaactagggatgtattttcttgttaatgctatcaacatttaaaaaataaatctcttttaagtttattgtttcaaaatgcaagaagtgtccctcaggacccacctactgggaagcagatgatctcatttgtcagtggaaaatgcctgtctggatggtaaaaacttttcttggtccttattttaracctttttggtctgaaaaatgtaagtttgggatggtcattcatgggtttaatatattgctggagaagttggtgttctggttagctctttcttcatgctgagcttttaaatatgatattttaaagaatttcagtaaatcaagtgttgttaagtaggcgggactgtcaagttttaagtttcaaaatccatttacttaatcagtgaaaaagttattgaacacttggctcaataaatgacttcttcaacaggaaagaccatgtcttatttaccttttacctctaccacctagcccaatgcctatattggggtgcccaac

SEQ ID NO: 295096 - DNA, 619 bp, Homo sapiens
ttactgctctttttaaagaccaggtcctgatcaatccagtcagcagtataatccatttcttacaggtttctttctgcgtctgtgtattttaacattgcatccgtaattaaatttactttctgaactagggatgtattttcttgttaatgctatcaacatttaaaaaataaatctcttttaagtttattgtttcaaaatgcaagaagtgtccctcaggacccacctactgggaagcagatgatctcatttgtcagtggaaaatgcctgtctggatggtaaaaacttttcttggtccttattttagacctttttggtctgaaaaatgtaagtttgggatggtcattcatggktttaatatattgctggagaagttggtgttctggttagctctttcttcatgctgagcttttaaatatgatattttaaagaatttcagtaaatcaagtgttgttaagtaggcgggactgtcaagttttaagtttcaaaatccatttacttaatcagtgaaaaagttattgaacacttggctcaataaatgacttcttcaacaggaaagaccatgtcttatttaccttttacctctaccacctagcccaatgcctatattggggtgcccaac

SEQ ID NO: 295097 - DNA, 576 bp, Homo sapiens
gtctttgaatccaaagtacttctctaatagtacatagttgaatcatgtgtttaaaaattcattctaccaatcattgtcttttgattgtaatgtttatttcatttacatttactgtaagtagtaaacataggatttatacttgatattatctaattattttctgtgtatctcatgctttctgttcctctattcttccatcattgcattcttttgtgttaaataattttctatataccatttttttatcattccctttactatatatgtttgggttattttcttaatggttgccctgggattacaattaatatcttaatttaaaagtgtctggtttggattaatacaacttgattttaacagtatataaaacccttgtttctagggatgtgaaggacctcttcaaggagaactacaaaccactgcttgaggaaataagagaggacacaaacaartggaaaaacattccatgctcatggataggaaaaatcaatattgtgaaaatggccaaactgcccaaagtaatttatagattcagtgctatccccatcaagctgccattgactttcttcacagaat

SEQ ID NO: 295098 - DNA, 576 bp, Homo sapiens
gtctttgaatccaaagtacttctctaatagtacatagttgaatcatgtgtttaaaaattcattctaccaatcattgtcttttgattgtaatgtttatttcatttacatttactgtaagtagtaaacataggatttatacttgatattatctaattattttctgtgtatctcatgctttctgttcctctattcttccatcattgcattcttttgtgttaaataattttctatataccatttttttatcattccctttactatatatgtttgggttattttcttaatggttgccctgggattacaattaatatcttaatttaaaagtgtctggtttggattaatacaacttgattttaacagtatataaaacccttgtttctagggatgtgaaggacctcttcaaggagaactacaaaccactgcttgaggaaataagagaggacacaaacaagtggaaaaacattccatgctcatggrtaggaaaaatcaatattgtgaaaatggccaaactgcccaaagtaatttatagattcagtgctatccccatcaagctgccattgactttcttcacagaat

SEQ ID NO: 295099 - DNA, 502 bp, Homo sapiens
ggatagcactaggagaaatacctaatatagatgatgggttgatgggtgcagcaaaccatcctggcacgtgtatacctatgtaacaaacctgtacattctgcacatgtaccccagaacttaaagtataattttaaaaaacccttgttcttgtaaaattcctttgtgccattattgtaataaaattatatctttgtatattgtatgcccatcaacacagatttataggttttgctttatgcagttgtcccttaaatcacataggagaaaaaaagtattgcaaaaaatatatatcaatactgtgttggtttttgtttatctgrgaatgtcttaaattcttcttcattttttaaagatagttttgtctgatataaaattcttaattgacaccttttctctctcagcactttagatacattatctcactgttttctggccttcatgatttctgataaaaaaaattgaccgttaatcttactgaaattccttgtatgtgataagtcac

SEQ ID NO: 295100 - DNA, 551 bp, Homo sapiens
cacttccatgtgaattttagaacatccttggtacattgaatgaaaattagtcaaatttcgatgacgattatgttgaattaaatgcttaatttgtgaagaattgaaatcttttacattttcatgatttccatctaggaacataacataactttccttttattcagacctttcttctgtccttcagtagattttgtttcacttgcatggattctgcactttcctgttaaatgtattgctaggtattatatctttggttactattataagtgggatttttcccactgtattgtcaaatttgttttttcaattttatagtaaggtcgttattttttattaaccttaatttcatactcagccagctggctggakctccatttcccctagatgctttctaggatcccatttcagccctaaaaattctagaacttaggtgttatagaactttgtcattggaagaggttatatctggttcaggccaaaggaaaagcttcatggaaagggtaagattcattgtcattatcatttaaggctgtctaactcttctggtggta

SEQ ID NO: 295101 - DNA, 1074 bp, Homo sapiens
tttagtcataagcatttttaaaaattaggtaatggtacaaaatgtttaaagtttgaaatttatatttcatatttactattaatatttcacgtactatgttaaaatataggatctcccaaatagtaaaaacagcccaattaactaaaggataataggkgtaccacaagctgtgtctctgccaaaccatccttgtgggtatgttggaaagtagtagatttatggaagtcataaattcgagacctacatgttctttctgattgtgaaagctatcattaaccgcagattaagtctgaaggaaaataaagtcagaacacattaccgggacccatggttggcaatttaagcaaaaggctagaaattagaaaccagttctaaccctgcctccacaactcccttgctggtagccttcggcaacatttaatctcttagtgtttaagtagctacatcctcaaaacaggggcaagcattactctttaattactctcacagccgttcagtgacatatgttaaaatagacataggtcttcagawaataagcttatttaaatgctgatgggttttggtatgtcatttaaagcaatgatatatttgggttataaaacaaaataatatgcctgagttttcctgcaatttttttttttttttcctgagacagtctcactctgtcacccaggctggagggcagtggcgcaatctcagctcactgcaacctctgcctcccaggttcaattgattcccctacctcagccccccgagtagtcgggattaaaggcacacaccaccacatctggctaatttttgtatttttagtagagacagggtttcaccatattggccaggttggtctcaaactcctgaccccaagtgatccatccacctgggcctcccawagttctgggattacaggtgtcagccaccgaaaccagcctgtaattttttcttgaatgaaatttcaataatttcttgtaattacctaattggtattctaacaacatatttcaaatattttaaataagtgttgtaattgctgcttcagagaaatctcttaacttgaaaactgatacatacaccctc

SEQ ID NO: 295102 - DNA, 535 bp, Homo sapiens
caactcaaattaatagtttggtttagctatgattgcatagtactgtaagcagcaaatccaaaaatcttattaatattaaatgctgcggtcaaactacgtgctatctgataatatttcatttattttatatgctataattttagaattcataatgaattctaaatgaattctaatccatgaattcataatggaagatttgaaagactatatgatttacagttatgattcatttgtataaaattatttgatacagccattaatgctttgccacatgtatacatgaataagtataattttatttcaatatcaaaaaatgaattaatccatattttccttcaaacgtgtgcacacttgttaatatgtatatgttacractttttaaatgctcttttattatataatcagaatataaatagaataaagaaaataaataggttatatatggactttaacatgtctcacaagacttgaaaagagcaatttcacagcaaacaaaaataactatccgtttaccatgtatataaaacttctggca

SEQ ID NO: 295103 - DNA, 536 bp, Homo sapiens
gtgtacagagattagcgagcaagaagcttaatgcccggaggcctgagaaggaagaggacagggcagataccagatcctggatagaggcacagctgtgggatagyactaccccacagaatctgtggccacaggttaagtggcacagtcgtcacccagtgcaccaggctccagagacaccaaatgtgccacataactgggagaacagatagcccagctttctcttctcttattcttcatttttctgtcgagtctcttaattggttgactctaacttgaatccatagctctgtcctggaaacaaagctagccctctctagatctgcaggcattgcgtgcacatagcattgcagttaagagcatgaggtggccagctgagattacctgagtttgaatcccagctctaccacttactagttgtgtgacctcagcgcaattatttaagtccttaggctttaatttccttgtgtgtgagtggagctaatactagtacacatgctgctgtaacaatttaccactaacttagtagcttaaaacaa

SEQ ID NO: 295104 - DNA, 1093 bp, Homo sapiens
ataggcctttagaattagactgaattataccactagytttcctggttctccagtttgcagacagcagaacgtggaacctctcagtgtttacaattgcttgagctaattcccataataaatctcctcttgcatatatatatacattctactgtttctgtttatctggagaaccctgtctaacatatcctagttctccagttgcagggttccagcccctctttccccagcttgagatggctctgttattttttttaaccagtcctaagttggtatcctatcagaatatttctatgaaagtcattcctacaattgtgcaattctaggtctgaaaataatctcacggaagcatttactttttgcttttttaaaatagttattttggctctatttctatataatgctccaaacttctttactaatttttacaggcagatttttacgctctgtcaaaataagagttttatatttgcttatccatttctgaaaaacctcaagcatctaataactatttttaaaactggactttattggwgagcacattgctgccttgaactgtgaactgccaaatattgtcatgagtacctgatgatctgttaccatagtaaatgctgagccgtaaatgaataaacgacagtgtatgaaaaccaggagggctggcaggtctctctcaagttcccgaggatggttaggacattcttaaaatcggtcttgcaaagaagaaagtaaatgcactttcacctagattggaaacaagatatgttttcacagatttaagaaagccctcataaatctggtgatggagtctttttgttttttcttactgttaggtaatggcctgtaagtttggatattgcaaagcatgctagagttattaccttcattttcatttgtcaaatggctgggaawacacaaaattattttacaatgcttgacactataatagcttcccagtcaatgaagcagtagaaaagccatatttctaactgggtcccaaattctaatttcttaagaaactgagacacggttggtcttggtgttgcaatgtctccatctataaaatagagataataatggtttctctgttgtggtatat

SEQ ID NO: 295105 - DNA, 583 bp, Homo sapiens
ttattcttttgccttagtctcctgagtagctaccattataggcatgtgccactatatctggttaattttttatttttttatagagatagggcctcacaatattgctcaggctggttttgaattcctggcctcaagtgatcctcttgacttggactcccaaagtgctgggattacaggccctgagcgactcactgtgcctggccagtttgattctttcgaatgggaatttttgttttgtgtgayatcaatcaaacatctatacctataagatcaaagtataaccctaaaatgctgtatctgtttttctttctctctctctctttctttctttctttctttttctttctctttctttcttttttttgagagatgagagtttccactatatttcctaggctggtcttgacttcctgggctcaagcagtcctcctgcctcagcctcccgaagtgctgagattataagtgagattctatcttttagccttatgtggtaattctaaatatttttgtgggtttttgacccctttgagaattggataaaatctttggactcctttcttattaaatacatatctatatatac

SEQ ID NO: 295106 - DNA, 583 bp, Homo sapiens
ttattcttttgccttagtctcctgagtagctaccattataggcatgtgccactatatctggttaattttttatttttttatagagatagggcctcacaatattgctcaggctggttttgaattcctggcctcaagtgatcctcttgacttggactcccaaagtgctgggattacaggccctgagcgactcactgtgcctggccagtttgattctttcgaatgggaatttttgttttgtgtgacatcaatcaaacatctatacctataagatcaaagtataaccctaaaatgctgtatctgtttttctttctctctctctctytctttctttctttctttttctttctctttctttcttttttttgagagatgagagtttccactatatttcctaggctggtcttgacttcctgggctcaagcagtcctcctgcctcagcctcccgaagtgctgagattataagtgagattctatcttttagccttatgtggtaattctaaatatttttgtgggtttttgacccctttgagaattggataaaatctttggactcctttcttattaaatacatatctatatatac

SEQ ID NO: 295107 - DNA, 571 bp, Homo sapiens
gagtttagtttgggacaaggtaagtttgcaatgcccctcgaatatccaagtggatgtttcaagtaggctgctgggtaagagtctggaattcaggaacaagttctgtgctagagatacaaattttaaaatgattaggatagagatggctttaagagatctcagaatggatgatattactcagggagtgactatagatagagaagagaataaatgccctaaataccaaatacagtcccagacactctcagaataagagattaagatgatgaggagaaatgggaaggagtgatgagtgaggtagcaagggagccaagccaacatgttccagaagccaagtgaaaagtgtttcaggaagcaggtggtgtaccatgtccaatgcaactgagaagtaaaatgtgataaaacttgagtcaactctcaattcccattgaattactrgagtctttctgactgtggttgttttagatcctgagcagatatacatggcagcctaggccagatataaagagccaacagaacctcgcctcaaggcctcttaaattagcatgaggtagggaactagataatagcc

SEQ ID NO: 295108 - DNA, 398 bp, Homo sapiens
ataacagggagaaaggttggtgaggacattacctatttgtattcccagcacccgagacattttttgtggggagagctgggaagggggcttcagattaattgaatatatatagtcaattacatatattcaattttatatatatatatatatatatgcatacacatayacacatatatgtaatcacatattttaaatgtagaggatgccagtttgcctaatacatatatataacgtttttagctggtgaatcatttttcctattatatttggaaacttaatttaaaaccatttcctcttatatttcctcttatatttggaaacttaacttaaaatcattttcctcttatatttggaaacttaacagacaacagaaagtggatagaagaaagacccctaag

SEQ ID NO: 295109 - DNA, 486 bp, Homo sapiens
aacatagatgcaaaaatcctcaacgaaatgctagcaaaacaaattcaacagctcattaaaasgatctttcacccaggtaaagtggcacttatctcacagaggttagttttgtgcaacatatgcaaatctataaatgcgacacacaacattaacagaatgaaggacaaatatgatctcaataaatgtagaaaaggctttagacaaaattcaacatttttcatcagaaactcaactaattaagtatacaaagaatgcatctcaatacaatataggacatataacaaaagcccacagttaacatcatactcaatggtaaaatcttgaaagcttttcctctaagattaggaacaaggcaaggatgaccacttgtgccacttctatttgacatagtactggaagttgtagccagaccgattaggcaagagaaacaaataaaagtcatccaaagcagaaaggaagaaattaaatggtgtttgtttgcagaca

SEQ ID NO: 295110 - DNA, 486 bp, Homo sapiens
aacatagatgcaaaaatcctcaacgaaatgctagcaaaacaaattcaacagctcattaaaaggatctttcacccaggtaaagtggcacttatctcacagaggttagttttgtgcaacatatgcaaatctataaatgcgacacacaacattaacagaatgaaggacaaatatgatctcaataaatgtagaaaaggctttagacaaaattcaacatttttcatcagaaactcaactaattaagtatacaaagaatgcatctcaatacaatataggacatataacaaaagcccacagttaacatcatactcaatggtaaaatcttgaaagcttttcctctaagattaggaacaaggcaaggatgaccacttgtgccacttctatttgacatagtactggaagttgtagccagaccgattaggcaagagaaacaartaaaagtcatccaaagcagaaaggaagaaattaaatggtgtttgtttgcagaca

SEQ ID NO: 295111 - DNA, 564 bp, Homo sapiens
tttcgctcttgttgcccagattggagtgcaacgacacgatctgggctcaccccaacctctgccttccaggttcaactgattctcctkactcagcttcccaagtagctgggattacaggcatgtgccaccatgcctggctaattttgtatttttagtagagacaggatttctccatgttggtcagtctggtctcgaactcccaacctcaggtgatccaccctcctcaatctcccaaagtgttgggattacaggcgtgagccactgtgcctggctggatggttaatattgaatgtcaacttgaccggattgaaggatgaaaaatattgttcccaggtatgtctctgagggtgttgccaaaggagataaacatttgagtcagtgggctgggagaggtatacccacccttaacctggttaggcaccatcccctcagctgccagcatggctagaaaaagcaggcagaagaacctggaaggagcagacttgctgtcttacagtcttcatcttcctcctgtgctggatgcttcctactctcaaatgtcagactccaagttcttcagctttt

SEQ ID NO: 295112 - DNA, 586 bp, Homo sapiens
aacgagagagaacagaaacaagaaatgggtagaaaaacaaatggaaatttaatgagatccatctaaaaacagaaatggatactggggtatacagtcaggaatcagagccagggatatgaatattatagtaggcaaaaatcatctatataattacattttcaragatatgtattgacatgagaacatgtagagataaaatactcaccaaaactgtcacatttcaacttcttgagcacacagctaaattgcacttctcagcctcttgcatttaggtgttctcatatgactgaatgttggtcaatagtgtgaaagcagaggtcataggtatcattttcaaggatgacttctgaaatctcccatgagatccttcatgcctccatactaaaccttgtcttacctgttagccagatccagagaatccattatatggctttgaagcaccagaagagggcatagccactaggtggaaggttccagggtctccgaatgactgaatgcaaaaaatatacctattaaactattctcaactatggtttcagtgagaaatacatcttagttatgttaagcactgtaggtggagttgttt

SEQ ID NO: 295113 - DNA, 1173 bp, Homo sapiens
aacgagagagaacagaaacaagaaatgggtagaaaaacaaatggaaatttaatgagatccatctaaaaacagaaatggatactggggtatacagtcaggaatcagagccagggatatgaatattatagtaggcaaaaatcatctatataattacattttcaaagatatgtattgacatgagaacatgtagagataaaatactcaccaaaactgtcacatttcaacttcttgagcacacagctaaattgcacttctcagcctcttgcatttaggtgttctcatatgactgaatgttggtcaatagtgtgaaagcagaggtcataggtatcattttcaaggatgacttctgaaatctcccatgagatccttcatgcctccatactaaaccttgtcttacctgttagccagatccagagaatccattatatggctttgaagcaccagaagagggcatagccactaggtggaaggttccagggtctccgaatgactgartgcaaaaaatatacctattaaactattctcaactatggtttcagtgagaaatacatcttagttatgttaagcactgtaggtggagttgtttwaacgagagagaacagaaacaagaaatgggtagaaaaacaaatggaaatttaatgagatccatctaaaaacagaaatggatactggggtatacagtcaggaatcagagccagggatatgaatattatagtaggcaaaaatcatctatataattacattttcaaagatatgtattgacatgagaacatgtagagataaaatactcaccaaaactgtcacatttcaacttcttgagcacacagctaaattgcacttctcagcctcttgcatttaggtgttctcatatgactgaatgttggtcaatagtgtgaaagcagaggtcataggtatcattttcaaggatgacttctgaaatctcccatgagatccttcatgcctccatactaaaccttgtcttacctgttagccagatccagagaatccattatatggctttgaagcaccagaagagggcatagccactaggtggaaggttccagggtctccgaatgactgaatgcaaaaaatatacctattaaactattctcaactatggtttcagtgagaaatacatcttagttatgtwaagcactgtaggtggagttgttt

SEQ ID NO: 295114 - DNA, 552 bp, Homo sapiens
aagacaggttttgataaaaaatagagaaaacctgttaggtacgcgattgggaggggttaagtctgagctgagaagaccttgtcaaaataacaacgtttctgagggtcaaacctgaacctggacgtgacaactatttacttcactttcttgtcatttccttcctgttattcattaggttttaggtctgcagacattctcagcgataatacaattcagcaatatatctattctttgaatttatggaaaaagaagtaataaaaaataaaaattctataaatcagaattatattctgcacatgatgatatggtaagataaaatatgtatttaagcacctgagcatttttaatgttcaggagaatgtttctggttkacacaatgatgtccacttggtattctaaggtttaatctcttaagatgtgagggctaaccacagactagtttactatttgactttgttaaaaataaaaagtatttatagacagttgaataaccaatttataaatttaagtttatctcacacaatgtggaaagtcaaagtaacatttgcttat

SEQ ID NO: 295115 - DNA, 552 bp, Homo sapiens
aagacaggttttgataaaaaatagagaaaacctgttaggtacgcgattgggaggggttaagtctgagctgagaagaccttgtcaaaataacaacgtttctgagggtcaaacctgaacctggacgtgacaactatttacttcactttcttgtcatttccttcctgttattcattaggttttaggtctgcagacattctcagcgataatacaattcagcaatatatctattctttgaatttatggaaaaagaagtaataaaaaataaaaattctataaatcagaattatattctgcacatgatgatatggtaagataaaatatgtatttaagcacctgagcatttttaatgttcaggagaatgtttctggttgacacaatgatgtccacttggtattctaaggtttaatctcttaagatgtgagggctaaccacagactagtttactatttgactttgttaaaaataaaaagtatttatagacagttgaataaccaatttataaatttaagyttatctcacacaatgtggaaagtcaaagtaacatttgcttat

SEQ ID NO: 295116 - DNA, 580 bp, Homo sapiens
aaactgacaggcaaccaagtagctgattgttgagatatcgaaatgtttcagggaatgcagagaatacagcctacytgatataaagtctgacagcaacaacaaaaaatctctctgggcaattttatttaataattaaaacaaaaggtttggaggaaatattcaaattgccactttaacaagagaggaacctgtggtgagaatgcttcaacagtgatctggactggcattagagctaaagaatcccagcctgatgtgatagtgactctggctgctttatgttcctcaggaatcccaggatgtctttcaaacaaacaaataaaccaaacaaacaacaacaatgaaatattatctttatcacttatcgcagatgattttcccagaattgttggctcaaattttagaagaaattctagaaactgattcaacataaaattcaaacccgctagctcttcatttaaatcatggaatcacttgtttgctattgaaccacatgttgacattgaagtacagatgtttgatgatgaattcattcctctttgtataacagcaactacatgataagccagggaaaatatggcag

SEQ ID NO: 295117 - DNA, 580 bp, Homo sapiens
aaactgacaggcaaccaagtagctgattgttgagatatcgaaatgtttcagggaatgcagagaatacagcctacctgatataaagtctgacagcaacaacaaaaaatctctctgggcaattttatttaataattaaaacaaaaggtttggaggaaatattcaaattgccactttaacaagagaggaacctgtggtgagaatgcttcaacagtgatctggactggcattagagctaaagaatcccagcctgatgtgatagtgactctggctgctttatgttcctcaggaatcccaggatgtctttcaaacaaacaaataaaccaaacaaacaacaacaatgaaatattatctttatcacttatcgcagatgattttcccagaattgttggctcaaattttagaagaaattctagaaactgattcaacataaaattcaaacccgctagctcttcatttaaatcatggaatcacttgtttgctattgaaccacatgttgacattgaagtacagatgtttgatkatgaattcattcctctttgtataacagcaactacatgataagccagggaaaatatggcag

SEQ ID NO: 295118 - DNA, 476 bp, Homo sapiens
aatgaggaagacccttgggaaaatgaaaatgctacagaaatgtatataatggggctggacattattctgaaatcagaataatagaagcaaagatgagaagaggaaaaggttaagattgtaagtttggcgcccaaatgggaaaaactaactcacttttttttttttttttttttttttttgcctatctggaagatttcaagctgcacatacactcttaaraaacaagtttcacatttcactgtaagaaatggagataatcagctgagtaaatagttataaagctccaagcccaaagacttctacaatttcaagattctgtgttaagtaaatatttctgagttggaatggacctctttgtaagcagagattatggagatctatagcctgtttgagattcttgtctttctcttcccatcttcacttgagagggaataaagaaattatcttaccttaatataagaaaaaaagtcactgca

SEQ ID NO: 295119 - DNA, 1184 bp, Homo sapiens
acttgaatggatatatgatttacctgaatttgaatggcatagtaaagataattaaacagaaatcaaagaatctttgtctaaacttgattttgtcgtgcattactagcgtggctttaagcaatttaaatgctttctctagtttctgtttccccatcatttcaatagaaatgacgattgttgttcaacaggtcaaacaacaaaggttgttcatgaatatgagagtagtttctaaatttcgagttcctatataaakatagagtagtatttttgtgttcattttatcctcatagaaaatctcaaaatgattatattcccatagctctgaacaaatgtctgtggaagttagcatgctgtattctaattggtaacttactttcacgtttacaccaccaagctgtgagcattttgaggacagaaaccatgtttttatttctgcatctcacataaagttctgcacattgtgttcaacaaatacttgttaaattaatagattggatggacaaaatataagagtgttttcagattttctttttacaatcctcatatcttgtagctggacaagagttctaagagcattgaagaataattagatwtttcctatttacctagcccagcactaaataatatagtgatttttttaagaagctgtaaaatacaatgtttttaaagaaaacacacagtaaaaatatttaataagagaaatgtgtttagtaaagaatgatataatttgaaatcagacatcctggggtccataacccagctctgcctcataccatctagtgtatcggggaaaacgattctgtattcagttttctcaagagtaaaagaagtatcagtatgcctgccttcatggtcataaacatagaaattataggcactggggactccaaaagagaagagwgtgagagtgcttggggtggtggtgagggtggaaaaattatctcttagatataattatctatttaggtgatgggtaccctagaagcctaaacctcactattacacaatctatccacatgacaagcctgtacatgtatcccttgaatctgaaatataataaaagaaagaatgtctgccttatagagtcatgtgcgggataaagataatgtacattacgaattttgtgatatatatacttattatttgattcaattctaatttcacctgcctcccgaaatgtaaaa

SEQ ID NO: 295120 - DNA, 577 bp, Homo sapiens
agtataagaaccaggagtctgcattgtgaccaagagtggggctgtctttgcttaatcaataaactgaagaagccaaataattgctctttgtttttcattgagaaatttgccaagagatgtagccaggagcccttctctcttgagtggctgtctccacacacctcagtttatcttcctcagttccaccacaacagtggtggcaaaactttccaaagtgagactcttttacacctagagggaaaggaatctgtccccaatatcacatgcaaaggaaatctcattctattcttaagtgatcaatatagagaagcttatttgaatgggtacatgatgctcataagtggaagattggttttgctgttttgtctttactgtttttgaaaaagagatcataataggaaatatacgtctttcaaacaacttgtaaaaatctctgattttgtgtttattaaaagtcttctaaggtaaaattctatgtagcatttgtagtactagttggacattcaccatgttaataataggggtatcaggctgattaaatttttatcatytttataatttttttcttactaatgtg

SEQ ID NO: 295121 - DNA, 532 bp, Homo sapiens
tgcagacacagtagtgtagtgacttccaaccctggagacttaaatcgggaaattctgaggaaggaaggtggggagcaaatggtgaaaggtrcagggcttttagtggctaagagaaagcgttgcccacaaatggggacggatatgggcctgaagagtttggagtagtcggtgaaatgggaggagtaaagggagagggagtcattgctcaggggttttaataaatacggggcaggggtatttctgaagggaggtctaattccgccctgagcagcctgggtgactcccgaggggaacctcaaggtaaactggggctcaatatttacatccgaaaggtgggagcgcgcttttcccgcctgagaactggggaccctttttcccctttaaataatattttgacacccagaggatcttgcaaggtctcccggattccaagagtcttccccagtttctccactcaactcctgcttagtctggtttacggcagctggggtttctaagaaggaagtctggacccaggggttctgtgaccttg

SEQ ID NO: 295122 - DNA, 532 bp, Homo sapiens
tgcagacacagtagtgtagtgacttccaaccctggagacttaaatcgggaaattctgaggaaggaaggtggggagcaaatggtgaaaggtacagggcttttagtggctaagagaaagcgttgcccacaaatggggacggatatgggcctgaagagtttggagtagtcggtgaaatgggaggagtaaagggagagggagtcattgctcaggggttttaataaatacggggcaggggtatttctgaagggaggtctaattccgccctgagcagcctgggtgactcccgaggggaacctcaaggtaaactggggctcaatatttacatccgaaaggtgggagcgcgcttttcccgcctgagaactggggaccctttttcccctttaaataatattttgacacccagaggatcttgcaaggtctccsggattccaagagtcttccccagtttctccactcaactcctgcttagtctggtttacggcagctggggtttctaagaaggaagtctggacccaggggttctgtgaccttg

SEQ ID NO: 295123 - DNA, 541 bp, Homo sapiens
tctctaggctagtgcctgtgcgtgaggagaaggcctgagagctctcgctgagagtgtcatgcactctccttccccttcatcccgccccagggctctagttcaatgcttactcccctgttacacttcttactattttttttttcttattactcgarttggagacaaagggctccacagcatatggccgacacctaagcttcctactgccagaacatgaataattaattattcacaatcttgcgtcattactatctctcttacaaacaccgaaaaatgtcaagggtccatttcccaagacgcaaaatgcgactcccagatatacaaaggctcccccaaatcaacttttgtaagatattccacatcaaaggggaagatctcacttaaatatttgtttttgcatagtgtttcataagatttcaaccatcaattcatttttggctttggtccttgggagaagggacaaatgaaaaggggaatgcagagaaaaggaatggttttactaaaaggtggtagtgttctagtctacaacatattcatgaaa

SEQ ID NO: 295124 - DNA, 548 bp, Homo sapiens
aggatcctgagacaaaatctcaaaaatatggatctaaattgagaatcaaataagaatattacctgaatagttcaaatgatataatggctatgtattcactgaatggatagctggaaaaaaatgtcaaagtagctaaaaccatctgccattattaagtttgatagttgtcaaattatttccattgtgaaatataataaagaaaaggataatgaagacatttttatcttttttgataaatttgtgttaaaatatgtatcttcaataaaacagtgaatttaatttttctctaaaaccatgggatgcctcagaatactatctatttctcaagatcaagtataaggagacaaaaaaaaaaccctcattaaactatttccttgcaaaaaaaaaaaagaaaagaaaaagatkaaaagattcaagctattcaggacttgacttatctaggtgttttcaaaatatctgtatttttcaaatctttaataactaagttcattaaattatatttatttagagatattaatgattttggaattctgggaagttatacaaaa

SEQ ID NO: 295125 - DNA, 583 bp, Homo sapiens
cctgtttatcctaattccacctcctgttttgtaggaaggtcctctctggttagatactgcagttacttgtgtttgctgaggcagagagagtgcttctgcagctgactaaaagtggtgggacttctggcttctgcagctgactagaagtggtgggactcctggcttttgcagctgactagaagtggtggggctctctcttctccatgaggcaatgcagcagcaggctttctgtagaggctctttgactaaaaaagcagtttatctggaaacctcaagggagtacttggagaacttggggtactagcccttacgtctggacccctccaggcagtgaattcctccttcccaaatatgtctaccaatatacttcctgggacatggtgcaaatttattcacatgcccattttcaggcttatatcaaaatctttttaaattrtttatgttttaattatactttattactttttaactaaaaatgtcatttcccttgggtgaagaacccaatgcaatatgagaaatttcaaagaagattaaaaaaaaaaacctgtattggggacagcattttaagaaaggcacagcatgc

SEQ ID NO: 295126 - DNA, 589 bp, Homo sapiens
acatccactagggtggcaataatgaaaaaacaaaataataacaaaaaagaagtgttggtaagtgcaagaatatggaaaaatagaaatccttgtacattgccgktgggaatgtaaatgatgcagccactatgaaaaaccttttggcaattctttgagaagttaaacataaaattatattatgacctagaattctactcccatgtagatagccaagagaaatgaaaacataaagccacatagaaacttgtatatgaatgtttatcgaagcattattcataatagccagacagcagaaacaaaagatgaataggtaaatgaattgtggtaaatccatataatggaataatattcagccagaaaaagaaatgaggtgctgatacatgctacagcttggatgaacctcaaaaacattatgctaaataaaataagtcagatgcaaaaggtcacatattgcatgattccatttgtttaaaatattcagaatatgcaaatcaatagagaaaaagcagattagtggttgccaggggaggtgagaatgagaagtgcttacttacatatggtacaggtattcctctgcagtgatgaaaaa

SEQ ID NO: 295127 - DNA, 566 bp, Homo sapiens
tgacctgtgctgttagaatcaatgcagtgattaagtacgcttgtgatgggggtggcgtgacagtgaccggaaaacggaacacgaggagcttcagggctgtgcatgtttgttcctcacctaggtactcctaacacaggtgtgtttggttgtaaatcatgctgcataccaatgatgtgtgcactgttctttgtgtaaatgtatcaatcaacacaaagtcttaaaatactgaggatgaagggtagagtttggtctactctcacaaagaccatcatgggtcagaatttcaattctatgtagcatttaaaagagcaccagtttctgcggacagatgccacagatcaacagaaataacatatgtttttattgggcctgctttcattctctcactcatttctcttaaagatctcaaccatcctatgtatggcatatagctatcatagatgacaayaggtcagatcactaattgaaattccctcctccatacaaaattatttctaataatcatgtaatgatcaataatcataacatccttttgaatcattctttagttttgaaaacaactattt

SEQ ID NO: 295128 - DNA, 596 bp, Homo sapiens
gaattgagatgacaccttgataataaggttttggtcctagagaaagtaggacagagagaatgtataaaagaagctgaaasgcagaatatttcaaacacccacaagcacaacaaattcttgggtacggtttgaagaaaggctaaaagctatttaaattgtaagtctactgtgactgatccagagtgatatgaaacctacaagccattggcataaaatatacatgccaagcctgctaggtaatgtccttggctaggatgcctcttaaaaaccagattgtgccaggtgcagtagtgcatgcctacagtcccacctactgagaaggctgaggcaggaagactgcttgtgcccagtaggttgagaccagcctgggcaacatagcaagacatgttaaaaaacaaaaaatcaggctatcttacaacttaattccttagaacttctcccggcccttagcaggtattccttcatgtagaaaagaacatgctttgtgttaagaccatgtaaatttggataccaatactctgcttgtaaagttaagagactaatgtgcatattctgggatgttacaagtattcttataatcctggaatgctattcat

SEQ ID NO: 295129 - DNA, 596 bp, Homo sapiens
gaattgagatgacaccttgataataaggttttggtcctagagaaagtaggacagagagaatgtataaaagaagctgaaacscagaatatttcaaacacccacaagcacaacaaattcttgggtacggtttgaagaaaggctaaaagctatttaaattgtaagtctactgtgactgatccagagtgatatgaaacctacaagccattggcataaaatatacatgccaagcctgctaggtaatgtccttggctaggatgcctcttaaaaaccagattgtgccaggtgcagtagtgcatgcctacagtcccacctactgagaaggctgaggcaggaagactgcttgtgcccagtaggttgagaccagcctgggcaacatagcaagacatgttaaaaaacaaaaaatcaggctatcttacaacttaattccttagaacttctcccggcccttagcaggtattccttcatgtagaaaagaacatgctttgtgttaagaccatgtaaatttggataccaatactctgcttgtaaagttaagagactaatgtgcatattctgggatgttacaagtattcttataatcctggaatgctattcat

SEQ ID NO: 295130 - DNA, 591 bp, Homo sapiens
gggcttgctttcttttttcttttttttttttaacagttttttttttgagatatgatacacatatcataccatcctcctatttaaacgtatacaactccatggcttttggtatgtccacagaattatgctcctatcaccacaattttagaacctttttgttaccccctagaaaaaccctatacaccttagctatcacctctcatttcctccattctccataccccagccctaagcaagtactaatgtattttctgcctttacagatttgcctattctagacatttaatatcaatggaatcatgcaatatgtgtttttttgttactttttttgcttagtataatgttcttaagagtcatctatgtgtagcataatcagttcattcctttttatagccagataatatttaattgcatggatatggcagttttgtttccatttcctcagttgatgcacattargctggttttacttttgtttattatggataatgctgctgagtatggatactgctgctgagtacttctgtgtacaagtttttgtgtagacacgtattttcatttctcttgggagagttcctagaagcagaattg

SEQ ID NO: 295131 - DNA, 493 bp, Homo sapiens
cgaactaaatgaaaatacttgtggatttggggatgagcgggagtcaagtgctagaatttgcttagcagcttctcttccaccaataatgactttaaacatgttgcaaactagccccaaatgctaacytacatttttaatctgagaggtatgcgtcatcaaatattttggttttatcccgaaagtcagctaacagagatgtaagtacctgggcaactctaatggaatgagaagcaacatcttccatcttaagcattgataagggttaagggaacagctgctctttgcaatgaacaaatctcactctctgaggcagaaattcgccatatagaagactgaatttcttcatctttttgagaatcatttccactacccagaaaaaacattcaaatgagttgtaaataaagtcaagcgcagttgaaaaatcctgtatccacagatgtttcttaggagtgcctatgcgcttagactcgagggctaggggtttgaaagcaaa

SEQ ID NO: 295132 - DNA, 615 bp, Homo sapiens
agggttttgcatgtctttctttaaacttattcctaatatttgatgttttgatattattataaatggtatgttttttattttttaatttattatttatttattttttgttttgttttgttttgagacagagtctcgctctgtcaccaggttgatgtgcagtggcgtggtctcggatcactgcagcctctgcctcctgggttccagtgattctcttgcctcagcttcccgagtagctggggttacaggcacatgccaccacgctgactaatttttgtatttttagtagagacggaggtttcaccatgttggccaggctggtcttgaactcctgatctcaggtgatccgcctgcctcggcctcccaaagtgctaggattacaggcgtgcaccatcacacccagccataaatggtatgtttttaaaattttattttctaattgtttattgaccattaaccttgtatctaggggccttaaatttacctaacaacttctttttgtttgtttgtttttgttttgtcttgttttgtgttttgagacagagtctcactgtcgcccagsctggagtgcaatgttgcaatcttagctcactgcaacgtctgattcccgggtccaag

SEQ ID NO: 295133 - DNA, 485 bp, Homo sapiens
ttttgccacatttttctcttcttggatctgcatgtaggagggatgcctgatatccttcatgtccccttttccacgtttaaattgtaagtttccctttatgtttccatttatgatagagtcccttgcaggcagttggaaccctcttggcatgggtggtgctgggagagccagggtaggcattggtgtggggaaaactgtgcttctctttgccttgggtgtcttctggagcccttgcctggtttttgattcaacaagagacattgtgcttgaagaattggaaagataatttggggcactggatgataccttcctcyaaacaccatccacttttgcctcagccacttggctgtgctagcaaagatttaatccattttgagatgcagttggtttgacactggttttgatctctctctgtaagggctgtccctgtcactccctgctagctcctactggaagacctggggatacctaacagggtcctgtgc

SEQ ID NO: 295134 - DNA, 478 bp, Homo sapiens
ctggctgcctggcactgccagtccactaagtggccttgagcaagtggcctggcctccaggagccccaatttcctcacctgtaaagtacagataatccttccccactccccgtgggattgtgatgagcaccaaatatgtctgtgcacggagcttagcacacggtaggcacacatcsgagggctagtatgagctatcagccctcctccgcagcttgtggtcaggtctggcaagctgttgatcttagcatatgttagcaaactggtgccaacaaacattttatgcaatgtagtttaaaagaaaacttgtaatgactaccagaagaaaaagtaagtcaacaggacaagtcagtccaagactgagacacccgcaggagggctgtctgtctctcggtttccctcttcactttcagaacttgtggatttctcttactttcttctgagccaagctatgcattaaaaaaaaaaaggttgtctatctt

SEQ ID NO: 295135 - DNA, 1146 bp, Homo sapiens
gctaatatcaaacaaacaaaacccacaaatctgctctttaccactcccctacttcagtggttccccatggcttctctgcttagcaaatgacacccttcataatttgatttatttctgcctaaatctctatatcttattttccagaactctctcaaatgcagcctatactcagccattacttgtgcatctttttccaagggccatgctcactcatgcttctgtgtgcatgctgttccctcagcctgggaaacccctttcctcctccttcctctagccaactcctacctactccttaagagtcaacccacctgactcctcctgtgcaataccttccctcgccagtgccccagactgggttaggtgctcctccaaggtgttccctccatcatagcgytgatcatcagtcattatcaatctacttacttgtcgagttagtcatctgtccctcccactagactataagttctttgaggagtttgtgtcttgctcaactttgtttccttgttcctagcacagggtcaggcacattggaggcatccaatgaatgccctcggaatgactgagggaggatggagggagagatctgaagwagtcccagacagtgttgttttcacaccacacactagatgggtcccaattgttgtttcttaccatgaacagggtcctgtagttttcacagcactttcccaagcactgtcttatggtttctgcacatcaacccaggaaagcagacaaagatgagatgatgaatcctgcctaaccaatgaggaatcagaggctwagagattctagcgccttactcatgccacagggctggacctcttcctatgacagcttctgtctctaaggtgagaccttgggctgagttgccaacgtcagttgtgtttaaaaatgacatacctgagaaggctgttgactatttgctgactctacaatgagacaatagagacctgacaaaggatgtccagaggtggaaaaagctactgtaggttggagagcaatctctgagtgaatgaaatgttggaaccatttaatgttaggtgaacaggagaactgtgaattccctaaagtctaatgtcttccaattgcacagctggggcagctggccaaggagactttggactagctggagctttatgggatgaa

SEQ ID NO: 295136 - DNA, 490 bp, Homo sapiens
ggtctagggagctctaagtaggaagcccagggtcataaagagcctgtcattgattctccctccagttaatgaagtccctaggctagaggagctattaaatttcagtgccaagtattagtggcttttgctggttatagtgattcaacagcccccagtgagggtgaatcacaggaagagctggagagctgaatgtggccctggagcccaggcagtcttgttcacggatatcacctggcattcacattggccaagcagccgggmccttggagcaaataccaccagcaccatcccatctggccaccatcattccagccatggctgtttggtccttgccctcaaagccaggacacatcaacactggggctgctctttgggcaaatgaagaaaaagaagatgccagggaccatacgtcaccatgaaatgtatgcccctgcaggccctccatgggtattccaatccaaggaggagagacaaaaacataaatgagaaa

SEQ ID NO: 295137 - DNA, 604 bp, Homo sapiens
attgtgttaatttggtaaattgcattggccaattttttaatgttaaacataccccttgatttcctatataaatccaacttggtcatgatacattatcttttctacatattgctggatcaggttgttaatatgttcttggaattccgtaccatcattcaaggaagagattgatctggaatattcctttcttgtagtggtttttaatacattgggatgcataacaacatctctgagcctctgtttcctttttgataaagttaagacaatttaccagaattcacagggttgttataagattaagttagaaaatacgtgtgaaatgacttggcacatttcctggcacaaagtaggtacttgacaaatatatactgaaagattagaatggactgcatctctaatcaggtaaaacttaagaataaaatgtgtatataaaacaatccaaagaataagttaatgaaagtaacaaaggcttcatttctaaaaccaataagtaggatttgacacacaacaatctaattcatagagccccaacttacgttcagaacttacaatccagagcccaatragggcaaaccccagatcataaaggttaggaaaaagaggc

SEQ ID NO: 295138 - DNA, 580 bp, Homo sapiens
actgaaagaggcatgacaagagtagaaaagcattcttgaattccaatgccacctctcycccattcccctgcagcatggcatggagaatctgtgtgcttggggtagggaaaacacagtgattctgggatccggcattgaactcagtgctgccctgccacggcagaaagcaaatccgagctaaacttagcaggtgcccgctcacagagggagtatttggaccagccttagccagggcggattgccatcccagccatcagaacttgagtttcagcaagcctcatcaccacaggctgaagtgctctgaggtcctaaataaacttgaaaggcagtctgtgtcacaggactgctattcctaggcaagtcctcatgctctgctgggctcagagaagtggacatggtgggcacacaacctactaagacaccatccagggtggctaagggagtgcttgcaccactcccccatcaaccccaggcagtgcagctcccagaaaaaaaaattactacttccttctgcttcaggagaggagagggaagagtaaagagaactttgtcttacttcttggataccagctcagccaca

SEQ ID NO: 295139 - DNA, 580 bp, Homo sapiens
actgaaagaggcatgacaagagtagaaaagcattcttgaattccaatgccacctctctcccattcccctgcagcatggcatggagaatctgtgtgcttggggtagggaaaacacagtgattctgggatccggcattgaactcagtgctgccctgccacggcagaaagcaaatccgagctaaacttagcaggtgccygctcacagagggagtatttggaccagccttagccagggcggattgccatcccagccatcagaacttgagtttcagcaagcctcatcaccacaggctgaagtgctctgaggtcctaaataaacttgaaaggcagtctgtgtcacaggactgctattcctaggcaagtcctcatgctctgctgggctcagagaagtggacatggtgggcacacaacctactaagacaccatccagggtggctaagggagtgcttgcaccactcccccatcaaccccaggcagtgcagctcccagaaaaaaaaattactacttccttctgcttcaggagaggagagggaagagtaaagagaactttgtcttacttcttggataccagctcagccaca

SEQ ID NO: 295140 - DNA, 487 bp, Homo sapiens
ttccccgagccatcagaagctccccgaggacgcctgcttgttccagtgagtttctcttccttgaaactgaactgttctggacgaaaggtttttgttctctgctgtcctttgtaaagttttacaggtgaggggaaaagattggcttctttttaggaaaaaaaaaaaaaaaaagacatgcagcagcagcagaactgctgtcggggtgggtggatctgagttcatcatcaggttctgaatacttctcagtatgatcttgggcaagttatagctgctctctctgacctctgtttcctcatcaataaraggatcaatggtcaccagcctgaagttcatgaactcatccttgagcctgcaggtaataatagggtttaataatatcacatatcaccaaactcctcatagaaagtctgcatttttccacccaaagcatgcacaggctagtctgtccttcctgcacacagctctgcacagctttcgcacacacacc

SEQ ID NO: 295141 - DNA, 626 bp, Homo sapiens
ctttccttaaacctcatgaaccagcctctgatacctccaaattttcttctgcagcttcctcacctctcttagcctgcgtgtactcgaagagagttagatccttgctctgggttaggctttggcttaagkgaatgttgcggctggtgtaatcgtctaccagactcctaaaactgtctccatatcaccagtaaggctgttttgctttttttcatttgtgtgtttactggagcagcactttatttcattcaagagatttttgtttgcatgcacaacttggctaactatttggtgtaagaggcgtagtttctggtgatctcagttttgacatgcctttctcactgactccaataatttccagcttctgatttaaagtgagacacctgtgactcttcctttcacatgaacattttgaagtcattttatggttatcaattggccaaatttccatattgttttgtctcaggaaatagggaggcatgagtggggagagatggcagaatggctggtcagcggagcaatcagagcatacacaacatttattgattaagtttgccatcttatggggcattgctcatggcactccaacacaattgcaatagtaacacccaagatcactcataggtcac

SEQ ID NO: 295142 - DNA, 549 bp, Homo sapiens
atggtctgggatcagaagaaaagtctggactagaaatgtagatgtgggaatcttaagtaccggttagaactctaagagtgaataaaattgtkgagaagaagatgagcaagggtaagaccttaatggatgggcagacatagaaaatgcagcaaatgacattgaggagcaatgaagcaacactgacattagaagaagcaaaagggcatgctctggcagagaccagggaatgagcataaagtttcaggaatcagggagcaggcaagtatgtcaatggcagaagcaggtgtgtcagtaggaatagcacaccaccttaaagtgatgagtgctgtccatgaaccattggggcggcattttccaaagtatgttctgaagtacacaagttcaggagttatgtttcagcaagcctgggaactgttgggaaccatattcccttcttgtttatttaaaacaacacaatctagatgactgagaaattcttccatgtttcatcccaagtaaaagaatagagaggggaatgatttaacattatttagtctagaaattcccaat

SEQ ID NO: 295143 - DNA, 595 bp, Homo sapiens
tttagatataaagatggagataggttaaaaggaagaaaaagacatgatggagataggttaaaaggaagaaaaagacatgtatgatacactataaaaaattaggggtggctattttatctgatagtgtagacttcaagacaatgagtattaaccgagagaaaaagggagatttcataattagaaaatgttaattcctcaaagacataaaaatactaaaagtataggtaaaaaacagagcttcaaaatagataaagcaaaaactgttagagctaaagcgataaataaacaaatcaattattctagttggagattccagcattcatctctcaatacagaatagaagttggtatggatatagaagaactaaactgtaccatcaaccaaattgatctaattgatatctgtaaaacattccacytaagaatagcagaacccttttcaaattcacaaaacatattcaccaagattcgctatataatggctcctaaaacatagctcaataaattacaaatgataaaaaccatacaaaatattttctctaactactaagaaattaaattggagactgataataaaaacataactagagaaaacc

SEQ ID NO: 295144 - DNA, 605 bp, Homo sapiens
tataatggctcctaaaacatagctcaataaattacaaatgataaaaaccatacaaaatattttctctaactactaagaaattaaattggagactgataataaaaacataactagagaaaaccaattatctggaaattaagcaacatacatttaaatatctcatgagacaaaaaagaagttayaagggaaattggaaagtattttgtattggatgtcaaaagcatattatatcaaatctttggggtacagctagagcatttaactatatagctttaaatgttgacattacaaaaaagaagtattttaaaataaatcttctaaattttatatcttgagctaagaaacaaagagcaaagaacatagaagaaagaaaatgacaagaatagacaccaaagaaacagaaaatagagaaaagaaaataaatacaactaaaattttgttttctgaaaacaactagattaagtaaacaagagataaaacccaaaataccaatattaaggatgaaaaaaagcaaaccaccatagaaactatgaatttttttttaaaaaaggggatattatgaacaactttatgccagtaaattcaagcatttagatgaaagaatt

SEQ ID NO: 295145 - DNA, 583 bp, Homo sapiens
tttatctgtgcagctcttcctgtaagcattattttaaaactgtaatttggtagaaaaatttctacagaatgaggtggatctagacttgtcatgctggttcccaagctccttttgtgattatctacttttggcacctttccaaggatcacactgagacatcttatgtggtttataatgtgtttatagttttaatktttaatgagcttagccatggggacctcctagaaaatgaagatctcatttagggcattaattgcttcctgctttaagaactcaagaaaacgtcccttctgccagttttctcctcagttcacttcacctaatttgttcagcaaaagtttatgtgcaaatattgtgtccaaatcaccctgacggaggggcagtacacaatctggaaataatagagaattaatctaattgttggagtattaaaatggccataaccacctaaggtgagagaattagtttcaataactactgtgactagagatcaaatgataatacaagctcataaaagagaaaaaagcagcatcaatttatttctgctgcattagtacagtgaaaataaataccacagagtaag

SEQ ID NO: 295146 - DNA, 580 bp, Homo sapiens
agctgcataatgttataagatttgggaaagtacaagaaggtcacaaaaaggagaggaaagaggtgccccagacatagcctgtaaccagtatatcatatttccctgaatgttgagccttcattttaagaaaaaaacccatatgccttccaacactcaccacacagtcttcacacaccacccttccttatgtgtagtttcatcacaacagtttttaaagtgtccatctcataatcacttaaaaagcagtagatattatgcattttctgcattaccctgaaaatcacattaataattaaygtatgacttcccagaaactgagatcatccccttcaatgttcagaagatgaagtctattagcattttccttaccttgcatcatgatggcctttcccacttgcaaatggaaagcaatggtcatcatgtgcacatgtgcataaacaccaacccaaactgctatgattttagcaattttaataatagaaaagaaatgtaaaaaacctgatgtcacagtcatttttttcctgctaacctgcaaagcaaaaaaaaagaagacttcatttcagaattaaacacccaggct

SEQ ID NO: 295147 - DNA, 518 bp, Homo sapiens
caacagtttttaaagtgtccatctcataatcacttaaaaagcagtagatattatgcattttctgcattaccctgaaaatcacattaataattaacgtatgacttcccagaaactgagatcatccccttcaatgttcagaagatgaagtctattagcattttccttaccttgcatcatgatggcctttcccacttgcaaatggaaagcaatggtcatcatgtgcacatgtgcataaacaccaacccaaactgctatgattttagcaattttaataatagaaaagaaatgtaaaaaacctgatgtcacagtcatttttttcctgctaacctgcaaagcaaaaaaaaaraagacttcatttcagaattaaacacccaggctttgtgcattgctcttttctattttaaatctgaagtcagtgacattcctgcagtgctctggtagctaccagtggcaaactcatctctctgatccaaatatatcaattagtctaatgtctgtctcttcagaacatgttaagg

SEQ ID NO: 295148 - DNA, 616 bp, Homo sapiens
cctggtgacataactggctctggaaaggtacactgagttatgtcctctggggtaactggtatcacagagaaattgtcacacagagaactgagttgaaggcttggagaaaatgagcactctggcacagaaaattctaaaaggtacaattaactgtgtgataaacacaaagaatacacttttgccaaaatatatcagtatgattaagcttagaaatcccagaaagttcagtttcttgagtagtcccaattcacataggaaatacattgaggtgcgctatctatctatatagcaccaccaccaatttaaaactggatacgattatccctcatggttctgtggattgactggtctcagttgttcgtggattccaacctaagtttctttatgaggttactctcagatagttgggatcgtcatcatcagaatgttagatatccaagatggcttgagagctggccactttgtctccrtgttaatactttagttcaggagaatttatctttgatacctttggcacttaaaaatttacaaattgatgtatatcaattttttttacatcttttgatcatcaggatagtcctgtttaataaacagatcaagaatgaaaaaacagatt

SEQ ID NO: 295149 - DNA, 480 bp, Homo sapiens
atctatcttatacttcggagctcttcaagtgtttgaaaactcagttgtgttctaagacatcactttcttccatttctcaattatctttatgaattctttttctgtccttggcctatgggtattggtcaacatgtttttaacatctatattattttgattaatcaaacatgagattttgggattggagtcatatcattacttgacagcaacaactgtgttgatttcctataccccattctcttcyttcagagtgatgagatgagacccagatattaccctgcatgtgcaaatgatttttgttctttggcactacgagagaggaaccctgaaggtatgaatctaggagcttatgtaggaactgctatataggaactgctatatagctgctattcttccctcgaaagagatagataaaacttttctctctaatattttacaaacttttaacttataaacaaatggccccagagatttttatct

SEQ ID NO: 295150 - DNA, 464 bp, Homo sapiens
cattttgaatggcacaaagaatgttttaaaattttgaacgaatatttttaaattgggaggctccccatgaaaatctggatttgtggcttcacctaaaaaagtcagataaggcacagacaattccacctctgcatgaaaataatgtgctgtggccgaacagtggctgccttccttggatagtgtgtgatgactccaggttgatgctatgaccagctgggaagtcttattagtcaaagtaggcactataaacattggtaacaaataaatatgaaaayttaagtagcttaaatctacaaaggattatttcacactcaggtagtgtgggacagacactgtctttcacttcataggtttgtcatctggaacatttggcttctaaggcactgtggagaaaatggggggaaagatgctggcttctaattgcttacttcagatagtatacctgccacttcccctcccagctt

SEQ ID NO: 295151 - DNA, 464 bp, Homo sapiens
cattttgaatggcacaaagaatgttttaaaattttgaacgaatatttttaaattgggaggctccccatgaaaatctggatttgtggcttcacctaaaaaagtcagataaggcacagacaattccacctctgcatgaaaataatgtgctgtggccgaacagtggctgccttccttggatagtgtgtgatgactccaggttgatgctatgaccagctgggaagtcttattagtcaaagtaggcactataaacattggtaacaaataaatatgaaaatktaagtagcttaaatctacaaaggattatttcacactcaggtagtgtgggacagacactgtctttcacttcataggtttgtcatctggaacatttggcttctaaggcactgtggagaaaatggggggaaagatgctggcttctaattgcttacttcagatagtatacctgccacttcccctcccagctt

SEQ ID NO: 295152 - DNA, 572 bp, Homo sapiens
gcccatatcaatagctgatatttaaatagctatttkcttaatgccaatacaatattttatgtttaaaaatcaaggttgtgagcaataaattaggcacttttttttttcctttttttgagatggagtctcgctctgtcacccaggctggagtggagtggcatgatcttggctcactgcagtctccacctcccaggttcaagcaattctctgcctcagcctcctgagtagctgggattacaggtgcccaccccacacccagctaatttttgtatttttagtagagacagggtttcaccatattggccaggatggtcttgaactcctgaccttgcgatccacccgccttggcctcccagaaagctgggattacaggcgtgagccactgtgccaggccaggcactttttttctatgagtcttttaaagaaccatcctctaaaatagaagactgttagcacttattgcaatttaagcctgctgccttattccataggagaagaaactgaggtccagaaacatgaagcaactttttctagaccacagcacaagtggcaagctgagactgagatgctca

SEQ ID NO: 295153 - DNA, 493 bp, Homo sapiens
acaaagacattgactattcttaaatgtcctctattaattaatcccactctagaaatctgtgcttctctcccttatttgcataaaacacctgaaaacgagcattgctgaagacagtgtcaagtctggataaatgtaagctcaaccacatgctagctaaatgaccttgtacacattttctgaattttgcctgatgtgcatttttcaaatgcatttgataatatctttctgtctaatgatacaagcatttaccagtttttagaatgtatgaaaataaatgtatttagcaggtttaattagtttgtatatttaggtatgtgcattcaaaatcatttggaaatgcattttaagtatttcacagtgtcttttaaatacatttacctgtacatacacatccactgcagttgaggagatagraagctaaaacatttataaatgtgagctctgatttcaagagttttgagagggaatagtagagcacagcagaaagagcact

SEQ ID NO: 295154 - DNA, 493 bp, Homo sapiens
acaaagacattgactattcttaaatgtcctctattaattaatcccactctagaaatctgtgcttctctcccttatttgcataaaacacctgaaaacgagcattgctgaagacagtgtcaagtctggataaatgtaagctcaaccacatgctagctaaatgaccttgtacacattttctgaattttgcctgatgtgcatttttcaaatgcatttgataatatctttctgtctaatgatacaagcatttaccagtttttagaatgtatgaaaataaatgtatttagcaggtttaattagtttgtatatttaggtatgtgcattcaaaatcatttggaaatgcattttaagtatttcacagtgtcttttaaatacatttacctgtacatacacatccactgcagttgaggagatagaaagytaaaacatttataaatgtgagctctgatttcaagagttttgagagggaatagtagagcacagcagaaagagcact

SEQ ID NO: 295155 - DNA, 581 bp, Homo sapiens
agccatgctggtcttctggacaccaaatctcttcttatcttcagaccattgtacttgctgtttcctctgcctgaaatgatcttcacctctagctcacaccttccctgttcacaatcacctccctgaagaagccttccctaactatgacatctaaatttggcttcccctaktccatccagtgtctccctatggcatgtttgattttcttttgaacatctttcaaaatatgtatccgcttgcttgttatcatctccttcctttcactacgtatgctgcatgatgacaagaaagttgtttataccaccacgcccctagcactttagagaatggtggtgcttaggaggtactcaataatcacttgatgaatgaaaaataagggaatggattagctgtgatgtgtgaagagatatgaagtttcaaaaatcatccctcagtttctgatttgttccttgacaaatgactatgccaattactgagagaggggattccaaaagaagaccagtcttaggggaaagatcatgaactttgaacagtggacttggatatgcctttgagacttccatgtgatgatataaaatggg

SEQ ID NO: 295156 - DNA, 649 bp, Homo sapiens
cttcaatgagtggtggtggaaaaatatttccttcatgcaaaaaaaatataattataccattaccttacatcatatacaaaaatcaactcaaaatggatgaaatatttaaacataagacctgaaactgtaaactactaaaagaaaacagggggaaactccrtgatagcagtctgggcaatgatttgtttaatataatcccaaaagcacatgcaacaaaaacaaaaatacacaaatgaaattacattaaattaaaaacctacacacagcaaagggaacaatgaataaagagacaatctttggaataaaaaaattgcaaaccatacatctaataagggggtactatcaaaaatacattaaaaattaaaccaactgaataacaacaaaacaaataacctcattgacaaatgagcaaagaatctaaattaacacttttcaaaagaagaaactcaaatggccaacagacatgttgaaaaaatgctcaacatagtcataagggaaatgcaaattaaaaccacaatcacctcacacgttagaatagctattttcaaaaagatgagaggtaacaagtgttggtgaggatataaagaagagggaacacttgtacactattagtgagatgtaaatttgtaaagccattatgcaaaacagc

SEQ ID NO: 295157 - DNA, 564 bp, Homo sapiens
tgctaaattatcagtacagtatcctgtttgaaacaggccttcataacctacaagaaaattacttccagtgatttctttaagaaaaaartgactttaactttcagattttcctctgcccatcagctcttttgcaattaaagtaacaatgacttattttctcaactctctgtacagaaaaccatgaacactatggatagattgaactactgggacccaataagccattcaacaaatgaaacacaccttgaggtttaggaaatagacccaaagattgtagaaaggccataggttaggctttattatgctaattcaaaataaaattaaagatttctaaggaaacagagttgatccctcacctgagaatgacgaagtaagagagtgttgcagaaataatctataaagcagcacaccaacatggcacatgtatacatatgtaacaaacctgcacattgtcgtcatgtaccctagaacttaaaatataataaaaaattatatattaaaaaaatgaggctgatatatatacactgacattgaaacatatttaatgtagacatttaagagaat

SEQ ID NO: 295158 - DNA, 564 bp, Homo sapiens
tgctaaattatcagtacagtatcctgtttgaaacaggccttcataacctacaagaaaattacttccagtgatttctttaagaaaaaagtgactttaactttcagattttcctctgcccatcagctcttttgcaattaaagtaacaatgacttattttctcaactctctgtacagaaaaccatgaacactatggatagattgaactactgggacccaataagccattcaacaaatgaaacacaccttgaggtttaggaaatagacccaaagattgtagaaaggccataggttaggctttattatgctaattcaaaataaaattaaagatttctaaggaaacagagttgatccctcacctgagaatgacgaagtaagagagtgttgcagaaataatctataaagcagcacaccaacatggcacatgtatacatatgtaacaaacctgcacattgtsgtcatgtaccctagaacttaaaatataataaaaaattatatattaaaaaaatgaggctgatatatatacactgacattgaaacatatttaatgtagacatttaagagaat

SEQ ID NO: 295159 - DNA, 564 bp, Homo sapiens
tgctaaattatcagtacagtatcctgtttgaaacaggccttcataacctacaagaaaattacttccagtgatttctttaagaaaaaagtgactttaactttcagattttcctctgcccatcagctcttttgcaattaaagtaacaatgacttattttctcaactctctgtacagaaaaccatgaacactatggatagattgaactactgggacccaataagccattcaacaaatgaaacacaccttgaggtttaggaaatagacccaaagattgtagaaaggccataggttaggctttattatgctaattcaaaataaaattaaagatttctaaggaaacagagttgatccctcacctgagaatgacgaagtaagagagtgttgcagaaataatctataaagcagcacaccaacatggcacatgtatacatatgtaacaaacctgcacattgtcstcatgtaccctagaacttaaaatataataaaaaattatatattaaaaaaatgaggctgatatatatacactgacattgaaacatatttaatgtagacatttaagagaat

SEQ ID NO: 295160 - DNA, 437 bp, Homo sapiens
ttgatagtaaacaaatgcctgacatatgtaagtgctggatgcaccctcatttcttctaagagtgagtcattctgtactagagtgttacctggcrtgcactaggcaataaatgcatgcttgcttgcttctttcccctatgtatggataacattattctaaaataacacctgacatatattaggtgattagtcgtaatcttttctttccccttatatgttagtatgtttgtactagcatagtatctggcatatccatgttgtttctttgcactcgtatatgaataatgtgctggaatcatgcctgatgtatgttaggtactcaactcatccttgcttttctctgctacatgtttttaatgttgtgttcaaataatacctgaaatatataaaacttcagtgtatgtgtatttcttttcccctatgtgtgagtgatgttag

SEQ ID NO: 295161 - DNA, 563 bp, Homo sapiens
cacggtggacaggggctcctctagaaagcaggttcgactgtgtttctaaagaagatacagcttgtaacacgtgtccgtggtttgttttgagagaacagcatctcaayccagcaaagtaaagaagacatatttttaagaacagagcaaggaacatgagcagttggaaattttgcatcatttttcccaagatagagtcttttcccttacctttgtctcatttgtaatcatatccacaagacctttcttagaaacaggaaaaataccttttcctgtgacatcatttttttttctgtttctgttttgttttgctttgttttgttttttgcttcttaggttcctggggccaagtcaaattggttttggtaatctcataaaatactaagatgatcaggaattcatttagaggagactgcctcccatacagtgtagtagcttgggggaggtaactctgtaggtaattccagcttaaaatgagaagcaactgcaggcaaacagcatatgatgtgcaggtgtttctaagttcgtatgataaaatgggttccttggaaatccaaatcaccaaa

SEQ ID NO: 295162 - DNA, 551 bp, Homo sapiens
tattccctcagatccctttaccatgcccatgcctactcctagcagccagcacctgtgtctctttgggcagcctctctgtccccacattttcctacctgcaagaagaaccasaagttcctgggcattgacgtatttatgggggcagctctctaatagtgactgactagaggagggccagtaaattccccagcttctataggtcagcagaagttgatctcaagttaccctcagtgggactttgcttaataggacacctttgctggggctcttcccttgatgattctcacttccctactcactcactggtttctttttcacatcatcactattaaacaaatgaggaagctggtaaaaattattccctgcctcataaatcattttcacacaaaccctcatttcattatctgcttctgaagaacccaatataattgatgtccttgtaaaattataaagttgatacatatgcattttagaaagtaaatagaaactataaaaaagtaaaagaaaaaaatactctagatcctaccactcagaagtaattactgtaagca

SEQ ID NO: 295163 - DNA, 541 bp, Homo sapiens
tgtatcttttttttccatgtgtatgtagtcttctaaattttcaatactcagataacagtttcttttggttatatttttctccaagtctaaagaatttttcttgacatcctcccaaacaatagttttcaactgtrtagtgccaagggacctatttgtggtggagaaagaaagagatggtgttgaaaaataaacgtgtaacccacccccttgtgcagccacatggagtgaggaacctttattatgggggtgtgtctggcatggaaatattatcagacaagtgagtcacacatgggaaaatgttaatgtctcactacagagtatttcactcattcaggaaatgtaccataatttatccagtcattcagctccttgttagtttggatttaggttgtttctatgactttttaaagaaattatatagaaaatattccagtctgggtgcagtggctcatgcctgtaatctcagcattttgggaagccaaggcgggcagatcacttcaggtcaggagttcctgaccagcctggccaacatggtgaaacc

SEQ ID NO: 295164 - DNA, 581 bp, Homo sapiens
caataaattattcagctaccatcaccagggcctttcagctatgatatgccctggtgatcgkagctgaatcatttattgagacagctcttatttattgattatccaccatgtgccaagttcctacataacacagtcagtccacacagaaatgttatatgttaatcatgcacatctagcttgcaaataagataaagagactttaataaataacataaacacagatctgactatctttacaccatgtcatggataagagagattctacagccagatggaacctgggtcactatactatttattagctgtgtgatctcgggtgtgatgcttaacctctcagtgacttggtgccctcatatgtagactagagacaagaagaacaataatgtggttttatgaaggataaataagaggtgaaaactgatagaatatgcctgctacctagttagctctcaataaatgttagctgtcttctgaatttttatttgtacttataaatcaattttttccataaggctggttcttagcattatagatgtaaatgatcactttgggaggtggacgctgataaagagtattgactg

SEQ ID NO: 295165 - DNA, 594 bp, Homo sapiens
tggctctcccttgcttgcagagccttaagcccaataggtagctgccccacatcagaatacataaatctttgaagtagaagtgttgagaaacttaaacgctctttatcacaccaatsactagtgaatagaatttgccatcatcatcccctttagcaaaataattgtgagcacttattaagctcctactatgtgtggcattgtgctaggtgatggaataaaaacaatgtaagagcaatatgctggtgtggttatttcagtatcttcttgagcttgtctggtgaaaaatgtgtcgtgtaattgacaagtctagagcacaaacgataaaatgaatacagagtaatatatgctaaccgtcacaaaggaggcattgagggctgatgggagttcagaaaatggagcaggtattgagggatgccaggtaaaaggtcagagaggtgataaagtttgaactgtacttcaatcaaagagccaaatatgggctgaaagaagaaggtggataagaaggaaaagtggcagtggaaggaaaagagaagaaggtagaaggaatgcgtagagctttagagaacaacacgccagacctttgttctctgcttg

SEQ ID NO: 295166 - DNA, 594 bp, Homo sapiens
tggctctcccttgcttgcagagccttaagcccaataggtagctgccccacatcagaatacataaatctttgaagtagaagtgttgagaaacttaaacgctctttatcacaccaatcactagtgaatagaatttgccatcatcatcccctttagcaaaataattgtgagcacttattaagctcctactatgtgtggcattgtgctaggtgatggaataaaaacaatgtaagagcaatatgctggtgyggttatttcagtatcttcttgagcttgtctggtgaaaaatgtgtcgtgtaattgacaagtctagagcacaaacgataaaatgaatacagagtaatatatgctaaccgtcacaaaggaggcattgagggctgatgggagttcagaaaatggagcaggtattgagggatgccaggtaaaaggtcagagaggtgataaagtttgaactgtacttcaatcaaagagccaaatatgggctgaaagaagaaggtggataagaaggaaaagtggcagtggaaggaaaagagaagaaggtagaaggaatgcgtagagctttagagaacaacacgccagacctttgttctctgcttg

SEQ ID NO: 295167 - DNA, 1176 bp, Homo sapiens
tggctctcccttgcttgcagagccttaagcccaataggtagctgccccacatcagaatacataaatctttgaagtagaagtgttgagaaacttaaacgctctttatcacaccaatcactagtgaatagaatttgccatcatcatcccctttagcaaaataattgtgagcacttattaagctcctactatgtgtggcattgtgctaggtgatggaataaaaacaatgtaagagcaatatgctggtgtggttatttcagtatcttcttgagcttgtctggtgaaaaatgtgtcgtgtaattgacaagtctagagcacaaacrataaaatgaatacagagtaatatatgctaaccgtcacaaaggaggcattgagggctgatgggagttcagaaaatggagcaggtattgagggatgccaggtaaaaggtcagagaggtgataaagtttgaactgtacttcaatcaaagagccaaatatgggctgaaagaagaaggtggataagaaggaaaagtggcagtggaaggaaaagagaagaaggtagaaggaatgcgtagagctttagagaacaacacgccagacctttgttctctgcttgwcaataaattattcagctaccatcaccagggcctttcagctatgatatgccctggtgatcgtagctgaatcatttattgagacagctcttatttattgattatccaccatgtgccaagttcctacataacacagtcagtccacacagaaatgttatatgttaatcatgcacatctagcttgcaaataagataaagagactttaataaataacataaacacagatctgactatctttacaccatgtcatggataagagagattctacagccagatggaacctgggtcactatactatttattagctgtgtgatctcgggtgtgatgcttaacctctcagtgacttggtgccctcatatgtwgactagagacaagaagaacaataatgtggttttatgaaggataaataagaggtgaaaactgatagaatatgcctgctacctagttagctctcaataaatgttagctgtcttctgaatttttatttgtacttataaatcaattttttccataaggctggttcttagcattatagatgtaaatgatcactttgggaggtggacgctgataaagagtattgactg

SEQ ID NO: 295168 - DNA, 599 bp, Homo sapiens
gggcaagtggcaagtggccttttaaaagccatctcttcggagctatttctctcccgctaaatgcatcactgactctattagccccatcaccgagaatttcaacttgttttcacaaatgacaatgaaaaactccatcagaaatgatagtttctttagctcatcaaatctctattcmctgcagaaacactgttgttgtccttgtggtttgtgctctatgattgcttttataaagacagtgaaaaggcaaaatatataggcggaaacttaaattgacttcatatcgctaagatttactgtcttcaaaaatagcatgctagattaatgcatttctgatttcaaggtgcttttttaaaaaaaattggtcttctttgcacataataattctatcagacaatggtctgtggacgaaaacgtatgtgatttacttctgggggctttgaagaataaaaataccgttttttactaatgatctgagatatataaaatatggttataatatgcaaagacatctttcagttatggactttttcctccttcgatgtgtttgttgtaggatctaagagaggaatgtgtgaagttgaaaacaagagtgtttgatt

SEQ ID NO: 295169 - DNA, 599 bp, Homo sapiens
gggcaagtggcaagtggccttttaaaagccatctcttcggagctatttctctcccgctaaatgcatcactgactctattagccccatcaccgagaatttcaacttgttttcacaaatgacaatgaaaaactccatcagaaatgatagtttctttagctcatcaaatctctattccctgcagaaacactgttgttgtccttgtggtttgtgctctatgattgcttttataaagacagtgaaaaggcaaaatatataggcggaaacttaaattgacttcatatcgctaagatttactgtcttcaaaaatagcatgctagattaatgcatttctgatttcaaggtgcttttttaaaaaaaattggtcttctttgcacrtaataattctatcagacaatggtctgtggacgaaaacgtatgtgatttacttctgggggctttgaagaataaaaataccgttttttactaatgatctgagatatataaaatatggttataatatgcaaagacatctttcagttatggactttttcctccttcgatgtgtttgttgtaggatctaagagaggaatgtgtgaagttgaaaacaagagtgtttgatt

SEQ ID NO: 295170 - DNA, 599 bp, Homo sapiens
gggcaagtggcaagtggccttttaaaagccatctcttcggagctatttctctcccgctaaatgcatcactgactctattagccccatcaccgagaatttcaacttgttttcacaaatgacaatgaaaaactccatcagaaatgatagtttctttagctcatcaaatctctattccctgcagaaacactgttgttgtccttgtggtttgtgctctatgattgcttttataaagacagtgaaaaggcaaaatatataggcggaaacttaaattgacttcatatcgctaagatttactgtcttcaaaaatagcatgctagattaatgcatttctgatttcaaggtgcttttttaaaaaaaattggtcttctttgcacataataattctatcagacaatggtctgtggamgaaaacgtatgtgatttacttctgggggctttgaagaataaaaataccgttttttactaatgatctgagatatataaaatatggttataatatgcaaagacatctttcagttatggactttttcctccttcgatgtgtttgttgtaggatctaagagaggaatgtgtgaagttgaaaacaagagtgtttgatt

SEQ ID NO: 295171 - DNA, 599 bp, Homo sapiens
gggcaagtggcaagtggccttttaaaagccatctcttcggagctatttctctcccgctaaatgcatcactgactctattagccccatcaccgagaatttcaacttgttttcacaaatgacaatgaaaaactccatcagaaatgatagtttctttagctcatcaaatctctattccctgcagaaacactgttgttgtccttgtggtttgtgctctatgattgcttttataaagacagtgaaaaggcaaaatatataggcggaaacttaaattgacttcatatcgctaagatttactgtcttcaaaaatagcatgctagattaatgcatttctgatttcaaggtgcttttttaaaaaaaattggtcttctttgcacataataattctatcagacaatggtctgtggacgaaaacgtatgtgatttacttctgggggctttgaagaataaaaataccgttttttactaatgatctgagatatataaaatatggttataatatgcaaagacatctttcagtyatggactttttcctccttcgatgtgtttgttgtaggatctaagagaggaatgtgtgaagttgaaaacaagagtgtttgatt

SEQ ID NO: 295172 - DNA, 581 bp, Homo sapiens
atctttcagttatggactttttcctccttcgatgtgtttgttgtaggatctaagagaggaatgtgtgaagttgaaaacaagagtgtttgatttggaacagcagaatcgaacactaagcatcctattccaacagcgagtcagacccacttctgatctgctcctccaggtatgtgtttatctggaaaacaatctttgctactgaaatgctattgacaggaagttacttaagttcagaagttagcaacatcttcatgagcaaggcatattgcatcagaatcccaattctttcctttctcaagttatgtcattaaatttgaaggtgtctgaagttcttgactttttaaagctacatgcagataaggaaatgcactaacaaataataaacaggcaaaagggacaatcagaagatgttctgtagtaaactaaatggraccatggaaaggagttaggaaataattgattgctttggggaccagcattagtaatcttgcatactgtgataatcaaggaagaattttatgtagtgccaaagcacattttttttatttcaaactctttatgatcaaaaatacatgtggggt

SEQ ID NO: 295173 - DNA, 583 bp, Homo sapiens
gattagttgacagattctggtaaacttacaaagggagccaggtccatgatggaaataagaaaggcctaagctgaaattaaaatcttaagattgacaacaaacttctctattgatttcattttctagaatgatatctctgggactatgggtggcaataaatcagattaacaagacccccctccatattaaaatcaacattggaactaaattccaaggaattgagatggcrggatagcaaacaaaatccaaaagtaatgttcttacagagactggaatctcctaactaagctcatttgaacctacttgtctggattcactgatgctcagcattccccctttcaaatcacactgaacaatgccctcaacttaatgaatgttggcagctagtaaagagctctctaccatgtacacttatttgtcttaccagttgagctgaatacttgccaagaatgagttatttttgtaacttagtaggtctgctaaagtagtatttgtgatcacattaaatatagttgtctaactataaaaataaattgtgggagaccagaaattgtattaaatgtggaacaattctgcatgcaaa

SEQ ID NO: 295174 - DNA, 583 bp, Homo sapiens
gattagttgacagattctggtaaacttacaaagggagccaggtccatgatggaaataagaaaggcctaagctgaaattaaaatcttaagattgacaacaaacttctctattgatttcattttctagaatgatatctctgggactatgggtggcaataaatcagattaacaagacccccctccatattaaaatcaacattggaactaaattccaaggaattgagatggcgggatagcaaacaaaatccaaaagtaatgttcttacagagactggaatctcctaactaagctcatttgaacctacttgtcyggattcactgatgctcagcattccccctttcaaatcacactgaacaatgccctcaacttaatgaatgttggcagctagtaaagagctctctaccatgtacacttatttgtcttaccagttgagctgaatacttgccaagaatgagttatttttgtaacttagtaggtctgctaaagtagtatttgtgatcacattaaatatagttgtctaactataaaaataaattgtgggagaccagaaattgtattaaatgtggaacaattctgcatgcaaa

SEQ ID NO: 295175 - DNA, 583 bp, Homo sapiens
gattagttgacagattctggtaaacttacaaagggagccaggtccatgatggaaataagaaaggcctaagctgaaattaaaatcttaagattgacaacaaacttctctattgatttcattttctagaatgatatctctgggactatgggtggcaataaatcagattaacaagacccccctccatattaaaatcaacattggaactaaattccaaggaattgagatggcgggatagcaaacaaaatccaaaagtaatgttcttacagagactggaatctcctaactaagctcatttgaacctacttgtctggattcactgatgctcagcattccccctttcaaatcacactgaacaatgccctcaacttaatgaatgttkgcagctagtaaagagctctctaccatgtacacttatttgtcttaccagttgagctgaatacttgccaagaatgagttatttttgtaacttagtaggtctgctaaagtagtatttgtgatcacattaaatatagttgtctaactataaaaataaattgtgggagaccagaaattgtattaaatgtggaacaattctgcatgcaaa

SEQ ID NO: 295176 - DNA, 525 bp, Homo sapiens
ttttaaatgtatgtattttgctttttcaaaacatctgcctttggggttctttcacatatatgtagttgaagtgagacaaaaagatgaaaagaaaaaagactagttaagcaggtagcctgtggtgagagcaataagggaggggtaggtgagtgagtaaagaagaaggtaaagaatggaactgtggttcttgagtttctgtgatggaagcttttcattctgatygattctggcctctcttgagacacaaactaagaaggagttgggagaagaggcaagaacatccacacaagtttgaagcatctacctggcttcccacgctgttgggatataagttcaccttatgagtttctggaatggatgaactctgccccttggctgtttgtgtggaccagccatggaggcgcctccagtcctgccctacaaacctgatatctaatttagaaacacccacagggtgacaggaggagcagccagtgatgcttcagggatgctgagtaacaccagggctcagatggcagagtatcc

SEQ ID NO: 295177 - DNA, 558 bp, Homo sapiens
tgtattatatgaatgtgcctttggtcagggggactgatgtttccatattgtttcatgggtttttatctccccattctactccctcttaaattttaagtaacttaatggaaggcacctaaatttctattcttcatatcctcctaaaattagatatatgtattaattgtattaataggtattaattgctttcaagagcacatggctgacttcccatcatatgtgtcaatctgtattactatgtggctggctttacataaaccatcctctcaccaaaacaatgaaaactctcatgctcggagatcagatgccttaaggggctaagccaggtgaaggaagcaggaaaggaagttgtgtgccctgcagccagccccagccagttaggccccatggaaatgctagctagatgtygccatagctttgaaaattgtaagaagctagaaatgcagacttttgcatgtagtctctcaaattttaaatgttggctaacacctagttcagctatttaatgacactgaggaaacccaataaggcaaccatggaccagaattggcctgcaac

SEQ ID NO: 295178 - DNA, 558 bp, Homo sapiens
tgtattatatgaatgtgcctttggtcagggggactgatgtttccatattgtttcatgggtttttatctccccattctactccctcttaaattttaagtaacttaatggaaggcacctaaatttctattcttcatatcctcctaaaattagatatatgtattaattgtattaataggtattaattgctttcaagagcacatggctgacttcccatcatatgtgtcaatctgtattactatgtggctggctttacataaaccatcctctcaccaaaacaatgaaaactctcatgctcggagatcagatgccttaaggggctaagccaggtgaaggaagcaggaaaggaagttgtgtgccctgcagccagccccagccagttaggccccatggaaatgctagctagatgtcgccatagctttgaaaattktaagaagctagaaatgcagacttttgcatgtagtctctcaaattttaaatgttggctaacacctagttcagctatttaatgacactgaggaaacccaataaggcaaccatggaccagaattggcctgcaac

SEQ ID NO: 295179 - DNA, 558 bp, Homo sapiens
tgtattatatgaatgtgcctttggtcagggggactgatgtttccatattgtttcatgggtttttatctccccattctactccctcttaaattttaagtaacttaatggaaggcacctaaatttctattcttcatatcctcctaaaattagatatatgtattaattgtattaataggtattaattgctttcaagagcacatggctgacttcccatcatatgtgtcaatctgtattactatgtggctggctttacataaaccatcctctcaccaaaacaatgaaaactctcatgctcggagatcagatgccttaaggggctaagccaggtgaaggaagcaggaaaggaagttgtgtgccctgcagccagccccagccagttaggccccatggaaatgctagctagatgtcgccatagctttgaaaattgtaagaagctagaaatgcagacttttgcatgtagtctctcaaattttmaatgttggctaacacctagttcagctatttaatgacactgaggaaacccaataaggcaaccatggaccagaattggcctgcaac

SEQ ID NO: 295180 - DNA, 622 bp, Homo sapiens
agctgtaagactataaaattgtcttaccctgattcggccttgtttggccttcccaacctcttgcaacaataccagattaactcatccagctctgtaggaaaacaataacctccaggagtgtcatgctggctgaaatttctgtcactgtgaccttcaacaacacttctttctagctttttaactgaagaaggatatagttaaactggattaagaagtctaatggaaaagtgaagagccctctgtgtctaaagtttgttttaaggatttcaacattgaatagaggttcaaaccctgaacataaatcaacattatattgcagtagactaagtgattgaagtgtaaattcacaaaatgcaccctgtagcatgaaamattcaggcgatatatatttttatcatatttcaaacacataagaaaacctgattatcctgaatttagtaaattttgtgcagtaaatgtctatcatagtaacctaaaaactcccctagtaaaaattgttattaagcactacattttcattctgagttttggataaatagaaggatttggaaatgcaagggacagaaagtactgagaaaggaatggtgatgcttacctggggatttgattatgcagattagag

SEQ ID NO: 295181 - DNA, 528 bp, Homo sapiens
ttaggtctcagtaggtaaaatgaaggatttggcaagaaccagggatccttttttctattatagcttgatttgtgctgaggaaaaaggataatggatggagggatggaggaagaagtcattgaatgttaaaagtcaccatgaaaggccaggcatagtgrgtcacacctgtaatgccagcactttgggaggccgaggcaggtggatcacctgaggttaggagtttgagaccaacctggccaacatcgcaagaccccatctctactaaaaatacaaaaattagccgggcgtggtgggtcatgcctgtgaccccagctactcgggaagctgaggcacaagaatcgtttgaacccaggagacggaggctgcaatgagccgaaatcatgccaaggtgacagagtgagactgtatctcaaaaaaaaagagtcaccatgaaataatatgaagaaaggaagttatactgttcacctagatttatgtcccagttctgaaactttacctctaaattcattatatcaaattaaatactta

SEQ ID NO: 295182 - DNA, 528 bp, Homo sapiens
ttaggtctcagtaggtaaaatgaaggatttggcaagaaccagggatccttttttctattatagcttgatttgtgctgaggaaaaaggataatggatggagggatggaggaagaagtcattgaatgttaaaagtcaccatgaaaggccaggcatagtgagtcacacctgtaatgccagcactttgggaggccgaggcaggtggatcacctgaggttaggagtttgagaccaacctggccaacatcgcragaccccatctctactaaaaatacaaaaattagccgggcgtggtgggtcatgcctgtgaccccagctactcgggaagctgaggcacaagaatcgtttgaacccaggagacggaggctgcaatgagccgaaatcatgccaaggtgacagagtgagactgtatctcaaaaaaaaagagtcaccatgaaataatatgaagaaaggaagttatactgttcacctagatttatgtcccagttctgaaactttacctctaaattcattatatcaaattaaatactta

SEQ ID NO: 295183 - DNA, 539 bp, Homo sapiens
gctggcaaacaaaacacagaaatccttgcaattaaattctggaaataataatgccactattattatcctacaatatgttgaaggttctagtaaaggtaataagacgtgaaaatgaaatggcaactataaatactggaaaagtagaatgaaaactgtattcctttacacatttcatagctacattcttagaaataatctctaataaaaaatctgctagtttaaatatggttaactcattggattgaaagtaaatataataaaaattaatagctgtaatctctttattcaataagcacctagaaatggaaatagcaaattatttcctttcaaggtaaggactaaaattataatatatttagaaataaatttakccacatggtaaaactcacacacaaaaaaatggaattgtattaaattattttaacatggttttggaagaatacatgtctgagaagaaaagtcaggagaatctgctttgctagatatcagactgaactataaagctattatatttaaaatcaatatggtgttggaatggc

SEQ ID NO: 295184 - DNA, 581 bp, Homo sapiens
cgatttatctaagtcaccagaagatccttgaggtgaaataataagcattactgtgcagttttagaatatgccattagttatgacacaaaggcaaatctgctgtggcttcagctcttcactgggcagccagaaatacatttttcatggcatatcatgaattggcccagacaagtatcctgaagtaacagagtctactgatactgatagaaaaaaaaaattatttccatgaacttagcagtttctgttcagtgtacctcgtcaagtaatttagtttatctcaaaaacctgtggattcccttaggagaatggactgtacccctttagaacaacaatacaaaagtgatcatattaaacccaamttttcttcctttgatgcctccaaatcatgggtccaagtctacaagtgcgaattaaatcagtaattcaggttaaattcatattgttatctgaaatatattttatcttcattaagtcaattacatttgcagaaaatgtaactcacctaggttcttcagtgttttgggtttgttttttgtttgtttgcttgtttgccactaaacaaaacacggaagaaaggcatt

SEQ ID NO: 295185 - DNA, 581 bp, Homo sapiens
cgatttatctaagtcaccagaagatccttgaggtgaaataataagcattactgtgcagttttagaatatgccattagttatgacacaaaggcaaatctgctgtggcttcagctcttcactgggcagccagaaatacatttttcatggcatatcatgaattggcccagacaagtatcctgaagtaacagagtctactgatactgatagaaaaaaaaaattatttccatgaacttagcagtttctgttcagtgtacctcgtcaagtaatttagtttatctcaaaaacctgtggattcccttaggagaatggactgtacccctttagaacaacaatacaaaagtgatcatattaaacccaacttttcttcctttgatgcctccaaatcatgggtccaagtctacaagtgcgaatkaaatcagtaattcaggttaaattcatattgttatctgaaatatattttatcttcattaagtcaattacatttgcagaaaatgtaactcacctaggttcttcagtgttttgggtttgttttttgtttgtttgcttgtttgccactaaacaaaacacggaagaaaggcatt

SEQ ID NO: 295186 - DNA, 591 bp, Homo sapiens
cccgtgaggtaggactaaaaaaaaagtttgctcatagtttcaactgccaggcagtggcagagcccttgctttaattatggctgttgcactgtaaaccccacgctctgacccactccctcattcttcctccacaatcccattctgtcacttgtttttctcccccatagttcagtaggacagagagagataccatgaaaatcaaaagaaggattgaaatccaacggctggttatgatcacagggaataaaataaaagrcagggtagccacaggacttcctaaaacttctggaagtattgcttatcttctgtagcaggaagagcatttagagtttgatagctgtggagtaaaactgactctatatatttggggtcaagctttctcaaaatcaatcttatttttaactcccaaattccccaatttccaggagccttggtgagtatttaatcctgagattgtcaactagctttggtaatgggctcaagtgactgtagttacgtgaactgtttagccattgccctcattataagtggtttaatccgaaggcttttagggtggagacttgcagtatgtattttgccacaggactcact

SEQ ID NO: 295187 - DNA, 687 bp, Homo sapiens
gacccatcagtccattactaggtgtgtacccaaaggaaaatccatcattctaccaaaaagatacaagcacacacatgttcattgccasgctatttacagtagcaaagacacggaatcaacctaggtgcaaataagtagtggaatggataaagaaatatggtacatatataccatagaatacagccataaaaaagaatgaaatcatgtcctttgcagcaacacgaatccagctagaggaggccataatcctatgtgaattaattcagaaatagaaaaccaaatactgcatgttctcacttataagtggaagctagatactgagcacacatggacataaacatgggaacaacagaccctgcagactactagatggggaaaaagaaaggggggaatgggttgaaaaactacttagtgggtactatgctcactacctcggtgatgggacctgcatccaaaacccagcatcatgcgatatacccacggaacaaaactgcagaagtaccccctgaatctaaaataaaaggtgaagttaaataaaattcctaacaaagtcacaacatccaatgacagaattataggcatcagtaagtgtaaattttcagaaaaaagaaagacagaagtggctatttaatctactaccacaggtatagagaggcactatcatattaagaagggaaaacaaacagg

SEQ ID NO: 295188 - DNA, 593 bp, Homo sapiens
cagtgctaggaaaagttcagttttgtgtttttctttagaacaaaagtataaagtaaaaatactgtgttccaaagttactaagttggtttttcccctcctccccttttagtgtgtttatattattcatttgaaattcggttcagttcatttgtttctgatagtattcaaatttaatttcctctcttcttaattacattttgttttttagaatacataaaacattaacaagaatccaaaagttaaaactatattaaagggtatatattgagtgcagtgtccctccctctcctgcctcgttcctttctacctctcraagattctttaatagtgtcattatcccttttttgtcttcctctgttacttttaaaatcatgtcctttggccgggtgtggtgattacaggctcacacctataatctcagcactttggaaggacaaggtgggaggatcccttgagcccaggagtttgagaccggcctgggcgacatagtgagatctccatctctactaaaaataaaataaaataaaaattagccaggtgtggtggtgcatgcatagagtcccagctactaaggaggttgagtttggaggatt

SEQ ID NO: 295189 - DNA, 621 bp, Homo sapiens
acacattactgtgctttaatctaaaaatatacacatgtatgtgtgtatctcctattcttttgggactaattaacagaccactaagagaatgtaagttcagatggttaaaggaagatcaggaggggaaaattttgcaaagcgatgagtgtatatggagggtaagaattgtgtgaaatatcaaacaaaaggaagttttgggcacctggactagaggtaaagggctcacaccaaaaagagggtaaataataaataaaagtgcaactgggcagtgcctgctatggaaaaacttcctccatttcacatttgctgaaggctggttcttaaaatgaggattaggtctgcaacaggttacacatttaaaatggcctccagttgtgagtcctgggctctggcacaagagatgagagctctttctatgacctcaagtagggkctagggatatcaaggtgccaccaacttcactgcagcccaagtgtagccccaaacaccagggatcatgtacaccagactattcatctcgattttagagttgcaaatggaaacataaagacaaacactatttccatttctagctgagtctttctagactccgtgaatacaggttcacattcagattaaatc

SEQ ID NO: 295190 - DNA, 552 bp, Homo sapiens
agcgcaccagcatggcacatgtatacatatgtaactaacctgcacaatgtgcacatgtaccctaaaacttagagtataatataaaaaaaaaaataaaataaaataaattctttccttcagcaaacactgaatagtgctgtaagaaagaaatatctatatgacctgttagtaatgttgtagaacagrgtgcttatgtattcaaacacttaggaagttatcactaataaatgacattgatctgtgtatagaattaaaaggaagtttccatgtggaaaagggcatcacctgacaggaaagacagccaggaaaggcaagttgaggtgagagcccttaaaaattatggaatttggacatggtttctagatactaagaatcatggagggtatttgagggtcaccaggcagggtcatttctgagaaacctcttctaggaagcacatccaaaaacggtaggcaaaatataaaagatgccactttgcaatgcctagatgagcttctgtaatcataaaggagtctctagaaaccaatgacaaaaaactcaagaagttaaaga

SEQ ID NO: 295191 - DNA, 552 bp, Homo sapiens
agcgcaccagcatggcacatgtatacatatgtaactaacctgcacaatgtgcacatgtaccctaaaacttagagtataatataaaaaaaaaaataaaataaaataaattctttccttcagcaaacactgaatagtgctgtaagaaagaaatatctatatgacctgttagtaatgttgtagaacagagtgcttatgtattcaaacacttaggaagttatcactaataaatgacattgatctgtgtatagaattaaaaggaagtttccatgtggaaaagggcatcacctgacaggaaagacagccaggaaaggcaagttgaggtgagagcccttaaaaattatggaatttggacatggtttctagatactaagaatcatggagggtatttgagggtcaccaggcagggtcatttctgagaaacctcttctaggaagcacatccaaaaacggtaggcaaaatataaaagatgccaytttgcaatgcctagatgagcttctgtaatcataaaggagtctctagaaaccaatgacaaaaaactcaagaagttaaaga

SEQ ID NO: 295192 - DNA, 527 bp, Homo sapiens
ttatctgtttctttagtgacaaccacagtgctaaacacatgataggtgcttaataaatgctaactgatctaagaaataaaaaatagatgagccactggaggacaaaatgaaacagatgattacaygttgaatttttttcagtgtccaaaagagaaaagacaaaaattaatatctagaattttttcaaagtgaaaatagctattttctgactaataaataatacatgcttgctgcaaaatattcaaatatctcacaataatttctctgttagagaaaaccagttttaatgatttggtgtaggtgtatgctctcagtagttcgcccatgattacatagggttgtcatttttttaaacaaggttggagccatagtgtgtgtgtgtgtgtgtgtgtgtgtgtgtgtgtgtagttaatactaactaaaaattaataatagattgctgataccactctttggcacaaatgtttctcattaactggttattgtagcctttattttgtataattcataatgtatttaaatctatt

SEQ ID NO: 295193 - DNA, 586 bp, Homo sapiens
caaggttgataaaatatagaacttataatgaactacatttaaacatttttaatggtatcactaatgcatgtatcagttaaagtactatttggaaaaatctgctttcctctgtcttcattgacagcatattaattatgtctgaaatagtcaaaaggttgcatttaaaagaatataagaatagtattttgaagcataagaaagtttattttaaagtraacgttaagtcacattttctgaaaatgaactgaagttctcacctacatgttcaccacgcattatactgttaacaattctcagtgtttaaacatgttatatttttcctttatgattttccttaaaattgtattaaaacaataatctggtgtattaaatataatactataatttacaaatcaaaccctgacacttaccataactctgatatgcatttctgtaagaacttccactgggatgtactaaaggatctctaccacggcccccaccacagccatcacagtcactaaatttaaaaaaggtttgctaacgtcagcaggaacaacttaagaaatccctttgacaaaatcagaaaatattatagtacctatat

SEQ ID NO: 295194 - DNA, 1247 bp, Homo sapiens
agaattgaataagtgtatgcaaacaaatatgtgtatatagaaatactgtggtggaaacaacccaaacaaaataatgggttagcaggttgtgtaaggagagaagtgctgcaatgtaaatgaacattcagagcatcatgcaaacgaaaggagacagttataaaaagtcttgtagggctgggcgcggtggctcatgcctgtaatcccagcactttgaggctgaggcaggcggatctcgaggtcaggagatcgagaccatagtggctaacatggtgaaaacccatctctactaaaaatataaaarattagctggccgtggtggcaggcacctgtagccccagcgacttgggaggctgaggcaggagaatggcgtgaacccgggaaggagagtgtgcagtgagccaagagtgtgccactgcactccagccttggagacagagcaagacttcatatatatatatatatatatatatatatatatatatatatatatatatatataatatatatctccagctaagtaacatcactgtgtcttaaatggctaagttttagttgtttataaatatttcctaaatatgataatcttacaaatttacatttgtctaaactaatacaatttagtawagaattgaataagtgtatgcaaacaaatatgtgtatatagaaatactgtggtggaaacaacccaaacaaaataatgggttagcaggttgtgtaaggagagaagtgctgcaatgtaaatgaacattcagagcatcatgcaaacgaaaggagacagttataaaaagtcttgtagggctgggcgcggtggctcatgcctgtaatcccagcactttgaggctgaggcaggcggatctcgaggtcaggagatcgagaccatagtggctaacatggtgaaaacccatctctactaaaaatataaaagattagctggccgtggtggcaggcacctgtagccccagcgacttgggaggctgaggcaggagaatggcgtgaacccgggaaggagagtgtgcagtgagccaagagtgtgccactgcactccagccttggagacagagcaagacttcatatatatatatatatatatatatatatatatatatatatatatatatatawaatatatatctccagctaagtaacatcactgtgtcttaaatggctaagttttagttgtttataaatatttcctaaatatgataatcttacaaatttacatttgtctaaactaatacaatttagta

SEQ ID NO: 295195 - DNA, 578 bp, Homo sapiens
acttaaatatgcactaaagacaattatcaacagattaatacatggtacagtgaggacaaaatacccacaatataaaataaagaagaaaatgtaaaatctaagctgtctttgaagcataagttgctatttgtgagacatatgccaggaagaataactcttaagaagtccgaaaaagcatattggtgaaagcatgaagagtaacgggaactaaaaagagactgaratgatgttataaaacaaaacagctccaacgtacccagaatgcaatgattttgatggtaatacaaaggaattcagtaggtaatagaattataaaaaggtttacagctgtaataaacacacaatccctagaatttaagattcagtaagacagagacaattggttggatcaaaataagtcctcaaacacactggtaaaatgagtcattaggtattcatgttacataaatcactctggtgacaggataaaaatgattttaggagaaaaagagcaaggatggggcagaaatgccagttagtagttctgttacccaacttcaatgtactcatattattttctactttcaagtacttaacat

SEQ ID NO: 295196 - DNA, 604 bp, Homo sapiens
aaaattctaaaaactgataacagcaaatttagaagaatgtctggtaggctttgttttcttttaacaaaactaaacactctctcaatctcatccagcggtcttgcttcttggaatttttccaactaaactaaaaacatgtttacatcaaaatttgcatatggacatgttgtatagtagttaagtggataaactgtggtttatggactatttatctaacactgttcagcactgaaaaaaatgagctttcaagtcatgaaaagacatggaaggaaattaaatgtatatttacaagtgaaataagcaaatcagaaaatgctacacatattatttcaaatatatggcaatctagaaaaaaattattgaagaagtaaaaagattagtggtcacaatgatttacaagggagagtacaataaataggcacaactcaggtaattattagagtatacaatactgaaactattctacataatacyataattttggatatattttattacatgtttgtcaaaactcatagaatgtgcaacagtaaaaatgagtcctaatgtaaattgcagatattgaatgataaagtgttgatgtaggtttatgaattgtaacaaa

SEQ ID NO: 295197 - DNA, 485 bp, Homo sapiens
gcaagtggtaagaccatcgcctattggtgagatcatcacctactgccaagtggtgagtaccatcagacccctttctcttgctattatgtgctatttttccctagaattctggggctaaatattgggcacctttcggccagttaaaagcaactagcgtggctgctggactaaagacacgggtgtcagcctttctgaaaagggctctctaacaacccccgactctttggagttgggagcgttggtttgcctcaaaccagcttccacttttcctgtaattctgggccaagccaagggttgacagagaggaaagccattcggctccagggtcctgacaacaagttggttgaccctgcagccatgagcagaactctcaaaggcatgttgcccaagagagactcgtccatctatcytatctatcttgacacttgcccctgggtcctaatgcctgccagacaaacttcctcttgccacttttctctgaggct

SEQ ID NO: 295198 - DNA, 602 bp, Homo sapiens
tacaacaaataccacctacttatagggttaggaatggctactgctacaggaaccagaagagccagtatatctacttcattatcctactrccacatactctcaaaggatttctcaggcggtttgtaagaaataacgaacctatccttactctgcaatcccaaatagactctttagctgcagtgactctccaaaaccgctgaagcctagacctcctcactgctgagaaaggaggactctgcaccttcttaggggaagagtgttgtttttacactaagccatcagggatagtacgagatgccacccagcatttataggaaatggtttctgaaatcagacaatgcctttcaaactcataccaacctctctagttgggcaacatggcttctccgctttctaggtcctgtggcagccatcttgcttttactcgcctttggaccctgtatttttaacctgcttctcaaatttgtttccttggaattgaggccaagaagctacagatggtcttacaaatggaaacccaaatgagctcaactaacaacttctactgaggacccctggaccaacacgctggcccttccactggcctaaagcgttcccctctg

SEQ ID NO: 295199 - DNA, 602 bp, Homo sapiens
tacaacaaataccacctacttatagggttaggaatggctactgctacaggaaccagaagagccagtatatctacttcattatcctactaccacatactctcaaaggatttctcaggcggtttgtaagaaataacgaacctatccttactctgcaatcccaaatagactctttagctgcagtgactctccaaaaccgctgaagcctagacctcctcactgctgagaaaggaggactctgcaccttcttaggggaagagtgttgtttttacactaagccatcagggatagtacgagatgccacccagcatttataggaaatggtttctgaaatcagacaatgcctttcaaactcataccaacctctctagttgggcaacatggcttctccgctttctaggtcctgtggcagccatcttgcttttactcrcctttggaccctgtatttttaacctgcttctcaaatttgtttccttggaattgaggccaagaagctacagatggtcttacaaatggaaacccaaatgagctcaactaacaacttctactgaggacccctggaccaacacgctggcccttccactggcctaaagcgttcccctctg

SEQ ID NO: 295200 - DNA, 603 bp, Homo sapiens
gtctagcttatgtgactctcctctcctgtctgaaccctgcttcctgtgaagagtgtagcatttttaagcactgcatccaaatgacataaccctcttgcctaaccttttcaatagtaggtattgtgacatatttctgtgccatcatttaggtggtatgactctcctttcctgcctggacaatctccataggaggcattatgccatagagttgggttaacaccccatatttgtgagatttctgttcgtgttttgcctacaaagagaatattggaatatttctggcttaggatttaggtgacatggttttcctgcctgtttaataaccacaaaggggatggtgacatatacttaggcacagctaaaaggcataataatgactctcataggtggaccaagccaataggagaaattttgactcttctaggttcatgtacctgagtgatttccaggatcttcttctgtaaaatgtcacagaagattacaaaactcacrcatatcttataacacccttgggttgtatagagagtgtcataacagggcctagcacacaaaagggattctgggtctccaatgctgagacccagctgacagtaaggactttca

SEQ ID NO: 295201 - DNA, 531 bp, Homo sapiens
cttgtcttagaaacatcttgtgcacattctcctttttttgtctgtttgcttgttgctcactatagacataatatatacatttattttagtctaatttcataaagcattccttgtataattttctcagagatgatgaatgtgactttgataaaatttaatgatcttcacaaaataatttttacatgtaatttcatggtgtgtgtattattgtatgctatttatttagtacattttttattttatttcaatttgagaatgctatttaatccaatttttatttattgttcattttacattatgaacttgatataattgagtttattaaacttattaggccaatttattcaaattaatagttgaacatttattaagtcatgaggtccttttggcatatacatgaagtaaacaagataatactagctatataatagaagctacataattrgaaataaatattcttcttgaaattagccagtagactcagatgaaaataaaaatgtctatagtatgacatgaattctgcatatgaag

SEQ ID NO: 295202 - DNA, 595 bp, Homo sapiens
gccacctaaaaccaaaacaacagcaggcacatgcatccaacatttacctcctgaaaaattaccaagtaatatgcaaatactttcttcttccccacacctgcctcatcatcacatgaagatcaagcaggggttgggtaagtcagggtcagggcagggttgaggaagaggaaagggagagaccaggtgggggtgacatggcttacagagatccctgggagatactacttaaaaaagaagtttaagttaccagtggttttgcatctgggcaaagtcattttgacacaacyacaccaaaatggctacatgtaagcggctgaaatattccagagccctctctgagcctcagcttccataagcagtgtcgggtagaggctgcaagaagcatctgggaacgaaacatgtcacaggcttcaattcctccagaagctgagagacagaggcgggggacacatccactcggtggaacagaaaactgaaacgaagagacacgtcctaaattttcagtgactggcgttagagttaccagactttctggggtggacacttgatgggtaaaatgattcctgactcagtttccttctctgcgtagtggaca

SEQ ID NO: 295203 - DNA, 625 bp, Homo sapiens
gcggcagtgtctggccccagtgtgctgagagaaaaaagagaaaacacacacagagaagtggggatcacagaacatggaatgtgtgtcctcaagggcccttccagacctttaattagtgtggctctctcatttacagatgaagaaaccatttgtcagacaytcagcgggtgaaggacaaacaagagacagaatccagggccttcaacgtcctctcagtgctcttgcccctacatcacacagactccagacaagcaggactggaagaggctaagatgaccacgagcctgaccccacacctgctactggagagacccacagcctcctcatctgggctcttctggccacatggcacagcctggtggggtaggttttactcattgtggcatctctggtacctggggcacagtaggttctcagaaaatgttgcatgagttaatctaatggaataccagtttatcccatatggaagtatgctagccgcttttttggaagccacgagaaatttaaagcagactttaaaaaaaaaaatcatgtatcacttcgcttcagcctgacaagattttttctggctggacaagaattcttgacaaacctgcatttaggcaggtaagttccccttgtggca

SEQ ID NO: 295204 - DNA, 625 bp, Homo sapiens
gcggcagtgtctggccccagtgtgctgagagaaaaaagagaaaacacacacagagaagtggggatcacagaacatggaatgtgtgtcctcaagggcccttccagacctttaattagtgtggctctctcatttacagatgaagaaaccatttgtcagacattcagcgggtgaaggacaaacaagagacagaatccagggccttcaacgtcctctcagtgctcttgcccctacatcacacagactccagacaagcaggactggaagaggctaagatgaccacgagcctgaccccacacctgctactggagagacccacagcctcctcatctgggctcttctggccacatggcacagcctggtggggtaggttttactcattgtggcatctctggtacctggggcacagtaggttctcagaaaatgttgcatgagttaatctaatggaataccagtttatcccatatggaagtatgctagccgcttttttggaagccacgagaaatttaaagcagactttaaaaaaaaaaatcatgtatcacttcgcttcagcctgacamgattttttctggctggacaagaattcttgacaaacctgcatttaggcaggtaagttccccttgtggca

SEQ ID NO: 295205 - DNA, 1179 bp, Homo sapiens
caaccatgtatatggcaggcaatatgtaaggcatcttttttcctggaatgtgtgatttttcccctgaacggtgattaaattcatctcccaagaagcttttggtttgaatccaggtagaccaagcaaaaaaagaagacaatacagcataggacccacagtttgaaacttgtcagctaaacaattcagatcgtctctttcttcagtcatggtcactgtgtgctcagtcagctcagcctgtaactgattcctgtcctgaatcaaatgccaaggaccctgttcttmatactcctgccctgacttcccccaaaggtgtgacaatggcagtgtgaagtaggaaaaagctgtgcctggagcctgcctgcacctcttgtaaaaaaactgaactgagaaacgccagcttgcaattcaatgcacaaaaattgacatccattttagaagcaatgctcagtcagctaacttgttggtatttgagggggtggacagctgccttttccaaaaagaacaacgctgcatgggacaggatcctacctgtagawgcctaaaacaaccgctaaataaaacaaatggatagaactataatctaacaaagaaagtaaaacagaattaaaaataggcaataaatccaacagaaggcaaaagaaaaggaaaaggggaacaaagagcaaatgaaatgaaaacaaatgacaagatggcagattcaatcaaatcatatcattaatattaaatgtaaatggtctaaatacctccaggtaaatgacagagaatgtcagattggattaaaaaaaagcaaggcctaactatcttgcctatcagaaattcwctttaaaaagacaaaaacaggttaaaagtaaaagaacagacataacactaaccagagcacacagagtaaaagaacacatttaacactaaccagagcaaaccaggaataaacaggggcataggaaaggttaaattcatcaagaagacacagtccttaaatgtatatgggcctatgtgacattatgagatacagatacaggtggcttttgttcatggctcctggctcataactgacatagcccttcttacagtaaaaagaatttctctctctgatcttctcttgcccaaggcaaaactctgagtgtagaacataaaagcctcatttcagaaagaaacctgccccatattttgaaggaagga

SEQ ID NO: 295206 - DNA, 471 bp, Homo sapiens
aggggtatcttttgttctaatgaggtgacccttggtgggctcctggatgggggttggtcaccagaaagcccacaccaagattagaaacctggaactttcagycccatcccccatcctcagggaggggagaagagttgaagattgagtgaataattaatcatgcctatgtgatgaagcctccatataaagtacaggttttggagagttctggaatagtgaacatatccacttgctggaagagtggcacaccccaccccaacagagacggaaactccttcacttgggacccttccagatcttgccttatgtatctcttcatctggctgttcttctgtatctgttgcaatgccctttgtatacatttgtaaatgtgttttcctgagttctgtgagtcatcccagcaaatgataaaacctgaggaggggatcatgggaatatcccttctgtctgtagccaagccagacagaagtt

SEQ ID NO: 295207 - DNA, 471 bp, Homo sapiens
aggggtatcttttgttctaatgaggtgacccttggtgggctcctggatgggggttggtcaccagaaagcccacaccaagattagaaacctggaactttcagccccatcccccatcctcagggaggggagaagagttgaagattgagtgaataattaatcatgcctatgtgatgaagcctccatataaagtacaggttttggagagttctggaatagtgaacatatccacttgctggaagagtggcacaccccaccccmacagagacggaaactccttcacttgggacccttccagatcttgccttatgtatctcttcatctggctgttcttctgtatctgttgcaatgccctttgtatacatttgtaaatgtgttttcctgagttctgtgagtcatcccagcaaatgataaaacctgaggaggggatcatgggaatatcccttctgtctgtagccaagccagacagaagtt

SEQ ID NO: 295208 - DNA, 587 bp, Homo sapiens
atgaagaattatgttctgtccaccactgaaaggcagtatgccgtcttctccaagttctgctgggcctaaagcataaatatatcaggaaaagaaacaaaaagaaagagaaaagcaacagaaagtataaaatgtgaggcaaaatgaattaaatagggcaaagaagagtcatttggtattgataaaagtaatgatcaataatgaagtcagggtccagttcatgaacattaatgggccagagaacatagcatcaaaatacattaagcataaattcttagatgtgtgaggagcaattgacagaaactcaattatagtgggaaactagcatactcacctcaatccatttaagatcaagaaggcaaacttaaagcaataagagatacaagctrtatcactaatagctgaattagtagatattgaacttatattctatagagaccgtatctttctgtcaagtgtttgggcaacacttgcaaaattgatcacataccaagccacaaataaaaccttattcaaaatcaggcagttccaaaaaaccaattgtaataaaattagaaacaaataatacaagcttattatttacatgaata

SEQ ID NO: 295209 - DNA, 516 bp, Homo sapiens
cttccatgaacacaggtttttttcatgtcaggcttcatgtgtgaaatggccatatgcaattcttgaccggggctttttaatgatgatctcttcaaattcttgaaagtcactatcaacaggaaacttttgttcacacaagtacataataaaaaatgtcagaccattttataaccagtcaaaaatgtagaacatttgaaattttattaaaagaatctaacagctcttccttttctttctttgacaaatgtaatgttgaaatttcttatgataaagtgaatggattgtgaatgcaatcaaacgttttatatcaagtatttaaaaataatgacgaagttctaatttccagaatgtgcrtgtattgctagagctctctcgctgtagctaacaaggatgccactaaaagggaacatcacctgcaaataggttaaagttgccaatttataaaaagacagaaatttggagacttcttctagagctgctccatgctagagactctatgcagcttccctgtcaccc

SEQ ID NO: 295210 - DNA, 1009 bp, Homo sapiens
agcatctggcatttcccctgcctgcacccactccatccttccaccctgttaagaaggtgcctgcttctcctttgccttctaccatgattgcaagtttcctgaggcctccccagcaatgtggaactgtgaacctctttcctttattacacagtcttggatatttcttcatagtagcatgaaaacagactaatataccaaggcaggcagattggctgagcccaggagctcgagaccagcctggacaacatggcaaaatcccatctctacaaaaaattagccaggcatgggtgcctgyagtcccagctactcagggggctgaagtaggaagattgtttgagcccaggaggttgaggctgcagtgagccatgttcacaccactgctttccagcctgggtgacagagtgagaccctttctcaaaaaaaaaawcttaactctaaatgcaagctttgtgatactggggctggactcwgtaaacatatctcctttgccacttggtactatgttagattttatcttcaaagggtgcatgggttgggaaaggtgtcgctgcatggctattgcccaggaagaatcttctcttcccgtattctggtgtgttttatctccacagctatgagtggtgtttaggagacctaatgacactcattctccaacaagttctccagaaacccaaccagagtgtggagcagctgatgataaagcctcccctttatcccctttaaaaccactttcggaagaccagcactggcccactggcaccccagtttattggcctcttgacaagcaggttctatagaccagctatggcccacctgcatcctccaatgaatttttcagccatccagtgaactgctgatatgaaaagctttggcctatgtcttctggcaagtttcttttccaatggcaggctgagggttctcatggcagccatgccatctccaacaaggtctgaatctaagccctaaaggaggggatatgaggagggatgcctcttccaagtttttaatt

SEQ ID NO: 295211 - DNA, 591 bp, Homo sapiens
tctttttgcctgtttgccttccactagactgtgtttcttgaaggaatgcccataattccagtgcctgcacatacttgaatgaatgaatgaatgaatgaatgaatgaatgaatgaatccatcactagacagggctttcctctgaaagctccagccagctttattaaagtcttctgttacggcagttgaggggagagtttctctccagcaaggccaagatctccagtgtctcccacttccaacctgaagccacctacccagaggaaagaagtctctggctcagggacaatccaccacagagcagtcagaggtgaagacaattgtcccagcatcacttactataagaggggaagggtcagccagctgtggccattggagcaggctttccctgggtattggaacagccagccaggggcactgagtgaggcctatctgggcactgatgccatgaagccaactgatgagtcaacttcctcatcgcaccctggagaagcagctcctgtggatcacaggctgagaagagmcccaggacctggccaccagtcctgacagaggcttttccaagtcagctgcctggtcttaaagaatgacag

SEQ ID NO: 295212 - DNA, 551 bp, Homo sapiens
ggtataagagtctgaaacaaccagaggccaagtcagtgtacaagagtcacaccatgtgtgggctactgagctagccaataggaaaagggaaatatttcatttacttgtttcacaggacccatgagataaagattaaagcatccactcaagagatgtccagctattcctgacactgaatccagtgcaagatttctcccaagggagctcttacagagctctgtgcgtgtgccaccatgaactcgtcctcaagactttgtacytaagaaatccaaagacgagtttcatgggacagtgtcctagagcatccttccatgtgagcagtatgccaacacacaatccaaccagtgcaaccttccagaggggtgagctgctggggtccagactcggcctctgtggtctaggtcagcccaagggaccccttctctttggggtcatgcccacctcaacttgaaacactgtgaggtctatggaccctctctccagaacctggaccaccacaaacatggtacttgcgaacaatccctagaatccctgggccccacagggcagaa

SEQ ID NO: 295213 - DNA, 551 bp, Homo sapiens
ggtataagagtctgaaacaaccagaggccaagtcagtgtacaagagtcacaccatgtgtgggctactgagctagccaataggaaaagggaaatatttcatttacttgtttcacaggacccatgagataaagattaaagcatccactcaagagatgtccagctattcctgacactgaatccagtgcaagatttctcccaagggagctcttacagagctctgtgcgtgtgccaccatgaactcgtcctcaagactttgtacctaagaaatccaaagacgagtttcatgggacagtgtcytagagcatccttccatgtgagcagtatgccaacacacaatccaaccagtgcaaccttccagaggggtgagctgctggggtccagactcggcctctgtggtctaggtcagcccaagggaccccttctctttggggtcatgcccacctcaacttgaaacactgtgaggtctatggaccctctctccagaacctggaccaccacaaacatggtacttgcgaacaatccctagaatccctgggccccacagggcagaa

SEQ ID NO: 295214 - DNA, 551 bp, Homo sapiens
ggtataagagtctgaaacaaccagaggccaagtcagtgtacaagagtcacaccatgtgtgggctactgagctagccaataggaaaagggaaatatttcatttacttgtttcacaggacccatgagataaagattaaagcatccactcaagagatgtccagctattcctgacactgaatccagtgcaagatttctcccaagggagctcttacagagctctgtgcgtgtgccaccatgaactcgtcctcaagactttgtacctaagaaatccaaagacgagtttcatgggacagtgtcctagagcatccttccatgtgrgcagtatgccaacacacaatccaaccagtgcaaccttccagaggggtgagctgctggggtccagactcggcctctgtggtctaggtcagcccaagggaccccttctctttggggtcatgcccacctcaacttgaaacactgtgaggtctatggaccctctctccagaacctggaccaccacaaacatggtacttgcgaacaatccctagaatccctgggccccacagggcagaa

SEQ ID NO: 295215 - DNA, 571 bp, Homo sapiens
ctctggctgatcaagaggaagacagatgcttctccagccagatgaaccagcctctctaggatcagggacagtggcctgccccaccccaacccctttactctgtcacagagggccaccatctctgcctggacctcttctgctcctctccatctgcctcaacccctaggggctccagggctgacccctscctttagcgggaaggctgaggcagggagctgcctgtccatctggatttactcccacaaggctcctagacaggtagggtctgaacaaaacccagggctgcctagcactgtgccaggccctcaggaacctgaaacaaatgctccgtagaaaaaaatggctggctgcttcccagcggggggtgtgccggggccgctggggagaggctgtttcaaagcaggaggccagcccagcaagatgtcaggaccacctgctgggacctagggtaaggatctaggtgagcatgcttggggagtttcttccaatgtcctgacttaattcctaggaatgatgctttggaacacttactatggcaccattctaagtgtgtctcatatattactgcatt

SEQ ID NO: 295216 - DNA, 571 bp, Homo sapiens
ctctggctgatcaagaggaagacagatgcttctccagccagatgaaccagcctctctaggatcagggacagtggcctgccccaccccaacccctttactctgtcacagagggccaccatctctgcctggacctcttctgctcctctccatctgcctcaacccctaggggctccagggctgacccctgcctttagcgggaaggctgaggcaggragctgcctgtccatctggatttactcccacaaggctcctagacaggtagggtctgaacaaaacccagggctgcctagcactgtgccaggccctcaggaacctgaaacaaatgctccgtagaaaaaaatggctggctgcttcccagcggggggtgtgccggggccgctggggagaggctgtttcaaagcaggaggccagcccagcaagatgtcaggaccacctgctgggacctagggtaaggatctaggtgagcatgcttggggagtttcttccaatgtcctgacttaattcctaggaatgatgctttggaacacttactatggcaccattctaagtgtgtctcatatattactgcatt

SEQ ID NO: 295217 - DNA, 327 bp, Homo sapiens
ccatctctgcctggacctcttctgctcctctccatctgcctcaacccctaggggctccagggctgacccctgcctttagcgggaaggctgaggcagggagctgcctgtccatctggatttactcccacaaggctcctagacaggtagggtctgaacaaaacccagggctgcctagcactgygccaggccctcaggaacctgaaacaaatgctccgtagaaaaaaatggctggctgcttcccagcggggggtgtgccggggccgctggggagaggctgtttcaaagcaggaggccagcccagcaagatgtcaggaccacctgctggga

SEQ ID NO: 295218 - DNA, 653 bp, Homo sapiens
ctaatcagcaaaatgctggcaatggtgaagacccgaatatcacagattcatgttttgcagcttggctttgcccttggccaaaagggatcactggggaagagaaaagcagcccctgccagggactgacttggcactctcagttagtccttagcgttctccaagtcacaaaaatgaccagacatcctctgatcctggctaatacaagtgactgcagcttctttaccaattatggccttcgcctcgctccattcctcctgccttccggataaaacatattaagacccatttcttcccttttcccaacagcatgcaattcacagcaaaggcctgcttccttgagtccttgagtcccaaaatcacctaaccaaactcaaatcctataagaggtcctttctaacacccttttgccaacactctccatgttcctcatgaggtgcgtttaccctttgttgcaatggccaataaaccaactttgttcagctcaagtgtgtttctggtggcctttggctggagggytaaatgcaatgacagatacagaagcaccttgacaaaaggcagacgttggagtgtgctatgagacgtggctctgttcaagtgggaaattatattaatatagagaggaattattaggctagcactgaaagtgaaaaagg

SEQ ID NO: 295219 - DNA, 553 bp, Homo sapiens
cctgctagctggcacgccttacaaatgactgtggcagccagcctgccagaagggaaatactcccccatcccatgctccaaccccctaccccacctcactcccaggggtggcaggagactaagagtgagccaggagggctacccactcactaagcaggaaaatgttaccaccaaaaccatgcaggagcacagagakgagagtccatttaaaaagaaagaaacccatgatgatgacaagaaaaatagttaatacacttgagagtataatgccctccacagcatcaaaagaacatattcagaggaattagacaaaaatctcccctcttggcaaagagataaacaccacaattcggcaaatacaggaggatacacggggacttccctagccagactcatttcctgagccctctctatctaacgtttcttctgagtcttcgtgttcaccctatcaaacaccataccaatctcagactgaagggcctttgcatttcattataaaatgaccatgaagcagaagtagctcttgtttcaaaaatgtcttgtttgacaaatga

SEQ ID NO: 295220 - DNA, 561 bp, Homo sapiens
tcagctgagggaattggggaaggcttcatgggggaggtaatacctgagatgggccgtgaaggaagggggataagaaatagaatctggttttgtggaactggaatgaaagtggcttttatgcagtatgaacagccatttaaagcatatagaatggaaatragacccatccacctgaagggaagaggcaggtgccatggctgggcatagctggaccttggataacctcatgacaaccactttctatgtctctaccatgtcccttcctacagagcccttcctttactcccagctcttcctcccacctgcctcccctctggccccacaggaagcgtggcttggtcatcagccaaagccctgtggtctggccatagtggggaggggccaaaggccacagcagagaggaaggcaagatgctttcctggccgcagagaagaggaggcaatggcatgactggcaagctctttaatccagggctgctcactccccagaagactgcttcctccagctcccttctggattaataagaaaccagatgggcccagctggttggtgagagtcatg

SEQ ID NO: 295221 - DNA, 570 bp, Homo sapiens
atcactcatcagttttatttcaaaggtacctagacaaattcagataagataatttttaaaactcttgaaatatgtgacttctgttgcttctagcccctttttaatgttagtaaaatgaatttttatgtgaagagaatgctagttaaaatttaaaggagaaatggtctctgaaagaaactgtcttgtttaaaatgaaatattcatacactaatacacaactatttaatacacgaaatacagaaaatattccttgacaacaaagttagtaacccaagtttgatgaaatattcagtcataattgaacataaaacagacataaaaataaaattttacatagtaatataattggatttaaattataattagaaatggctaaatatatctgttattataatttaagtgaataagatgtatcgggtctacacattaaaattgaagtgagcactttaaaaaatgcccagttttcctctacrtatggagttttaactttatcctagtagtagcttttgaaataagagattatatatttatgttaaaaatgtcagagcagtaagagacacaaacctaaac

SEQ ID NO: 295222 - DNA, 596 bp, Homo sapiens
ataaaataatgtcacactttcaatccctcagtcttctcaagctttacataagcgatcaacgctcttcctcccctataaaggaaatgacttctatgttccagtaattatgggacactgatttgctgagcatttgaatcataacaatgggtttgatcactgtactctgggagtatctatctaaagtacactaaggtatgaagcactcttcagttgaatgccttagacagatctcgtctaaattgttcccctcccctatactcccttctcatgcccaatattcatcctgactggaagatttgaattcatcaaatcttttaaaaagtggctcaataaagctratcaggtctcaataaatctcaaactgtgaaatataaaaacaaatctcaccaaggaaaacattcaaatactaccaaacaagaataaaattcggtgtgaataactaatgcgttcaattcatttctttcatgcctttaagtgggtaggattagcataaagagtcttctcagagtgtaggcaacaataaaaactgcaataactcatactttgcagtgactttcatttttgaatctggatattttttaattttcataatagcc

SEQ ID NO: 295223 - DNA, 596 bp, Homo sapiens
ataaaataatgtcacactttcaatccctcagtcttctcaagctttacataagcgatcaacgctcttcctcccctataaaggaaatgacttctatgttccagtaattatgggacactgatttgctgagcatttgaatcataacaatgggtttgatcactgtactctgggagtatctatctaaagtacactaaggtatgaagcactcttcagttgaatgccttagacagatctcgtctaaattgttcccctcccctatactcccttctcatgcccaatattcatcctgactggaagatttgaattcatcaaatcttttaaaaagtggctcaataaagctgatcaggtctcaataaatctcaaactgtgaaatataaaaacaaatctcaccaaggaaaacattcaaatactaccaaacaagaataaaattyggtgtgaataactaatgcgttcaattcatttctttcatgcctttaagtgggtaggattagcataaagagtcttctcagagtgtaggcaacaataaaaactgcaataactcatactttgcagtgactttcatttttgaatctggatattttttaattttcataatagcc

SEQ ID NO: 295224 - DNA, 1175 bp, Homo sapiens
aattaattattattattttgaaaacatttattgatttggaagatttccaggttgataaaataatctggaaataatattaaatacacctcttcatttccaatgtcaatttttttcttgaacacttcaagaacaattttaaacaataatggtatattccatactagagccttctgaaaaattactggtggtaaaaakaattattatattgttttattgtaacaataacagatttggtgatttctcaccaaataagcaaaatgctgatggcgcttgtatgttacctccaaaagcatactattgaacaaaggatgcagctatataaaaagatatagatgtagatgtgttaatatagggttacatagagatatactgcctcaaaatgttaaattggccatattcttcttaactattactgtaataacatctatttgcctatgtaatctttattcttcttaaaattacctgagtttagatattgtctctcctgttgtttaaaatttatcatcacactccccaccatcttggtctagtcctctcagttttttcccatctgattagctccttcatccaatcacttcaaaaactggatgactatcaaatctcttcttggtccagagttggcwcatattatgctcatcctcaggaaaaacaccaataaaatccttgtgaaataattctgtattttaawctaatagatggctttattgtcctttattcagatatcatttttattttcataaaaaaaccacaaccatcaagtcttgtcatcaacatgtagtttctgcttttccttgtgcttgcctgaaggcttttctaatagctgcatactagaaagagtgttttcaactaagaaagacagtacagaaaagacagcattaaggttggcaggttgtttgggtgtgttattgatatcttaattttgtttttattttctgatgagaatgggatgaaatattcttactttcttcataatacaacttaatgataaatataatgcatttggaaagtaaaatacaacctttaaaatagtatttcattttcactctacctcagaatttaggaaaataattttaacctgtatctttctttttaatggccatgtaaatattgcgtaagtcaatgaaaaactattctcctattttatctggatctgataggaaaatgagacagtcaac

SEQ ID NO: 295225 - DNA, 605 bp, Homo sapiens
tacagtaaatagaagaaatttgttcaataaaacatacctgaaaagtgacagaaatggagctagagtcttatgactcctagtattagtttgtctctattgaaatgctgaaattatatatgtataatatatatattactaaagacagggctcatgaatcatttgctcaatagcaggaatccattgtgtttctctttttggccaggtatcttgcaaggcacagggaacacaacgttaacgagtaggtttgccttcaaaggatggacagtctgataaatactctaatttagaagtcacataacagtattatgcagtcttctcttttcccctacaatgttattgattgaccaaaaagaagstcatggttcaacttgttttatccgcagatgaagtggaggttctcattgaaagagaactcttccaagaactggacacctggcttccacttttgccttgttactaacgttatgtgtaacattgagagtatcatttaacctttttagtccttagtttgttcatttatgaaatagttaaaataaaacttgacctacctacctcacaggatcaatgtgaggaagaaaaatatgatttcataggtaaaatcaaaa

SEQ ID NO: 295226 - DNA, 600 bp, Homo sapiens
ggtctcgaactcctggcctcaaacaatcctcctaccttagcctcccaaagtgctgggattataggtgtaagccactgcgcctggcccaaaacctttttcttaatgaaaattataaatcttacagagtttttaatcctgtcttgaaagacaatataatttttaaaagagatgtacctgatctgtttataagactgttttgacatatattagattatctcaagctgtccctcatgtstctcagtctttcttgcatattccccgatattacctccacttcttgttgtatcatttcttccgttctcgtcaacttcaacaattctttcttctattgtgtctaatctgctgttggatggatttttaattacaacattatttttcatttaatgaagtgtcatttagctcttttcctaatcctcatggcaatttttcatagtatacaattcctaagcatcattttgattcatatatatgtgtgcatacacatgcacacacacaaaacggttttatattccagaattatcattccaaaatctaagaacatggagagtctaattctgttttctttgacttcttcttggttgtattgtcttattcataatg

SEQ ID NO: 295227 - DNA, 600 bp, Homo sapiens
atatgcaaatgaacagaggcatgagtaagttccaataaaactttatttacaaacatcaagcagggggttgcattcgtcaatgtgctctagtttgctaacacttgaaaataattaatttaaattagtattgtactgacagaataacagaaaatagattaagagagaaagtccagaagtatattttagtatatataaaagtaaagtaagtggcaaggktcatatttcaatttagtgagaaaagcatgatgagtttcatcatttactaatgctaacatacttaatagccatacagacaaaatctaatttaaatcctttcatcacattatttgtaaaaatatacaaagattgattatgcaaaataaagcaatatatcatcttagaaacatgatattatcatattcattcagtgacttgggaagaattcttaaccaaaacataaaacttaagaggaaaaagacagatttgacagtagcaggtagtacccaaaatttaataaataagacagataatccaatagtaatgtaggaaaaggataagcatggcagagaatgcctctgacctcctaatgtatattcttgccttccaccttagtaagataaa

SEQ ID NO: 295228 - DNA, 600 bp, Homo sapiens
atatgcaaatgaacagaggcatgagtaagttccaataaaactttatttacaaacatcaagcagggggttgcattcgtcaatgtgctctagtttgctaacacttgaaaataattaatttaaattagtattgtactgacagaataacagaaaatagattaagagagaaagtccagaagtatattttagtatatataaaagtaaagtaagtggcaaggttcatatttcaatttagtgagaaaagcatgatgagtttcatcatttactaatgctaacatacttaatagccatacagacaaaatctaatttaaatcctttcatcacattatttgtaaaaatatacaaagattgattatgcaaaataaagcaatatatcatcttagaaacaygatattatcatattcattcagtgacttgggaagaattcttaaccaaaacataaaacttaagaggaaaaagacagatttgacagtagcaggtagtacccaaaatttaataaataagacagataatccaatagtaatgtaggaaaaggataagcatggcagagaatgcctctgacctcctaatgtatattcttgccttccaccttagtaagataaa

SEQ ID NO: 295229 - DNA, 623 bp, Homo sapiens
tctaaaaatattttaataactcactatatctatgatataaaataaaattggatgaatacattatcaactacataaaatgtaaacacaccattatttcatttaaaatacaaagacattcttttaaaaactagtatatgctatttgtaakagtcatatcttaagtaggaggacataggaatgttgaaaataaatagatggaaacaagaaactctcctatcaaaaaaaaaaaaagagcagtgaagctatattcatattagttaatacagtttaatacaaaactcttaataaaaaggtagacttaatatggacaagtcaatccacatgaaagatattaaaattaacaaaatctctgttttaaataagacagtctcaagatatttaatcaaaaattgaccaaactcgaagaaatagacaaatccatgattatgatggcatattttaacacatgtctaacagtaattataaagtactgaaacaaaattattaaactaacttccacttctgatttgaataatttttaaaagattattgatttgtaaagcaaacatagtaacaatgtattatttttgaaacaaaagaaattaaaaaattaaaaagcaaaatttaatttcttcaaaatatta

SEQ ID NO: 295230 - DNA, 536 bp, Homo sapiens
acatgtgcaggtttgtcatatgagtatatcgtgtgttgctgaggtttgggatatgaatgatcctgtcaagcagctagtgagtattgtactcaatcattagtttttccctcatccatccctttcattctagtagtcccccgtgtctattattgccaacttaatrtccatgagtacctaatgtttagctcccaattgcaagtagaacatgtaatttacttaggataatggtatctagctccattcatgttgccacaaaagacatgatttcatatttatggctgcatagtattccatgatgtatatgtaccacattttctttatccaatccactgttgatgagcacctaggttgattccatgtctttgctattgttagtagaacagcaatgaacataagagtaaatgtgtcttttcagcagaatgatgtatttccctttggatatatacccagtaatgcgattgctaggttagaaaattaatttgagatcttcctaactttttgatataggtgtttagggttataaactttcctcttaa

SEQ ID NO: 295231 - DNA, 633 bp, Homo sapiens
ggttcatatatttttttctattttttttgactttttaatggccatcacagaaatctatcactctgaaacagttttctctgttacaggtggttcaaaagtataaagcacattattcattatagttaaactgctgaactgtgtaaacatacatatttactaaaacgactaaaatgggtaatattttaatagatcattgatagatatttagtaaaaacactaaatcaacataatgctcgccagagcaatataggactatagtaagagtgtagacaaaaggctgtaattgtatktatatattaacattttatgtaaaattatttactttcagtttctttaccagttattttttgtttcttacccttaatatgaattttgttgcaaaacgaggtcataacatcttggtgttttatgaaacttgtgcactatgcaatttagtcagtgcttatacataggtgagacacttccatttgaagatggaatcaccattgaccttttacagtgacaagactttttactaatcatttatttgagggtaatgacttcacatatgtgtggaagaatataatcttaatgttggaaactaatttaaaagtcatttgtatgttaaaacagtgaactatttactggtaacta

SEQ ID NO: 295232 - DNA, 313 bp, Homo sapiens
taatctgtacatgtttgccaaaattctgtttctggtattttaacatagcaattgtttttctgttcataaataaaratgaaaatgtttattgcaaattatcagttatttattatctcattacagatgcaaataaaaccatagacaaaaatagactgcttttaaatggctgtcttctaattttcaccttgtattacaaagatgatatgaactactaaactatattatttaaaaataaataaaggtccttatcatttatcacccctacagtaaatattgaacaaaacaaccatgtctctattcctttctagtcttt

SEQ ID NO: 295233 - DNA, 597 bp, Homo sapiens
attatgcagtcttgcatcagatagatctgtatggagttccattcttgctacttccaccattctaccctaaaattgtcacctatagcctgcactatggaaatcatcccctaactgatttctctgcttcaactttagccatcatyagccagaaaaatatttgaaaaaatataaatttgatcatgtaatccattgttgatgttttcccttctttatctccttcagatatttgagctaaatttacatgataaggagttagctaggcaaagaagaggaattaggatattccaaattggtggtgcagatgcctcacatatccaaaaggcaagtttgcttgaagatttgcaagtataattagagagttgaagtcattttttaaagtatatgttttagcaggtgattctggaatgatggcatagtgagaagcaccagaaatctgtcttctcatccagacaacaaatttactttcagaatatgtctgatataactgtactgaaactctgaagcctattgaagtcttgaaacttctgaaagaaggattggacagtaaattgtagttaattttgatcttccacttcagctacccatcccctgcaccca

SEQ ID NO: 295234 - DNA, 1090 bp, Homo sapiens
attatgcagtcttgcatcagatagatctgtatggagttccattcttgctacttccaccattctaccctaaaattgtcacctatagcctgcactatggaaatcatcccctaactgatttctctgcttcaactttagccatcatcagccagaaaaatatttgaaaaaatataaatttgatcatgtaatccattgttgatgttttcccttctttatctccttcagatatttgagctaaatttacatgataaggagttagctaggcaaagaagaggaattaggatattccaaattggyggtgcagatgcctcacatatccaaaaggcaagtttgcttgaagatttgcaagtataattagagagttgaagtcattttttaaagtatatgttttagcaggtgattctggaatgatggcatagtgagaagcaccagaaatctgtcttctcatccagacaacaaatttactttcagaatatgtctgatataactgtactgaaactctgaagcctattgaagtcttgaaacttctgaaagaaggattggacagtaaattgtagttaattttgatcttccacttcagctacccatcccctgcacccawcaatgataatgtactgtataattcagaataactaacagagtaaatttcaaatgtatctccacaaaaaaaatcaagtaaatgagatgatgtatatgttcatagcttttatttaaccactccacattgtacacatatgtaaaacattaaattaaactacataaatgtcaattaaaataataaaattggtatatttcatggtattaataagcaaaaaacatatacaaacatttcaatagctgcagaaaaawaattgccaaaatcaagactcaaacatgaaagaatctctcagcaactactatttatagaaaatccttaagtctggtaaagggcattgaagtggtctgcaactcataaagggctaacattaaaccaatggaggacactgaacgctttctccctaagatgtaaacaaagcgagcatttattctttctgtttttaatcaacagtatatggagtctaagcaagaataatgaagcaagaaaaagaaaagt

SEQ ID NO: 295235 - DNA, 1199 bp, Homo sapiens
cccaggaattgcagtccttgtggcctagactgcctttcaagtttatttagaacccaagagtactttagtccacagtggtggggcttgccagaactcaggttccaacccctgggattgatgattcccctctggctagagagctggtgtaaatactcactccatggacaccagctgagttctgcctggtgttgcatyctgctgtgacggagaagcactgagttccaatgcaaagtctcataatcaccatactctacctacgccaaggtcacagattctttctctgtgccgtgagactgttgcaagaagatgggggaggtgtgtgtaggtgattcaagactgtctttcttaccctttccaatgactctttcagtaatatgaagttaaaacctggtaccatgactgctcatatgatttttggtttttagaaggtgctttcttgtgtggatagtagctcaatttagtgttcttacaggggtcagggatgatttttggaagcttctattcagacatcttgctctgcctcgctttcctcttttaaatttattgagactagtttatccacctaagatgttatatatactgggaattgttaatatgcactttagaagaacttatattctttcattgttgcgtggcatgttctataaatgtctgttaggwaattagtaattctgaaaaagttgtacttgaattgcagcttacgtgacatctcaaagaaaagttaattattggaaaagtgataaatcaaagaaaaaggactttgaatctctataggcagaaaattgtggaaaagtaaataaatcgtagataaaggctagttagtaaagcatgttaatgtagattcctttggtgctatctccaggtaaataattgtttatagttgtcttcagtggttattctttgttctccctggagagaggagatggaacatcttttttttttaaacataatttttwaaatttatatccctcttttatgtaaatagaggaaaggcagagagctttcctgcatctacttcttcccaattgcattcaactggaaacaatacttacgccatatctggcctcacacaattgggagtaaatatccagataaaactttaagaggaataaggacaaaaaaccagaaaagataagtaaatatcaatggaacaaggagaatgaatctgccatacatataattgaagtggcagaagaatt

SEQ ID NO: 295236 - DNA, 539 bp, Homo sapiens
aattagtaattctgaaaaagttgtacttgaattgcagcttacgtgacatctcaaagaaaagttaattattggaaaagtgataaatcaaagaaaaaggactttgaatctctataggcagaaaattgtggaaaagtaaataaatcgtagataaaggctagttagtaaagcatgttaatgtagattcctttggtgctatctccaggtaaataattgtttatagttgtcttcagtggttattctttgttctccctggagagaggagatggaacatcttttttttttaaacataattttttaaatttatatccctcttttatgtaaatagaggaaaggcagagagctttcctgcatctacttcttcccaattgcattcaactggaaacaatacttacgccatatctggcctcacacaattgggagtaaatatccagataaaactttaagaggaataaggacaaaaaaccagaaaagataagtaaatatcaatggaacaaggagaatgaatctgccatacatrtaattgaagtggcagaagaatt

SEQ ID NO: 295237 - DNA, 552 bp, Homo sapiens
aaaaggcagaaattatcaagcagaataaaatagcaagacctaacaatatgtccgctaaaagaaagacactttaaactcaaaaatgcaaacaatataaaatagtaaaagaatggaaaagctaccttattcaaacaccactccaaaaaaaagctagagtggctattttcatattatttgaaatagatttcagaagaatgagtattttcaggattgagatgtatttcatgattatcaatatgtcagtgtctcccagagaacatggtaatgctaaatgtacatttaacaattaaagaggctacagggccaggcaaggtggctcaagcctgtaatcccagcactttgggagaatgaggctgacagatcacctgagatcaggagttcgagaccagcctgactaacatggtgaaactctgtctctactaaaaatacaaaaattagccgggyatagtggtgcgtacctgtaatcccagctacttgggaggctgaggcaggagaatcatttgaacccaggaggcgaagcttacagttagccgagattgcaccattgcactc

SEQ ID NO: 295238 - DNA, 555 bp, Homo sapiens
tatagcacctttactcacaatagccagaaattagaaacagcttaaatatccaggagaatgaataaacaaattgtgctrtactaagcccatgaatactactcagcaatgtgaagaaaaaactaatgatacaagcaccaacttggttgaatctcatagacatgaggccaagtaaaaggagccagatgtacgaatctggaaaagttttccttttacatgacgttcttgaactggcaaaactaatcaatggtgatagaaatcagaaaagtggttgcctctgaaaggggctttgggaagggcaggaaggatctttattggggtaggggttacatgggtgtttatgtttgtcaaaattcattgacctgtattgacaagatctatacatttcatggtgtgacaattatacctcaatttaaaaatatcaaataaaaataaaatcacggatggattcaggcaactacttacctggtgtgaggctcacaggcagagctgtctatttgctttagcacagctgctaaggcagcctcagcctggcaagattccaaggcagagaagacc

SEQ ID NO: 295239 - DNA, 610 bp, Homo sapiens
aacttctcttggtatttctagtttcaaacagagtgcctggaacatagtatgtgataaatatttactgaataagtgtaatttttgagagtatcagattatataatttttagagctgaayaggaactgtaaatatttttctgtaactcattcttccatttcagtggttcccaactttgactttgtattggaaggtattggggaattttaaaaaatcctgaggccctcgttttacaaaattctgacataattattttggtgtgcagcctgggcttcaagattttaagcatcatatcttaggttgctgattccagtgtgcaactaaagtagaaaaactgctttattccctttttgcggatggggaagctgacttccagagaggtcgtgtgttctgcccatgttaggtggtgggtggaaatgaacaaagaactgaggcgtcctaacacctcttctaacacactttctatggtgctattcatcttgacttgagatggacagcgctctccactggggcactgaggaggagcccccagttcacaggcaccctggagcctgctcgccttccaattttaggacaaaagattagaagcagctatcatacttacccttataa

SEQ ID NO: 295240 - DNA, 599 bp, Homo sapiens
ttttggaaaaagatcttgcaaaagcttgaagaaagaatgaaaaagagatgagtgaaatgagagttctaaaaatgatgaaagaggaaaaactgamgggagaggtggagaaaaaggctcaggctgctgtgagacatgaaccaatatatgaattatagaatataggactgatttgacaaacctctgaaaatagacaaccggaaattctaactatacatctcatttcttataaaacttaagagatagttttctcaaataataggcactagaccaaacttcttgttcaagccatattatatgtctataagatatgtacatataaataaaattccatgtagatctgtatactgctgaattgtgaataattttaaaagtttgatttttttgagttatagtgtgaaagtaacttccccttagaagatatattcaaaagcgctagttttctttatacatacatatgttacagaaaatacccaatgctatagcaatactgaaatcagaaccaatatttccctacaagataaagaccaaattcctgtacagtatattcaaggcctgtatcatctccagactccacctttgtggaccagacttctctttat

SEQ ID NO: 295241 - DNA, 599 bp, Homo sapiens
ttttggaaaaagatcttgcaaaagcttgaagaaagaatgaaaaagagatgagtgaaatgagagttctaaaaatgatgaaagaggaaaaactgaakggagaggtggagaaaaaggctcaggctgctgtgagacatgaaccaatatatgaattatagaatataggactgatttgacaaacctctgaaaatagacaaccggaaattctaactatacatctcatttcttataaaacttaagagatagttttctcaaataataggcactagaccaaacttcttgttcaagccatattatatgtctataagatatgtacatataaataaaattccatgtagatctgtatactgctgaattgtgaataattttaaaagtttgatttttttgagttatagtgtgaaagtaacttccccttagaagatatattcaaaagcgctagttttctttatacatacatatgttacagaaaatacccaatgctatagcaatactgaaatcagaaccaatatttccctacaagataaagaccaaattcctgtacagtatattcaaggcctgtatcatctccagactccacctttgtggaccagacttctctttat

SEQ ID NO: 295242 - DNA, 580 bp, Homo sapiens
aggttgtgaaggttttctcttactttttttttctataccttaaattttttttttttaacatttaatttcataatccattttgagttaatcaaggttcaggtcraggtggtttaatttttgttttttgtttttgcctgtggatgtgctcagtcaacgttttttggaaaggaatcacatttttttttttaactttataatgtgactttcttttagtttaaaggttttttaaaaaaagtttaaccattggggttttatgatcacaacccttgttttgtttgcatttgcctgctatacctttgtctatggttttattttcaaccttaaaagatacttagttttagatgcatccatttacattatagagttgggttttgtctggtgttacagtgtgaaggtctttttcttttaccttagtgagtttagcccacttaatatttgttgatatgaaagaagttggtctgtcttgaaacaattttttttgcttttggtttttataattaaaaccttttactttgtggtacatttactttgggtcagttatttataggtcgtgttggtataaaggcatatcttcctgtgt

SEQ ID NO: 295243 - DNA, 580 bp, Homo sapiens
aggttgtgaaggttttctcttactttttttttctataccttaaattttttttttttaacatttaatttcataatccattttgagttaatcaaggttcaggtcgaggtggtttaatttttgttttttktttttgcctgtggatgtgctcagtcaacgttttttggaaaggaatcacatttttttttttaactttataatgtgactttcttttagtttaaaggttttttaaaaaaagtttaaccattggggttttatgatcacaacccttgttttgtttgcatttgcctgctatacctttgtctatggttttattttcaaccttaaaagatacttagttttagatgcatccatttacattatagagttgggttttgtctggtgttacagtgtgaaggtctttttcttttaccttagtgagtttagcccacttaatatttgttgatatgaaagaagttggtctgtcttgaaacaattttttttgcttttggtttttataattaaaaccttttactttgtggtacatttactttgggtcagttatttataggtcgtgttggtataaaggcatatcttcctgtgt

SEQ ID NO: 295244 - DNA, 468 bp, Homo sapiens
tataattctgcctcagtatgactatgtggggaaaaaacctctcctaaccctacatttcctttaagctaccaccaatttctctttcttgttcaaaacaaaaattttttaaaaaattrtttatagttgttatctcttcttttcctccacctattccttctcaacataatttgtttaggttttgtttccaccattttttactgcagtggctcatttcaaggtcactcattatctatgtcttgtcaaagccagtaatcagctctcttttctcatacagcttgatctcttaatagcatttgaattaattcagttattcactctttttctgaaaactttttaagcttctttgacaacacttcactggtgatttctttttagttttatttgctttacctcttctactagaattctgcctttggctttcttttttttttgataacttgtttgggtctgtgctgtctgatagaacct

SEQ ID NO: 295245 - DNA, 468 bp, Homo sapiens
tataattctgcctcagtatgactatgtggggaaaaaacctctcctaaccctacatttcctttaagctaccaccaatttctctttcttgttcaaaacaaaaattttttaaaaaattgtttrtagttgttatctcttcttttcctccacctattccttctcaacataatttgtttaggttttgtttccaccattttttactgcagtggctcatttcaaggtcactcattatctatgtcttgtcaaagccagtaatcagctctcttttctcatacagcttgatctcttaatagcatttgaattaattcagttattcactctttttctgaaaactttttaagcttctttgacaacacttcactggtgatttctttttagttttatttgctttacctcttctactagaattctgcctttggctttcttttttttttgataacttgtttgggtctgtgctgtctgatagaacct

SEQ ID NO: 295246 - DNA, 537 bp, Homo sapiens
ccgctaagctgccccagaaggcttcccttcaaagagaggtgtgtgggtgacactgcagttccataatggggcacccacggaggtagatctgcatttgtgtaggtaggaaggaccctagtccgggttcctgagcaattctgctcctcttgggcaggcagaaggctattcgggtgactgcagtccgggcggaagaggcggtcaggggtgaggtggcctatcccccaaccccgacctcattttagggtctctcccaggcaggtctttcccctctttggaygggtcagctctgtggagtgctggccgagtggccacttcgaactcgtgcacttctgctttctcgggttcggccctggctttcatgcccgggagctccgcagcctggagatgcacaccccgacaccctcctcccctaatttcgcacccgaggagggacggccaggcgagagggccctcagggttggcccagcctttctgcgatggcagcgaggggtctcttcggagcagccgagacgggtgtaacgccgtgggcgggagaag

SEQ ID NO: 295247 - DNA, 546 bp, Homo sapiens
ggatgtcaaggtggggttcgctagctgaaggcatgttgggggctaccctgaacccacagacgtgggacctggccccggactttccgtcttcctcagcctccgggtcgcgtcagttgctcggcgagggtctgagaagtggaggagggacacggcctcsgcagccacctaggcgtggccggagtggagcgcggggtcggggcgggccccaccgcgaacgaggccagcagcgccttcagtgttgtcctcgcggtggacgcactgccagtccgcccagcaggcctcgtttccgggaacaggggcaggcggctagcaaagcttcccccgggggccaccaggaagcacccggagatttcctgaaaaggagtgcgcctttaaagtgtcggcttcccagacgttgctctggggagagcgaggaaggggagggacacaccttttcaaagggctgggaccctggagggacttttctacaactcgccgccggtgtttacgggaggctggtttctcctgggccggcgtaggtccacacagccccagagaccaccactg

SEQ ID NO: 295248 - DNA, 521 bp, Homo sapiens
gtgcataaatgtatgcctttgaacttccaaaatgtcaaggtcatcacctttaacctttctgaataattaggcgccttaagttcttcttgattttcagctgccacccactctcacacatacatgctyacacatatagagagccacacacacatttatgaccacacaaaatcataccaggagctcaccataaatctaagaaaattcctaatttcaggatcaataaccttaatttccctgcaaacgtttgtgtaatgcaatagcagtcaacttctttttaaaaatactgattagattaaaatgccttctagctgctttcactacagctaggaaaggctgagaattctggcggggggtcttaaatagtggtcccctttgctttaatgaagaactacagttttaaaatcaagcctttgaaagaggaagttctgtgcagccttacaccttcattaaatttgaaagcaatttgccaccctgtgaaataaattattgcactttctacaataaggaacaaaaggaaatat

SEQ ID NO: 295249 - DNA, 528 bp, Homo sapiens
cttaaaactgttttttttctttctgtttccatctattttttaaaactgcatctaaacgtagcaagcttgtgtgcccaccacccaaggcaagccgaacccgagataccattttccgtttgcaggggcctggagatccacacgagggcgcgctcacgttccagaagccgcgtttgaccaagaggccgcggtaccttgtctgtccaacactggattctaataggcgacctcaaccccttagaaacaggcggcagctaaggtgtttgctagtttatttgttctaagcagccatgaggtgtgagaagttgtatagagacagaaaacggagcaactagattcacgaaacagcctaatctttgtctctttaaagacaaagctgttgcaaaagaataccttggtataaccagatggtgtggagcagagttttaaaagataaatgtatgcattttgaaagataccatagccactgctrgttaattaaattagggaaaatcagttttcttggtttcagtgtggagagccttgtctagg

SEQ ID NO: 295250 - DNA, 475 bp, Homo sapiens
cagcagcagcaacttgacccaagtaagtgcaaaagaaattgccccctgatttattgctgaaacctgtaaggctcgaatgtgcaaaactgatagttttactaacctataaaaacgtctagaygcctacccaagcctaggcgaacaacatgcatccataaaaagagcttcccataaccacctaccctgggcgctcagttagtacggtaaacagagcgcgagcattaaggctttttatgataattccccacaagttgtgaaaagcgaccatccttggtgaaattaatttaacgacctctcttccccaccctgtggtctctccctgcctcccctcctctcctctctccccgtctccaaacctccctctttgtagacaaccccgccgcgaactggatccacgctcgctccacccggaaaaagcgctgtccctacaccaaataccagacgcttgagctggagaaagaattcctcttcaaca

SEQ ID NO: 295251 - DNA, 657 bp, Homo sapiens
tgtattgtttaggtacagattacagtccaatctataaaaatataaaaagaactatagataataaaactataaaaatataaaaagaggccaggtgcagtggctcacacctgtaatcccagcactttgggaggctgaggcaggtgggtcacctgaggtcaggagttcaagaacagcctgaccaacatggtgaaaccccgtctcaactaaaaatacaaaaattagccagccatggtggcaggcgcctgtaatcccagctactcgggaggctgaggcargagaatcgcttgaacccgggaggcagaggcttcagtgagccgagatcaagccactgcactccagcctaggtgacagggagactccatctcaaaaaataaataaataaataaataaataaataaataaataaataaataaaataaaaagaactgtagataataaaactgaattaataatgagcaggaacaacactaaccttcagaagtgatctattaggtaatgcaatgagttaagggtgctatgtcaaagcctttagaggtgcttaatctgtaataaactattgtatttttaacaaaatattgtctgactaatcaattataaaagtaagatccgcagtctgacaatggcatggtaaaaagaggtcagattttcgagtcagac

SEQ ID NO: 295252 - DNA, 442 bp, Homo sapiens
tgtcatgtgctgattggttttggccagtccctctttgaaccaatcaccatggcaaggagattaaattggaccaatcagggcccaatgcttgaggtgagggcaggtctataccagctcaaacccacctatgtaagggaagtctgtggtgaggggtagggagggaagcaatcccaaagtctactctgttgatccacttgcgtgcctagtcaactcattctttctttagttctcaccttagagatcacatctgcagaatggatttccctgatctcccaaactgagtcatgttctagctcatggcaccctatggtcttccytcataatacttactgcctttaaactacggtagtttccccttatccaggggggatgttttccaagaccttcagtggatgcctgaaccgggggatagtactgaaccctatatatactgttttttcct

SEQ ID NO: 295253 - DNA, 497 bp, Homo sapiens
tcacaccatgtgaaaaagtaactcagtggggctggaatctcttactatgtgctgtyggtaattttggatgcaggaaaactactttaccttttgtgttttgaagagtgcataactaatgtccttctaaaccaaagagacagagtaattggcctcaaagtatgtcctgccctttgacctctatgggggtaaatgaggggcattgaactaaatattactgtcatcttactcagaaatctaaatataacatgctcaaagagaaatttaacacctggtgaaacaaatggccaatggatgcttcatactcaaatggcagtggttggaggtttgaaggaggaggccccagtaaggtttattgaaccacagatggtatcctaattaatatttggaaagcgtatgcctgggcagtgaggctgagttcatattactctgaaaccttcatttcgtcttgaaaacagtgccacatagtgacctagctatgtggagtttgagatgaaatt

SEQ ID NO: 295254 - DNA, 1101 bp, Homo sapiens
tcacaccatgtgaaaaagtaactcagtggggctggaatctcttactatgtgctgtcggtaattttggatgcaggaaaactactttaccttttgtgttttgaagagtgcataactaatgtccttctaaaccaaagagacagagtaattggcctcaaartatgtcctgccctttgacctctatgggggtaaatgaggggcattgaactaaatattactgtcatcttactcagaaatctaaatataacatgctcaaagagaaatttaacacctggtgaaacaaatggccaatggatgcttcatactcaaatggcagtggttggaggtttgaaggaggaggccccagtaaggtttattgaaccacagatggtatcctaattaatatttggaaagcgtatgcctgggcagtgaggctgagttcatattactctgaaaccttcatttcgtcttgaaaacagtgccacatagtgacctagctatgtggagtttgagatgaaattwtgcatagctagtatgtggttgagccatattttgaatccagatctattttattgcattattttaatgtgtcttggagtgaggtgaaaatttaagaaaaacatttcccaagatttaaaattctgacacccaaacctgagtgtaaatagccattagtagaaaacattcaaataaggtggtcattattgttcattgaaaagcacatttaggtcgggtggggttgctcacgcctgtaatctcagcactttgggaggccaaggcaggtggatcacttgaggtcaggagttcaagaccagcctgggcaacatggggaaaccccgtctctactaawaacacaaaaattagtcgggagtggtggcatacacctgtaatcccagctacatgggaggctgaggcaggagaatcacttgaacccaggaggcggtggttgcagtgagttgagattgtgccactgcactccagcctgggcaacagactgagtgagactcagtctcaacaaaaagaaaaacacacttagatgcaccctgctcttaaggtcatgacaggtcctgttgtggtatcagatcagagtggaaagaaacactctgtacatgttcatgggagagt

SEQ ID NO: 295255 - DNA, 603 bp, Homo sapiens
tgcatagctagtatgtggttgagccatattttgaatccagatctattttattgcattattttaatgtgtcttggagtgaggtgaaaatttaagaaaaacatttcccaagatttaaaattctgacacccaaacctgagtgtaaatagccattagtagaaaacattcaaataaggtggtcattattgttcattgaaaagcacatttaggtcgggtggggttgctcacgcctgtaatctcagcactttgggaggccaaggcaggtggatcacttgaggtcaggagttcaagaccagcctgggcaacatggggaaaccccgtctctactaaaaacacaaaaattagtcgggagtggtggcatrcacctgtaatcccagctacatgggaggctgaggcaggagaatcacttgaacccaggaggcggtggttgcagtgagttgagattgtgccactgcactccagcctgggcaacagactgagtgagactcagtctcaacaaaaagaaaaacacacttagatgcaccctgctcttaaggtcatgacaggtcctgttgtggtatcagatcagagtggaaagaaacactctgtacatgttcatgggagagt

SEQ ID NO: 295256 - DNA, 579 bp, Homo sapiens
aaaatccaggcctcctaattattgtatggtgttcttcctaccacagcttgataatagaacaaagrcaaaaccttctagcagcataaaaagagtatttaaaaaatctgataaattaagggacgagtatttgtattataaaacattcatcccaatattatttaatggcaagctagaattatacatttaagtttttatataagttgtgaatttatacatgtaaatgacttcacaaataactaagggaacatttaatgtgtaaattagtatctatatattttaaataattgccttagaaattctagattgcttagtttttgatttataataatcgttggaacctttagatatgcactatttctgctaatagttattgcctgttaagtacttcgcatgtgctttggctgagttctttgtcttgattttgtcatttaatctttacaacaagcataagaggtaagtattcgcattatgagaaagctgaactgagtgatgtcatcaacttggaaaaggtagcatacacatctagtaaacagggtggagctaaaattatgaccatttggtcccagagtctttgctttg

SEQ ID NO: 295257 - DNA, 585 bp, Homo sapiens
attcatgaaaagctcatatgaactctaaaatgaatctctttatatgtaygtcctattggttctctttctctggagaacaatgactgatacagaccacaaaatcacagaataatctggataaataggcactagacaactcgatttacttaaatatagttgtcaggcaaatgacataattgaaatctattcaaatcctatcacttttaccatctaagtatctcttaaatacaaccaatttcatcagttccatggtcaagccaacctaagcttcccttcttttgagtagactagcagaatggcctcaaaactaatttactggcttccattttgcatgactgtacctctcctctttttccaaaggatccatgacactttcaaatgcaaatcatatcccaatcatatttcctacccactgctttgaagggcatgtgtggatttactcttaattatttttttcaggcttatctcacttcgatcttcattattgttgttgttaaactgtgcccatctctgttctaaccacacagacctcttgtagtctcttacacttttacaatgttttatatatggagtgattttttaaaa

SEQ ID NO: 295258 - DNA, 592 bp, Homo sapiens
gatacagaccacaaaatcacagaataatctggataaataggcactagacaactcgatttacttaaatatagttgtcaggcaaatgacataattgaaatctattcaaatcctatcacttttaccatctaagtatctcttaaatacaaccaatttcatcagttccatggtcaagccaacctaagcttcccttcttttgagtagactagcagaatggcctcaaaactaatttactggcttccattttgcatgactgtacctctcctctttttccaaaggatccatgacactttcaaatgcaaatcatatcccaatcatatttcctacccactgctttgaagggcatgtgtggatttactcttaattatttttttcaggcttatctcacttcgatcttcattattgttgttgttaaactgtgcccrtctctgttctaaccacacagacctcttgtagtctcttacacttttacaatgttttatatatggagtgattttttaaaaaatcttttttttttgtttgggggaacttttattcattctttagagaggctctagtgtcacttctggaaaacagtcccagaccttgaccaggt

SEQ ID NO: 295259 - DNA, 556 bp, Homo sapiens
aagttatataatttttgctgactcccagatttgtggatgtgaaagttgataagtatgtcatttgtatcttaatctaggtttgtggtaaaatgctgactagggcagaacaagagagctggatacaaaatccttctctcaggtccataactatgatttatctaaattctgtgtgtaaaatgaatatgcagttgggaatctatgtaaatgcaccatcttccagttcaatttctttatgatttctccagcaatgctaaaacagagttcatcaaactctattgggatttaataataaagataattttttaacatctaaaacataataaaaatattattttgtaaaaaaytaaaggtaccctggtttaattatagcttgataattctggggatagggttacatgacagcatcaggacctggttctcttactatcatagatctgctctctcctgggttgccctaactctcattcaggttgtttctacctggtgatcctcagcagctctaggatatatacaccaacttccatgtatagttcatgggtagcaaggaaaggaagta

SEQ ID NO: 295260 - DNA, 595 bp, Homo sapiens
ccttttgtaatgcacctgtcattttcctcaatattgcatgatctcccagaaaaccactggtatgcatcccatcaatatggattatttttcatctctaaaattttatataagtaaaaacagagttttcactttttggcctggcttctttcactgagcatatttcttttgaaattcatctatgctaagacatgtgtctatagcttgttcttactgctgagtattattttgatttaacagattayacaacactttgttaatccattcaatattgaaagactttgagttgcctccagtttctgcctattacaaataaagctgccacaaagattagtgtgtataggtgtttcttttggctaagtatctaggaatgcaatgactatttcacatgatatagccaggtttaaatttttacaaaaatgccaaactgttttgcaaagtagttgtactattttatatctccgcaagcagtgtattagaattccagttgctacaatttcatgtcagcacttggtaggaagagccttttaaattttatctgttttagaaggtggcgtagttatctcatagtgggtttattcgcactgatctaattacc

SEQ ID NO: 295261 - DNA, 595 bp, Homo sapiens
ccttttgtaatgcacctgtcattttcctcaatattgcatgatctcccagaaaaccactggtatgcatcccatcaatatggattatttttcatctctaaaattttatataagtaaaaacagagttttcactttttggcctggcttctttcactgagcatatttcttttgaaattcatctatgctaagacatgtgtctatagcttgttcttactgctgagtattattttgatttaacagattacacaacactttgttaatccattcaatattgaaagactttgagttgcctccagtttctgcctattacaaataaagctgccacaaagattagtgtgtataggtgtttcttttggctaagtatctaggaatgcaatgactatttcacatgatatagccaggtttaaatttttacaaaaatgccaaactgttttgcaaagtagttgtactattttatatctccgcaagcagtgtattagaattycagttgctacaatttcatgtcagcacttggtaggaagagccttttaaattttatctgttttagaaggtggcgtagttatctcatagtgggtttattcgcactgatctaattacc

SEQ ID NO: 295262 - DNA, 599 bp, Homo sapiens
attcttaggtaatttgtagatctccatttttggggtttagttactagaaaattattgtgggttttttttttagatgttattcttccttggttgttcatgtttcttattttcttgtgttgcctccttcacccttaatggagcagtcccctttcccagacattatagactattttsgacgggagatactttccactgtaagtggatgcaagggcaccaagtgtgtgaggtgtgacagttctggctccagtgagggcacagcaggtagtctctgtgaaactctatcagctaatgacaatgttcacaaagattacagaagtcctcactatccactgaggtggtgaggtctataggtatctttcatggaaagggctgctagggtcttcctgatcttattttatcccaccagggaaatgttgccaaggagatccctcttggtttgatggcacacttgcagcaccagtggcaacagtgtgttatatgcagtgccataaagtggcaaaagagccagtctgaaacacagacacatgtagaaagtccaagcctccagtgtccaggacagcaatggcaccaaggtctgaggtgcatatgcccccactgcc

SEQ ID NO: 295263 - DNA, 449 bp, Homo sapiens
tgatggaaaaatgggggaaaggtaggaaaacaactcaaataaaaagtgaaaagtagtcctttaaacatgagaaaaggtattcaaagtcacttataatcaaagaaactttaagacgkggttcatgtctgtattctcagcactttgggagactgaggaggccggatcccttgagcccaggagtcagagaccacactaagcaacatggcaaagccccatctctacaaaaaatactaaaaattagccgggcatggtggcgcagttctgtagtcccagctacctggtaggctacttagtagtagctacaatgagctgtgatcgcgtcacggcactccagcccagacaacaggagtgagaccctgtctcaagaaaaagaagaaaaaggaatgttaataaaaataacacttaaatataaatttggcacctattagataactgaaaattgtacaagt

SEQ ID NO: 295264 - DNA, 581 bp, Homo sapiens
caaggtgatcaatgacaggggttccgagataaggaaattccactggtttcttgagtttacagtgttcgtgttgtgagacagtagatcttagtgtttcagagcatggtctttccagtttccaaactgcatagcctctgtgcctaaacttcctcagaattaaaatggatataattatagtatctacctgctaagtttcttttgagagttaaatgacttaatacctgtaaaaaacacttmgaatagtgccagccacaaaataattattcaatatgtgttagtttgtattacttttgccaaaaagctcaaagaacagcagcaatcacatctatcctcaaccagcacaaccaaacaacccactgaaatcaagacagtgtcaggaggtttactggtcatttgtgctgtcaagtattaaacacccaaggccatctcaccagtttttaatctggtgcctaattttctcatatctatggtgatacacttaattgctatgaggaaaagacatgtagtccattttctgattatttaatttgtttctaatcaattcactatatattcattgattatgcaaagcactgagttag

SEQ ID NO: 295265 - DNA, 610 bp, Homo sapiens
ttgtaaatttctttatctttcactccaagtctttaataactgcctttttattcttccctgtcttttgtgtgtaattccccccatgtcatttctactccattttctaacatcatcaactgcactattaaatagaaacaccctctaggaaaagctaattgcttggggaatttctattccctaaagcctatgggaaacttttggaatctcctattcatctmaagactgaaatcctacctcaatcagagataattattaaactaagcaagaggatttcaatagtcttctcaaattgatcccaaagatgccacctgcaatgctgctgcctcattcagttttagccactttcaattaactgaacagcataaagcactcctgagggactagaagcaaacaaaatccaaattacaaacaagcagagatatctgaagcaattaagcccttggtggcttaactccagggtgcccagaactcttgttcaaggccaaggacccaattggagtaggtatattaagtcagttcaatcttgtgaagcagttaatatctattaaattcaggtggtatagacagttacgtttcataattgataagagaaaaaaaaaaaaacctaggg

SEQ ID NO: 295266 - DNA, 577 bp, Homo sapiens
acctgcaatgctgctgcctcattcagttttagccactttcaattaactgaacagcataaagcactcctgagggactagaagcaaacaaaatccaaattacaaacaagcagagatatctgaagcaattaagcccttggtggcttaactccagggtgcccagaactcttgttcaaggccaaggacccaattggagtaggtatattaagtcagttcaatcttgtgaagcagttaatatctattaaattcaggtggtatagacagttacgtttcataattgataagagaaaaaaaaaaaaacctagggcctsaatgatctgatttaacactctctacagcccagttctacaaggtaatgtacaaatttccacttcactttgcaaacgtggcctcatttacttcctagcttacttaatacaatactgtaaaactgcattttataacttctaaaaaccccatcaaataacctaggccaagcagttctttaaatgtgtgtgcccccagaagaactaagcagttcccttacatgtaatttggcaaatgtaaagaagagtcagtggagagaaggggataaaaagga

SEQ ID NO: 295267 - DNA, 1087 bp, Homo sapiens
accattccagtttacaaactgggcgtcatctgcaattcatagcaatgctggaccagattaaacctcagtgcattcgacgacttcagactgcatggtcgtgcataataaaatcagcatgagaagagttattactttctgacactataaccatcccttgtcatatatttattctaaagagtccctttactccttttgaatggtttatgtttgtgatatataaagtgattcttagaagagagtcactggaacatagtgagcactcaaaaaataaactctgctattactatatcctcctctggcacagctgagattgactgtcacacaacagaaacacagctttatgctacgagcttgtagtccatggcagagcttcattccatcccaggtagaagggagttgatcagtcaaatttaggagcacagaagttttactagrcattttccctggttatggagaaatataggaaacattttgataagaaaagcatacttgtaggaaccctctaaaattccatcttttgtctgaattcaaatgtgtggtaagaagaawataaaatagtccttaaagatgcttctctataagaaatacattttccatgcatacaaaatagcccactttaaatatgattcagtagtcatctgggcccctcagtttagcccaaactgacctcttagtattaagatgtattatgtgatgatagagctattcttttgattttgacagaaataataatttaaagcagcatttctcttcccgtcagtttaggtgagttgaactgctgtgctgagagggagaaactaggagaggtggcccacgagatttttattgatacgctttcctgacatcctcatacaaaaatatgcaaaacaacagaatcctacagcagttataacattgattggaaatattagaagtttcactgctctcagaagatttttgtaggggaaggtgagcaatatagcaccatatttgctataaaacttatttgttgccccaaattctttgacagcttaaaatttttttctcaaagttcagcagtagcaatctcwtgattgcttttgtttttccaacatgtcctcaaaaatta

SEQ ID NO: 295268 - DNA, 580 bp, Homo sapiens
gtccctgttacttactgggccaaaagagagaactccctatgcagtgccgcacagggagttagctcaggataggctaagagcaagctgaatctgtagtgggcagcttgtgtatggcaagagagatgaggttagctaggtttcatatacttgctgcrggttggataatttgaataatttctcaagcaccaggacataggggctgtctccagttgtctggtatccagccccaagatgattagcatgggtgcatagtagtcccagagtgtgagagacctgataaggaaagtggaggagatatgaaattaatcagctgctatatagagtgagtgagagaacaaacactatgttagtattacaatgatccaagatgttcaggatagaagaaaagagatacaaatataacattagtttaaatagggttaattaaaaaccataatctttaatttacattggaaagatatgtagagaaatatgatttattttccccttgtaaaaaattacatatttttagcactgtccactgaaagtaactaaaagcaacggcaactcagtagcaattagtacctttaggcccatatgg

SEQ ID NO: 295269 - DNA, 580 bp, Homo sapiens
gtccctgttacttactgggccaaaagagagaactccctatgcagtgccgcacagggagttagctcaggataggctaagagcaagctgaatctgtagtgggcagcttgtgtatggcaagagagatgaggttagctaggtttcatatacttgctgcaggttggataatttgaataatttctcaagcaccaggacataggggctgtctccagttgtctggtatccrgccccaagatgattagcatgggtgcatagtagtcccagagtgtgagagacctgataaggaaagtggaggagatatgaaattaatcagctgctatatagagtgagtgagagaacaaacactatgttagtattacaatgatccaagatgttcaggatagaagaaaagagatacaaatataacattagtttaaatagggttaattaaaaaccataatctttaatttacattggaaagatatgtagagaaatatgatttattttccccttgtaaaaaattacatatttttagcactgtccactgaaagtaactaaaagcaacggcaactcagtagcaattagtacctttaggcccatatgg

SEQ ID NO: 295270 - DNA, 528 bp, Homo sapiens
atgtcttttcattctcttaacattgcctgttaaaggacagatattaattttggttgagttcaatttatcaatttgttcttttatggattttgcttttgatgtcatacctatgtttaattaacagggtcacaaagattttcccctatgttctcttctacaagttatacagttttaagtttcacattattgaggatttatattttgcattaattttgtatatgtcatgaggtatggatagagattcatcattttatgtttggatagccaattgtttccacatgattttttgagaaaactattctttttatattgaatagcccttgtgcctttattgaaaacctgttgagcatataaatatgggtcttttggatttttacctacactgtaatttttattttgagacagggtcttgctctgctgccaggatggaatgcagtggcrtgatcactgctcactatagcctcaaattccaaagttcaagaaattctcctgcttcagcctcccaaataactaggactacagatgcta

SEQ ID NO: 295271 - DNA, 1114 bp, Homo sapiens
atgtcttttcattctcttaacattgcctgttaaaggacagatattaattttggttgagttcaatttatcaatttgttcttttatggattttgcttttgatgtcatacctatgtttaattaacagggtcacaaagattttcccctatgttctcttctacaagttatacagttttaagtttcacattattgaggatttatattttgcattaattttgtatatgtcatgaggtatggatagagattcatcattttatgtttggatagccaattgtttccacatgattttttgagaaaactattctttttatattgaatagcccttgtgcctttattgaaaacctgttgagcatataaatatgggtcttttggatttttacctacactgtaatttttattttgagacagggtcttgctctgctgccaggatggaatgcagtggcatgatcactgctcactatagccycaaattccaaagttcaagaaattctcctgcttcagcctcccaaataactaggactacagatgctawaacactaaaatttgataacaactctctgctataaawtatttacaattgctcggattatctgtgtagtaaaatatatgtattctcatttcatggggtggtccttcataaagttttcagttaaataattttcctagtattactgtatatagtacagtatttgttcagctccaaaatgcatgttttctttttacagtttaacattataatggtaatctccttcctgatttgatttttttttctgaaaagctgttatccacccagtggtttctattatagtcaatggcattttacaaggaaatatttatagtgagtcaggtccaggaagtagaacactatgtaagtctacatctaattacacctgatagaatgctgtcttaacaaaacatattaatatctgggagtgctatttattacagaaaacaatttaaatgaataagcaatattattttctaaaatcttgagtgttggtgtttaaaacaccaaattttaaactccttaagttcagtaattataatgttgcttgtcttactctgtgttttcttgcagtttcattgattcccatgacttcaactcccactataggta

SEQ ID NO: 295272 - DNA, 474 bp, Homo sapiens
gttgaataagccagaatgattagaaagctgctcatgtgatggcaaggtcatgcaaaataaacaactcttaggaaggaaattaaaagtatcaccaggtgttgctttcaaaaaccttgaatttttgtcatacttagagggatcatttctttataacccattattttctgtaataagagaacggggtgggggaattaaaaacagcagataattccatttatttttaatatttggtctagaaatccattacattattttcatcatattaagtttacacttctaattaatttttagcctcatattacttagtttaaaggagatacaaaattcacaaaatgttatctcttttttatttctcttagaaaagctcagctgaacacattctgcgtgaaaatgcactcrttttcatgttttaatttcctccaaatccatcactggagctgggaaactgtaatttccttgttactcatgagtgtg

SEQ ID NO: 295273 - DNA, 512 bp, Homo sapiens
agttgaaacgttgttgggagaatttaaatgaagaaagagactaacaaacttgattccattgatcagttgtagcatcatttaaagtatagccatgaactatcgtgtgccttctgatgtaatgcaagaagaatagcatcaaccacaaaattaacctaaagttcaccaagccttyaactatcagtttactggaaatttgatgatataattaaaagttacatgatactctcagcaatcagtcaaatccaaaatgtgggaaattctacaagacagattactctatttttaataacataaataagatgaaatttttaaaaggtcaagttattattgattaaaggaaataaaatagcaaaatagcccctgcttatctctcccccacagcaataataagttggcagccattcatagacaaaaaatgtttttgtgggaggtttggtattcaagtaagggcttgcacaaccccagtggagcatgactgaggagattcattttgagaggacaagaccatacct

SEQ ID NO: 295274 - DNA, 512 bp, Homo sapiens
agttgaaacgttgttgggagaatttaaatgaagaaagagactaacaaacttgattccattgatcagttgtagcatcatttaaagtatagccatgaactatcgtgtgccttctgatgtaatgcaagaagaatagcatcaaccacaaaattaacctaaagttcaccaagcctttaactatcagtttactggaaatttgatgatataattaaaagttacatgatactctcagcaatcagtcaaatccaaaatgtgggaaattctacaagacagattactctatttttaataacataaataagatgaaatttttaaaaggtcaagttattattgattaaaggaaataaaatagcaaaatagcccctgcttatctctcccccacagcaataataagttggcagccattcatagacaaaaaatgtttttgtgggagstttggtattcaagtaagggcttgcacaaccccagtggagcatgactgaggagattcattttgagaggacaagaccatacct

SEQ ID NO: 295275 - DNA, 615 bp, Homo sapiens
tattataatgacttctgaggagaggcaaccactaaatcaatactgcctatagctttattttttattataaacaaaattatactttgacaaaaaattgtgagaccaatttttaccacttggaagtctgtacattctacaagttattttgaggtgataaaaggattttgcaaatgctgtcaaatgaaatatgcatttccaactgctactgggatgaccaaatgtattcttatatgtaagatgtgccttgcagtcatttaaaayttttaattttctcagacaggaacttaatgatgcaaatggaaattttcattgaactcagctaaaaacaaattcagttgctgccattccttcagtacaaacagcaccagccatatagggtatctacatatcatgttatacaacattaagagtagccacatacaagcactcttgatggtacaatttttgcctaaaatgagtctgaggattatctaaaaaattatgctacacttttttccagagcttatttttctaatttccaacccagaaaattttcattaaaatcagaaaaaagcacatttgtattcataatctacctttgatatcagtaaccaatgttttctaatacaaatgtca

SEQ ID NO: 295276 - DNA, 592 bp, Homo sapiens
gtgtatctttttctggttttgatctcaaagtaatactggtctcatagaatgattctggaagtattccctcctctattttatagagtattttgaatagaattgctatcacttctttaaatgtttggtaaaattcagcaatgaagtcattgtgtcctgggctttttttttgcttgaagacaatttattacagcgttaatcttgttagttattactgatctgctcargttttggatttcttcacggttcaatattggtaggttgtgtgtgcctaaaaatttattcatttcttctagattttcccatttattggcatgtagttgctcatagtagccactaataatcctttgaatttatgtggtgtcagttgttatttctcctttttcatctcagattttatttatttgggttttctctctttttttcttagtctggctaaagatttgtcaattttgttaatctttttacaaaactgactttttgtttcattgactttttgtagttttttcatttcaatttcatttatctctgccctgatctttataatttattttattctactaattttgtgtttgattttctcttgcttttctag

SEQ ID NO: 295277 - DNA, 592 bp, Homo sapiens
gtgtatctttttctggttttgatctcaaagtaatactggtctcatagaatgattctggaagtattccctcctctattttatagagtattttgaatagaattgctatcacttctttaaatgtttggtaaaattcagcaatgaagtcattgtgtcctgggctttttttttgcttgaagacaatttattacagcgttaatcttgttagttattactgatctgctcaggttttggatttcttcacggttcaatattggtaggttgtgtgtgcctaaaaatttattcatttcttctagattttcccatttattggcatgtagttgctcatagtagccactaataatcctttgaatttatgtggtrtcagttgttatttctcctttttcatctcagattttatttatttgggttttctctctttttttcttagtctggctaaagatttgtcaattttgttaatctttttacaaaactgactttttgtttcattgactttttgtagttttttcatttcaatttcatttatctctgccctgatctttataatttattttattctactaattttgtgtttgattttctcttgcttttctag

SEQ ID NO: 295278 - DNA, 554 bp, Homo sapiens
agtcctttctactcttccttttcatttccttaagcaggatctatccccatggcctccactgccccaggcctatggcaagtactgcctaattaccgctgatattcattcaagagctaagggcttttcagtctttagtggtgaatgcttccagtcctgagtctctccttttagggtagtgggctcctctttagtttggggccacgtcttggaatcaggggacgcagaaatctggggccacttttatagggcattaatctcattcacaaggtcagacctaatcttaaagccttcaccttctaataccttcatattggtgattaggtttcaacatatgaatttgagggaatacaaacattcagaccatagcacttaataataaacttataatagcsactgaacctctgtttctcagttttttcacctgtaaaatgagaataatagttcctatagggtagttgtgaagattaaattaaataatatatgcaaaatgctcagaataactatgccttgcacagagtaatctataaatgttagctcttattatgggtgcttac

SEQ ID NO: 295279 - DNA, 527 bp, Homo sapiens
ggtatacatccccccaaaatggaagcaatgtctttgcctacccataattgtaggagcacaattcataataaccaagaggttaaggcaactcaaatctccactgatatatacatagattaaaaaatgtgagacatatatatatatatatatacacacacacacacacacacacacacacacacatacacatacaatggactattgtgcaatcttaaaaaggaagggaatcctgtcacatgctacaacgtgaataracttgaggatactatgctaagtgaaataattcacttatatgaaatatataatgtagtcaaattcatataaataggaagcatatcagtgatcagcaggaataggaagaaaggaacaagggaaatttttgtttaatggctatagggttttggttctacaagatgagaaaattctggagatatgtttcatatcaacttaatgatactgaaatgctactaacctgtaaacttaaaaatggttaaacacataaattttatgatatatgtttgtttacc

SEQ ID NO: 295280 - DNA, 639 bp, Homo sapiens
tgaccattgcacattatatacagatataaaaatatcatatgtaccacataaatatgtacaactgttatacatcaattttaaaaagaatgaatttgggctcctaccacacatgatgcacaaatattaactaataattaataataaatatacatgtaaatgctaaaaacataaaagtcttagaaaaagacagtagtaaactttgagaccttgggttaggcaatagtttcttagataaaacactaaaaacacaaataaaaaaatagattggttgaaattcattacaattaaaaactattttatctgtaaagaataccataaggaaagtgaaaacacacagcagagaaagtattcagaaatcatgtatctattaagtagctggtattcagaaaaaatacataagaaaattttgcaactccataataatgagacaaatgayacaactgacaaataggccaagcatctgaataaacatttccccaaataagacacataagtggtctataaacacacgggaatatgctttatcatttaggctaggctttatggaaatacaaaatagtatcacaattacttaccactttatatctactaggatgcccaaaattaaaagcacagacaataacaagtgttggtaaggat

SEQ ID NO: 295281 - DNA, 567 bp, Homo sapiens
attgttaataagcatctccatttattcaataagcatttactgagcacctgctatgtgccagacactactggagatacagcaatgagcaaaatgagcaaagcccccaatatcattccatgtggagagaggtgaggcaaccagaaaacaaacaagtacacacaaaaaaataagatggcttcaggtgatagtaagtgcaattaaaataaataaaatatgataatgaagtaaaaataattgggggataggaaaagggcagttgttttaaagggaggtcagggaagcctttctgtggaggcatatctagcagcaactcgtaataagaaggaaccagccatgcacagatcagaagatggaatgttctgagagatggcaagcacaaagaccctggggccagaataaagtcacgctgtttgaaaaacagaaattccagtggctggtaggtcatgaaggagattggcctagagaaggtaaagcctggaagtgggcggaagccagatcatgcaggagcaagtaraagaacatggcaagcagtttgagtgttgttctgagggctgaaagaaggaacct

SEQ ID NO: 295282 - DNA, 530 bp, Homo sapiens
acacacacacacactcctgtcctcccatctatgtgccatgacttatctttgcttctagtctgagtctctctctgtacctcccaccccttgtatgtccctgtcaagtctttactttttcatctctggcccttcctgggttgatttatcgctactcctccctgcttcatccatttccattaataactgattatatataaacaaaggggtgttgttttctcatttgttgaacttatttagagacctgttctaattatgaaagtgaatgaataggagctttgtattctctgggggaaaaaaagaaagaaaatataattgtgctttagttctgtagtcctcagttttttccattgtggttcaatggyccatggtagaaaaggttcctcttacacacatatctctatatttttaaaaacatccttaaagaatgtcattgtgcatactctttagttccagttacctgagaaaccgtagacagtgaccccgagaaattctagcccacatttgtaatccaagttaggagacattaattg

SEQ ID NO: 295283 - DNA, 620 bp, Homo sapiens
tcttactcattttcgtaaccatcactctcccaacctatccaaggaccttgctaagtagctgagacatagtgataatgagctactgttaatgaaagttgcttctttgtgccacaaatgtgttaagtgatttacgttcatttttcattccaacaactactttgtgaagcagaagttattagtctcatcttacatacaaggaaactgaggctcagagaaattaagtggctttcccatcccttgtcctgctatggctacagtctcagggcctgctatcacaggggtcatctcaatacttgttttctggttcctaggtctggatctaatcttgatggcctgacattgaccctgactgttaccctctagtctctggcccagcattaggtttccctgcacttctctccctcctcacccacttgtcgctcccagtcctggctcctaggagagatgaatccttctgggtcagccaagaagaactaggagagtctatcagtcamtccatagacaggcagtaggaccacagtcctctttcaacatttctaggaaaaagaaaaggaggagccagagtctcagcccctgcaaactcatcaaggggtgcagccttatgaggatttttctagccc

SEQ ID NO: 295284 - DNA, 598 bp, Homo sapiens
caataatttcttttggacattaagccaaatgaaagcacaagtaaagggaacaataatttttgaacaaatgttaaacatgtagtttctgatttcagactggtgtattggaaaagtagggctcaaacaccccacagctaataaagatatatcaggytttcattaaaacagatattagaatgaaagtacagcttcaacatagttttatacagtgaaatatagaataagcagttctttcattagggatggggaaatcaaattttaaaaacaatgtctagttagaagtttttctacagatcatcaattcagtacttacttccaatattaataactcagctaagcacctggaaggaggcttttctctgctgagttaatgaatttttctgtgagtcttcatttgattgattacatcatagcaagtgtaaccacataagaagctgccctggaaatatgattatctgaagcaacagctaaagaacaaggaattactgaggatgaacaagttctattttagaattgtttatgacagacaattctgaggaaaacaaaatcaaaatagatacaggagaagtgggattgtttgcaatgtctaacacaaaag

SEQ ID NO: 295285 - DNA, 352 bp, Homo sapiens
taaatagaaatttattgtgggttattggtgttattagtcgatatcttttctacaggaaygaaaatactcaaggactttaaaattactgtttgtgagtaaagagaatgcctaggagtttcttagctttgaaaattattctgggcaactcaaatgctgctgattgcatttctcactggacgttattcctggactcgggacaagagaggttcagagttacagcctacctatgttcagtgctactcctgtaagcacttacatgttttatttgtgggctcttcctttatttccagaacattctttaagtgcctgtactgggaatattccatttgcttcttcaaatccattctcccca

SEQ ID NO: 295286 - DNA, 463 bp, Homo sapiens
ctgtgtttgatgatcatttgtgacattgctgcctgtacaaatgctctttgccttgagcagtcgagtcatttacatccttagctaaagaagggctttgaagttgatccagaagggaggattggccttaggttgctatcaaggagagggcttttgcttcaatttactctcagaaatgttgttcctgggcagatgtttcctcagtcatgttgtacatcacttttcagttcaagtgcccactacacctttctgttctctgtgtcttctggaataaattattgattgagaaacatgtataaattcctggccagttaaagcttggtgctccttgggctggacgtccaatcctgaatcagrcggaggagtgggtggccaatgacatgcagtcttaacatagcccccttacccacccctcaatagtaatatgggtttgaacgagtttttacagaaataaatatagtgtcag

SEQ ID NO: 295287 - DNA, 574 bp, Homo sapiens
gctcatggctgtatcttttctgagctaggttaggacataggagcccaatgacaaaggcctctgaccttaagcagcagtggatactgtgaaggctacctggagctcaggactggcaaacccaatcagaggagtggccctcagcagacacaggacacgctgttgccatgagtgtctcttcttcagtccacactcacatgtcaagcacctgcttgtgccagacactgtgctaggagccaagaacacaaagataaatagaactcagagtgaaggttacagggggacagccatgatgacaggcctcatggtgggcagcrggagctgtgaggagaggggcactggccagcaccaacaggaccagcgagaaggagggtaggttcagagggtgcggtgcctaaactgccaacaaagcaaagattgttctaccagataaatagaactagtaggtcatatatacacatgacttttttcaataaattggctttgcaattgttggagctagcagagtctgaaatccatcaggcaggttgacaggctggaaatgcttgggcaggagctgaccctgtagtccacaggc

SEQ ID NO: 295288 - DNA, 552 bp, Homo sapiens
ccatgaacagatgagtaaacaattcagaaatagaatcagtaataaaaagcctattaaaccraataggtctagaaccagatggattcacagccaaattctaccaaatgtataaagagttggtacaattcctactgaaactattgaaactgcctttgcaaaattatgactgtgacaacgaaagagatttaatctaactgactccatcttggctctaacctttaagctgtccttgttcctttctcggcataggctgaactaactatgggaggaacttagtttataggttaaaacaaagattatagtagccctttcccaaaacaaacctccttcttgcatggtgactaggcggtctttgtaggactaagaaattatccacaagattagaaattatgatttaggagtcatgcagctggaggctacaagattctgaccttccctaaactgctcctaagattagtgcttgagatattttgtagaccctgcaatggatcaactggcaccacgcagattgataaactggctcatctaatcttgttgcccccactcaggagc

SEQ ID NO: 295289 - DNA, 671 bp, Homo sapiens
ggttctctgcatttcctaaatttgaatgttggcttctctaactaggttggggaagttctcatggttgacaccctgaaatattagtttggtgcaaaggtaactgcaatttttgtcattgaaagtaatggcaaaagacacaattaattttgcatcaacctaatatgttttccaagttgcttacactctccccatctctttcagggacacccctgagtcatagatttggtctctttacrtaatcccacatttctcagaggtttgttcattccttttcattcttttttctctattcttgtctgactgtcttatttcagaaagccagtcttcaagctctgagattctttcccctgcttggtttattctgcaactaatacttgtgattgcattataaaatttttgtagtgtgttttccagctctatcaggtctattacatttttttctatgcaggctattttgtctgtcaactcctgcattgttttattgtgattctcagcttccttggattgggtttcacatagtcctgcatctcaatgatctttgttcctatccatatttggaattcgatttctatcatttcagtcatctcagcccacttcaaaacccttgccggggagatggtatagtcatttggagaaaagaaggcaccttggctttttgctgccaaggtttt

SEQ ID NO: 295290 - DNA, 625 bp, Homo sapiens
ccacatttctcagaggtttgttcattccttttcattcttttttctctattcttgtctgactgtcttatttcagaaagccagtcttcaagctctgagattctttcccctgcttggtttattctgcaactaatacttgtgattgcattataaaatttttgtagtgtgttttccagctctatcaggtctattacatttttttctatgcaggctattttgtctgtcaactcctgcattgttttattgtgattctcagcttccttggattgggtttcacatagtcctgcatctcaatgatctttgttcctatccatatttggaattcgatttctatcatttcagtcatctcagcccacttcaaaacccttgccggggagatggtatagtcattkggagaaaagaaggcaccttggctttttgctgccaaggtttttgcactggttctttctcatctttgtgggcttatgtttgtttaatctttgaagttgttgacctttgaatgagttcttttttcttttaacctacttgatgaccttgaggggtttgattgtggtataaggtgtattcagccaactggctttacttttggaagattttagggggccagtgctcagctcccaactcctgg

SEQ ID NO: 295291 - DNA, 641 bp, Homo sapiens
aagtgagatttcaagatacaagttatgaaaattatgaggaaagaaaccacgatgatagcagtgcagtgggttgggggtcttaagaaggaaggccaagctggcaccctcttactgcctacaggrcaggtcagggacacagtgaaggctgggcaccagctactatgctatcaggttcagaggctgactataggggagatagaaaatgtttttatcaagatcagaaggaaaatattacaatggactctggctttggaaaaatttacggttctctacagataatttaattggttatcctgagcagtccatgcagatttctgtcactggagggactcaaaggtgcctagtgggtgactaaccatacattctctaagaaatctatcttgtttggagaagaccatcaagtgctggagataggattgtacagtgaaaagagatacagcctgatcttttttttccttcatgtcatattttctggacaagaaaggatgagagctaaaagaacaatttgtaaaccatctaggcaatgggagctacatgcaaggagcaggctattgagaaaagcagtgacagcaggaaagcaaaggtcttccctgtgccagggcacacaagcaggactctcaagcctcctggaaacagagccc

SEQ ID NO: 295292 - DNA, 420 bp, Homo sapiens
aaggaaaatattacaatggactctggctttggaaaaatttacggttctctacagataatttaattggttatcctgagcagtccatgcagatttctgtcactggagggactcaaaggtgcytagtgggtgactaaccatacattctctaagaaatctatcttgtttggagaagaccatcaagtgctggagataggattgtacagtgaaaagagatacagcctgatcttttttttccttcatgtcatattttctggacaagaaaggatgagagctaaaagaacaatttgtaaaccatctaggcaatgggagctacatgcaaggagcaggctattgagaaaagcagtgacagcaggaaagcaaaggtcttccctgtgccagggcacacaagcaggactctcaagcctcctggaaacagagccc

SEQ ID NO: 295293 - DNA, 1136 bp, Homo sapiens
ctttgccaggtcctctgctgcatgctggtgagcgattaagacctacttttggacctacttttgtactaccagagctcacagctggtgagatggaagtaccatggcagggaggctcaaaatgctatgacctctttgaggtcatatgtctccttcaatcttggggaccccaggaagatttccagaggaggggctgctgggctgaatctggaaggagggaggctatgcccactcttttttttytgagacggagtctggctctgtcccccaggctggagtgcactggtgcgatctcagctcactgcaagctctgcttccagggttcacgccattcctgcctcagcctcccgagtagctgggactacaggtgcctgccaccaggcctggctaattttttgtaatttttttagtagagatggggtttcaccatgttagccaggatggtctctatctcctgacctcatgatctgcccgcctcggcctcccaaagtgctgggattacaggcgtgagccaccatgcccggctggctaagcccactctttaactcataaacttttccctccagggagcctcatacwctaggtttggttgtgcacacctgtagtcccagctacttgggaggctgaggtgggagaatcactcgagcctgaaaggtcaagcctgcagtgaactaagctctcatcactgccctacagcttgggtaacagagtgagactctgtcttaaaaaattaagtaaataaataaaagatcaggagtcactatacttacatcagacaaatagatttcaagacaaaaaccataagaagagacaaagaaagtaactttataatgataaagaggccaattcagcaagaggatagaacaattttaaatatatatacacccaacactgaagcacccagatatataaaggaaatattgttagagctaaagagacagataggccccwgtacaaaatagctggacacttcagcgccccactttcagcatctttaagagagaaaatcaacaaagaaacatcagatttaatctgcacaattggatttaatagatatttacaaaacatttcatccaagagctgcagaatacattcttttcctcagcacatagatcttcttaaggataggccatatgtta

SEQ ID NO: 295294 - DNA, 563 bp, Homo sapiens
atattaaagacatctaacctttgtatttccttcaatggtagcttttggaggtcctccccaggggtagttggggttctggttgtcacaatgcctggggggtgccaccagcacttaatgccggaggctgggaatgctaaatgtcctgcarttcctggaacagtcctgcacaaggaagaactgcatggcccaaaggctgatagcatcttcttggagaaacactttctaatctcctacaagttctcctcactatggggtggtgggggctattgtgggagagaccaggagaaaccaaactcaaaattggccaattcacggtttttttcaccttctgttccactttacagtctcttttggatgattcagtgttttgggagtacatattccatttttaacatttcttcccctcccctttctcttctccaaaatggtattagtgtatatgagggcagggcgtattcactctgtggatgtgggagagaggagatggtctacctgaatatgtgtgaagagactcagcgtacttgcatgtctgaacatgtctttatgttgctcttacacttgaa

SEQ ID NO: 295295 - DNA, 563 bp, Homo sapiens
atattaaagacatctaacctttgtatttccttcaatggtagcttttggaggtcctccccaggggtagttggggttctggttgtcacaatgcctggggggtgccaccagcacttaatgccggaggctgggaatgctaaatgtcctgcaattcctggaacagtcctgcacaaggaagaactgcatggcccaaaggctgatagcatcttcttggagaaacactttctaatctcctacaagttctcctcactatggggtggtgggggctattgtgggagagaccaggagaaaccaaactcaaaattkgccaattcacggtttttttcaccttctgttccactttacagtctcttttggatgattcagtgttttgggagtacatattccatttttaacatttcttcccctcccctttctcttctccaaaatggtattagtgtatatgagggcagggcgtattcactctgtggatgtgggagagaggagatggtctacctgaatatgtgtgaagagactcagcgtacttgcatgtctgaacatgtctttatgttgctcttacacttgaa

SEQ ID NO: 295296 - DNA, 581 bp, Homo sapiens
tttctcaagggcattaactaacccccctcttcagggtggtcatccgagagataaggagggaggttgttacaaggagatgagtgagctcctgtggaaacgtccacagaggtgagccaagggatgacatgggtaccatctgcacaatatagagttggaacttccaaatgatttccctttagaaactagaggatatgattcattcactttgagcttccaggattagcaaagaactctaatgcccattgattcctattcctttataggtaaacttgtttttctctctggaagattttagtattttctttcattcttgaggttctgcaatttcaccagtatgtattcagctatgatttttggtcattcattttgtgtgtctctctgtgacccttttcaatttaaaaacttgtgaggtttttttcaggtctacattttctcatattttcctatttcccctcttccatgctytcagggctctcccttttttcttttcttttctttttttctctcctgttcgtgagttcattctttatcatgtaagccaaaaataaaatactaagtcccccaccccccaaccatctaaa

SEQ ID NO: 295297 - DNA, 621 bp, Homo sapiens
tcatttctctccttctctggcccaactgtccatttgagtttcctgggtcaggactcctgcttcagacagctgtgctcagagtttattctacgggcaaatgcatgaatcagccatcctcattttctsttttccttggctgtctggagttacttccggctctgttctgcctctctgggttgtttcttcccatctgggggatttatcctgggtccaaacatcacccctgctctctgctcagtaggtgtgaggagggacaggggcctagtgggttcagctgttccaaatacaaagccttagtaattaacctgatgattgtccaaaagccccttctgctttctcgacttgttgagtctgagcttaaaatatttctggaatttctattacttctgctgtagctttctattgtctatgtttgggattatgtttttgttttttgtttttttttctcttctgcccttatgtttctgcaatctgatcccatctgcttcctatcttccaggaattttttcaaaatctgtctaaggatagttacctttcttgtttcatagggccatcatggattcctttacatcctcctcctttcatccatttatcttattaatcctcacaatgattcactga

SEQ ID NO: 295298 - DNA, 621 bp, Homo sapiens
tcatttctctccttctctggcccaactgtccatttgagtttcctgggtcaggactcctgcttcagacagctgtgctcagagtttattctacgggcaaatgcatgaatcagccatcctcattttctgttttccttggctgtctggagttacttccggctctgttctgcctctctgggttgtttcttcccatctgggggatttatcctgggtccaaacatcacccctgctctctgctcagtaggtgtgaggagggacaggggcctagtgggttcagctgttccaaatayaaagccttagtaattaacctgatgattgtccaaaagccccttctgctttctcgacttgttgagtctgagcttaaaatatttctggaatttctattacttctgctgtagctttctattgtctatgtttgggattatgtttttgttttttgtttttttttctcttctgcccttatgtttctgcaatctgatcccatctgcttcctatcttccaggaattttttcaaaatctgtctaaggatagttacctttcttgtttcatagggccatcatggattcctttacatcctcctcctttcatccatttatcttattaatcctcacaatgattcactga

SEQ ID NO: 295299 - DNA, 621 bp, Homo sapiens
tcatttctctccttctctggcccaactgtccatttgagtttcctgggtcaggactcctgcttcagacagctgtgctcagagtttattctacgggcaaatgcatgaatcagccatcctcattttctgttttccttggctgtctggagttacttccggctctgttctgcctctctgggttgtttcttcccatctgggggatttatcctgggtccaaacatcacccctgctctctgctcagtaggtgtgaggagggacaggggcctagtgggttcagctgttccaaatacaaagccttagtaattaacctgatgattgtccaaaagccccttctgctttctcgayttgttgagtctgagcttaaaatatttctggaatttctattacttctgctgtagctttctattgtctatgtttgggattatgtttttgttttttgtttttttttctcttctgcccttatgtttctgcaatctgatcccatctgcttcctatcttccaggaattttttcaaaatctgtctaaggatagttacctttcttgtttcatagggccatcatggattcctttacatcctcctcctttcatccatttatcttattaatcctcacaatgattcactga

SEQ ID NO: 295300 - DNA, 614 bp, Homo sapiens
gcaataagaaatatagatatgttaaaacccaagtagaccaataacaagtaacaagatcaaagctgtaataaaaagtcttccagcaaataaataaataagcccaggacccaatggcttcacagctgagttttactaaacatttaaagaactaataccaatcctactcaaaatattctaaaaaaaatagaagaggagggaatacttacaaactcattctatgaggtcagtattacctggataacaaaaccagaaaaagacatgtcaaaaaaagaaaactataggccaatatccctgatgaacatagatgcaaaactcctcaacaaactactggcaaaccaaattcaacaatacattaaacagttcatttatcatgaccaagtgtgaattattctagggatgcaaggatggttcaacatatacaagtcaatcaatgtgatacaccatatcaatagaatgatggacagaaaccatgtgatcatttcaatggttgatgcttaaaaaggcatctgataaaatttaacattctttcatgataaaactcaagaaacaggatatagaagtatcayacttcacaataaaagccatatacaacagacccacagccggtatcacac

SEQ ID NO: 295301 - DNA, 519 bp, Homo sapiens
taagacattattaatctgtattatatattattcatccattctcactttggtggacatttgggttgtacatacactttcataaatgttattgcacatgttcttttggtgcacatatgcaagagtatagacctaggggtagagatgctgggtcatgaagtatgcacatgtttagctttatagaaagacctagttttctcataaacctagtcaaagatgactaaaccaatttttatgtcttccracagtatatgaaaattccctttgctccacatcctcctagcatttagtgctgttagactttaaattattttcaatctgttgaatggatatttgtatatcctcataggttaaagttttatttctctggttactaatgaggttgtataactttccatgtgttttttggctttacagaatttattcttagtgaagtgccttatacatcttttgttcattttccactgggtgtttgccttttccttatttatttgtaagagtactttatgtgttaaatataca

SEQ ID NO: 295302 - DNA, 459 bp, Homo sapiens
cctatgtttcttcatctgtaaaattgggctaatataatctcacatgataataataaaatattatcatgtttggggaagtccttagagatcatattgcaaatgctagttaatgccactagtgatgaatgagaacagatttggaccttgtctatcccttaaaccagtgtaaagtacagctgacccttgcacaacatgggggttagggatgccaactctctgtgcagtctaaaattagcataaaacktttgattccccaaaaatcttaactactaatagcctattgttgaccagaagccttactgattacataaacagtcaatcaacacatattttgtatgttatgtgtatttatactgtattcttaagactaagctagagaaaaaaatttatgaaaatcataaaaaagaaaaaatatatttactgtattaaatggaagtggaccatcataaaggtcttcat

SEQ ID NO: 295303 - DNA, 628 bp, Homo sapiens
tttttccctttgggaaaagctgagtacacctgcaatgggtagaatgctcaatggtagcatcttgttgcaggcctcaagatagttgcctaagctgctgcttagatctccttctcagagttctcagaccagcaagggctttctgttcttacagtttggctagaaacctatacagccttccaatgagcacatgcttctgcaatgtggaaaatgcacttacrcgtagaaagtgaaccagatggtgcacatgagggaagaagagagctcagctggctgtttcttgtgttcctttgggtatcagagttgggagcctgcatattcatttataagtgtcaggcagtcacatacagctttcccagaggaggtgagaaaggaggagcagcattaatttctcagcttttgctttatgattccctgatgtagctctacctgcaggtgaaagctacctgtggtgaagacacaccaagcactataatttttggaaaaatagctttttaaaagcgtggaggaatgtgctctaagcagcttaggaagtagctggagggttacctcctattgagctgattttattcttcttaaaatagatggtgcctgaaagttacatctacattttaattgggacattagtgtc

SEQ ID NO: 295304 - DNA, 601 bp, Homo sapiens
tattattattatcctcattttacatagggaaactgaagcacagggaggttaagtagcttgcctaaggttgtataactagcaaagccagaattcgaacccaggaaatctatatctccagaacccaaattcccaaccattatactatgcatatttaagaaataacaaggcttagtaaaggatatgggtgggtaactaataatccatgaagaggattaaataccatactgcttccagttctgatcaagctaaatatttgtgggtgataatagttgagaaaattggtagtgctgttacagctttattcttttaagtatctgcagtgttagatgtggtaaaacagaggacacraacaccattatctctaaaacggagataatgacaagtgtagcttccactcatatcatcaaaattagggcccaagacactctatccaactaacagaaattcaattcaaactagcttatgcaaaatgaaaacaacaacagcaaaaaagaatgtgaagtttagtagttctgtaagtgaagaattcgagggatatacctgattaggaatggtttgacccaggtctcaaatgatgtcaaaagcctttctcttccttact

SEQ ID NO: 295305 - DNA, 583 bp, Homo sapiens
tgcattttcctgtccaatacaagagctttaaaaaaacatgaataatactttctttcctttctttctttctctctctctttctctctttctttctttcttgttgtttaactgggtcttgctctgtcacccaggctggagtacagtagcatgaacacggctcactgcaacctcaacttcctgggctcaagcaatcttcctgcatcagcctcctgggtaactgggactatgggtatgcaccaccatgcctggctaatttttcttatttttatagaaatggggtttcaccatgttacccaggctgatcttgaactcctgggctcaagcaattctcccacttaagcctcccaaagtgttggtagtacaggcatgagccactgtgcctggccctcagcttttatagatggttgttaygcaagaaatgaccataagatgggctcacatgcatttgctatgaagttaagattttatttgttgtgcttgcctaggccatctcctgggcaccatttcatactctcttgctcccgtacctcttatttccgccaccactgtggagaccagttctgctcagatgctgcctcggact

SEQ ID NO: 295306 - DNA, 523 bp, Homo sapiens
tgttggttgaagatcacgaagcagttgtcctccaaaatgccccaagagtattagaatatgatagaagattgtttatttgctaatgaagacatcagaactagccgaatggttcaaaaataattttaaatactttatacattgaaacaaatcaagccactataataattaggagccccttgctctggtgcagggcataataatcgctagcaaatccttagytgatgacatcacagtaatctgagacagagaggtggggactgtagtggacacttaaagcaacattgctgtgtctccttggtaattcatgaatgacagttcccggcaattcatgaatgtgacacttctcggtcatttctgtgttttggcaggtactggtggctttaaagccagggaatcaaagtccttaaagttgtaattaattttcctgaagctgataatgagacctactgcgatcctttcacataagacaggtctttacacacaatttatgaaaacagaataattaatagaaaatgatttcaat

SEQ ID NO: 295307 - DNA, 459 bp, Homo sapiens
tgtccttgccctgggtatatacaaacccattctctgtgaagagaacaaacacatttctattgtggcatgtccatagtgttagaattggaccttgctctagtagaattattattattattattattatttgaggcagattctcactctatcgcccaggttagagtgcagtggtgcagtcttggctcactccaacctctgycccccgggttcaagcaattctcctgcctcagcctcctgagaagctgggactacaggcacatgccaccaagcctggctaatttttgtatttttgtagagagagggtttcaccatgttggctaggctggtcttgaactcctgacctcaagcaattcacccccctcagcctcccagagttctagtagaattgtgatcctaattaatttaatacacgtcactatgagaaaatggacttgcatcatggattgaggatttggcctt

SEQ ID NO: 295308 - DNA, 459 bp, Homo sapiens
tgtccttgccctgggtatatacaaacccattctctgtgaagagaacaaacacatttctattgtggcatgtccatagtgttagaattggaccttgctctagtagaattattattattattattattatttgaggcagattctcactctatcgcccaggttagagtgcagtggtgcagtcttggctcactccaacctctgtcccccgggttcaagcaattctcctgcytcagcctcctgagaagctgggactacaggcacatgccaccaagcctggctaatttttgtatttttgtagagagagggtttcaccatgttggctaggctggtcttgaactcctgacctcaagcaattcacccccctcagcctcccagagttctagtagaattgtgatcctaattaatttaatacacgtcactatgagaaaatggacttgcatcatggattgaggatttggcctt

SEQ ID NO: 295309 - DNA, 557 bp, Homo sapiens
tgtaaaattacttggctggaataacattacagagctttattgctgttagaaacaaggctatcttccatatcaagatgtttaaaatactagttttctgaatatttatagttgtgtgacagctaaatccattaattctaagatgttgcttggtagtcccctgtgcaaataagtctctaaatgtaagttcattccttctattaggatcctaacacatcttttgggaagcaggatgaaaattctacttttcttttggatttgatattccacctaataaggggatttrgagagagctttagaaattaaataaaatagctagaagttattgaggatttactatgtgcaaggcactatgctaagtgcctgcaggtcttctcatttaatcattataacaattgtatgaggtagatttttattactcttccttttttataggtgaagaaacacatttaggttaagtaaaactttcccaggtcacatagctggtagctgggatttgtatccagggctatatgtgaccctaaggtcagtgtgttcataaccgtcatgcagaatggcta

SEQ ID NO: 295310 - DNA, 530 bp, Homo sapiens
aaatccattaattctaagatgttgcttggtagtcccctgtgcaaataagtctctaaatgtaagttcattccttctattaggatcctaacacatcttttgggaagcaggatgaaaattctacttttcttttggatttgatattccacctaataaggggatttggagagagctttagaaattaaataaaatagctagaagttattgaggatttactatgtgcaaggcactatgctaagtgcctgcaggtcttctcatttaatcattataacaattgtatgaggtagatttttattactcttccttttttataggtgaagaaacacrtttaggttaagtaaaactttcccaggtcacatagctggtagctgggatttgtatccagggctatatgtgaccctaaggtcagtgtgttcataaccgtcatgcagaatggctatgagtgatacttcagcattttatctcctaccttcctctgacttgtcctggattatccttaagactcttgacattcaatgtaatacacaaattct

SEQ ID NO: 295311 - DNA, 537 bp, Homo sapiens
aatattcttctaacttaaagaatatcattgcatacctatatttaggcactaaggagtactgtactattatgctgcaaagattttaactacggggcttgggaaataatctcaatgtgaagatacatgttacatcatgtcagttattattgttctattgttacttccaagattmaggacttggttctaagggagggacatttcttttaaatgttttgtttcatttttttcatgatggagagatgactgaattactgtattgtcagtttctggaaacttgaattatcagttttttctaattcagcttgggaacagggctaggagagaggacagtgtgagaaagtatgtcaagcctgattggtatataatactgctcttggccaatatatttaaaaaataattttcaatacacctcccccatctttcttaagatggtggaatcctccagcatgactccagttttcgttattttagcactagacttttaatgatttcagaatttccgtctgcttttgactattctccctggtgttttaaaaa

SEQ ID NO: 295312 - DNA, 623 bp, Homo sapiens
ttttgggtaagaaaaccttttttaaaagctatgaagaaaaatataaatagatttatgtaagcaaaggcaaaggttatagatcaccctagaatagtagcagatcattggagaagagtataacatgcctagactattatgaatgcattaggtaggatgttcttgtgttgctataaagaaatacatgaggggggcaaggccaagatggccaactacaaacagtkgtgattggagactcccattgaaaagaaccataataaacatgtgaatccttcactggcaaccaagatatccaggttctctcatcagaaccaactagactctggctggcatgatccacgaagaggagggaacacagtgtggtgtggtggcccacctgagagccacacggggcagaggagcccccaacccacagccaagggaggcagtgagtgagcatgctacctagccggggaaactgagcattatccacagaactctgtcagccacggatcggaagatcccactcacctacccacgccacggggtctagggtcccaaccctggagctgcgcagattctcaacagcctctcagctgcaatctgcttaagcctgcggagctcccctgggggaggggcaaccagca

SEQ ID NO: 295313 - DNA, 623 bp, Homo sapiens
ttttgggtaagaaaaccttttttaaaagctatgaagaaaaatataaatagatttatgtaagcaaaggcaaaggttatagatcaccctagaatagtagcagatcattggagaagagtataacatgcctagactattatgaatgcattaggtaggatgttcttgtgttgctataaagaaatacatgaggggggcaaggccaagatggccaactacaaacagtggtgattggagactcccattgaaaagaaccataataaacatgtgaatccttcactggcaaccaagatatccaggttctctcatcagaaccaactagactctggctggcatgatccacgaagaggagggaacacagtgtggtgtggtggcccacctgagagccacacggggcagaggagcccccaacccacagccaagggaggcagtgagtgagcatgctacctagccggggaaactgagcattatccacagaactctgtcagccacggatcggaagatcccactcacctacccacgccacggggtctagggtcccaaccctggagctgcgcagattctcaacagcctctcagctgcaatctgcttaagcctgyggagctcccctgggggaggggcaaccagca

SEQ ID NO: 295314 - DNA, 577 bp, Homo sapiens
gaggctcagggacagaacacggatctccctgggcctgtgcccctagtgggagggatggctgtagtctctgtggaccagcagacttaggttttcttcctggcagttctgaggaatctgggcagcccagatgagtgggtttcccccagcaaagcacaccccatccacaaagggacaaagtgcttcgttaaatgggtcctgttccctgtaccacctaaatgggtgagaccctccaacaggggttttcagacactctatacaggagcaatcctactggcatcagattggtgccccttgaggtcagagatcccagaagaaggatcaggcacccatctttgctgttctgcagcctttttgagtgacacctccaggcacaggagcgaaccagatgaatacggcctgaagtgaatccccagcaaaccrcagcagccctacagaagagggacctgaccattgaaagaaagacaacagaaagccacaacatctgcatcaacaacaacaaaaagtccccacaaaaaccccattcaagggtcagtagcttcaaagatggaaactagacaaactcaagaagatgagaaaa

SEQ ID NO: 295315 - DNA, 583 bp, Homo sapiens
gagcaggcacatcacatggcgagagcaggagcaaggctgggggagataccacacatttttaaatgaccagatctcatgaggtctcactcactatkgcaaggacagaactaagacatgaggaatccacccccatgacccacacatctccaaccaggccctacctccaacactggggattaaatttcaacatgagatttggactggacaaatatccaaaccatgtcagtgaatatattttagagtttaaaagtctgtttctaagcttaactttgatatgaataatttaaacacacatgaatgtgccttcaaaccaaactatacaatgtgtaaaaaccccttcgttccacattggggtttcgtattatgaaatataaaaaagaaaaaaaaaagaaatacgttatttggctcagaattatcaagaatctgctctgcaactaatattacttctcactacacatttctttttatttctcagattcttagcactttttgagagatcagagaaaagataaatttaaagattttactacttgttatcatctctagatgcgaaggagattacaattaatcattagattcacag

SEQ ID NO: 295316 - DNA, 583 bp, Homo sapiens
gagcaggcacatcacatggcgagagcaggagcaaggctgggggagataccacacatttttaaatgaccagatctcatgaggtctcactcactatggcaaggacagaactaagacatgaggaatccacccccatgacccacacatctccaaccaggccctacctccaacactggggattaaatttcaacatgagatttggrctggacaaatatccaaaccatgtcagtgaatatattttagagtttaaaagtctgtttctaagcttaactttgatatgaataatttaaacacacatgaatgtgccttcaaaccaaactatacaatgtgtaaaaaccccttcgttccacattggggtttcgtattatgaaatataaaaaagaaaaaaaaaagaaatacgttatttggctcagaattatcaagaatctgctctgcaactaatattacttctcactacacatttctttttatttctcagattcttagcactttttgagagatcagagaaaagataaatttaaagattttactacttgttatcatctctagatgcgaaggagattacaattaatcattagattcacag

SEQ ID NO: 295317 - DNA, 1207 bp, Homo sapiens
gagcaggcacatcacatggcgagagcaggagcaaggctgggggagataccacacatttttaaatgaccagatctcatgaggtctcactcactatggcaaggacagaactaagacatgaggaatccacccccatgacccacacatctccaaccaggccctacctccaacactggggattaaatttcaacatgagatttggactggacaaatatccaaaccatgtcagtgaatatattttagagtttaaaagtctgtttctaagcttaactttgatatgaataatttaaacacacatgaatgtgccttcaaaccaaactatacaatgtgtaaaaaccccttcgttccacattggggtttygtattatgaaatataaaaaagaaaaaaaaaagaaatacgttatttggctcagaattatcaagaatctgctctgcaactaatattacttctcactacacatttctttttatttctcagattcttagcactttttgagagatcagagaaaagataaatttaaagattttactacttgttatcatctctagatgcgaaggagattacaattaatcattagattcacagwtcttaagcataaaatgctggatgacatattaaatgaagggtcattctggaaaataaaatagacaaaatggctttactctcaaagataattgtgaagtaaaaaccaaaatawtagcttattcataactatttggaggcctttcttaagtccagaaaggtcagagggaaattgaataaatgtcaacactgtcaggtggggagactctcagcgtctcctgaggaatttaatttatattaatgagaagtgagccctgcttagggccctctcagagactgctctggtgtcaaattttaatgatttaacttcatgaaaaggattcctaacaagttatccaacaagataccctcacataagattgctttttaattgtgaggcctcaattgctctgacctccccaaaccacaggcacatgttggggcttcttgaggacttgcctcaccaagtcgataacttgccgtcagttctggcccttctaggggaccaggtgaaccaagtgagattctgacgataaagttctaattcaattcagcagacattcatgaagacctatcactggggcaatgtgtgagtgacaatagtaggtgccacttatgaacacttaatgtgtgtcaggctccctgctc

SEQ ID NO: 295318 - DNA, 623 bp, Homo sapiens
tcttaagcataaaatgctggatgacatattaaatgaagggtcattctggaaaataaaatagacaaaatggctttactctcaaagataattgtgaagtaaaaaccaaaataatagcttattcataactatttggaggcctttcttaagtccagaaaggtcagagggaaattgaataaatgtcaacactgtcaggtggggagactctcagcgtctcctgaggaatttaatttatattaatgagaagygagccctgcttagggccctctcagagactgctctggtgtcaaattttaatgatttaacttcatgaaaaggattcctaacaagttatccaacaagataccctcacataagattgctttttaattgtgaggcctcaattgctctgacctccccaaaccacaggcacatgttggggcttcttgaggacttgcctcaccaagtcgataacttgccgtcagttctggcccttctaggggaccaggtgaaccaagtgagattctgacgataaagttctaattcaattcagcagacattcatgaagacctatcactggggcaatgtgtgagtgacaatagtaggtgccacttatgaacacttaatgtgtgtcaggctccctgctc

SEQ ID NO: 295319 - DNA, 623 bp, Homo sapiens
tcttaagcataaaatgctggatgacatattaaatgaagggtcattctggaaaataaaatagacaaaatggctttactctcaaagataattgtgaagtaaaaaccaaaataatagcttattcataactatttggaggcctttcttaagtccagaaaggtcagagggaaattgaataaatgtcaacactgtcaggtggggagactctcagcgtctcctgaggaatttaatttatattaatgagaagtgagmcctgcttagggccctctcagagactgctctggtgtcaaattttaatgatttaacttcatgaaaaggattcctaacaagttatccaacaagataccctcacataagattgctttttaattgtgaggcctcaattgctctgacctccccaaaccacaggcacatgttggggcttcttgaggacttgcctcaccaagtcgataacttgccgtcagttctggcccttctaggggaccaggtgaaccaagtgagattctgacgataaagttctaattcaattcagcagacattcatgaagacctatcactggggcaatgtgtgagtgacaatagtaggtgccacttatgaacacttaatgtgtgtcaggctccctgctc

SEQ ID NO: 295320 - DNA, 632 bp, Homo sapiens
ctggggcaatgtgtgagtgacaatagtaggtgccacttatgaacacttaatgtgtgtcaggctccctgctcaacgttttatgttcccaatttctaatcttcatagcaacgttacagaattacagatgtggagaaggagactcagagacattaagttaacatgctcaagattataagtattgccaagtagctagcagaaccaggattcgttaggtcagtttgcctcccaaatccatggctttctgctactcacctatgtcttaggtttttttctttactcatctaacgttccagtgttcataatagctttcctttgtctagctatgttccagatrctgtgctgggtgttttattatgtaaacctactgaatagatgatagtagccccactaatgaaaaaggagggatggaggattcagcagcttgccccagatcacacaggtagaaaatggcagggctaaaattctaactgagatctaactgatcttccaaacctatgctcttacgattagagaacagtgactttaacagtgctgtgccctgaggtgatacagaagtgttaaagcaggcctgttcactctgatagctgaaaagtccactgggttgagatggacttggactcaagtgtctgtaa

SEQ ID NO: 295321 - DNA, 519 bp, Homo sapiens
gagggatggaggattcagcagcttgccccagatcacacaggtagaaaatggcagggctaaaattctaactgagatctaactgatcttccaaacctatgctcttacgattagagaacagtgactttaacagtgctgtgccctkaggtgatacagaagtgttaaagcaggcctgttcactctgatagctgaaaagtccactgggttgagatggacttggactcaagtgtctgtaaagccaagcagaataaatgtgaaatgaagtgattttgaaaagatgttggggaagtacaggggtaaggaagattaattccaaatagaaggcacagaatggttttgccaatgaattggattttaaaatacaaagaatgaaagaaaacacatttcaggcagagaaactagttttcccttgagtaagtacagctttggtcacttcacttaggtttggatgtatagtgtttttgttgtaatttcaagtaattagtaactttagttttaattttctcattggctcatgactta

SEQ ID NO: 295322 - DNA, 601 bp, Homo sapiens
atttctcataggagttgtcaagagtaattgttctacattttgatcttacttgtgtttattttatggcataacttcacctttgacttttgcccacccctggtctagctgtattcactcctactagggcatataaagttaaagaaaagaatgaaatgcaaacattgcttgatattaaaatgataagcaaaatttatttccttctgaattgtgtacacaaatgacccctttctgagccaccctcacccctgggtcaatatgtgcattttgtgaggataacttttcagaacactacatgaaaattgaaacaagaaaatacctgggagctgcctgataaaagtgtatttgtgagaaggtttatgaggtggtgatgtcaaataagaacttggatgyggaagcctctggtgagtcctggctccaccctttatttagctgtaacctcgatcaagttctgtaaatttgccttgtctttccaatggttgggttgctgtgagggtgatgtgatatgaaatgtgaaggcagtttacatgtcaaacctgatgaagggctgaaattatttaggaatgaatgagcctaactaatttagtgagtgtcattggtgatt

SEQ ID NO: 295323 - DNA, 565 bp, Homo sapiens
tcttttcttctgtttacttgtgttctctaggtgattccatctaggttcgtggctttgcatgtcatcggtataaatccaaagtttacatctttagctcagacctctcctgtgactgcatgtttcccattgtatactttatatctgagacttaacatgctccaaaatgaagtcctggtctccccacccaaacctgaactttcctaaatattattatccatctattactattataacatagcctcctagttggtttctctacttccatctttgaccctccacaccccattctctgacacagcagccagtcagcatccatttcttcaaaggttcatgtttttataagggtctacaggatctgcatcgacctcacactctaaactcatcttcccctaaaattctcctcctcacccagtcatattggtctacttgctattcttccctcacagcaagtgtttatttaaatgtcttcacacatgctgtttcttctrtctgaatgccttcccccagatttctacacggcttcctcccccacttacttcaggaccctgcgcataggtcaccttat

SEQ ID NO: 295324 - DNA, 1111 bp, Homo sapiens
acacaaatttctttttatatctgctttgttagttgtggacatgcctttctaccgtgtcccttgatacatacacccattaagatgtttatctagctcgactaacactgagtgctggaatctgcaaagttacagaattgagaggatttagatcacatatcatttactctgaaaagaaagaaagggcacagattctggaaacagacaagtttgaacccagccctgctacctataaactgacttgtgggaccttagataaggtacatatctttaaaaaggtggatagtaatacacaccttgttagattgttgtagagacagtgatacgaaatcattgcccaaggttaggtgtggaatagtagctgtgtcagtcagggttgtccaaagaaatagaagcaatagtgtgtgtgtgtgtgtgtgtgtgtgtgtggtatgtgtgtatgtttgtgtgtgtgtgtgtgtgtgtgtgtgtgtgtgtattaagagacttattctaaggaattggcttatgtgattgcrggagctggcagatcaaattctgtggggcaggccagcaggcwacacaaatttctttttatatctgctttgttagttgtggacatgcctttctaccgtgtcccttgatacatacacccattaagatgtttatctagctcgactaacactgagtgctggaatctgcaaagttacagaattgagaggatttagatcacatatcatttactctgaaaagaaagaaagggcacagattctggaaacagacaagtttgaacccagccctgctacctataaactgacttgtgggaccttagataaggtacatatctttaaaaaggtggatagtaatacacaccttgttagattgttgtagagacagtgatacgaaatcattgcccaaggttaggtgtggaatagtagctgtgtcagtcagggttgtccaaagaaatagaagcaatagtgtgtgtgtgtgtgtgtgtgtgtgtgtggtatgtgtgtatgtttgtgtgtgtgtgtgtgtgtgtgtgtgtgtgtgtattaagagacttattctaaggaattggcttatgtgattgcaggagctggcagwtcaaattctgtggggcaggccagcaggc

SEQ ID NO: 295325 - DNA, 492 bp, Homo sapiens
actttatatctcaaagcatcctgccttaggttgggctgctataatgaaagaccatagrtgagtggcttaaacaacagacatttatttctcacagttttggaggctgggaagtccaagatcaaggtgctggcagatctggtgtctgatgaggttcctcttcctactttgcaggtggctgccttcctgcggtattgtacaaggtggaaagagatcatttatctcttgtctcttcctataagggctctaatcccattcatgagggtttcatcatcatgacctaaatacctctaaaaagccccacctccaaatatcatcacattagggattagggcttcaatatatgaattttgggggaacacaagcatttagttcataacagatccttaagacattgtctggctttgactttttcagataagagcttcaaagtagaaagaggtttttcatataagaggttgaaaggttcaaagtggaaggtcacgtagtgtatca

SEQ ID NO: 295326 - DNA, 469 bp, Homo sapiens
tcttaggcagctccacccctgtggttttaaagggtatagcctccctcctggctgctgtcatgagctggtgttgagtgtctgcagcttttccaggcccacagttcaagctgtgggtggatctaccattctgggatctggaggatggyagccctcttctcacagctccactaggcagggtcccagtaggaactctgtgtgggagctctaatgccacatttcccttccacactgccctagcagaggttctccatgagggccccacgcctgcagcaaacttttgcctgggcatccaggcagtttcatacatcttctgaaatctaggcagaggttcccaaacctcaattcttggcttctgcgcacccctaggctcaatacaacatgaaagctgccaaggcttggggcttccaccctccgaagccacagcccgagctgtacattggcccctttcagccaaggctggagtggctgg

SEQ ID NO: 295327 - DNA, 500 bp, Homo sapiens
ggggcatttatatacacatacagatgtacgcacccagtcactctcctagcctccttacctccagaaaggttaccctgactgttgtaaattataccattctttaaagaagattaagttagggtggagataagagcaacagatcagaatcgaaactacatcttcagggtgacagaattaaacaattgccaatataaagttaacaggagttattatttataatcaaaagaagttgagcagtccctgacgactacatatttggttctacaagctctctggatggtcccaagcagctcagccactgctgagtaacacacaggtcttcactcatgccagggttatatgatttgtgacttaccttcagggtttggggcttaaaggcttttgttttcatgtaactatgttttgtccatatctagatacatttatattgtagagaaaacatsatacagccattaaaacatgatttaatgatgtgatcttttttttttgagacagagtgt

SEQ ID NO: 295328 - DNA, 423 bp, Homo sapiens
ctgaagaagaaaacattttggaagaataggtttgcatcaaaaccctggaaaatactacatcctaacctaaggatatttagatactgactaatggtatttaattttaattaggaacatatgtgaactgaaaacaaggacaaatagtgagacccaccctttatgtatcctctgccaagaatgccttccccacacataccaaactaagttaggagatccctgctcttctcccatctttttctttttcttcttgccacttagcacaatttataattgggcatgacaatgtgtgatgtcttgtttcccccattagatagcaaactctmtttcaccactatagccctactggctagcatagtgccttggaaaaatagtaggtgttcagtaaataattgctgaatgaactaaatggataaatgaggacgt

SEQ ID NO: 295329 - DNA, 595 bp, Homo sapiens
cgtgcccagccgtcagcaggaatctaatcagcatccagatgggaatttctggtcattagtaacctttgtatactgagaaatgccctgaattacttgatatttggtagtttccttagttggtgatgagacaaagtgctctgggtctctgcaactctaggtcttaatactgaaatccctggtcataagtaaccttagttaactgaatttttaactgccttcctcaaatggggttgtatcttttatacctcagaagtttagaaagttaagtgtaagtatgtaaagatttttaagaataaaataattatttttcaagaatctattaatttttgacattttatatatttggaacatttgagaaaatttgaggatcactgtatttatagatttgatttattaaatgtgaagttattatttactatccagtgacattttmaataagataatttaagtttttaaaaagaaatacatatattaaatgtataaggacagtttaaatgtttaattaattttgtaaatgggactaaacgttattcaaaggccctttgaaattattactaacttctgtctgacttatacataaaaaagaagaaactag

SEQ ID NO: 295330 - DNA, 622 bp, Homo sapiens
agccacagccccttccttcctcccaggattayggggtattaactaggtcagtacatcaccttcacatttttcagaaacccagagctacttctacaaactctgaagactccctcaacccacccacatgggcagaatttaaagctcctgggggaaaaagaaaggactaatttacaagttgctataaacatagttcttaatgtcgcattgttctaaaatcttctaaaaactccccgactccttggcttctatgacaactgcagttccctgattttcctcttagttctttgatttcttcttctcagtctttttaaatggacttttgtccaacctctctgtaggcagttctctgtttggtccttttttcacgctaaactccctccttaagagagggctcgcttactttcatggctttaaaaatatcttcaggcttatgttcccagatttctattctgaacccaggcaactcctgagctctagacaaaatttccagtggatctaaatggacatctacattagaccagtgctaatacctcaaacttaataagtctaaaatcgaatttgttaacttccttccagagccggctctttcttttctactgtctcttaggtaacagcttcacct

SEQ ID NO: 295331 - DNA, 444 bp, Homo sapiens
ccattatggggccatttgagtagaaagactaaccaaaactcaaaacttttacagttagacagtggatacattcaaataggctaatagccaaacayagacaatacaaagaattaaaaaaacttctttctttgctgaatattctccttttgccccttcagaatcattctctccctttctcttctctgctgggctctgccctgagaggctgacctgcacagcctgcatcaactgggctcacttaccttctggattctcgtaggtttggccaaggggaggcaagagatcagagggtaagaggagagcaaagttggggtattcatctccttggattcttccctgacagaccacaagcagcggctgcattcctgctccagctgggcattccctccgtcatatgttcagctcctgctagtttccaggaacatgattccctcctcttgccct

SEQ ID NO: 295332 - DNA, 567 bp, Homo sapiens
acaaatatttgctgttttaagctgctaatttttagggtatgttgttatgcagcaatagataacctaatagacatactgatccagacacctcaccttgttttttaaaatgaacactcctatagaaatacaatttgtagaatccaatagaaaagcaccgagggaaaaatataaaattttaaagaatcagaacacatggtctttcctaaaaaaataataataataatgttaagaaagggcaggaaatagaaagaaagaaaactagtaaaaattagaaattgttcaatgaatagaagcccaaaaggaagcaatagaaatgaaaggctaaaactgatggataaaggaaaactagggctaagattttaaaaggtttaaatgagcaattaaaatgtaaagcattcaaataaaaagmaaaaagtcttagaaaaaaatgtgatttttaaaaaaatgttttgtctagttctacttttcccatcaaaaatcaaatgagaatagggtcaaccaatactagaattttaagaacagaaaactgtgttaaactaaggaagggaaagaactaatgaaagataa

SEQ ID NO: 295333 - DNA, 449 bp, Homo sapiens
ttaatgttaaacaatcatgaaaaaggttaaaatactttatcctttatactttataaactgtgctgtaactgctgtaagcaaagctttttctacacttggtttgaggcctcccagttcttgaattgttttgtatgcacaataaacttctacaatttatcaacttgacctgattttgtttttgacagtgacctcatcttcccttaaacttyccaacttttaccttccaacttctatcgccttatatatcagctttaacactgtcaaatatggtaacagaaactgtgttataaccataattaagacttttgagcactgcccagaggttgagtctcagaattaaaactaataaacagtgtttgcattactatgtcatggttgaactgagaagctaaagctattgttccttcactctgatattataataatccttatacaaccagagggagaat

SEQ ID NO: 295334 - DNA, 449 bp, Homo sapiens
ttaatgttaaacaatcatgaaaaaggttaaaatactttatcctttatactttataaactgtgctgtaactgctgtaagcaaagctttttctacacttggtttgaggcctcccagttcttgaattgttttgtatgcacaataaacttctacaatttatcaacttgacctgattttgtttttgacagtgacctcatcttcccttaaactttccaacttttaccttccaacttctatcgccttatatatcagctttaacactgtcaaatatggtaacagaaactgtgttataaccataattaagacttttgagcactgcccagaggttgagtctcagaattaaaactaataaacagtgtttgcattactatgtcatggttgarctgagaagctaaagctattgttccttcactctgatattataataatccttatacaaccagagggagaat

SEQ ID NO: 295335 - DNA, 585 bp, Homo sapiens
aatctttgaagataaggtagtcaagtttgtgttttttcttttccttctttttctaaatttgtataagtgtaaggggtaaaaatgcagttttgttacatggatatactgcatagtggtaaagtctgggcttttagygtggccatcacctaaataatgtttcctattctaatttagaggagtgttggatagctgtatcttgggatctttgttcattggatttctggcttaattccatagtttcttgcttcccatgtcattctacatttggggtgtttcaccctaggcttattgaagtacatctttatgtaacttccttaaaaatggttctgggatgtaaattctctgagactttgtggcatttaaaaatgtctcatacttaattgccagaacagctggaaagggaatttgagatgcagaattattcttcctgtaacttctaaatgcatagttccattatcttatgacatctggaattattaagaaaaaaatctaaaacttgtatgatcttttttctgagtatagctttgtaggtataagcttcctcttgttttaagatctacacaattttagtaacctcatgtatta

SEQ ID NO: 295336 - DNA, 564 bp, Homo sapiens
tttgttcattggatttctggcttaattccatagtttcttgcttcccatgtcattctacatttggggtgtttcaccctaggcttattgaagtacatctttatgtaacttccttaaaaatggttctgggatgtaaattctctgagactttgtkgcatttaaaaatgtctcatacttaattgccagaacagctggaaagggaatttgagatgcagaattattcttcctgtaacttctaaatgcatagttccattatcttatgacatctggaattattaagaaaaaaatctaaaacttgtatgatcttttttctgagtatagctttgtaggtataagcttcctcttgttttaagatctacacaattttagtaacctcatgtattagtccattttcatgctgctgataaagacatacacaagactgggcaatttacaaaagaaagaggtttaattggacttatagttccatgtggctggagaagcctcacaatcatggcggaaggcaaggaagagcaagtcacatcttacatggattgcagcaggcaaagagagagcttgtgcagggga

SEQ ID NO: 295337 - DNA, 589 bp, Homo sapiens
ccactgtaacacattcacagcaactgggggaaagacatagctttggttaaattgatctggaagggtcaccaacagcttccactgcrtgagattattttttttaagtacttttctgttattttaatgcatttgaaggagcaaggatagatatatgtgttcagagcgccatcttaaaccaataatcccttggtatcattttggaaagctttgttctttctgctaagaaagaaaagtacttgaatagtatatagaaaactgttactcagagaaacagatgtaaatttcagaatatcctagttcttctaggaaagaaagtgatggcagtgaagactcaacaaacatgtgctgcctacttactgtagtgtttgtccttttccattatgtggtgccatttaatcccacactactatctttattcttaaccaatgaacaaactgagactgtataatagtgtcttattcaagattttgtagtgcatagtagaattgaactggggcctaactctttattctttaacctaattgtgaccataccatcagtctctctgaaatgagcaactgcaccttgatttagtagcaagtagaaatgg

SEQ ID NO: 295338 - DNA, 1179 bp, Homo sapiens
ccactgtaacacattcacagcaactgggggaaagacatagctttggttaaattgatctggaagggtcaccaacagcttccactgcgtgagattattttttttaagtacttttctgttattttaatgcatttgaaggagcaaggatagatatatgtgttcagagcgccatcttaaaccaataatcccttggtatcattttggaaagctttgttctttctgctaagaaagaaaagtacttgaatagtatatagaaaactgttaytcagagaaacagatgtaaatttcagaatatcctagttcttctaggaaagaaagtgatggcagtgaagactcaacaaacatgtgctgcctacttactgtagtgtttgtccttttccattatgtggtgccatttaatcccacactactatctttattcttaaccaatgaacaaactgagactgtataatagtgtcttattcaagattttgtagtgcatagtagaattgaactggggcctaactctttattctttaacctaattgtgaccataccatcagtctctctgaaatgagcaactgcaccttgatttagtagcaagtagaaatggwccactgtaacacattcacagcaactgggggaaagacatagctttggttaaattgatctggaagggtcaccaacagcttccactgcgtgagattattttttttaagtacttttctgttattttaatgcatttgaaggagcaaggatagatatatgtgttcagagcgccatcttaaaccaataatcccttggtatcattttggaaagctttgttctttctgctaagaaagaaaagtacttgaatagtatatagaaaactgttactcagagaaacagatgtaaatttcagaatatcctagttcttctaggaaagaaagwgatggcagtgaagactcaacaaacatgtgctgcctacttactgtagtgtttgtccttttccattatgtggtgccatttaatcccacactactatctttattcttaaccaatgaacaaactgagactgtataatagtgtcttattcaagattttgtagtgcatagtagaattgaactggggcctaactctttattctttaacctaattgtgaccataccatcagtctctctgaaatgagcaactgcaccttgatttagtagcaagtagaaatgg

SEQ ID NO: 295339 - DNA, 656 bp, Homo sapiens
gaaattagtaacaacaagagaactctcaatggtcctaggagaggtaaaaaccaagtaagacttgggaaggcacttttgataattgaccagatataactgaggtcagtgcccttgttatgtctatgtaaacaggtacaagatctcttgaatgttaacttcaacaagtccagagttgttcatatatgtgcagcaggttttattaataactacatagactctgtcttgttcagctagtaaataatctaacgctagtctgttatctagaactacatttgccaaagagtctagagattcttgaattccctttcgtgcttgaactgtgctagtggctaagaattctggggtttaagtccagttctttagagttgagtcatggtaggcaaagccactccagggtgccactagtcctattgctgccccatttcccacctgaattaatcctattgctcacttacttctggcattcctcggtcttacacgattatagrctgtgacccctgaaagggcaatggtggccaatgtacatcgacccctgtaccaagtttttgatatacaaaagaaagctgctcctaaaagaatagatgactccccaggaaggtgggtgtggtttaggggtgtgacttttccccactcagggccaaaaacaaaaataagcc

SEQ ID NO: 295340 - DNA, 597 bp, Homo sapiens
caagtagctattgcctgatgtttaatagtggtgggtatatttaacaatacctgataggtacctgtcaaagattaaacctggttcttagattttattttggttgtaattgattattgagggatccttctttttaagtttttagtcagactaagtcttctggttggaggcaatactttatatctgtattcttgaaggaccttgtatacctagcctaaattttaaagggtatagtgagatgtgtccaaccccatttcccatcatggcttcaattagtttttgtttttgtttttkttttaaagatgtctttggaatttcctttggccaagggacttagagtcaaaagacttatagctaatcaaacattctaggatagatgggaatggaggcaggctgacatttcttatttcttaaaaccctcctaggcaatataagagtcaaaaagccaaaattaaggttacacatttaacaaaaacaaaaacccaagagcataaaatcaaactccactggggggaaacactgctcctatagacctctaagacaaaaacatgagcatcaggctacgacaacaatctgaaccagaggaagaagtcacaggag

SEQ ID NO: 295341 - DNA, 1042 bp, Homo sapiens
gatgtgtccaaccccatttcccatcatggcttcaattagtttttgtttttgttttttttttaaagatgtctttggaatttcctttggccaagggacttagagtcaaaagacttatagctaatcaaacattctaggatagatgggaatggaggcaggctgacatttcttatttcttaaaaccctcctaggcaatataagagtcaaaaagccaaaattaaggttacacatttaacaaaaacaaaaacccaagagcataaaatcaaactccactggggggaaacactgctcctatagacctctaagacaaaaacatgagcatcaggctacgacaacaatctgaaccagaggaagaagtcacaggagctgattttaaaagctaaaggagatagrcatcatcctaggctttcttaaagggagaaagaactgaaagcagcaagatacaataacagttwttaaacaactccatggactttgtgaaggaaaatgtttgcagaacctctataacagatgatcattggaatggagcctgcagtttccctaggctwgtcttctagctaaggatctcctttaccaattcagatgaggctcaggaaagtctgaaaccacccaaagctaaggagtaagggattcactattttaggacatagggcagatgctgcctgttctctctttatatcccttgggtctttctactttaataatcttcagttgaattctaactgtcaacatctacatctctccctccaagggctttcacagaagctggagaaggtctcttggcaagataggctaggagtgctgggaattaacacctcgggaaagctgtgtataaaaacctcagctcccttggtgctcaggtgggattaacctgaaatgtgtgttttacagtttcccagaggtttctcatgggatggagctccagtctgtctacagtggtagctgtaatgataatgcatcatgtatttgctgcctttcttcctctgttatgccactcccctcccttactgatatttcctgtacctcccaaataaactgcttacac

SEQ ID NO: 295342 - DNA, 590 bp, Homo sapiens
ttaaacaactccatggactttgtgaaggaaaatgtttgcagaacctctataacagatgatcattggaatggagcctgcagtttccctaggctagtcttytagctaaggatctcctttaccaattcagatgaggctcaggaaagtctgaaaccacccaaagctaaggagtaagggattcactattttaggacatagggcagatgctgcctgttctctctttatatcccttgggtctttctactttaataatcttcagttgaattctaactgtcaacatctacatctctccctccaagggctttcacagaagctggagaaggtctcttggcaagataggctaggagtgctgggaattaacacctcgggaaagctgtgtataaaaacctcagctcccttggtgctcaggtgggattaacctgaaatgtgtgttttacagtttcccagaggtttctcatgggatggagctccagtctgtctacagtggtagctgtaatgataatgcatcatgtatttgctgcctttcttcctctgttatgccactcccctcccttactgatatttcctgtacctcccaaataaactgcttacac

SEQ ID NO: 295343 - DNA, 437 bp, Homo sapiens
gttagcaagtctaaagctcttcaattttgaaggactaccgctgctagggaattaagttgatcttgcaaggtgaccagggagtcggtgacctgttccatgtcaccctttagttcttgagatagtttgtagtagaactgagtagaggttgtgataccgccaatgccagtacttagcccacctagcactcctgctctgataacaaaaggaagaatgrgtactgttttgttgtggggcttaggtatgacataattgtataaatattgttcagtgtaaatggtcatagggggcactaagaatgagaggaagcacataggttctgaaaagccattcagacaacgataggctaagctaccaaagacaaaaaatattcctaagggtaggcagactattcgtgtgggaggagttacccacctgatgcattgggatttggtcgtgtc

SEQ ID NO: 295344 - DNA, 574 bp, Homo sapiens
gctgtgtatccccccttctggtaactaaacaggttttatgctcaagtgtttaaaacccagttccatctctcaataaaaraacagtaaataaatcacaacttattgataaacagttgaggtttcaggaatagaaacgagatgtggaatagagttcagaattgaaagcgctttccaattacctattgaaaatctatcctacaggttctggtgtgaatttttggttgagctcttacaggaataggtgcagacactttacatccatcactgcagctatgcagctttgatatcataataggtattttcttatatcttatttaattaatccattggtccaagaatgatgactgctattgctacgtggaacaaatgtaaaagcaatacattgtctactggaaaaggtttaataggaggctttagtgaaacctttttgttgtcagtgttctaataacattgaacatcaactctctgtatttactctcttcatcttgatcataaaggcaatatttctcaaacaagtgctcagaataaagtcattctaattgtatctttattcctgttgacaccttttaaagct

SEQ ID NO: 295345 - DNA, 559 bp, Homo sapiens
tggagagagggccaaagaaaaagagaaataccagatttaatgattatagttaaaaaaaatactatctgatcattcttgttaactactagggcttctcaaacttgtggctatatcagaaccacctgtaggacttgtaaaaagcatagattactaaggtacccctctctctccactcttagtttgatttagttggtttaaattataatttttggaccccacaatttgcatttctagtgagttcctgggtgatgttgatggtgctaggccagggaccacactttgcgaaccactgctgtaaatgatggctaaggcctcaagtgtctcctatgcatgaaacgtttgcatagtaacasaaaactgagccacatgatcaaataaagaagatctaaggttgttttgtagatgtcacagagttaataacaaagtattttgcagggaaaggatggaggatttgcagatattcctcatgtgatcccaagagggattccagtgaataaaatgttacatttctttttgtactttgatttgaatatgtgtttattttagtttcacccacttt

SEQ ID NO: 295346 - DNA, 566 bp, Homo sapiens
ataaaatgttacatttctttttgtactttgatttgaatatgtgtttattttagtttcacccacttttattatccccaggataaaagtcccttagtcaaaaaatatacatattagcatgggtaaaagggcttcccactgtgcctacatcacacttaggcatccaatagatataatttcctattccttctctactgtcaccagtagagggccgtgactgcaagttgtccaggttctcggcattttgaacaaagaattggacaaaatgttcagcaaagcaaagaaagaatgaagcaatcaaagaacaaaagcagggatttattgaaaatgaaagtacacccaacagtgtgggagcggagcgggccgagcagtggctcaggggcccagacatagaatcttcttgggtccaaatacaccctagaagtttcccattggccacttcatgctcacctcatgtaaatgaagtggtagcctgaaatcagtctgattggttgcataaagcagccaaccagaggmtgaagtgaagttaggaaggtcacactcctttgcaaacatctgattggttgtaa

SEQ ID NO: 295347 - DNA, 555 bp, Homo sapiens
tgctttgtaggatgcgcatgtatcagtctgtgtgcagatgcaccgcaaaatctttcaaaggaaacaaaagtgtgtttaaataatgcaggaaataatggaagggactagaggacagtatgtgagtggctaagagtggccttaacttttcaaaaggcaaccttggtgtactaatacgaagggatgttctgagcacatagtagatccctgataaatgtttattgtccttgaggggctactactaaggtcagcaccagcatcgtggtcaatgttaaatatttccatatgggasaggaagcaggagatcatatctagaaaaagggaaacacattaaacagaaagtgtttgaggaagaagaccagtgtctgcataggaggggaatcaggcagccatgtcctggggaaaaggaatgtcgagagacagtagaggtgaactcttatggactgttcacctccaggtagtaagatatcatgaagatagttgtcaattctttccagtttccacctgctagtaaagagaagggtactggtagccttccggtcttgtctctagttgatt

SEQ ID NO: 295348 - DNA, 608 bp, Homo sapiens
ttaaaaatctgaaggataagttcagattccttcgtgaaattctatgcattctcgccttaaactcttacctacctgcccagttatctttgtgattgttacattgctttccaaacacactttaagcgatttttcttttttaaaatatgttttgtcactcgatccccacctctcaaaaccctagttatcctgtaagaccccttcaaaatgccagcttcttcattaggctctcacttttaccctggaatggagctattcttcctaacctttgaacttttaagatttttaaagatagtgtttttaaaaatatcagtgaaaggtcagtgtttcccccccagcccatagcaaactgatatatctgtaagttacaataaagtactcaaaaayaaaaggcatataaaacattaatccccaatttttactattatattcatcatttaagaccactgattatatggaatgttgcagcaatgccaaatgctatcaaagtttctatatagtacttctcaaattctgtaccttgctcatcataagtaagtaatactttcctagactggtcttggtctgcagaccacactgtgagtagcagttcttcaggctaaagcactcga

SEQ ID NO: 295349 - DNA, 469 bp, Homo sapiens
ttctgcatgggtgaggacaaagtggtataaaattttgatagacatatatccccaacatagagatctgaaaatacgaggaaaaagggtcttcagttatcatcacgtttrcatgaatattaattgcattagcaaaagagactgagtaagtttactgtttagaattaagtaaaacgctcaattgagatgggaacatgtgtttattgactatatctttcttgattaagctggcaaataaaaataatttctaatactttgagttggtctatcaatagatattttctagataaatatttgctaattgctaagcattatgcataataatactgttgttgctaaagttcaacagtttaaatgatcaacacggttttttaaaatgctattctcttgatgttttgcatagactgatttgaaaaattcaacaaatacaattataaaagtcttcataggcaaatataaaactaaaagtgct

SEQ ID NO: 295350 - DNA, 358 bp, Homo sapiens
tagcatctgaattctatggtttctctcatgttgctaaacaatccttcttctccttgttggaagacagagtgatgatcaggcccaaggctcctcttaaaattctctgagtgtcccaagatctctggagggttcattcccattcgctttctcttaatttccactctgtaccccagaatcattaggtaccttgaatacataaattacatatttttttgaccttgcaaaatttgagttacaaataaccttctgaaattgaataaattttataatttkggaaatatttatgtacttctaagtcacatctgaaattgaataattttataatttgggaaatatttacacgcttctaagtcaagta

SEQ ID NO: 295351 - DNA, 594 bp, Homo sapiens
gattattgaactccaggactgtggacatggtgcctgcctgcaagttagagtcaagagcagttaaattgaaggtagcatctgaattctatggtttctctcatgttgctaaacaatccttcttctccttgttggaagacagagtgatgatcaggcccaaggctcctcttaaaattctctgagtgtcccaagatctctggagggttcattcccattcgctttctcttaatttccactctgtaccccagaatcattaggtaccttgaatacataaattacatatttttttgaccttgcaaaatttgagttacaaataaccttctgaaattgaataaattttataatttgggaaatatttatgtacttctaagtcacatctgaaattgaataattttataatttgggaaatatttacacgcttctaagtcaagtagcaaacactagctgtaatgaacataatttttactgtgataaaaatgtagggaagatcaatttacagaacactgrcaagttgcccagaacatcctacataggaacaattgcatgaaatgtgaattatctagtcagctcttgggcaaaatttgaacattagcaatg

SEQ ID NO: 295352 - DNA, 607 bp, Homo sapiens
ctgctatgtactaaaattatttttttaaaaaacattctcaatctttgtcctaatatttgacaaaactgtgtgcctggcatggcattccatattagacctcagtgttcatttcttcatttttcagggaagaaaatgggccacttaatacatctatgcctcattttccttgatgctaacagcaatgatcatcttcgctatcataggaaggaaaatatactgatttaaagagatgattgaggaataaatgatgattttgaagcayatagcacttaactaagcatagtataagaacagctaaattaaaaagtattttcaacaccattgcacatttctcattttctccaataagttgaatgtcagtagaaaagaaattctaggaggatagtgccaagttgaaaattaaaaaaaaatattcaatacaaaactcaagaagccaataatctgtagaaaaatccacctcaataaactataacattttgaactacttgctggcaaatgacagagaatgaaagaagaagcttactaaaattcaaaaatgacagcaaagcaaatccaggttttgtctcatagctatgtaatgaagatgactttctgcttaaattaactg

SEQ ID NO: 295353 - DNA, 540 bp, Homo sapiens
agaggtgcatggtgtggccaccatcatgtagtcctcattgtaatctgggcctcaggaagctgttgccagactgctgtagttatatactgtcttagctgaaatccagggggaaaatggctactaccaggtcggagtgaagctatgcctattagatctataccagtaaaataaaataccttgcattcccttgtccctctctactaaagacattcatgaattcagataaaatggatgcatcttatcaatgaaactttaacaatatttggaaagcccaacctcaagaggttctggaaaaggtagcttttaatttatattctcttttttttttaatttccatttttattatagactcagtgggcacatatgcaggtttgttacaagggtatattgcatgatgttgaggtttgggyttctattgatcctgtcactcagatagtgaacacagtacctgataggaagtttttaagcccttgccctctccctccatccctccttttggagtccctagcatctattattactgtctttatgttaagattt

SEQ ID NO: 295354 - DNA, 602 bp, Homo sapiens
tttggttcattgtttaccgytttgtctatctccttttggactgtttgggttgaagtgggtccttattagttggggaaggagtcagggagatgccggggtagggaggtagatctgagggcttcctgtaggacacaaatcacactgtttacataattgcgagttgtcttttaatgaaaagaaaaggtcttttggccaaatatggcacttcactccatttgcctccttttctacaaaacaggtctagctgtaagatggtgttataatttatacttccctcaggaggccaggtttctcccccttgaagaggatatcgtggccaggcgggactgcagaagaatataagtcatttttttcttactgtctgagggtcaaattggtcccaattctccagaatacatcttaggggcatttttgccttgggaggaacatttccaattgctttggagatcccttcatggttgcggattcaggtcccttcgtggtcaccaaattgttacctgggggtccttgctcccagagctcccaagatagtggcgggctgcttccaaaatggtggtgggctgcttccaacatggtggcaagccttgtgttctctgacctgg

SEQ ID NO: 295355 - DNA, 474 bp, Homo sapiens
gtctagctgtaagatggtgttataatttatacttccctcaggaggccaggtttctcccccttgaagaggatatcgtggccaggcgggactgcagaagaatataagtcatttttttcttactgtctgagggtcaaattggtcccaattctccagaatacatcttaggggcatttttgccttgggaggaacatttccaattgctttggagatcccttcatggttgcggattcaggtcccttcgtggtcaccaaattgttacctgggrgtccttgctcccagagctcccaagatagtggcgggctgcttccaaaatggtggtgggctgcttccaacatggtggcaagccttgtgttctctgacctggggttcttggtctcacggattccaaggaatggaatcttggaccatgcagtgagtgttatagctctattagaagccatgggtcatggaagagaaccgtggaacccagtgact

SEQ ID NO: 295356 - DNA, 474 bp, Homo sapiens
gtctagctgtaagatggtgttataatttatacttccctcaggaggccaggtttctcccccttgaagaggatatcgtggccaggcgggactgcagaagaatataagtcatttttttcttactgtctgagggtcaaattggtcccaattctccagaatacatcttaggggcatttttgccttgggaggaacatttccaattgctttggagatcccttcatggttgcggattcaggtcccttcgtggtcaccaaattgttacctgggggtccttgctcccagagctcccaagatagtggcgggcygcttccaaaatggtggtgggctgcttccaacatggtggcaagccttgtgttctctgacctggggttcttggtctcacggattccaaggaatggaatcttggaccatgcagtgagtgttatagctctattagaagccatgggtcatggaagagaaccgtggaacccagtgact

SEQ ID NO: 295357 - DNA, 474 bp, Homo sapiens
gtctagctgtaagatggtgttataatttatacttccctcaggaggccaggtttctcccccttgaagaggatatcgtggccaggcgggactgcagaagaatataagtcatttttttcttactgtctgagggtcaaattggtcccaattctccagaatacatcttaggggcatttttgccttgggaggaacatttccaattgctttggagatcccttcatggttgcggattcaggtcccttcgtggtcaccaaattgttacctgggggtccttgctcccagagctcccaagatagtggcgggctgcttccaaaatggtggygggctgcttccaacatggtggcaagccttgtgttctctgacctggggttcttggtctcacggattccaaggaatggaatcttggaccatgcagtgagtgttatagctctattagaagccatgggtcatggaagagaaccgtggaacccagtgact

SEQ ID NO: 295358 - DNA, 538 bp, Homo sapiens
caacagccgtgaggataagctgtcttggaagtggatcctgaagttccagttaagtcttcatagactgcatccctccccaacagcttgactgaactctcatgagagtctctgagccacaattatccagctaggctgctccctgattcctgacccccagaaactgtgtgagataatgtttcttgttttaaattgccaagagatggggggagatttgttacacagcagtagataactgacacatatcgttaaaaaaagaaaaacagatcagtagttgtctagggccaggagtgggggtggagaataactgcaaagagacaaaagacaatttttgggttagtggaaataatctgagtttagattgtgttgatggttgcaagaatgttgacatttgccaaaattcatcaaaccatttaccgcaaatgagtacttttattgtaygaaaattatactttagtaaaggtgttaaatattataaaagaaaaacacatttatattctgtgcggtttttttttttcttttttttttgagacagggtctc

SEQ ID NO: 295359 - DNA, 551 bp, Homo sapiens
tatgacagtaagttagtgagaaggaagggaataatggatggtgagtggacaactagaaacttccaccagttattgcttagggaacccttaatatgagcccagtactttgctgagcattttgcatacattctattatttattcatcatcctaggtggatagaggttttctttattttactaatgactgtgcctgtcycaccattgtgtggaaaatgtctctaaaaaagacatttagagggaattacgtagtgagctcactagattatttactgttggagaacaatgactgtgttactgttttactttttaagaccagcaaccattttatagtggggacacaatgaatgttgattggatatgaaattctaaatgccaatattttatcccagatctgactccaaagcccaagttcctgtgcacacatacatgctctcttctttctctctctcttgctctctctctctctctcattctctctcttactcttttactttctcacactctctctgctgtatgtgtgtgtgtgtgtgtgtgtgtgtctatagtgtatg

SEQ ID NO: 295360 - DNA, 567 bp, Homo sapiens
gtgtttctacagtggacatgctattgacaccgctgccattcaagaaacttttaagtgtgcattagaaggcaaatttatcaacatgtattagtggttgtgacaaaaaagatgatgtccaagaggaagtaacactggcaaaagcatcacattaaaggaactctcaaggatacttcatgttattgaaagtgcaaaggataaaatgttggacactagtacaaatatagaaaggatatgacaatttgccaaggcatagaaaagatgctctgaaggtaggcactattcaaactactcttgacaagatttttacaaagcactttaattatcaatgtttctaatgttttaaatcataatctattaaataaatgttagttttgctattttagaaatatccctatacaattacaactgaaagyaagagaatttttaatgtttgggccagaattttttggaccagttataatttttcctatgattattaaaatcgctttgcacagtgtctccttgcatggtcatctgtatgactctgcactatcatgcaaagtgaggactgcctggttatgggtaaaa

SEQ ID NO: 295361 - DNA, 536 bp, Homo sapiens
gaggtcaatagattgagaccatcctggccaacatggtgaaaccccatctctactaaaattacaaaaattagctgggtgtggtggcatgcgcctgtaatcccagctactcgggaggctgaggcaggagaattgcttgaacccgggaggtagaggttgcagtgagccaagattgtgccattgtactccacctggcgacggagcaagactccatctcaaaaaaaaaaaaaaaagaaagaaagaaatatgctgtattacattgaccatgcatacctattattacccacaaggtacaaactcctrcaagttgttcaggtttcaggctaaactgtaaaactaaagtcagctgattgataatttatggtattattgtattctgtaaaaaggcttcttttagaaaattcctctattagctcttcttcagataacagaacagatttattggtctgctgcttttatatatgccttgccagcaccccagcagatcctagatttaatgaatttatttgcgtgactcaagtttacaagatcagccatcc

SEQ ID NO: 295362 - DNA, 602 bp, Homo sapiens
taaactatccttggatagttggaggaaggtcagctatagttctaaacataaaaatctgttatttcttcccttgtcaaaattatttatgaacaaatcaacctcatcagaaaatattaaaggtacattattttaggttctacagcatgtaacagatatggtaatagaattagtctgccatatggtggcagcaaataccaaagaaaattaatttcttgagtacgtccatttaaaaagttaatgtcttccctgagtcatgtattttaaacaaaggtttcaaatagaagaggctttacaggttttcataattatgttttaatcttgttatattaatagtcaagctcaaaacaatatcacgagcrtatttctgactgattgaaaaccgccttctgttactatggcatttaccaaatcaaactgcctcaaaaactatgtggctcttgatgcttatcaggcaacatgtaattgcaatgattttcattgtattaactaaaatttacatatcttatagaaaaattaaattttcttactttaaccaaatccacctagcctagcctcctacctccacaaatatttactcaataattgtttgttaataactattt

SEQ ID NO: 295363 - DNA, 627 bp, Homo sapiens
ttagtgttttaaaagatcgaatgagtcgagtgtgtattgttgttttggaggaggtagaagatgaatctcctgcattcatttctaaattgccacaggaaaataaatccctacattctccaccttctggaaatgtattggtaagatatgtaagtttatatgtttactatattctactgaactagtagtataaatcttgttttttaagaatagatgtaaatttccaatagtttctttacaaacccaaattaaagcaatacgtgtgtaratatgatgcagtatttttgtataaaatgcacatttttcgtttttacttttttgaatgctgagataacatttcagtctttactatgtcttaatctctttaaaagactgtttaaaaataatttgagaattagtagttatggcaaccacgtttctgttttcattttgtggtttcagaaactgatgtaacaagaatcaggaactctgcatattttaggaaaggttgactacccccagcaacactaaggcatggccttttctgtaatgaattttatgtatttacatataagactttatatgagattcagtcttcatctttaaccttggttttagtgctactgtcagctggctccttgactagtatag

SEQ ID NO: 295364 - DNA, 603 bp, Homo sapiens
actttagatagggtatctatgaattaaaaatccctgaatgtgacattactctaaaatcttgcatcttgaactggagarcactgttgttttctggtaggaggtccatgaagcatgcattagaggtagcttcttttcctggaggaagatttggatgagtatgtattttttatattgaaacagacatgaatatattttggagatgaaagtaaaactagcaggaatgttaagaaaaaacttaaaattgctttaaagtataatgtcgaatcccccgaaatattttccctttttgcccctaagggtactgttgtgaaaacattttgataagcaaatcttttggtttgtttaggttaacagttctaaactgtaaaactgtggaaatatactgacgaaaaaattagtatgaagtaaaattttcctatatatatcagcagcacaagcatctttattcaaagaaagtgttgctatttctttgtcattttagatttttatttttattctttgctggactttataccactattttaaggtcaagtatttttttaggcttttgccttagcaaggaaataccctgtgtttttgttttgttgtttttttttgttttta

SEQ ID NO: 295365 - DNA, 573 bp, Homo sapiens
ttgcagttctcctaggtggaggtaacggtggtttatagcaaatacaacagtggagacagtaagaaatagtctgatagtagatatattttgaaggcaatgccagtaagatttctgtgtttaaatagcttttatctaaccctacttgagggcttgtaaaatgcttttagtcaattatactcctttattattttttctaaactatttaagtctttataatatgaagtaatactagaactgtctatgatagaatagctcctattgtggtcagactacgtgcagtcccaaaaaaggcaagcagacagacagagtttagaaatacttttgttatagccagatgattgtaatgatatttattgggaaaggatatatgtcattgatttgagcttgtattgccaaattgcatacctacatgcataatgaaattggattagtagtagtattcctttgatagtttgtggaaaggagggctcagagggagaaattktgtgtgaagatttcgttaaataatagcccagagttttgccgttacaaattcataaaaatttaagaatcagttggatttttaaaaaatac

SEQ ID NO: 295366 - DNA, 608 bp, Homo sapiens
cctgtacatagtaatgaaattaaagaataccaaacataacaaaattatgttaaaagttaccactgagaaaagtcaaattaccctaagagaaatgactatcatcctgtcagcagatttatcaccaacagttgtgacagaagatgatggaaaatattttcaaagtattaagagaccaaaactgagaaactagaattctatacctagctaaaccatctttcaagagaaaggacaaaataaacacattttcaaaatttaggatgcacacatactcattcaaagaagtcctaggaaatatactscaacaagaaaaaagctgaaacctgaagaaaaaaataaacaaattagcaagtatcttggttaatatgaatcagtagtatgtttttaagtgctagtattttagaattttaaaaccaggtgaaattaaaatatctattaaaatatggtagatgatggtaggagggagttctgagctaaaatattctggagttattttattcaaaggcaatgaaatattccttcaccttagactttgacaagttatactggttaaagttctttgttgtaaacaacagaatccatgcaggaattttaaaaatttataacaaaat

SEQ ID NO: 295367 - DNA, 587 bp, Homo sapiens
agggaagttgtttttgtcttttaagatgggagatattatatgtatagactgaggagtaattgaaaggtaaaagggggaaaagttggtgatgcaagagagagtagatacctgcaggcacaaagtccttgagaaggcaggagggaatgagatgtagttcagaagcaaagtatgtcaggaactctgaagggtctgagattttactgtatttgtaagctaacaagttagcctgccactatttcatggaggctcagcaaatgggaaactcctgggtcaaagacaaaggctttgatttctcacaccaccagttccctacaccccarttccccagatcaatgtgaagagggccagatgacacccgcatatgcattgagttgcattacaagtgaggaactctgaacttagggaacccgaatcttttatattgggcaataaaggtgtgtgccctttgctctagagacattgtttttattattttgagcagtaaacattcttgctgtttgttccagagggagacactatctctatcttccaaggctatgaaacattcaatccttgattacatagtctggaacaaggaaatttaagag

SEQ ID NO: 295368 - DNA, 566 bp, Homo sapiens
cctttttaatacaatagattaatttcactaatgtttacccccaaaattagaagtatggagtcaaattgcattttatttttatttttgttttataatttcaacttttattttagattcggtaacatgtgcaggtttgtttcrtgggtatattgcatgacactgatatttggggtacaaatgatcctatctcccaggtagtgagcacagcacctaataggtagtttctcagcccttgctcccctccctctctcccacctctagtagttcccagtgtctgttgttcccatctctatgttcatgtatacccagggcttagctcccacttcaaagtgagaacatgaggtatttggttttctgttcctccatcaatttgcttaggataatggccttcagctgcatccatgttgctgcaaagggcatgatttcatccttttttaaggttgcattgtattccatggtgtatatgtaccaaattttttttattcaatccactgttgatgggcacctaggttgactccatgtctttgctattgtgaatagtgctgtgatgaacagacgagtacatg

SEQ ID NO: 295369 - DNA, 566 bp, Homo sapiens
cctttttaatacaatagattaatttcactaatgtttacccccaaaattagaagtatggagtcaaattgcattttatttttatttttgttttataatttcaacttttattttagattcggtaacatgtgcaggtttgtttcgtgggtatattgcatgacactgatatttggggtacaaatgatcctatctcccaggtagtgagcacagcacctaataggtagtttctcagcccttgctcccctccctctctcccacctctagtagttcccagtgtctgttgttcccatctctatgttcatgtatacccagggcttagctcccacttcaaagtgagaacatgaggtatttggttttctgttcctccatcaatttgcttaggataatggccttcagctgcatccatgttgctgcaaagggcatgatttcatycttttttaaggttgcattgtattccatggtgtatatgtaccaaattttttttattcaatccactgttgatgggcacctaggttgactccatgtctttgctattgtgaatagtgctgtgatgaacagacgagtacatg

SEQ ID NO: 295370 - DNA, 533 bp, Homo sapiens
acaaatacatagacacatgtgtttgtagcagcactatacacaatagccaaaaggtggaaacaatccagagttctctcagtagatgaatggacaaataagttgtggtatagccatacaatggaatattatttggcctaaaaatgattgaaayactggtacatgctacatggttgtttatgaagcaaaaacattatgctaggtgaaagaagccagacacaaaatgtcacatggtatgattccatttataggttgtatattagtccattctcacactgctataaggacatattcaagactgagtaatttataaagaaaagaggtttgatcaactcacagttccacagggcttggaaagcctcaggaaacttacaatcatggcagaaggggaagcaaacatgttcttcactgagtggcagcagagagaaatgcagaatgaagaggataggaaagtcccttataaaaccatcagatctcatgacagctaacgcactatcatgagaacaagatgggagaaactgcccagtgattcagtt

SEQ ID NO: 295371 - DNA, 533 bp, Homo sapiens
acaaatacatagacacatgtgtttgtagcagcactatacacaatagccaaaaggtggaaacaatccagagttctctcagtagatgaatggacaaataagttgtggtatagccatacaatggaatattatttggcctaaaaatgattgaaatactggtacatgctacatggttgtttatgaagcaaaaacattatgctaggtgaaagaagccagacacaaaatgtcacatggtatgattccatttataggttgtatattagtccattctcacactgctrtaaggacatattcaagactgagtaatttataaagaaaagaggtttgatcaactcacagttccacagggcttggaaagcctcaggaaacttacaatcatggcagaaggggaagcaaacatgttcttcactgagtggcagcagagagaaatgcagaatgaagaggataggaaagtcccttataaaaccatcagatctcatgacagctaacgcactatcatgagaacaagatgggagaaactgcccagtgattcagtt

SEQ ID NO: 295372 - DNA, 352 bp, Homo sapiens
cgacaattcaagatgagatatgggtggggacacagccaaaccatatcaggtrgaatattcaaatctatagagacagaaagcaaatgggttttggccaggtgctgggagtgtggagcagctgagaagtgactgctcacaggtacatggttttattagggatgatgaaaatgttttgaaacttgtactaaacatactaaatgccattgaattgtacactgtataaaatgttgaattttatgctatatgaatttcatctcaattttttaaataaaaagaggaatcaaatgtgattatacatacatatgtgtgtgttgcatccttgtgtgtctatttatatagataaataatctta

SEQ ID NO: 295373 - DNA, 529 bp, Homo sapiens
ttgatcatttttaaacctggttgatttcttgttgttgagttataacagttcttttgtaaattctggctattaaccccttatcagatatatgatttgcctgttcactctgttgatcttatccttcgataaacatttgcaaagtttaacacagtcccatttgcctatttttgcttttgttgcctgtacttgtggtgtcattatccaagaaatcattgccagtacaatgtcatgaagattttcccctgtagtttactctagttttatagttttaggtattacatctttaatccattttaccttaatttttgtatatgctataagggtccaaatttattattttgcakgtggatatccagtttttttccttaatgtgatttcttgaaaatactttcccttctccattgaatgatcttagtacccttgctgaagttcatttgaccatacacgagtgttcatttggggtcctctcttctattccattggtctatttgtctgtttttatgttgataacacacagttttgattactg

SEQ ID NO: 295374 - DNA, 529 bp, Homo sapiens
ttgatcatttttaaacctggttgatttcttgttgttgagttataacagttcttttgtaaattctggctattaaccccttatcagatatatgatttgcctgttcactctgttgatcttatccttcgataaacatttgcaaagtttaacacagtcccatttgcctatttttgcttttgttgcctgtacttgtggtgtcattatccaagaaatcattgccagtacaatgtcatgaagattttcccctgtagtttactctagttttatagttttaggtattacatctttaatccattttaccttaatttttgtatatgctataagggtccaaatttattattttgcaggtggatatccagtttttttccttaaygtgatttcttgaaaatactttcccttctccattgaatgatcttagtacccttgctgaagttcatttgaccatacacgagtgttcatttggggtcctctcttctattccattggtctatttgtctgtttttatgttgataacacacagttttgattactg

SEQ ID NO: 295375 - DNA, 660 bp, Homo sapiens
ccagctttgttcttcttttaaaatattgtttcagctatttggaatctcttgagatttcacattaattttagaatgactttttctatttctgcaaacaatgcctttgggattttgataagggttgcattgaatctgtagatcactttgggtagtacagatatcttaacaatattgtcttccaacttaagaacacaaactatctttctatgtatttagtcttccttaatttcttccagcaatattttacagtttttagtgtacaagtctttctccttctttagagtagatttattactaaatatgtcattctttcaatgctgttgtaaataggattttttttaatttcctttttcaagttgttcactattgctgtatagaaatgcaagatttttgtttgctgatttaaaatcctgcaaccttgctgaatttgtctattaattstaatagtttttctgtgtgtgaaagcttctgggttttctacataaaaaaacatgccatccgtgagcagagataattttatttcttccttttcaattggatgccctttatatatttttactatccaattgctctggccaggacttccaatgccatatttaatagaagtagtgagaggggagatccttgcctcattcctgatcttagagggaaagctttcag

SEQ ID NO: 295376 - DNA, 549 bp, Homo sapiens
cgcgcgcccgtggccggaggctccatttaccctccgcggaggggcgctgtgcggcggcacttaagcggcagcttcctctctcccaggcggcctttgtggctgtggccgggacagggaaaagctgcccaggccaagagggcgggggcgtcaggggcagccagcgccgcctttgcgcaactgaagcggatgaagccgcctgctctcaggtcttctaaggagaaggtctttttatcactcccattttacagatgaggaaatygaggctcagagacaggaagtagcttgtgccattcattagggtcccaggcctggtacctcctcccgttgatggcagtaccgattgcctttgcaaggacccagcccttcaccgtgtgtttctgctctcctgacccccacatctcccttagctcagtgacactctcctctgggaccgtcctcttcatcctcctgcattttccagcgccccttctcttagcactgtgtgtgccgtcccactgcctcccccgctgagctaggccttcccccaggacaggtcctgtgaaccacctg

SEQ ID NO: 295377 - DNA, 540 bp, Homo sapiens
taaatatctttctgtaacttgcacatatcatcactgaagatggaaaaccagtatcacatgccgtaaacaaagggtaactaaacaaaatagcacaactataaaataacagatttcatatgtcccctaaaatcaacttgtgtactaccagtgatatgyacacccaattttggaaacactactttaagggggttgggatatgaactcaaatacctccaactctaatatccccaagtccttcaattatcaggggtttctatttcataatttaaaaaacaagcagcctgaatccacattctacatgcgatggcaagtctcctcccacccatttcttcttcccttaggagacttttgtggatttccaaaaggttcattgttttcaggaacaaaccaatggccaaaccgtggtgtggtgggggttgaggggtgtgagctacctcctttcccacagtgcctagctcctcgctggcaatccatgttccattgatgcccagatttacacaccaagcctctctcctgagctgcagatgtgtgcacctgacc

SEQ ID NO: 295378 - DNA, 540 bp, Homo sapiens
taaatatctttctgtaacttgcacatatcatcactgaagatggaaaaccagtatcacatgccgtaaacaaagggtaactaaacaaaatagcacaactataaaataacagatttcatatgtcccctaaaatcaacttgtgtactaccagtgatatgcacacccaattttggaaacactactttaagggggttgggatatgaactcaaatacctccaactctaatatccccaagtccttcaattatcaggggtttctatttcataatttaaaaaacaagcagcctgaatccacattctacatgcgatggcaagtctcctcccacccatttcttcttcccttaggagacttttgtggatttccaaaaggttcattgttttcaggaacaaaccaatggccaaaccgtggtgtggtgggggttgaggggtgtgagctacctcctttcccrcagtgcctagctcctcgctggcaatccatgttccattgatgcccagatttacacaccaagcctctctcctgagctgcagatgtgtgcacctgacc

SEQ ID NO: 295379 - DNA, 510 bp, Homo sapiens
ccttttaaaaaaaatgtggcaaaaaaacacataatacaacatctaccttcttaaaattatagctgtatattgtaggattgttaactatgagcacagtgttggtcagcagatctttagaactttttctcgcacaactaaacctttctgtccgttgaacagccactccccatttccttctccctagccccagcaacagccattctttttgctctgatgagcttggccactctagtacttcatacaagtggaatcatgcagcatttgtccttctgtgactggctttttaygcttagcatgatgtcctcaaaattcagcccttttgtagcacatggcaggactggccttctttttatggctgaatcctatttcattgtacagatagaccatattatctgctcatctgttgatggacatttgtgttgtttccacatcttgggctgttgggaatcattgtggaagtgcatgggaatttgagatcagttcttttggacaatacccagcagtgagatt

SEQ ID NO: 295380 - DNA, 1115 bp, Homo sapiens
atgggaagcacacacattcttatattctccattctctgcagttggtgtttgcttattcctgggctggccaccaccttttgtaattgctgtagctttttgctttatttttcaaattatgttattaaaaattaactatgcactctttgacccagccattccacttctgtgtattttacccaagtgaaatgcagatatacatccacacaaagacttgtagaatgttcacagcagcctattcccccatagtcaagacctgaacacaagtcaaatgcccaccattggagaaatgaataaaaaaaattaatacttttatacagtagagtattatttattaataaaaaggaaggaatacatgcagcaatattatgttaagtgacagaagccagactcaaaatagtacatgctgtktgacttttctacaggatgtttgagatcagataaaactaatgtatggtaataaaagtcagcacagtcactgggtgagggtggggttgaccggaaagcaaccccaggatatttcttggtgcaatgaaatgtcctctagcttgttcgagatgwatgggaagcacacacattcttatattctccattctctgcagttggtgtttgcttattcctgggctggccaccaccttttgtaattgctgtagctttttgctttatttttcaaattatgttattaaaaattaactatgcactctttgacccagccattccacttctgtgtattttacccaagtgaaatgcagatatacatccacacaaagacttgtagaatgttcacagcagcctattcccccatagtcaagacctgaacacaagtcaaatgcccaccattggagaaatgaataaaaaaaattaatacttttatacagtagagtattatttattaataaaaaggaaggaatacatgcagcaatattatgttaagtgacagaagccagactcaaaatagtacatgctgtgtgacttttctacaggatgtttgagatcagataaaactaatgtatggtaataaaagtcagcacagtcactgggtgagggtggggttgaccggaaagcaaccccaggawatttcttggtgcaatgaaatgtcctctagcttgttcgagatg

SEQ ID NO: 295381 - DNA, 560 bp, Homo sapiens
ttgcagccctgaaggctgcctgcctcctcctggaggtcatacccagrtctatgctggacacccaggtcgtgcaaagctcagaggtcagcagggctgcctctgccagctcctttcatggaagctgaggcacaagcctgacaacttgttcacttgcagctgacttcatgctttttgctttagcacatacttgagagaatgtttcaattggagtccaatcagaccagccatcctactttgccattttatcacaacctcagcacatacacaggaaagttttagcagttcaacagaacatttttagtcatttggcagaagtagtatgccaatttgcaaatttgctggaaatttcccaatatactatctctgttaacaagctcattacaaaacttctcacagcctccctgggggattgtactaggaactagatgtatccaaggcactaatgttgtttctagatattttatttttattgtgattgtaaaagagatctttgttcactttattttgtaaagggtttttgcaagtatatataaatgcaacttatcactgtgtttatttta

SEQ ID NO: 295382 - DNA, 560 bp, Homo sapiens
ttgcagccctgaaggctgcctgcctcctcctggaggtcatacccagatctatgctggacacccaggtcgtgcaaagctcagaggtcagcagggctgcctctgccagctcctttcatggaagctgaggcacaagcctgacaacttgttcacttgcagctgacttcatgctttttgctttagcacatacttgagagaatgtttcaattggagtccaatcagaccagccatcctactttgccattttatcacaacctcagcacatacacaggaaagttttagcagttcaacagaacatttttagtcatttggcagaagtagtatgccaatttgcaamtttgctggaaatttcccaatatactatctctgttaacaagctcattacaaaacttctcacagcctccctgggggattgtactaggaactagatgtatccaaggcactaatgttgtttctagatattttatttttattgtgattgtaaaagagatctttgttcactttattttgtaaagggtttttgcaagtatatataaatgcaacttatcactgtgtttatttta

SEQ ID NO: 295383 - DNA, 560 bp, Homo sapiens
ttgcagccctgaaggctgcctgcctcctcctggaggtcatacccagatctatgctggacacccaggtcgtgcaaagctcagaggtcagcagggctgcctctgccagctcctttcatggaagctgaggcacaagcctgacaacttgttcacttgcagctgacttcatgctttttgctttagcacatacttgagagaatgtttcaattggagtccaatcagaccagccatcctactttgccattttatcacaacctcagcacatacacaggaaagttttagcagttcaacagaacatttttagtcatttggcagaagtagtatgccaatttgcaaatttgctggaaatttcccaatatactatctctgttaayaagctcattacaaaacttctcacagcctccctgggggattgtactaggaactagatgtatccaaggcactaatgttgtttctagatattttatttttattgtgattgtaaaagagatctttgttcactttattttgtaaagggtttttgcaagtatatataaatgcaacttatcactgtgtttatttta

SEQ ID NO: 295384 - DNA, 561 bp, Homo sapiens
caatttttcttatcaatcagtcacttaagctttttatttrccttttataaaaagccttttaaaatattaaagtctctttagaacttctgcatatcactaggcatccctagatgagactaatttgaaagccctcattttcaaatgcacttcttcaagtgcagagttgttcgtttggatcattctactgtaacttatctttagtaaaatttcataatttctgtaagtctttgttgcttccagggcctaatacttacccatcgataaaccagaaggtactgagttcttcagaaattaaggatctcatttttacctcaaatattggctttggctctcaggcccccttgatcaacttagccagtgatttttcgttcccaaagcatgcaagaagaaagaaacaaaggaggtagaacacaaaaatccctgtcaatttcccaaagccaaagtttacacctcctacagcattgccttttactactggtttctttctgacccagttagaggtctcttataaacctctaactagatccaagccagttaattattgaatccaatccaattctg

SEQ ID NO: 295385 - DNA, 561 bp, Homo sapiens
caatttttcttatcaatcagtcacttaagctttttatttgccttttataaaaagccttttaaaatattaaagtctctttagaacttctgcatatcactaggcatccctagatgagactaatttgaaagccctcattttcaaatgcacttcttcaagtgcagagttgttcgtttggatcattctactgtaacttatctttagtaaaatttcataatttctgtaagtctttgttgcttccagggcctaatacttacccatcgataaaccagaaggtactgagttcttcagaaattaaggatctcatttttacctcaaatattggctttggctctcaggcccccttgatcaacttagccagtgatttttcgttcccraagcatgcaagaagaaagaaacaaaggaggtagaacacaaaaatccctgtcaatttcccaaagccaaagtttacacctcctacagcattgccttttactactggtttctttctgacccagttagaggtctcttataaacctctaactagatccaagccagttaattattgaatccaatccaattctg

SEQ ID NO: 295386 - DNA, 565 bp, Homo sapiens
cattgctcattttttcaaaaatggaatcatattgcatatacttctcaaaatcttgctgctgactcaacaatactttgtggaaactcttccagggcaactggtcactcctgctctaattcagaatgtataatttccattgtgtggctatactgtatatttttcaaccattcttccactgatagacaattctgggttgggttatttatttatttatttaggtcaaatgagtratgttacaataaagattatctatatctacatccatagctatacaacctctgattgtggcagatgcttaacagatattgctcaattgctttctaaagatgttcacccagcacacctccaccagcaacgtctgattgcattattctccttgcattgaactgtttatgaatggaaaaaaaaaacttgttcatttcattttcttgtcaactaatacatctaaccatctttttgtatgtttggtggccatttggatttgctcatctgtaaattttcttttcatattctttacgcattctgctatgggattgttcagacttaccactttgtgaaaaacacc

SEQ ID NO: 295387 - DNA, 565 bp, Homo sapiens
cattgctcattttttcaaaaatggaatcatattgcatatacttctcaaaatcttgctgctgactcaacaatactttgtggaaactcttccagggcaactggtcactcctgctctaattcagaatgtataatttccattgtgtggctatactgtatatttttcaaccattcttccactgatagacaattctgggttgggttatttatttatttatttaggtcaaatgagtgatgttacaataaagattatctatatctacatccatagctatacaacctctgattgtggcagatgcttaacagatattgctcaattgctttctaaakatgttcacccagcacacctccaccagcaacgtctgattgcattattctccttgcattgaactgtttatgaatggaaaaaaaaaacttgttcatttcattttcttgtcaactaatacatctaaccatctttttgtatgtttggtggccatttggatttgctcatctgtaaattttcttttcatattctttacgcattctgctatgggattgttcagacttaccactttgtgaaaaacacc

SEQ ID NO: 295388 - DNA, 592 bp, Homo sapiens
tatacacacatacacatatatatgtatgtatattaggatcttacttgctgtttcattgacccatttgtctcttcctacattaaggccatattgtctcaatgactacggttttaccctatgcytttgttcctagttaggcaaatcttctcattgttattgatctattttataactttcatttgccatccttggtatctgtttttccccataaactttaagatcatcttaaccaatggagagaaaaatgttgttgggattcttgctagaattgcactgatttttaatattaattttagaacaattggcattttgatgctattcagttttcccattcaagattatggttgttttctattagttcggttcttgctttatgcctttcaataaggtttattaattttctttatagtttctatacttttcttataagtacattcctaaatttttgaaactttttaagaaaaagagtagttttatttaatatcacattcatccatcttaaatgttcttattccacccagaagatttttataacaagtttattgaggcataatttacctactaaaaaatgtactcatttaaaatgtacaac

SEQ ID NO: 295389 - DNA, 592 bp, Homo sapiens
tatacacacatacacatatatatgtatgtatattaggatcttacttgctgtttcattgacccatttgtctcttcctacattaaggccatattgtctcaatgactacggttttaccctatgcctttgttcctagttaggcaaatcttctcattgttattgatctattttataactttcatttgccatccttggtatctgtttttccccataaactttaagatcatcttaaccaatggagagaaaaatgttgttgggattcttgctagaattgcactgatttttaatattaattttagaacaattggcattttgatgctattcagttttyccattcaagattatggttgttttctattagttcggttcttgctttatgcctttcaataaggtttattaattttctttatagtttctatacttttcttataagtacattcctaaatttttgaaactttttaagaaaaagagtagttttatttaatatcacattcatccatcttaaatgttcttattccacccagaagatttttataacaagtttattgaggcataatttacctactaaaaaatgtactcatttaaaatgtacaac

SEQ ID NO: 295390 - DNA, 592 bp, Homo sapiens
tatacacacatacacatatatatgtatgtatattaggatcttacttgctgtttcattgacccatttgtctcttcctacattaaggccatattgtctcaatgactacggttttaccctatgcctttgttcctagttaggcaaatcttctcattgttattgatctattttataactttcatttgccatccttggtatctgtttttccccataaactttaagatcatcttaaccaatggagagaaaaatgttgttgggattcttgctagaattgcactgatttttaatattaattttagaacaattggcattttgatgctattcagttttcccattcaagattatggttgttttctattagttcggttcttgctttatgcctttcaataaggtttattaattttctttatagtttctatacttttcttataagtacattcctaaatttttgaaactttttaagaaaaagagtagttttatttaatatcacattcatccatcttaaatkttcttattccacccagaagatttttataacaagtttattgaggcataatttacctactaaaaaatgtactcatttaaaatgtacaac

SEQ ID NO: 295391 - DNA, 470 bp, Homo sapiens
tctctgtgtgtactgcctcttgccccatttcccaacaccataagtctaaatgctacttctgcacccacctcaaatatcctctttttcagaagtcttcccctgagccccaactaggaaaacgtcagctttttctggacctattttatggtacagaggtctttctgatctgttttgcgttttttgatatacatgtggcagcttgtctggtccattttaactctctcctcccctgcctcagccaccttcaacgaccctgctgatggcccacccatccaacatctgcatctccttccatcttgccttctctacctccacagcgtttctgccacccsctggttccctcagtcacaccctcatggataagtggtcctcttcctggatggcagaccttgtgtccccctcactctgccctcagccaccttttgttcacctttgattcacgcctgatcagcttcactgagagcatcaat

SEQ ID NO: 295392 - DNA, 470 bp, Homo sapiens
tctctgtgtgtactgcctcttgccccatttcccaacaccataagtctaaatgctacttctgcacccacctcaaatatcctctttttcagaagtcttcccctgagccccaactaggaaaacgtcagctttttctggacctattttatggtacagaggtctttctgatctgttttgcgttttttgatatacatgtggcagcttgtctggtccattttaactctctcctcccctgcctcagccaccttcaacgaccctgctgatggcccacccatccaacatctgcatctccttccatcttgccttctctacctccacagcgtttctgccaccccctggttccctcagtcacaccctcatggataagtggtcctcttcctggatggcagaccttgtgtccccctcaytctgccctcagccaccttttgttcacctttgattcacgcctgatcagcttcactgagagcatcaat

SEQ ID NO: 295393 - DNA, 503 bp, Homo sapiens
ctttccatttgtttagaactcatttaatttctttcaacaaagttttgtagttttcagtgtacaaaactttcatttattttggtcaatttactcttcaaatattttgttctctttgatgcttatgtaatgaaactgtcttcttaatttmatttttggattgttcattgaaagtgtgtagaaagacgattgattttttatattgatcttatatattataaccttgatgaactcatttattagttttaatagtttgctagtggatttcttaggattttctatatgatcatgtcacctgaaaagagatagctttttacttctcccttttaaatctggatgccacatgtgttcccagcctctagggctcacatgttcagcacacttataaagtccctttgtgatccactccagtgtcagcgccaggtaggcctatgaactttggtagctcagcaaatcctagctagggtgggagtggccagatctccttggtgcaagtacctgcagtt

SEQ ID NO: 295394 - DNA, 551 bp, Homo sapiens
gatgaccaaggactactgacacttctttttagaggcataatttctggaagtgacctcagaaatccactgattttttgccaaagaaataggctgtgataagtaagttagtatcagtctcttttctcatatcaactgcttgccatgttctttggtgagttggtcacagtctgttcaactagaaaagcagttctggcagcagggtaggaaaacaagaagtgtcaggatgactaaccacagtttcagagaagtagaagatggcttytgacagataaaagcaggattattattttggagtgttgcatgcctcctggttcatgccttggtccagaaagagattgctatcattttctccagttgcagacacaccaatcaactttctgcttaaaaggaatttgactaacaattgatattagaggtcaaaaacactttatatccttatctatcagtcagtcccagctcttttggtagaacattcagctgttaggacaagaagctggtgtcttacctgtcacccacacccagaacagcacctgataattcagttatctccc

SEQ ID NO: 295395 - DNA, 569 bp, Homo sapiens
agtgggaggaggagtgggaggcacatcataataggaggtcaggtcaccctcagtgagtkgggtaggtgggaagaaaatagaagcctggaatacgtgctgctgggaatgtggcaggcagttaattatcatggaaagaaggagtaccgaatggccaaagatccagctgggattagagtgtgagtttgtgttggaaccagggatggcaaatttctacagcagtgttcagcagtggaagaggatttacccagcctggctagcactggagttgcctaggtggggactgaaggatatgggggtgagggaactaaggacccaggcaaggccactgtgacagcagcgtcacggtttctcagttcacatgcgtggtttcccctgcctagagcattctcatgcggctgacctcacccttcaggactcatgtcagatgccctggcctccagaagccatccctggctttctgtgtctgagcagctccttttctgtgcttccacagtccccaaagccgccctatcacagttcatatcaccagcagtccaatgtttacttggttgtgtctcttattagactgt

SEQ ID NO: 295396 - DNA, 490 bp, Homo sapiens
attattagttgaatgtatgaacacacaccaagtgcctttgaaaggcaaagaaaaatttgaactaggaatggggtacaagtttgtcagtacccacagcaccccttgagctccacgggatgaagcactgagccccaaacaggggcagggccagggctggaagcagcagcaatgaggttccatcctcagcactgagaacagggccagggacatgggatgggtgaatggaagaaacaagagccatgaagatgcgtgtgaaccatgggaagtagccactatgcacagggacattgggcacggacacatgtgttcagcaagtgtggattaaccccacccacacacctatggtctcgatactgagtcaagcacagagatacctagaggaagaagacagaagtcttctcaagtagcccgcagaatagaggggraaactgagacatcaacaagtaaaatgaggtgtgactggtgctgaagtggccatatgatgtggtgg

SEQ ID NO: 295397 - DNA, 554 bp, Homo sapiens
gcctccaagtgggagtcctagcccctcccctgatgaaatatacatatactcagttccttgttattcaaaaaaaaaaaaaaaaaagagaaaacatcaggagcaattgtaggtttcttcaatgggaaaaataagattaaaacaatatacttcattgcttaaacatttattaaacagccactatgtgcatgaacttcaggaggcactgggaaaccagggatacccagagcccagctcctacacagaggagtccagccagtgcagggtggggtgcaggccgtgctccagcctgtcctccgcagcagatccctgagctcagactcctcccaacacacagcttaagaaggtgccttccaatctattaggcatcctcatctggggtttgctgatgatgagtctggttttctttctttctttctttctttctttctttctttctttctttctttctttctttctttctttctttctctttctttctcttccttccttccttcctttcttctttcttttttccttccttccytccttctctccttccctcctttcccttcctt

SEQ ID NO: 295398 - DNA, 585 bp, Homo sapiens
tctatttcaactttattttaaaaattttttaaattaaaaaaaattttagaatcttgctctgttgcccaggctagggtgtggtggtacaatcatagctcattgcagccttgaactcttgggctcgagcaatcctcccatctcakcctcccaagtagttgggactacaggcattcaccaccatgcctagctaatgtttttattttttatagagacggggtctcactatgttacccaggctagtcttgaactcttggcctcaagcaagcctcctgcctcagcctcccaaagtgttgggattataggcatgagcaaccgtgcctgggctatttcaacttaaaatttgggttttgcattggtattggatcaaagaagcctatgttaacggaaatgtatcctttgggtaattaaatgaacagagcaacagtttaggacagtggaaagaacatgctttaggcattaaaaaatctgggttctaagccccatcttagaaccactaaccagggctgtggccagagcagccctcaacttccctcgctgtctttcctcatgttaaaaagacatgatggtttatgattattaatatcc

SEQ ID NO: 295399 - DNA, 585 bp, Homo sapiens
tctatttcaactttattttaaaaattttttaaattaaaaaaaattttagaatcttgctctgttgcccaggctagggtgtggtggtacaatcatagctcattgcagccttgaactcttgggctcgagcaatcctcccatctcagcctcccaagtagttgggactacaggcattcaccaccatgcctagctaatgtttttattttttatagagacggggtctcactatgttacccaggctagtcttgaactcttggcctcaagcaagcctcctgcctcagcctcccaaagtgttgggattataggcatgagcaaccgtgcctgggctatttcaacttaaaatttgggttttgcattggtattggatcaaagaagcctatgttaacggaaatgtatcctttgggtaattaaatgaacagagcaacagtttargacagtggaaagaacatgctttaggcattaaaaaatctgggttctaagccccatcttagaaccactaaccagggctgtggccagagcagccctcaacttccctcgctgtctttcctcatgttaaaaagacatgatggtttatgattattaatatcc

SEQ ID NO: 295400 - DNA, 585 bp, Homo sapiens
tctatttcaactttattttaaaaattttttaaattaaaaaaaattttagaatcttgctctgttgcccaggctagggtgtggtggtacaatcatagctcattgcagccttgaactcttgggctcgagcaatcctcccatctcagcctcccaagtagttgggactacaggcattcaccaccatgcctagctaatgtttttattttttatagagacggggtctcactatgttacccaggctagtcttgaactcttggcctcaagcaagcctcctgcctcagcctcccaaagtgttgggattataggcatgagcaaccgtgcctgggctatttcaacttaaaatttgggttttgcattggtattggatcaaagaagcctatgttaacggaaatgtatcctttgggtaattaaatgaacagagcaacagtttaggacagtggaaagaacatgctttargcattaaaaaatctgggttctaagccccatcttagaaccactaaccagggctgtggccagagcagccctcaacttccctcgctgtctttcctcatgttaaaaagacatgatggtttatgattattaatatcc

SEQ ID NO: 295401 - DNA, 552 bp, Homo sapiens
tcctttataatctgggatctcaaaaaagacattacacaacatattataggtagcacaaaggaactgcagataggggcgttctgctaggctcatacccatgaggggaatcaatagactatccttcaaggttagaacacaacaatttacttatagtggtttattgagtacttagttcaatatgagtggacattttgtcaatagcattctaatagatgctacagatgacagctcaatgctataatataaaagctggaaggccatataataaaatctataggtccctggagtcagaggatgatcatttgtagaggacctgaagaaaaacaccaagaaatgtcttcttgcagggcttaatgatggttttggttattatggattgcattagtgaaatacactggtgccatttttatatattcttttatcttataaaattctagtaaatgaaaggtgaaattagaaagcttttyttttaatttgaattaggctggaagcttatcaatgtaaacacatttcccaattaagttagacaatatgcagaactcaccacctggg

SEQ ID NO: 295402 - DNA, 584 bp, Homo sapiens
gctacatgcacaattactaacagtcttcctactgtttgaatataaaaaacaaaaaaactacataaattacatgctcagttgccttagttctcatttaacttcagggaacaagaattaatttgatctattttaaatatttgccaacaggatgaattcaatgacgtatggaaggataatactgaattcactgtcttctacttcttgccactaaacaacatatcagcttgcttttctactgaaattgcataaaacagataggacagctaatttaaacagttgtttgcacattcaatatttataacccaaatcttgcatgactgactgcaagcagtgagttagaaggtttrgctcagctgctgcctagagtgatggatggccttgaagaatttcttgttcactgaccagatcaatcacataacaaaatgggaaaaaaagatcgaccttaaactagatttccaacatttccatctgtatgcaaaactgttgcaggaagaaatgtatcataaaacataatgtgaagctacttaaaaataataaaaatccaccagagatgatgtagaatgcaaataaaaaagataaggtga

SEQ ID NO: 295403 - DNA, 264 bp, Homo sapiens
ttatttcatcccttttaaaccttttataggcttttctattcatttctttggcatttgtaaggcctcaytgagaacatgctacttacatccctagtactactgattccaaacggaatgagaatgagttggctgatgtaggtgccaacaaaacctaattctatctaagactgcatagataaaactacaatttccagaacaaacggagatagtcttgctcaagttttgcaccacacaggctgtgtctgacaggcaggactcaacaac

SEQ ID NO: 295404 - DNA, 1240 bp, Homo sapiens
atgtagagcagtttagagtttcctcaaaaaaaaaaaaaaaaaaactaaaaattgagttaccatttgatcccacaagcccactgctgggtatgtacccaaaagaaaggtaatcagtatatagaagcaatatctgagctcctacgttagttgcagcactgttcacaatacccaagatttggaagcaacctaaatgtccatcaacagatgaacagataaagaaaatgtgatacatatacacaatggagtactattcagccataaaaaaagaatgacaccctgtcatttgcaacaacatggatggaactggaggtcactatgttaggtgaaataagccaggcacagaaagacaaacattacatgttctcacttatttgtgggatctaaaaatcaactcattgatgtagaaaatagagtgatggttaccagagcctaggaagggtagtgagggggcacagggggtgtttgagtacaaaaaacaatagttagaaagaataaataagacctagtatttgataccacaactgggtgatagtagtcaataaaaattgtaaattttaaartaaataaaaaattgtaattggattatttataacacaaaggataaatgctwgaccacctatagcccccttggctctcctgwtaaaccctgggccaagcctgaggccccttctatcctggaggatcccaggatcaaggtgatcacagccaagcacaataaaaccacagcccagattctgatccacttcccccaggcagaggaacttggaggtgatccccaagtctgtgacaccagaatgcattgctgagaactttaaggtctttgactttgaactaagcagccaggatatgaccaccttactcagctacaacaggaactggagggtctgtgccttggtgagctgttcctcccacaaggactaccccttccatgaagttttgaagctgcgggtgcctgctcatccccaagtgacatatacctgtgtttccaatctcatttttttcttgcaaatgtagtatggcctggcctgtgtcactgagcagttggacagcaacctgtagagtggccagcaagggcttgtctaggttgatgttggatctgaagagcagtgtcagtagagtagaagtctcttctagtttgctttgttctttttgccccactggggaaagtataacctgaatacccttttctgaccaaagggaagcaaaatataccaggtcaaaatagtgccactaacagtta

SEQ ID NO: 295405 - DNA, 630 bp, Homo sapiens
gaccacctatagcccccttggctctcctgataaaccctgggccaagcctgaggccccttctatcctggaggatcccaggatcaaggtgatcacagccaagcacaataaaaccacagcccagattctgatccacttcccccaggcagaggaacttggaggtgatccccaagtctgtgacaccagaatgcattgctgagaactttaaggtctttgactttgaactaagcagccaggatatgaccaccttactcagctacaacaggaactggagggtctgtgccttggtgagctgttcctcccacaaggactaccccttccatgaagttttgaagctgcgggtgcctgctcatccccaagtgacatatacctgtgtttccaatctcatttttttcttgcaaatgtagtatggcctggcctgtgtcactgagcagttggacagcaacctgtagagtggccagcaagggcttgtctaggttgatgttggatctgaagagcagtgtcagtagagtagaagtctcttctagtttgctttgttctttttgccccactggggaaagtataacctgaatacccttttctgaccaaagggaagmaaaatataccaggtcaaaatagtgccactaacagtta

SEQ ID NO: 295406 - DNA, 573 bp, Homo sapiens
tccaaatgggcttggtcttgtttagttattccagatcaatgcatttttttgttgttattgatcttggttttctttttcttatccttactgctgttatcctcgtcacctgaacccacatcttcaatcttgggctttttctcatctttatcatcctcttctttctcacctttcttttttttctgctttatcgtcactgacttctttcacccacccgttccttctccaaacaaagggtgatgggatagcctataaactacgagtgtttctttgacctgcctctcttagaaatactctmtctgtctagtcttctttaaagtggaggatcactttggtgccactgccaatgggatcaacagggtcagcacatacagttaagaaacccctagcataagactcccaggcatagtgtttatcatcattgtgctttatgatcacaaccactttttctgcctccaggtaggcagcataaaagccaacaccaaattgcccaggcctggagatgtctgcaccggcctgaggagcctccataaatgctttaacaccagacttggcaatagttcccaaattatttat

SEQ ID NO: 295407 - DNA, 577 bp, Homo sapiens
cagaaaaaacaaactggtggactgtctgatccaagttttatattttgtgaggcttaactgccattaggagtaatgcartggtgtgcctggaaaagcaaaaagtaaaatgtagatctataggttttgctaatttccaaggtgtaaatactcccaccacggccaatttcatgctaccaaagggacgccactgatgtggagtcgggatgagatacgcacaagcacttctcgcgaagtggctccagcaagccagtggtgcatgagatgagtgtgaatgcttccagtggatttcctattttattagcttctttcagtgagtgtccgaccttcagtgctggatcatccaagtcccatttcacctcttttgacccttgaacttctctttaaagagcttccttgatcgttctggcctttccttgcttcccagttattagaaacataagacgcctgcaggggatgtcttgaggtctcaggatagaatatttaaagtatagcatgtaggttcacccatgttttagtattaatctttaaaaaaagtcaccagtttttattctgcacatcagttctgttagaattagag

SEQ ID NO: 295408 - DNA, 577 bp, Homo sapiens
cagaaaaaacaaactggtggactgtctgatccaagttttatattttgtgaggcttaactgccattaggagtaatgcagtggtgtgcctggaaaagcaaaaagtaaaatgtagatctataggttttgctaatttccaaggtgtaaatactcccaccacggccaatttcatgctaccaaagggacgccactgatgtggagtcgggatgagatacgcacaagcacttctcgcgaagtggctccagcaagccagtggtgcatgagatgagtgtgaatgcttccagtggatttcctattttattagcttctttcagtgagtgtcsgaccttcagtgctggatcatccaagtcccatttcacctcttttgacccttgaacttctctttaaagagcttccttgatcgttctggcctttccttgcttcccagttattagaaacataagacgcctgcaggggatgtcttgaggtctcaggatagaatatttaaagtatagcatgtaggttcacccatgttttagtattaatctttaaaaaaagtcaccagtttttattctgcacatcagttctgttagaattagag

SEQ ID NO: 295409 - DNA, 561 bp, Homo sapiens
tctgcgtatcagtggtaggttaagccatgtgaatgattgatatcactcagggtattatgtggagtgagaagagatgagccctagacaaaggcagagcagacagagagacaggagaaagaccaagagggcgagggtagcttctgtaaagtcttgtctgatgcatcagattcacccaagaagcttgttaaaagttctggtytaggccagatgtggaggctaacacctgtaatcccagcactttgggaggctgaagcgggtggatcacttgaggccaggagttcaagaccagcctggccaacatggtgaaaccctgtctctactaaagatacgaaattagccaggcgtggtgacaaacgcctgtaatcccagctacttgggaggctgaggcctgtaatcccagctgtaatatgcctgtaatcccagctacttgggaggttcaagaatcacttgaacctgggaggcagaggtttcagtgagccgagattgcaccattgcactccagcctgagcagcaagagtgaaactccatctttaaaaaaaaaaaaaaaaaaaaaagttctgg

SEQ ID NO: 295410 - DNA, 608 bp, Homo sapiens
ttcatgtgatttggtttattttgatatttgctttattgtggtggtctgcagcagaatccacaatatctgagaaatatacctgcattcccaaaggtaaatttatttattgtttaaatgcagtacattgtatgtaattcaaagttataacaatgtataagatgaaaagtgaatctctgtctctttcatccatctggattatttctccagagtcaactgttattgctgaggtgttgtttatccttccagagacacggaatagcccttgggctaaataaagttttcatggaacacagccacacccatccatttatgtattgtgcatgtctgcttattttctacaacagagtagttgcaacagaaaccatctgctccacgaagtccaaaatatttgtcatttgttcttttacaggaaaagctcaccaaaatctggtctatacaatcaaatgcatatataggtgtgtatatgtatatayacacacacacatatatatatatacagatatttccatttttttactgattttataaaactaaatatagttttaaaccttggttttttaaaaaattaacaatatttaggcaatcacctcaaatcagtatacataaat

SEQ ID NO: 295411 - DNA, 495 bp, Homo sapiens
ctttcccagcagaagacaatttattcattaaaatctcccttaaacacatgcattttccattggaagcttaggctcatttttattaatttattagtaaaaaaaaaaatctatgcccttaaccataagataacttgtaggcaggaaagctattcttttaaaggactttattaaagtttcagccaataacaacatttatatttcaaagagcatattctttctattcacagaattcaaccaatatttttagcattgataatttacaaaaagcctaaatgmtttaagatacaatattaataaaataatgtttttgccttttaaaataagtagaaattggaaaaatgccccctcctaagaccaccataaaaataactcataacagtagagaagtccagtaaggaaattagctttttattagttttgtgccattgaatattgttcttatcacatcaacctaagtggggcacatattactagttatgttacttaatgttaagt

SEQ ID NO: 295412 - DNA, 592 bp, Homo sapiens
ttgaaatcttaacctgtaatgtgatggtataaggaggaggggtttgggggaggtarttaagctgtgaaagtggagccctcatgaatgacgttagtgactgtgattgttaatattgtcaacttgatcggattgaaggatgcaaattattgttcctgtgtgtgactgtgagggtgttgccaaaggagattaacatttgagtcagtggacttggaaaggcagacccaacataaatttgggtaggtacaatctaatcagctgccagggtagccagattaaaagcagacagaagaacgtgaaaagactagaccggcttcacctctgaacctacatctttctcctgtgctggatgttttctgccctcaaacattggacaccaaattcttcagctttgggccttggactggcttccttgcacctcagcttggcttgcctattttgggacctcaccttgtgatcatgtgagttaatactccttaataaactcccctttatagatacatctatcctattaattctgtctctctagagaaccctgactaatacagtgctcttataagaagtgagatgaggatatgaaagcttttttctccat

SEQ ID NO: 295413 - DNA, 599 bp, Homo sapiens
tgtgtttgcctgattcaaacgcattagcaaaaattaataaactgctgacatccctctatgatcttaatattttattcaatgttaaataaccaaatttaatagtaaaaaataatttaggggatgcagatttatgaaytgaacatcttaacattattgtataaagcatgtgctatatatattcactgaagacacaaatatctcagagttctctgtcttgtatgatccattgctaacttacctcaatttctcacttcctcttacaatttcattactgtattctaagccaagaagattcttagaagccagtgcctgtaagagccagtgatattttttacttcaagaattaaaacatgatctatttactcttgctttctacatgcattcattaaggagtgcaaattacacaattagatgcattttgttgctcaaatgaaaatttcatatgccaaaatgtgaactcaggagagccaattggtaaaacccaatctcatattctgcactgaatactgatctgtatttttgcttgaagcttttctacttgaaggtttaaagtatcactcttcatcctaagtattgttttcttagaatgcttttgattt

SEQ ID NO: 295414 - DNA, 646 bp, Homo sapiens
ggctccattttgtacccaaatccatctgatatacttactaatctactggctgtcagtttttcctctaaagtggtaccatggttttgggtccccaatcctgctgtgcaggatgaaaatgataaaattttacaggtaacattaatgctttcataaattagaaattctctaacacagcttttttaaagaccaaaacaatgaaatgcttaacggtctcaaagaattaacataataaatagatgataacattttmacatataaatcatgccttatctcttcttgtatccaaagtctgtaatgtttcttactattaattagatcatattttgactagagtaaagggagtattgcataaggcagtagaaatctaaaatttcagacaaattgctactaatgtactataatattatgttaatggatactcaaactcaccaagagacagacctggcagtatgagttactccttctggtttctgagctctcccatcctaatagctgggaaatttaggagaaatcacctcatagctctgtctacaaaatgaggatagcaatagttaccattcgatagaacatcaattaattaaggcataatgtgtttagacagtgcttattttaaaaaatgtgttttgattgttatttataatgtttt

SEQ ID NO: 295415 - DNA, 657 bp, Homo sapiens
ttctgtatatttttccctttgtctttgaactgtggtcatatattcttgcctttctagtccaccaataataagtcttaaaatctttgcttcatcccaagggattttaaaaatgttacctttcccatgaaactggctctcaattggaatgaacgctcagcccagcatgctttgctttttgctgcatcttggtgttagcaagatgttagagtgcagcagcgttgcctgcattggtgccttattcctgctcctaccctattttataagcatctcagatgycacagcaacatcttggtcacactacagtgcagattctattacttagtattcaacaaatatttcctgacattgatttttgtttaaaggtaagaataagaacttatgtgacaaaaaccaagacattcaatttttggggatattaggaatttttaaaatagcagcattaaaacaatcagtgcatagtacagagattactatatatttgattggttttcttctggctcacttaaaaaattctatggtgtatgaatgcaaatacatatatctaatatgtagctgcaaaaactaaaaagtaaaaatttaaaaaaatctatcagtcacaggcactgttttaaaatctcttatagtataaacacttctggttttaatagttaatgatgc

SEQ ID NO: 295416 - DNA, 598 bp, Homo sapiens
ttgcattccatttaagattttttttctatccctatagtaaatcagaacttgcttataaataaattacattctagaattccattttaaggcttttgtttctatgttagaagacatttttcactttacaatgataggtcatttttacaattagtctatacaactctatttaagtcttaatgcatctgacatatatatagcattatttcaattatagccaaatgttttgtttttatttaacaatacataygaaatttttggaaagcagattttacttccttaatggtgatgactccactggaagtttcagggtcaaggattccaccagtaacacagtgtagaggaagataatgttactgaacatcaataaattctgtcatctttttaagtcaggtgaaactcattaaatatctatcctatgttgaacatactgatcctgtactctagatgcccccagcttaaaacagggagcttatataagtatagataactgcagtagagtgagttaagaatagcatagactaaatacaagttatgagttatatagagaggagaggggaacatggggatgagagaatgggatttagaaagggcttcaccc

SEQ ID NO: 295417 - DNA, 1766 bp, Homo sapiens
gaattagaaaatggaaagccttcagaaaacaaagtagttatattattggactcttcctctttcctcaaggcatcctagtcaactcttctgcttctctgaagacctgctttattatcttcccttgactgacattctttgtttctgggtacacattgaagatgttgaatacccctgtatacccaggttcacatgttctcacttccagcaatcaggaggactgactagcaattctgatttcaaaaatgacaagtatattactggtttaccttgagtcaagtatcaaccctggttcaataaatggtgaccatggggactaggtcacaaagttagtgccagctccagtgattggggctgggaggtcagggtctggacaattaccccacacaaaattattttcttgtttttgcgcttgtatgcttttctgaattgtttaatgtgaacacattcctcgtttgtactaatgtaaaataagacgttatcaaaaataaatttgtcttttaggttgagagaagcaatgaakataccaaatgagcctacctatgcaaataacagaaccatgggttagttatatcctgctaaaaatatcatttgaggtagagaatactctagctgggaattcaatacaaatawcactttcattaaatatggataaatgtgccctttaaaatccattttagaaggaacwtattgaaggaagtcaacatgttatctttctagaaatccaacacagctagttttttctactgggctgaaatagatcattttttctttgtttaagcaccagataaaaaaaggactgatcaatctgataggtaaaaaaattgcaattttctcttttaaagtgtatttctctgaatattaatgaagttagccttgttacttcttacatttattagttctgtgaatgccttcaattcatatctttggcatatttttatagggtcatgcatcctttttattattgcctctaaggattctttatacattatagatattaactttattgtataatacatgtgcccaagtgttctcatttttgtctaattattaatcacatatagaagatgttaacttttttcctatatatatattttcctttatgcttctttctttgcctttctacttagaaaacctctcttttcatatgttattttcttattatactttwtctaggaagtaccaaagtttccacatctcagacttctgaaaccccaagtctttaggaagttccaaaatctcccwcatttttcctatcttcttctaagtcctgcaaactgttccaacctctgcctgtttccaattccaaagtcagttcgacattttcaggtatctttacagcagcatcccactacctggtttactgtattaagtccattctcatactgctaataaaaacatacctgagactgggtaatttataaaggaaattgtaaaaggtttaattggctcacagttcagcatggctagggaggcctcaggaaacttacaataattatagaaggagaaggaaacacatccctcttcacacagtggcaggaaggtgaagtgctgagcaaaagaggaaaaagccccttataaaaccttcaggtctcatgagaaatcactcactaccaccagaacagcagcatggaagtaattgcccccatgattcaattacctcccattgggtccctcccatgacacatggggattacgggaactacaattcaagatgagatttggttggggacacagctaaaccatatcaccatacatagtcagccctc

SEQ ID NO: 295418 - DNA, 526 bp, Homo sapiens
tcttgtgtccccacccaaatctcatcttgaatcatagctttcataattcccacatgttgtgggaggaacctggtgggaggtaattgaatcatgggggtargtctttcccatgctcttctcatggtagtgaataagtctcatgagatctgatggttttataaagggaagttccctttcacatgctgtcttggctgccaccatgtaagatgtccctttcttgccttctgctatatttgtggggtctcctcagccatgtggaactgtgagtccattaaacctctttgctttataaattacccaattgcaggtatgtctttattagcattgtgagaacagactaatacactgctctactgccacattgctagaaatggaatccacaaggtaagttgaacactattttttcagttatttaaacttttgagtttggtgatatgcattgctaattaatttgaggaaaaacctattacagatgaaatagattatcctgccattttaagcttaaaaaagaaatttaacatattaa

SEQ ID NO: 295419 - DNA, 637 bp, Homo sapiens
gcactgtgccagcaagctcagggcctcagctgggtcttgaaccaggtggagaaggtgatcagccactaacattccaagtggagggggtgcatgagcagaagtcagcatgggatgcaggcagagctgtagcagcagcacagtgaggtgggtatgrgtcaagtccctagagctaggcttgaatctagctgcactaccttgggtaagttgcttagcctccttgtgccttggtatcctcatctgtaaaatgaggacacttatagaacccacttcataagtgttgagggatttaaatgagttaatatataaagaggttttggagcagtacctgaaacacagtgagtggctggagagtgttagctgttatggttcactccagcattcattaaacactcattgagcagctggtgagggctgggcattacactaggcaccaggaacatgcacagcctttccttccagaagcacacagcatagatgtgaagcctatttaaacaatgtaatagactcatagagacaagtccagagggttgtggaaaccagaggaagagcacatgacctggcctgggtgggggtacagagaggatggacttggagtggggtgtccagaaaagtatttccaagaagttgtcacctggcc

SEQ ID NO: 295420 - DNA, 505 bp, Homo sapiens
tgtctacacctccactatggaacccagggggacatcctgactctgctaagccagtcaagtcagtctcatttccccttgctagcaattggtgtagagatgggcatgtcacccagttccagccaatgacacatgggggaggtctgctcagacaggattccttgctcttaaatagaagaaataacctcccttcttactacctggacatgatgccaggaatgttggctgacgccttgtgaccccgaggggagctggtctctgaggcagaaaggtctaagctgagaataggtgaaaggaaagaaggaaggagcttggatcctacatggcatcatggaacytcttatgaacccattgcacagccactctacctgggggatcccttcttaggtacctgagcccagaggtccaagctgggtgcaggcttggtctggggtatgagattggtcttgggccacacagtcagagccagacaaggggcaaaaatgtaaggtggtggtgcctgctgttt

SEQ ID NO: 295421 - DNA, 574 bp, Homo sapiens
agaggaatatactgagccctcatgcacccatcactcagcttcaacatgtgctaattcatgtcccatcttgtgtccactggtgctttttgaatgtgctccctctctctccccacaaccaacagcacaggccccggccccacctcaggcctgctcccagggctcagaaagaggcacattgctggggtccagctgcatggagaaatggctgagtcaggctgattctgaagaaagtcaaggctgggcatttcttgatactcatctgtcacacaaacattatccactycatcatgtgctggtagcagatgtagcatctagctatccctggccagcagctcagctggatgtctaagactgtatacaggtggttgtaaccaccacagtcttgggctctgaagatttgctctcctccaaatgagccagtctcctggccagccattcattcaatcagccacagtacattgtccacttctgtgttgagtgccagggagactaagatgaatatgatccaccccaatggagaagacaggtaggtaaatggtgaccataagacaacgggctaaatgcccaggtaaag

SEQ ID NO: 295422 - DNA, 401 bp, Homo sapiens
tcatagtttcagcggctgtggtgaacttttgatatattgaggttatggttatataaaacctctgtttttcgtaacagttgtagagaagccagggctactctgtccttcacttaaccactaggtatgaattctgtggccacatgaatttgaatccaggctttcttcattcactaactgtgcaaccctgagaaagctgctaaactaccatagggccttgctcttcaaggtgtggtacaaggacttgttttcatcaagcagcttgttagaaatgcagmatctttttttttttctttttaaaatagagacagggtctctctatgttgcccaggctggtcttgaactcctgggctcaagggatccttctgccttggcctcccaaagtgctaggattacaggtgtga

SEQ ID NO: 295423 - DNA, 570 bp, Homo sapiens
cttggcatgggctgggttccaaggggaatatggtgaaaggcagaccttgtcggctggtgggcagtgttttactcactctctaagcgtgacttgcccttgaattgccgccttcatcttcttttgcttgtgcattctctgcctgggacaagctctgtactatggcaaaaatcatcactcacatggtgtcaccagcagggagtgctgggttaagggcagctcctgcaaaatgtctcagggctgttggttgacagtgagtgtaacaggagccaacagtgcctgttgtacttctggacaagaccaagccttgtgctgctcagactacatgcggcatcctgagtctgattctgggtatcatgtttttaaacaataacttttctttgtgtgaattagaagtagtatatgatcactgtggaatattgaagaaatgcagacaaaatgrgaaagaatgattgcccatagtaccatcaactaagcattggtggtattatggtgggaactgttcacctttaagggtgtttccatgcccacgtgtgtgtgtgtatatgtgtaagtgtgtgcaagagggtatgc

SEQ ID NO: 295424 - DNA, 570 bp, Homo sapiens
cttggcatgggctgggttccaaggggaatatggtgaaaggcagaccttgtcggctggtgggcagtgttttactcactctctaagcgtgacttgcccttgaattgccgccttcatcttcttttgcttgtgcattctctgcctgggacaagctctgtactatggcaaaaatcatcactcacatggtgtcaccagcagggagtgctgggttaagggcagctcctgcaaaatgtctcagggctgttggttgacagtgagtgtaacaggagccaacagtgcctgttgtacttctggacaagaccaagccttgtgctgctcagactacatgcggcatcctgagtctgattctgggtatcatgtttttaaacaataacttttctttgtgtgaattagaagtagtatatgatcactgtggaatattgaagaaatgcagacaaaatgagaaagaatgattgcccatagtaccaycaactaagcattggtggtattatggtgggaactgttcacctttaagggtgtttccatgcccacgtgtgtgtgtgtatatgtgtaagtgtgtgcaagagggtatgc

SEQ ID NO: 295425 - DNA, 636 bp, Homo sapiens
agcttagtgttgggtggaggctttgtcataacactgtgggataaaacttgacagggtgttttcgatggcaagacatacacacactgccctctcaagcaggggcagaccctctggcatttagttttgggcacgtggctttctgaaaacatgcatgtagatgggctgtgtacaggtcctacaacagaatcccactttagaaagaggtatggggagatggaagtgtttggaggactacaccttccatggcattcctatgagacacagtcttcaaaggtgctggagtgttcccagcactcatgctctttgctcggccctcttccctcatgattgtacccacacctgcacacacactgctcacaggcctaagctaatgggcctcagcttatgggcggcagatttgcttctttcagtaatgcctgctgattcccacrttcgtgtcaactgtgttgagcttttgaggcctgttcttatcattagcacttagctttttcttctcatttcccagtcatttttgtaaaatgacaagagtaaccgacagtaaactattcaaccacttgggaaaatcaaggagtatgaaactgatgggctgggagtggagctccagctggctggcaggcggggcctggagcagaatgt

SEQ ID NO: 295426 - DNA, 636 bp, Homo sapiens
agcttagtgttgggtggaggctttgtcataacactgtgggataaaacttgacagggtgttttcgatggcaagacatacacacactgccctctcaagcaggggcagaccctctggcatttagttttgggcacgtggctttctgaaaacatgcatgtagatgggctgtgtacaggtcctacaacagaatcccactttagaaagaggtatggggagatggaagtgtttggaggactacaccttccatggcattcctatgagacacagtcttcaaaggtgctggagtgttcccagcactcatgctctttgctcggccctcttccctcatgattgtacccacacctgcacacacactgctcacaggcctaagctaatgggcctcagcttatgggcggcagatttgcttctttcagtaatgcctgctgattcccacgttcrtgtcaactgtgttgagcttttgaggcctgttcttatcattagcacttagctttttcttctcatttcccagtcatttttgtaaaatgacaagagtaaccgacagtaaactattcaaccacttgggaaaatcaaggagtatgaaactgatgggctgggagtggagctccagctggctggcaggcggggcctggagcagaatgt

SEQ ID NO: 295427 - DNA, 636 bp, Homo sapiens
agcttagtgttgggtggaggctttgtcataacactgtgggataaaacttgacagggtgttttcgatggcaagacatacacacactgccctctcaagcaggggcagaccctctggcatttagttttgggcacgtggctttctgaaaacatgcatgtagatgggctgtgtacaggtcctacaacagaatcccactttagaaagaggtatggggagatggaagtgtttggaggactacaccttccatggcattcctatgagacacagtcttcaaaggtgctggagtgttcccagcactcatgctctttgctcggccctcttccctcatgattgtacccacacctgcacacacactgctcacaggcctaagctaatgggcctcagcttatgggcggcagatttgcttctttcagtaatgcctgctgattcccacgttcgtgtcaactgtgttgagcttttgaggcctgttcttatcattagcacttagctttttcttctcatttcccagtcrtttttgtaaaatgacaagagtaaccgacagtaaactattcaaccacttgggaaaatcaaggagtatgaaactgatgggctgggagtggagctccagctggctggcaggcggggcctggagcagaatgt

SEQ ID NO: 295428 - DNA, 560 bp, Homo sapiens
ggatcattaacagatgtcttaatcatgacttgtccagaagaacactttttccttctttgtcctccctggtgaaccccatgctttgccactaattgttcccagccctgatgctcagtaaatagctccagaactgactgagtcaaggctgggctcgtggtgaggccatgagatgccaagggcacatgtcaagaggctctcactttcaggggtccgctctgaacttgcatgatgccaagagtgagcgcctccttacatgttgtgcccttggtggctggcttgtgccaccctagtgctcactctgcctgtactgagttcctccaacccaatgcctagaaactatattttgattcttctgatttttttcactgccaatattcagtccttcaggaagttctgctgactctgtcttccaaacattgcgaacatatcctgtcctctccacttccattcctgccgcgctggccctggcrctcaacagctctcccctgaaccacttaatgggttcccagtgctacccatgtcctcctccaatctattcttcacacagcagccagaaattc

SEQ ID NO: 295429 - DNA, 1081 bp, Homo sapiens
cgctctcatgtgccactggatacctctcttggcattgcccaggatattttggaagtggtggtgaaagacagattgatcttcatcatctccctccccagcaaagggccaagaatgccatggagtgtaaagactccaaaaytcaaagtacccgaaatttggaaagcagtgcttcccacacttgcacattattatatgcaagaagatgagattttaatgagctctggacagaaaaatatggaaaatcaattaaggtgtcatgaacagaaatactttgagaaagggagtggctgacaaactgatcaggaagagacataccagaaaggttaagaatgaaaattgctcttaacagcatgaatcgtggcttatgactctgatcggagcagggagcagggctggtgtctgcatgggactgagcagcgctgtctcagaaccaagctctccccaaattcatgctccagatggttctgtcaatgtggaggatggtgccttcagagcttcttgtcctcgtttaaccttcttcttcgtwtcagtggaacaaaagggtctttcattttacaggattctccttagaaggtacttgtggatcaataaggcaattttactctttgttacattagtatcatggtatgccattgtattgccttgagttaagaattaagtttgtgtgctaagttggagagtaaagtgtttattgtattgtttcttggctgtgtgactgagcatagtagaggagcatgaatgcagatatcagcatcacccagagagaccctgwgggaggaaataagaagaaggtgaggaggggagccacatcagccacataggggacaaagagtcagttaagaaataatgccccagagcatgtcaatgggaccccctttccttctctctggccccagagggatgtgctttccacccccaggaaagcctctgcatcagtaaggcaaagctgttattgctgttactcaattgtattcagcatatatctactgagtccctgttgcctgctggacactgggaaaatggtgacatgcaagacagccaaggtccctgttctcaggaatgttaaactctactgagagag

SEQ ID NO: 295430 - DNA, 1190 bp, Homo sapiens
gttggtacttggacatctgaaatcccagtgtttcccatgcctggaccagcccagacttgagaaggtatgccaatgctgactgagaaggtagaagggttctcagtgcttctggcatcataagaggaagagaaggaaaaatgcctctggtcacagttaaagcctttcatggccttaattagagctccagtaactttaaaacagagattgggaaattcaaatctgtaggcaaagtctgcagcaggacaaatgaggtccttgttcctgaaaaattcggggctggctggctaaagataatcccaataatggagtcacatgttacagataccctccaggctcactgcctttagtccattcccatacacagccactcgaggaatctgtccaatatgcaaatctgatcatgtccctgcctatttctgagccttttgtggctccccatttgatgcttccgattccactttccttgagtgtataaaagccctgtgatctggaccccatttgtccctctagcctcatctccggtcactcctggcctcackctgtgtcctcctcatgtgtgtgaagctcccagagcacactctgacactctacgtcctcagctttwgcattgcgatggggaaggtgtcaattcaccggcagggtccagtgagcaagctctttccaaagtctatgtactgccccattgtgatcaatgaaacatcatctgggtgtgagaggcaaatgcagcagaactgatgaccgagtggatacaggtgtctcaggtcttcaggggaggggctacgacaggatgggaacccacaacaagggtcagaattattttwaaaaaaattaaacctgggagaaaaacacaagttagtgctacactgtgaggcaaagaactgtctattgtcacatattctctataaagccaggataaaaggaccctggggctgaagtccagtgggagcagaacaagaatgcctcggaaggctttggaaagggcaaacccaacctgaacttgggagctggtccccaaaatcccaccagaaagtactcattttctttaaagactaggaatgtgaggactcatgtagctacttggcattgaggcaaactggaaatatgaaactaaacttgtttgctaaaccatgacaagctacagcctatagttctaccatatgcttctaaattgcccatgtcttgtacagttt

SEQ ID NO: 295431 - DNA, 535 bp, Homo sapiens
gggggataaatgagtgtgctgtctatgtatgtaatcatctgacatcccattggtaatttcctgcaggaggagttggctgctgtccaccgctgcgaaatgagggtgcaagagagagagggcaaagcaggagaaatgaggctggaacatgcccagcccagccaatcctcctcgggcttccctctccttgacagggaggtcagtcatgtatcatgcacgcagctcatatgtgytggacactttcctcaggcacagggctggttgtggtaatggccacacctggtaaggcctctgtcatcctgggaagtcctcccaaatgtccatatgcagagtgttctggagatgggttaactcacccaaaaacatctactcttgggttctctctggttccctcttgccccttcaagtagtctttcttggtctcttttattgattatgctttttacttcttgccctttaagtgctggggttctcaagatgtccctcttggccctcttctctgctcactgtaaagcactagttcaggaagtccatccac

SEQ ID NO: 295432 - DNA, 557 bp, Homo sapiens
acttagctctcagcctattgctctctgtccctagacttcaagctccttgaggacagggtcacatgtttgcacttcagaaccctagcaccctgcatatatgtggcaactgattcaaagccaggacttcagcactgcccatcagtcatcacaagatccctggacacacaccagcatacaggcatgggggcttctttttactgttgggtttmctgttactgcagtggaatgactgggcccctggaggtctcatagcaagctcactgagctcacctggacccatgctcatgatggcatgtcttctgggcggcattcagtatatgtagaaagaacagtaaagttggagtctgatgacctgtgttgaattctagttctactactttctagccctttgatcttaaaaaaaaaaacaaaactccaagatacagttttatcatgtgtagaatgagttcttaagaaaatctcccaggaattgttgtactaatttagataaatacacatattagtttgagccttcctgaaagcagagcctgagacaaggatttgggtacaggaaattt

SEQ ID NO: 295433 - DNA, 467 bp, Homo sapiens
ggcggggaacataacacactggggcctgtcatggggtggggggctgagggaaagatagcattaagagaaatacctaatgtaaatgacgagttaatgggtgcagcaaaccaacacagcacatgtatatctatgtaacaaatctgcacgttgcgcacatgtaccctagaacttaaagtataataataataattttaaaaaagaaaactctgcaacacagacattctcaaagatgtttgttggatgactggatgagtaaaagtatctttcccatratggatactcaggatgatcttccacaacattgttcagactttatgaattgaaggagagaatgcatcatttactaatgaaatttcagataatcatacaagatgaacaggttggaattccttttccattcagggtggaataacataaaccaggtttgctctatgaactgaaacaactaaaagtccagacaacataca

SEQ ID NO: 295434 - DNA, 600 bp, Homo sapiens
ctgaacccaataaaagtgcatgtagctggatggctgggggtggggtgaatatcacactccacagagacctagaggtgcagattagtagttcagcatggtccaacagaactctgcaaagaagaccatgacttctgtgctctgycttctaccttaatacttttcttttgaggagaggtgctatgagaggcaacgttgtaaattgcagggacttatcttagaaagatttggacaccagaaagggagaactttctgtactagggttggaactttaatggaagagtgtcaggaggaaggaagagttttttgggaggacattgttccaatggggaagaagacatagctaggtccctattgaagcagatatgcttagctttcaagctgagtgtcacgaatgggtaggtgaagatgactggtctgatgttatagctggaatcctgctgcaaactgctgcatcctatgatacccagatgggatgtgaacccctagtcaaggctcaggttcacccccttggtccagtgaagtaggcccaatagagccctgaactcatacatggagtgaatcctcagtcaaatagttccatgagccctaacatcgcctcag

SEQ ID NO: 295435 - DNA, 579 bp, Homo sapiens
ttaaaaatgaaaaaggctggagcaagtatgaatgttgagagccacacacacctgatagacatttccttgaaaggacatggcactgattaattggatcagagygaggactcaagcatccacaggggctggccaggcatagggggaagcaggagcagggagctgtgcacaggtgtgtgagggagactgaccgggggaggacacgaccaagtaaaggagatgctacctcactctctacccctaacaactgtgactgaagctaggagggaatgagggggcctcggctcttcagatcagctgtcagatcttcagatgctcaagaactgagtgtaaaacctcctggcttatatttttcacaggagataaaacaaggtgcagaccgaagaaaccaagttctcaggctggactatgggccttggttgtcttggccctgtggggcagaagggatgaagatgggcagagaagggcagaaatagtcctctgaaaactgagtggggacataggagcacacagccaccacccatctgttgagagcgttttgaatgttacaatatataaattgaaatttgcagctgccctcag

SEQ ID NO: 295436 - DNA, 579 bp, Homo sapiens
ttaaaaatgaaaaaggctggagcaagtatgaatgttgagagccacacacacctgatagacatttccttgaaaggacatggcactgattaattggatcagagcgaggactcaagcatccacaggggctggccaggcatagggggaagcaggagcagggagctgtgcacaggtgtgtgagggagactgaccgggggaggacacraccaagtaaaggagatgctacctcactctctacccctaacaactgtgactgaagctaggagggaatgagggggcctcggctcttcagatcagctgtcagatcttcagatgctcaagaactgagtgtaaaacctcctggcttatatttttcacaggagataaaacaaggtgcagaccgaagaaaccaagttctcaggctggactatgggccttggttgtcttggccctgtggggcagaagggatgaagatgggcagagaagggcagaaatagtcctctgaaaactgagtggggacataggagcacacagccaccacccatctgttgagagcgttttgaatgttacaatatataaattgaaatttgcagctgccctcag

SEQ ID NO: 295437 - DNA, 563 bp, Homo sapiens
ttttgttttgaacttctttcctcctcttggaagtgtttctgtgttaggagctggcaccagcccctggatctactcgctctttcccgcccccatgcctccgcaggaatggataaactccaaacagttttcatactaaaccccttttgccaggctcctccatctcctgccatagcttcacagtagtccttccactaacaaacagtcgagcaggctctggtttaaccttcactgtattttactaccaatcacagcttcttaacatgctaggtcaacatgaccacacattgcatgtgggttcagggcctcatagactgcacgatgcctccttatgggcctcctggagcaccatgtaccctgagattatgattctctgccttaattgaccttcagcagctcttgtccttcctgtctgtgcttgggccaggctcctgtgggccaygtgttcacagatcgtctctgaaggtgccaggcaaccgtccctcacttcacagtttacaatatgccaccgagtaaagtgacatgttcccacctgaatagccacagaaggctaattccaccacccc

SEQ ID NO: 295438 - DNA, 582 bp, Homo sapiens
tggtaccaaatccatatcttctgattcttaaccctggatttgttccattatacatcaggctaccatttgactaaattcttatgcatctactttaattccaggcaaatctgcaaaataattagtggcctgagtgtaaacattttcttcacatagaaggaaatcaacatatactttatgtcatgtcttatttatcagtttacaatttcctggtctatattaactatkttttctttatatgcttcttgacattatttacatttctcaggttttttgattttgctgaacttgtggctactatgcaatatgttttagcctctctaggcttctcccaacatttgtgtgcacttgtattcacaagactagtatgaaagtagttgaaaataactgcatcttttacatgcagttcatggtagaacatttcctctggactagaagtatgtttctgacatattccaaatggaatacattcatcacttttggtcccatagcagcttagtgcatatgctccgcaaaatcttccctcatttagtccttcacagaattcttccaaacacattgacatgtgacatgtccgtttcatcc

SEQ ID NO: 295439 - DNA, 573 bp, Homo sapiens
tttgtgcccccccacaaaactcttatgttgaaacctaaggcccaaggtgatgttgtgaagcaggggggcctttgaraggtgactgggttatgaggccagccttcatgaatggcattagtgcccttataaaagaggcttgaggaagcctgtttccccttctgccacataaggacacatagaaggtgctatctatgagacacaggtcctcaccagacactgaatatgccagtgctttggtcttgaacttcccagccttcagaactgtgagtttcatttatgaactacacagtctaaggtattttcttatagcagactggatggagtaagacgccggactaagtgctgctcatctttacatcatgaagatgtcactttccacagggaagacccccttctacttcttcatcctaacccttacccaatggtaatcatgtaataattttgtgaatcattgtttaatatttagtgtttttctctctcattatactataatctccacgagggcagagaatatatttgttttgttggtatcctaatgcctggccccataatggtcactcaataaatatttga

SEQ ID NO: 295440 - DNA, 469 bp, Homo sapiens
gaaagttaattacacttctctttcccctaggcctacacagggtcaggataatcagtattaccatcttccacccccacatcttgtcccagtagaaggtcttcaagggcaatgacacacatggagaggtcatctcctgtaacaatgcctcctggaataactcctgaaggacctacctgaggctattttacagttaactttttttataagtagaagaagtatactctaaggtaatgataaaagcatagtatagtaaatacataaaccactaatatagtcatttattatcattaccaaatattctgtacataattgtattgctctacttttctacaatggrcagcacagtaggtttgtttacaccagcatcaccataaacatatgagtaatgcattgcactatgacatcccaacagttatgaagtcactaaatgataaaagtttttcagccccattataatcttaagggacca

SEQ ID NO: 295441 - DNA, 573 bp, Homo sapiens
tttgtgcccccccacaaaactcttatgttgaaacctaaggcccaaggtgatgttgtgaagcaggggggcctttgaaaggtgactgggttatgaggccagccttcatgaatggcattagtgcccttataaaagaggcttgaggaagcctgtttccccttctgccacataaggacacatagaaggtgctatctatgagacacaggtcctcaccagacactgaatatgccagtgctttggtcttgaacttcccagccttcagaactgtgagtttcatttatgaactacacagtctaaggtattttcttatagcagactggatggagtaagacgccggactaagtgctgctcatctttacrtcatgaagatgtcactttccacagggaagacccccttctacttcttcatcctaacccttacccaatggtaatcatgtaataattttgtgaatcattgtttaatatttagtgtttttctctctcattatactataatctccacgagggcagagaatatatttgttttgttggtatcctaatgcctggccccataatggtcactcaataaatatttga

SEQ ID NO: 295442 - DNA, 318 bp, Homo sapiens
agggctttatgatactcatttttgtgaactaatcatatccctttctccttattttcccttcaccttgacttatttggttatctttcatactgttacacttatttctaatacccctttttctggaggaggggtaaataaatacatggaaaataataataaatctctagcactcatgascctcgggaacactaataaaaatcgatctcctttctacttagcattttttttctttccacttgccacagcatgtagtgtttagtatatactcaatacatagttatggtttgagtaaataaaatgtagtacaatataaccaat

SEQ ID NO: 295443 - DNA, 846 bp, Homo sapiens
ctccatattcctgtgggtatctacttagtacagacagtgcctcttagaatactggatgcacaaagtgcttaaaattttttacccaacaagtgtaacctttagtatcaatattcattaattgtaattactttcatttatatagctttgatcaatttaaaaaaactcccacacaatttgaattcagctatttacactgttaaaaagccgaagractcgagaaattatcagagaggaatggcagctaggaaaatcatgatttaagtttctctccagcttccaactaccaggggctaatagtggtgggtttaattataaaacctctgactcccttaaagccaacagtwaatagtggtgggtttaattataaaacctctgactcccttaaagccaacagtaattggcaggcactgtctttgaaattcacaattgcatgtgctctggaaggaaacccagctaagcaaatataatgtctttctgctggcagatttgatttacacagaagcctttacttaaacaattagcaatagaaaaagcaataaatataatgccttaattgtttttacttcaggctatctttaactgagacaagtgtatgagtttatagtatattacagcawatagcttctcttaatggctttccttggcttgtaaactctgtcagagcaatgaacgtctttttgcattccatgaatgtgtatatttattttaggcacccagaaatctcaatagcagtattatgatccccatgagtctacttataaaatgagtttttcttaccatggtggtggttggtgctaaataaggcacattcttgatgattttttgaacgtgacacatgatcactac

SEQ ID NO: 295444 - DNA, 527 bp, Homo sapiens
tgactggtgaataagagcgaaccacttcgatttggttatcaatgagaacaagtagaaggcagatgaggcagtgtcacatcttatgagtttattgaccaactagagaagcaggatggttaaaagacttgaaatcatgtcacatggggataagtggtatgtgaaatatctcacgataattatgaattcatctatttctcctttaaattatgtmacttttaatgattactttgttattacacgttcccaaattgaagataggtctatctcctgtgtagctatctcaagcttatttagactagtgtttacctgtaactttttccatacttttaatttcaacatttccatgtttttatattaaagatctctcttcacaataaaaattgtttttgcttgtttgtttttatttttataatctgagctgacaattcttatctttcaattggaaattttaggccactgttatttaatttaactactaatatgtagtcatgtgccacataatgatgtttcagtcaacgatggactgc

SEQ ID NO: 295445 - DNA, 460 bp, Homo sapiens
ctctctacttgaaacacttgattctctgggctctgagccacctccctctttggttttcttcttctcttaccagcagccccttctcctttgctggtttctgaatcttaaacatcacagttcccagggcctcattccataaataatgtcatcctctctcatggctttaaacatttacacacttacggakcccaagcttacatctttgcctattcagagtaacaactatgaagcaaatcaggttagcaattaccaaaaccaacttctgatggatcccaaagcttgtcctttcccatctctggcaacttctcaggcccttaaaatagatttatttcgttttgtaaaaaagtctttcaattttatttggatgttggaatcctgcatttgtattctagaacttgggaactgaaaagaacaatagaaatcaactagtttaatctcattttttaagtaagacaatcta

SEQ ID NO: 295446 - DNA, 460 bp, Homo sapiens
ctctctacttgaaacacttgattctctgggctctgagccacctccctctttggttttcttcttctcttaccagcagccccttctcctttgctggtttctgaatcttaaacatcacagttcccagggcctcattccataaataatgtcatcctctctcatggctttaaacatttacacacttacggatcccaagcttacatctttgcctattcagagtaacaactatgaagcaaatcaggttagcaattaccaaaaccaacttctgatrgatcccaaagcttgtcctttcccatctctggcaacttctcaggcccttaaaatagatttatttcgttttgtaaaaaagtctttcaattttatttggatgttggaatcctgcatttgtattctagaacttgggaactgaaaagaacaatagaaatcaactagtttaatctcattttttaagtaagacaatcta

SEQ ID NO: 295447 - DNA, 578 bp, Homo sapiens
tatgcacaatagggataaaatatgcatctcatatgattgtcctgagggttgaatgagcacttgcatagagaaaaggtttcacaactggtagttattgctgatagttgagatcagcctagggaaaataaattaatctatctgaatctcagggttctcccctgtaaagcagggaagaatactactacttttggagaattttctttgtgagtttttgatacaatgtatgtaaaacacctaactcaccatctggacataataggtgatcaatcattttattgcatctgctaacctcagtctgtaatactcagaaaacatggttttaagagaytgtttggactgatattctgggtgagtaaagaggcagtacattgtacaataaagagcatggattacctgggttctaattctaactctgctatttgttagtcgtaatcttgagcaagtcatatgacctctctgtgcctcagatttcttatctgcataaggaggatgatatagtacctatgttggaattgagagaattaaatgaacaaacataggaaatatactcgatgtagcgcctaatatacagttactat

SEQ ID NO: 295448 - DNA, 596 bp, Homo sapiens
gaacaaacataggaaatatactcgatgtagcrcctaatatacagttactattgaataagtatttgctatcatgattccctgtaagaagatccaaaaaccaactttttaaattcacacggaacacagatacacatacacacatgcatgcacgtgttcactcacttgcacaagaacacacctaccgtggttggctgggggtaaccaagaataggcaatagttcacttaatattgaatttagctgagaagtcagttatgaattatgtgaaaagtggaatctaataaggtaaattatttttccttgttatagggttgatgagtattatattgaagacacaccaatttatggtaacttagatgatatgatttcaggtaagttttccataagttaaatttataaataagtaaatcccagttggtttcacaaaataatttaagtggcgctttaaaaaaatcaaatcacacttagctatcccagtgataaccatcaattcaagaacttttagtatattaattaggctacatttccaaagctgcatattgtaagttgtattacaatagccactctaaatcaacatcctgtttttctatattctct

SEQ ID NO: 295449 - DNA, 596 bp, Homo sapiens
gaacaaacataggaaatatactcgatgtagcgcctaatatacagttactattgaataagtatttgctatcatgattccctgtaagaagatccaaaaaccaactttttaaattcacacggaacacagatacacatacacacatgcatgcacgtgttcactcacttgcacaagaacacacctaccgtggttggctgggggtaaccaagaayaggcaatagttcacttaatattgaatttagctgagaagtcagttatgaattatgtgaaaagtggaatctaataaggtaaattatttttccttgttatagggttgatgagtattatattgaagacacaccaatttatggtaacttagatgatatgatttcaggtaagttttccataagttaaatttataaataagtaaatcccagttggtttcacaaaataatttaagtggcgctttaaaaaaatcaaatcacacttagctatcccagtgataaccatcaattcaagaacttttagtatattaattaggctacatttccaaagctgcatattgtaagttgtattacaatagccactctaaatcaacatcctgtttttctatattctct

SEQ ID NO: 295450 - DNA, 565 bp, Homo sapiens
atttatctaaaaatctatatattaaaacagtatggaatcatcttaaagttagaaatgtgggaattttcttttgcrtgattcaagaatttatttttatctttcctttcattgtagagtgtcctctagtgctctaaggaatcaaaaattattttttggaaatatattattcaaaataatttgtccccatttcactttggagaatcatgttagtcacctataatactcaactactcaaattcttatgtattctgatggctccaaacccattatacctgctacttccatacttaagtgagcccaggtgccgcttgcacacattctgatttagcaggtccaggctaaggcttagagatctgctacttaacatcccaggtgattctgatgcagattttccatggaccatgatttgagaaacaccactctacataccctttctctgtgttgcttttcagaaagagctcaatgattattaagtcgcttttcttatagtaaatatatctttctctctctgagggtcaaactggtacaatccacacttctgtcaggttactggccatcctatgag

SEQ ID NO: 295451 - DNA, 565 bp, Homo sapiens
atttatctaaaaatctatatattaaaacagtatggaatcatcttaaagttagaaatgtgggaattttcttttgcgtgattcaagaatttatttttatctttcctttcattgtagagtgtcctctagtgctctaaggaatcaaaaattattttttggaaatatattattcaaaataatttgtccccatttcactttggagaatcatgttagtcacctataatactcaactactcaaattcttatgtattctgatggctccaaacccattatacctgctacttccatacttaagtgagcccaggtgccgcttgcacacattctgatttagcaggtccaggctaaggcttagagatctgctacttaacatcccaggtgattctgatgcagattttccatggaccatgatttgagaaacaccactctacataccctttctctgtgttgcttttcagaaagagctcaatgattattaagtcgcttttcttayagtaaatatatctttctctctctgagggtcaaactggtacaatccacacttctgtcaggttactggccatcctatgag

SEQ ID NO: 295452 - DNA, 497 bp, Homo sapiens
gtttatatattttctctactatactttcatcattattttagagtgtatttcttctacttaatttttttttttaagttagctgtaaagcagcctcaggcaggtccttcaggaagaattccagaagacattgttatcatagaaaatgacagytcaatgcatgttattgtccctgaagaccttccagtgggataggatgtggaggtgaaatacatgatactatctgctccctgtgtaggcataggctaatgtctgtattggtgtctttgtttttaaccaaaaaagtttaaaaagtaaaaaagaaatccaaaatctccaaaatagaaaaagcatatatagtaaggatatacagaaagaaaatatttgtgtacagctgtacaatgtgattttattttaagctaagtgctattacaaaagagtcaaaaagtttaaaagaatataaaagtttgtaaagtaaaaaagtcatagcaggctaaaatttattattgaagaatttaaaa

SEQ ID NO: 295453 - DNA, 1205 bp, Homo sapiens
  misc_feature (1)...(1205): n = A,T,C or G
tgaacctgggacaccccttcaacctagcatttactgcactgttttgaaattatatcagtctgactattctatgaacagctgagtgcgggtgcattatccctctcactgagatctgccaaatgtnctagcaccctaccaaaatggtctaagggcaccataaggtgcctaagaaaacattttgctaaaaatatttttaaccaaccacatttgcaacagttcatgaggcttcctggtttgaactccagttattgcccacaaagaaaaaagtaaacttgagaaagtaatctgtgttttgggtcaaccttttctttgtctaagatataaaaattctaccaatcatcttgtgggtgtcctctcattgtttctgttccttctaggcgtgggctgggatgtcactttcttatcctaagatctctaagatctctaaggctgagacagctatgtccatacggcttgcttagctgtgtgttgtttgcactcccaaatcctcaccatatgagaaagatgggctttccaagtgtctatgtgagctggtgacggttaatgacttrccgtgaagggtatgagccagcctgtggccccaaggtctctgtctgaagaggagaactatcctacatgccctaggtgatggtwctccagctttgttcttcttgcttaggactgctgtggctatttgagctctttttaagttccatatgaattttaggtttgttgtttctaattctgtgaaaaatggcatggtattttgataggaattacattaaatctatagattgctttggtcagtataatcataatattttaataatatttattcttaatcataatattataataatatttattcttaatcataatattataataatatttattcttccaatctatgagcatgaagtggtcgtccatttgtgtcatttacwatttatttcatcagtattttgtagttttccttatagagatcttttacctccttggttaaatatatttgaaatatatttttctctagctattttaaatgggattgacttcttgatttggggctcagattgattactattaatgtatagaaacactacaaacttttgcatgttaattttgtattctgagactttactgaattcatttatcaaatctagtagtcttttggaggaatcttaagggctttctagatataagatcatattatcaacagagatgatttg

SEQ ID NO: 295454 - DNA, 618 bp, Homo sapiens
gtcaccaagggaaatattgagaaaaccatatgcttcttcttatggaggcatagttgaagggacacagcttcctttaggttgctgggctggaggtgggattctcctccatgggcagggccagcacttcctctgacatctgcccagtgggatcagcttcatcatggagatcaatcttagggyaaatggtctgagtcagggagcccaagccatgatgaccacaacaaaaacaaacgctcctcacacttacccatgaatcatctacttgaatccttccagccacgttatgacagagtggctaagttatatccctacttcatggttgagcagactaaggctcaaggccaggcaatgtgctaagagtttcacaagcacaatatgtcatttgattcacgcagcccctccatgcagttggtattattggtttttcatttactagaaatgggggctcagagaggttaaataaactattcagagtcacagaactaatagtggtggagtgaatgagaacttagatacccttgactttggagtccgtgctcataacgactaccccataggcctccctggaaaacctgagattattgaccttgtccaagtccggcctgccatcagggaact

SEQ ID NO: 295455 - DNA, 1196 bp, Homo sapiens
gtcaccaagggaaatattgagaaaaccatatgcttcttcttatggaggcatagttgaagggacacagcttcctttaggttgctgggctggaggtgggattctcctccatgggcagggccagcacttcctctgacatctgcccagtgggatcagcttcatcatggagatcaatcttagggtaaatggtctgagtcagggagcccaagccatgatgaccacaacaaaaacaaacgctcctcacacttacccatgaatcatctacttgaatccttccagccacgttatgacagagtggctaagttatatccctacttcatggttgagcagactaaggctcaaggccaggcaatgtgctaagagtttcacaagcacaatatgtcatttgattcacgcagcccctccatgcagttggtattattggtttttcatttactagaaakgggggctcagagaggttaaataaactattcagagtcacagaactaatagtggtggagtgaatgagaacttagatacccttgactttggagtccgtgctcataacgactaccccataggcctccctggaaaacctgagattattgaccttgtccaagtccggcctgccatcagggaactwgcattcagcctatggacattgagagaaatgtgttcttatttcaatgttaaaagcaatgaggcttctcattgctcacatgtgctgcacaggttccttctttctctcttccaaagcatgccaggtgggcaagaaccatcccttattgaatgggagtattgttccagctggctagtggaaggccatgcatttctttggcttctggwccccttcactcagtctaccatgatttactacacctacaacaataaactttctgaaactgtggcccctgtttttaactggcaggtgcccatgactttggggagctagaaaagtgggtgatgctttcccagtgagggggtggtccctctgtcctctttgctactgccctggttcaaaccgttattatctctggcctgattcaggcccttgtatctctcatccaggaatggctgcgtgatttgcagggcccattgcaaaatgaaaatgtagggccccttgctcaacagttattaagaatttcaagacagtgacaggacagcattaaaccaaggggaggcccttctgagtgtggggctttgtgtgactgcacaagtca

SEQ ID NO: 295456 - DNA, 535 bp, Homo sapiens
tgcatctaaaagggcattgagtaattaatttttccatttgatgcattttatatatagtttatatgtagttttcagttctcaactataattatcttcttttttattttctaaaayctgaatcatagtttaaagcctccaataactggatatcctacagaccttttatattgccaattttttaaaatcttgatcatgagtcattttatttttttcttttttctatgcttgtcaattgttgttgcaggccagatattgcatatgaacaattgaagaaatcatttaaggtactggataatgctatatttctccaaaaagaatttagtcttcttgtatcaggcatttaggaagggcacagtttgcttaaattcagacaggttttgagataattcacaagtaggcttctgtattactaagctgcaaacttttaaaagtcctagttgaaagcttggtgtttaccaggcctctctctgatgttgggctccacttcatatttttgtctaccacatccatcctcatgagataattaaagctctat

SEQ ID NO: 295457 - DNA, 535 bp, Homo sapiens
tgcatctaaaagggcattgagtaattaatttttccatttgatgcattttatatatagtttatatgtagttttcagttctcaactataattatcttcttttttattttctaaaatctgaatcatagtttaaagcctccaataactggatatcctacagaccttttatattgccaattttttaaaatcttgrtcatgagtcattttatttttttcttttttctatgcttgtcaattgttgttgcaggccagatattgcatatgaacaattgaagaaatcatttaaggtactggataatgctatatttctccaaaaagaatttagtcttcttgtatcaggcatttaggaagggcacagtttgcttaaattcagacaggttttgagataattcacaagtaggcttctgtattactaagctgcaaacttttaaaagtcctagttgaaagcttggtgtttaccaggcctctctctgatgttgggctccacttcatatttttgtctaccacatccatcctcatgagataattaaagctctat

SEQ ID NO: 295458 - DNA, 516 bp, Homo sapiens
gctcattgcctagacccattaattcactggggttggcaaaatgttgataagctaattctctcatgccacccttgtttattagctgaatacatctataaatagatatttcttttcatcaactctgcagttaccctgagggatagttcatttagaaaaagcaagatagatgcttgattatgccccctctcttaaccaatttttaagataattagttggttcatttgcatcttccaatgatgactaaatagtttatttttgatttttataaactgatgaatttagtcatatttgatgtcytttaatctattatagttatcattattgaagctcaagtggcttccctttggccagtgggagcatcttcaggttttctcctgagtcctttgacatgaccctaaaagtctttcatagttcctttgctttttaatgtcccagactcaacttgtggaattcctgccacagactagtcattaaacatttctccgaggattcttgctttcttttaggaaaagcgga

SEQ ID NO: 295459 - DNA, 595 bp, Homo sapiens
  misc_feature (1)...(595): n = A,T,C or G
nnnnnnnncctttttgtcttaacttatgctttctgtactattatgtattatttgttcttattttttccctcaccaacttttactgtattgaaagagtttttatttttagctactctcttggcatttgatgatttggaatcatttaaatgtttctattttttggtgaatacatatattttgaagagtgtcttcaagtttgtatttttataccaatacagtaaacatctcaatgtttcaagaggagactttttagtatagyttttatttaattaaaatcagccatacacgccatactaaaatgaagctttcaggatgcttttacttctctaacttctctgtatctcccccactaactcctgggatttttttggactcctttgaaattttggttcctagctttttaaattatatagtatgcctgatctctttcaatcccgtatgttgtagttggcaatccctttataattgtttgttctgagttaggcatgactttcagttcctcgtaattgctgtctagaccccttagtcctgcctctcactagttgttgcctctagcacctctagcaccagactcaccccttagccactcctttca

SEQ ID NO: 295460 - DNA, 566 bp, Homo sapiens
acaggtcagtaggtgcagccaaccaccatggcacacatatacctatgtaacaaacctgcacgttacgcaaatgtatcccatttttttttagaagaaataaagaaacaaaataggagccagtataaatagacccagaaaatagagttatcaratatgtactttaaaacaactattattatgatgatcaagaaaatagattaaaaaagcattttaccagagatttgtaataataaaaaaaaaactaataggattcctttaccacctaactttttgtagcttagtctagaaacctaggtcttattttttattcttttatcttcttctgcctattaacacacttcactatccactacttactgccacttctctaattaaggccaatatcatggttcacctctatgtttcacacacaccacagaatgaactttctctattgcaaatttgatcatgtcattcctctttataaaattattcaatggattccccattgtcttaagtacaaactccagctcctttctgcactgtactaggtcaagcatgatcttactcgtgcttgatatttcctc

SEQ ID NO: 295461 - DNA, 493 bp, Homo sapiens
caacatgatttttcatatacttagtgaaatgtttactatagttaagcaaattaatgcttacccatttttttgtggtaagagtcctaaaaatctactctcagcaaattttcagtatataatacaacattattattatagtcctcatgttgtacattctctagccttattcatcctacatagctcaactttttaccctttgactacatttccccatcctctccctgayaatcagcattttattctctgtttctatgtactcaggctacgtggtttctgaggataagacagagtcagatgtaattctttctttgctgatccataagtaaaatgctttttcctctggattctttcaagattttttctttatctttgattttctgtagtttgaaagtgatatgcctaggcatagtttttctggcgaataggtggcttggtgttctctaagcctccttgatctgagatggtgtctggggaaatactcagtcattattgt

SEQ ID NO: 295462 - DNA, 570 bp, Homo sapiens
gtgtgtaagtgtactcttaataatctcgcttcacttcctggtcaacacctggcctgaatgttagcaactccaccgcccttagaaggattaagttagcagatagcagagaaagagaaggctcttctctgcgaaaacagaaatcaggtgggattagggttcttccctgattccacccaggttttgtctacttatctcattgggtcaacttgccaagcctgaccagccagggtacctctgtccttccraggatggaggccagcagaggcactctactctcacaacatacgctcatgcctctcatcactacccaggggctagagggaggggcagttcagctgttaccttcagaagcctctgaaataatcagaacaaggcattcagtaaaatcactccaagtcctcactgtaccctgggccaaaaatttatcctgattgtattttccatctcaaatttcaagccacactgtccaatatagctcagtagaggaagctgtgccacaaacatcacatgacagcataaaaataccccaatgagcacaataccagcaacttaaaaataccctgaacttca

SEQ ID NO: 295463 - DNA, 584 bp, Homo sapiens
tcattctctggctcctttcaggctcagttttaaaatgaataacctgcctcttcagtcagcctcttcccttctctaccatgggcasggctagtattctcttttttttttttctgccagatcctggtgctttatttttttattttttgtttgtttatttgtttgtttcagacccagatgtttgtgtttctagccttcgactgtatttgtcaggtatggtctcccatagcaagagagaaagccagagtcagaggcaaaagtttccattttccaaatatgtcctgcctacctttgtcactctgaagaaaggaaaaacaccagggggtatcttctctacagccgttcatccaacaatctataaaggccttgctacgggctaggaactgccctggatagtgggatacagcagtgatcaaaaagaagtccctgccttcctggagcttacactcagcaaaccagtccaacatctaacctggacttcattcagctatgatggttttcctacctggctctgctacttcttttccagtccaagcttcacatgtttttctaacacatttcttcaaaacctgtgccgggactgcctt

SEQ ID NO: 295464 - DNA, 584 bp, Homo sapiens
tcattctctggctcctttcaggctcagttttaaaatgaataacctgcctcttcagtcagcctcttcccttctctaccatgggcagggctagtattctcttttttttttttctgccagatcctggtgctttatttttttattttttgtttgtttatttgtttgtttcagacccagatgtttgtgtttctagccttcgactgtatttgtcaggtatggtctcccatagcaagagagaaagccagagtcagaggcaaaagtttccattttccaaayatgtcctgcctacctttgtcactctgaagaaaggaaaaacaccagggggtatcttctctacagccgttcatccaacaatctataaaggccttgctacgggctaggaactgccctggatagtgggatacagcagtgatcaaaaagaagtccctgccttcctggagcttacactcagcaaaccagtccaacatctaacctggacttcattcagctatgatggttttcctacctggctctgctacttcttttccagtccaagcttcacatgtttttctaacacatttcttcaaaacctgtgccgggactgcctt

SEQ ID NO: 295465 - DNA, 603 bp, Homo sapiens
ctgtatttgtcaggtatggtctcccatagcaagagagaaagccagagtcagaggcaaaagtttccattttccaaatatgtcctgcctacctttgtcactctgaagaaaggaaaaacaccagggggtatcttctctacagccgttcatccaacaatctataaaggccttgctacgggctaggaactgccctggatagtgggatacagcagtgatcaaaaagaagtccctgccttcctggagcttacactcagcaaaccagtccaacatctaacctggacttcaytcagctatgatggttttcctacctggctctgctacttcttttccagtccaagcttcacatgtttttctaacacatttcttcaaaacctgtgccgggactgccttcccactcagataagtgctgcaccttgaatttgccttcatatgcttgagtcattctcttgggctattctcatcttcccttctcaactctatgcagactgtctttaacctccttgtatagccatctcatcttcaaagaggggttccctaattgcttttatcatggactctttctagctaaagcttttaattctcttcttagccataggattcataata

SEQ ID NO: 295466 - DNA, 603 bp, Homo sapiens
ctgtatttgtcaggtatggtctcccatagcaagagagaaagccagagtcagaggcaaaagtttccattttccaaatatgtcctgcctacctttgtcactctgaagaaaggaaaaacaccagggggtatcttctctacagccgttcatccaacaatctataaaggccttgctacgggctaggaactgccctggatagtgggatacagcagtgatcaaaaagaagtccctgccttcctggagcttacactcagcaaaccagtccaacatctaacctggacttcattcagctatgatggttttcctacctggctctgctacttcttttccagtccaagcttcacatgtttttctaacacatttcttcaaaacctgtgccgggactgccttcccactcagataagtgctgcaccttgaatttgccttcatatgcttgagtcattctcttgggctattctcatcttcccttctcaactctatgcagactgtctttaacctccttgtatagccatctcatcttcaaagaggggttccctaattgcttttatcatgractctttctagctaaagcttttaattctcttcttagccataggattcataata

SEQ ID NO: 295467 - DNA, 583 bp, Homo sapiens
aaaacaggtaagacccggctcaagttttggtcagccagagtccactctatgtggcaaggttgatggctcactggggctgaattaaaagtaagagtccactaaaccactggtgtggggataagggtgaccatttgtctccattttcctkgacttactaggttttggctctgaatctcccatgtcctaggaagccctttggtccagacaaactgggacaactgggcaccctaggtggcaagaatgaggcttctctccagactccccagagcagttccagctgctcccccctgacctgcctaccaagcacttgccaacaaggagagtgaaaaggtgcctaaatacaatcaatgtcaactccactttctctgtgaaagcctggctgactgccttatttaacgtgcagcatcacccccagaacaccaatctccttttcctgctttgtttttcaaatttactccatgacgtttctcaatttctgtcatagcatggaacatatgtcagtattgtgtcagttatttattgtctgtcctgccctactagaatgtaaactccttgagggaaagattcttcagcggtgtttgat

SEQ ID NO: 295468 - DNA, 544 bp, Homo sapiens
ggcaagaatgaggcttctctccagactccccagagcagttccagctgctcccccctgacctgcctaccaagcacttgccaacaaggagagtgaaaaggtgcctaaatacaatcaatgtcaactccactttctctgtgaaagcctggctgactgccttatttaacgtgcagcatcacccccagaacaccaatctccttttcctgctttgtttttcaaatttactccatgacgtttctcaatttctgtcatagcatggaacatatgtcagtattgtgtcagttatttattgtctgtcctgccctactagaatgtaaactccttgagggaargattcttcagcggtgtttgattcctaatgtatcacatttgtctggcacacaataagccttccgtgtacatttgttaaataaatgaatgagttaaatacactttcaatctatagcattttagaaagaatatgaccaatcttgactttttttttattcaaatgggactaaggagacatttgcactatttcaaattcaaaaccgaatgttgacacatt

SEQ ID NO: 295469 - DNA, 603 bp, Homo sapiens
gttggcagttctagtttcctctagcacatgttcagatcaggctgatgggtcaagctaaggtgaattggagggtaaggaggaggaaatgaaagactgtgattttcttcagtactgtgagcagtgattgggtggcagccacagctcttgtctgtgctctgggagttagcaggcccagcacacggagctatttatgctgatgggtggtcagatgtcctcactccatgcttttccagcaaagacacctcctcccttaccatggggtcctaggtcctctgggtaatagaagcaagttccacagaacagacattgcycactgcccagatctgcccagtccccttggaatctgaaacctcagatgtgagttggctttccattaggattcagcatcaggtatactctcattttcaatgcctttttttgtgttgtgggaagtcagggaacccgaacagaaggacctgctgaagctgtgacagaagaatataaattgtgaagatttcatggacatttgttatttctccaaattaataattttataatttcttacacctgtctttactacaatctctgaacataaattgtgaagatttcatggacatttatcac

SEQ ID NO: 295470 - DNA, 603 bp, Homo sapiens
gttggcagttctagtttcctctagcacatgttcagatcaggctgatgggtcaagctaaggtgaattggagggtaaggaggaggaaatgaaagactgtgattttcttcagtactgtgagcagtgattgggtggcagccacagctcttgtctgtgctctgggagttagcaggcccagcacacggagctatttatgctgatgggtggtcagatgtcctcactccatgcttttccagcaaagacacctcctcccttaccatggggtcctaggtcctctgggtaatagaagcaagttccacagaacagacattgcccactgcccagatctgcccagtccccttggaatctgaaacctcagatgtgagttggctttcyattaggattcagcatcaggtatactctcattttcaatgcctttttttgtgttgtgggaagtcagggaacccgaacagaaggacctgctgaagctgtgacagaagaatataaattgtgaagatttcatggacatttgttatttctccaaattaataattttataatttcttacacctgtctttactacaatctctgaacataaattgtgaagatttcatggacatttatcac

SEQ ID NO: 295471 - DNA, 595 bp, Homo sapiens
gattaacttaacactggaagctgctgaagaaggaactcattaattggaaggtaggcttgaatttatttggaacacagcacaaaaagtttataatagaaaagggcaattagggacacggagagactttgaagtgtgttaaatagattttcagaaaaagaaaataaaggaaatggcagaacaattaagtaaacatattaaaaataaaaacataggtataaatgtttatgacttcagattgggcaatagtttcttagaaatgacatcaaaggcacaagcaacaaaagttgataacttgaaaatcaataaactaaaaatttatgtgtgtcaaaggacacaccaagaaaaggggaaaatttttgccaataatgttgaataagagacttaaacctagcaagactatgtaaagaaatactattaaataataaaaagacaaataacacaatttaaaaatgggcraaggatctgaaaagacttttgtccaaataagatacacaaatatccaaaaaaaaaaaaaaagctcaatgttagccatcagggaaatgcaaatcaaaatcacaatgagatatcagttcacatccactgggatggcaataat

SEQ ID NO: 295472 - DNA, 625 bp, Homo sapiens
acccaatcccaatccaggagaagaaaacacaaacttggcactttttggagctgttaggaaagaagaccaccaactccaaattttcctaaacataaaaaatgccgtctagtttcttctggcatggtggagtaaagagactcatgaatcctctgttcagaatacaactaacaaactgaaaatcattatcaaaaacaaccatttcagaggtctggaaattgaccagaggcaaacaacatattgagaggtgtttattcatgtaaaaaccgctgagcttcagataagaagggtagagtatgtggcattcctgccggggactactttatttcttatttcccttcccttaagcttagtatccaaagtggttctaccagggtggggtggggcacagatactagaagcttagccataactgggaaaaaatatttgcaaatcatggtatgcaaaggatttgtattcaaaatatgtaaygaatacttacaatcaaataataagaaagcaagcaacccaatttaaaaacaggtaaaaatttgaattagatgttttaccaaggagatatacaaatggctaatatgcgcatgataaggtgctcagcatcattagtcattagggaaatgaagttttaagc

SEQ ID NO: 295473 - DNA, 598 bp, Homo sapiens
cctgtgacaaacccacaaccaacatcatactgaatgggcaaaagctagaagcattcctcttaagaactggaacaagacaagaatgcccactctcaccactcctattcaacatagtattggaagtcctaaccagagcagtcagacaagagaaagaaatgaaaggcatccaaatagaaaaagaagtcaaaatatctctctttgctgatgatatgattttacacctaaaaaaccctaaagattataccgaaaggattctagaactgataaatgacttcaataaagtttcaagatacaaaatcaatctacaaaaaccattagcatttatatacatcaataaattcaarcttagaaccagattgagaatgtaactccatttataatagacacacacacacacacacacacacacacacacacagagatatatgcatgcacccacccacccaggaatacatgtagccaaggatgtagaaagatctctacaaggagaactacaaaacactgatgaaagacatcacaaattgacatgaacaaatggaagaacattccatgctcatggattgggagaatcaatatagttaaaatggccataatgccc

SEQ ID NO: 295474 - DNA, 566 bp, Homo sapiens
tatgtaccttgggactccacttaagattttcaaataagtcgcctgcattttaaaacagatcacaaaaatattaattcagtaaaccatgtcccagagattgtgtctcctaacctgggtatgctttttatagattatgactccatattggaagtatggaggtagtttactgatgggaagaggtcccatagagccccagactcaactagagcctccttgtttctgccattcggtcatgctgatgggtgctggcataatgcagtgagaccagaagaaactgacttaacttcttcctctgaggaggagcctgtggctttagaagggaaataataaccacccaatataaccaagatgctaagccataacatggttttctgagccctcactcatcaagctggaaaagatgyttcagcaccaaggacagcgctcatagccgcggccctgacagaagacgccaacttcacctccttaaggcctggtcctgtgtctctcgaggtataggaatcctggttttacacttaggtttattttggttctaatctcgctagaaaatcagactctgctgcact

SEQ ID NO: 295475 - DNA, 554 bp, Homo sapiens
aagacaaatcccctctggtagcatttgctgggtagactgataggaataatgttggcaaaattactgcatgagtctttcacagaaatgcagaatggagcgtccacatgacacccttctgtctcagagccctatattgtgttcacacacacagagtagagcttaagtgcgtggattttagaatagactgtttatttctctgcactaatatttgttccatgtacaacctagagcaagttacttaacctctctgtgactcaatcttctcatcttcaaaatggaagtaaaaattaaatcaattaaatttgttaactatttgcaaaacacttagaactgtgccaggcacttaataaaatagctatcattactctcttagaaaacatacatggagaatctctggtgtgtcctctgcccacccaggactcaaaccaaacgtaggaggtgttaagtkcttggaaaccacttcgttaaaagaaccaaattcagaaaggcaagtgttagcctgcagacactgtgccatatttgatgaggcttgtgggtgtaccaaggccagagga

SEQ ID NO: 295476 - DNA, 554 bp, Homo sapiens
tgaagtctttaaataataactgtgaaagaaaccaggacagttctgaacacattgttggtgcacagcaaaggctggttattctccccctcgctactttctaatcaaccctaaaataggatatacctctaagcaggcaaaaccccaccattaatagccatggtcactttaagccccaagtaagaattacgcattcttcagccagggtttgctggttcttatcttcaattcagaagtttctcttgggcctcagaatgcctgctgggttgatccatttagataatctagaagcccctcaaagtacgtayattcaaaacagactcaccatgtctaccccactctgctcctctctaggacctcagtctcaattaatggcacttccatctacccagacatccagctagaaaaaaggaaatctccctcaactttccccattcttcctatttcatgatcatttagctctcaaggcctgtcacttcctagatatgacatgtgtccatgctcaggctttcccatccccaggggagaacgcctttggctctaacccagatgatggt

SEQ ID NO: 295477 - DNA, 599 bp, Homo sapiens
ctaataatgtggtgatgcagatgtcattatcttcattttatggattcaaaaacagtttcagggactttaagtgtcttacccaggttattcacaactaagtgggggagtggagatttaaattcaagtcyctttaactccaagtccaatatatttcccaatattccaacttatggaagttggctttaatatatctatgtgtgtgtgtgttttaagattataagattttttaaacagcacctagatctgtatcagctctgcttactttctgcatccagatctgtccctgcttcttcctgctctgggttatgagttggtcacttcatcatcctgtctgttcaatcccatggtcagccagacacagaaaggagaacatacacttaggaaaagcaaggatgcccgctgctttttgctgctgttgtataacacattccaaaataaaagcctgagtcttcaggcagtgtcttgttttctctgaaagcacagacccttagtgactgggatgcagccagagtggtattccctcagcctcccccttgactcctgcactcaccagcagccaggatcacatctgcatgcttgacaaaccttgaacttgtctc

SEQ ID NO: 295478 - DNA, 341 bp, Homo sapiens
ccccttaccaagaaggggtgtctggtaaaggtgagagttcaccatgtgtgggaagacatcctgccaccccacttccttcttcatcctacccgagataacatggtaagatgttagctgccatccaattccctgtgcacattagacaaacacattactttccttttgtcagttgcctggaagtagarcactgagggaaacgaaagctgtgttctatggagggtgaagagagagggggtggattctggggcctgggacacccctgaaaggcaggttgaggagacggggacactgctggggcagcttgaggacaggagggctgcaggcatagaagagcagggccc

SEQ ID NO: 295479 - DNA, 644 bp, Homo sapiens
tatgtgaggtgtatctatcaatatttacatattagaggccaggcacagtggctcatgctgtaatcccagcactttgggaggccaaggcgggcagatcccttgaggtcaggagttcaagaccagtctggccaagatggtgaaactccatctctactaaaaattcaaaaattatccaggcatggtggcaggcacctgtagtcccagctattcaggaggcttaggcaggagaatcacttgagcccgggaggcagaggttgcagtgagctgagattgcgccactgcactccagcctgggcaacagagcgagactcagtctcaaaaaataaaatgamtaaataaaaaaatttaccatattagaaattaaaacaaattctaaaacatgtttttattaatttatttaaaataacaatcataaaacatttacatgttaatataaataacatatttttaccaaaagtttattttccaaaacaaaaaaattagaaaagtggcattgtttcacatttctgcaaagctctttaacatgtagtgcaaatgaagacagctggattctcgtatcttgcttctgcattcaatctgttgcatcatgtagcctctggaaaattccactgtacactaatgaaagaattagaataaaaaatgca

SEQ ID NO: 295480 - DNA, 644 bp, Homo sapiens
tatgtgaggtgtatctatcaatatttacatattagaggccaggcacagtggctcatgctgtaatcccagcactttgggaggccaaggcgggcagatcccttgaggtcaggagttcaagaccagtctggccaagatggtgaaactccatctctactaaaaattcaaaaattatccaggcatggtggcaggcacctgtagtcccagctattcaggaggcttaggcaggagaatcacttgagcccgggaggcagaggttgcagtgagctgagattgcgccactgcactccagcctgggcaacagagcgagactcagtctcaaaaaataaaatgactaaataaaaaaatttaccatattagaaattaaaacaaattctaaaacatgtttttattaatttatttaaaataacaatcataaaacatttacatgttaatataaataacatatttttaccaaaagtttattttccaaaacaaaaaaattagaaaagtggcattgtttcacatttctgcaaagctctttaacatgtagtgcaaatgaagacagctggattctcrtatcttgcttctgcattcaatctgttgcatcatgtagcctctggaaaattccactgtacactaatgaaagaattagaataaaaaatgca

SEQ ID NO: 295481 - DNA, 599 bp, Homo sapiens
  misc_feature (1)...(599): n = A,T,C or G
tgtgcatgcatatcatatattctccactattacctcagtaccaaaatgatatagcatattgatggttaaaataaaattgcaaagttttagggctaaattcctcatgatgttttgtgtaacttaaaatttagaatgacctaaacaaattgaatgactagtcattagctttgtagatctggcattgtttctctcatgtaactcagaaggttagtcttttcacttgtattctaggattatgactggcagagcttgactgrcaaaatcaatccatgcatcaattttgctgctaagtcttcactgagaatttaataattctcaaaataattcccatatttcagcctgcacccagataccacaacttttttgaaagcctctccttcagatctcaccgtatacaantttttttcaggaaagtgggaaaagttacaggagaatttcctcctccatcctccttcttagaaaaagaaaatacattttcacaataatcattttttggaaatggaaaaatgctacctcgtttatgagaataccaaggttctacacctgtcaggcctgacaccgattcagctgcaaaatcttcagatgtttttgattctctg

SEQ ID NO: 295482 - DNA, 661 bp, Homo sapiens
ttatgtgttaaagaagacattgtacattgagacaattggattcagtaattcttagagagtatttccttgctgtctggttctttttaggactcagccaagttgatgaggtcaaaaccatggaagagtgaggcaactagggagtaaaatttaagaaggcactcactctctggattatgtaaatgcaggatcagcagttgtacaaccctaaaagggagtgctttcttaagagaaaggtacctaggatgggagagcagccactagtctcagactgggatttggtcctcttgttccataaagactcacaggtgcctcttgggcaggatttcttgaaaagcggccaagaaaggacargaattgaccttttgtctgggtgctacagacaaggaattgtgttgttcaatttattattttgcactgaaatggagaaagctttttgaaacaagttctgtcaggtcagtgagtgggcaaagaagttcctgattacgagggcagaatacaggagaaaaggagctgttctgatcctcgaggagctaaccacatggtgggtgaccttcagagattcattcacttgttaattcatttattcagtaaacagaattaattgcctattgctttccagaaactatcaaaagcattgacaaatgcgcagatgaacaaacta

SEQ ID NO: 295483 - DNA, 661 bp, Homo sapiens
ttatgtgttaaagaagacattgtacattgagacaattggattcagtaattcttagagagtatttccttgctgtctggttctttttaggactcagccaagttgatgaggtcaaaaccatggaagagtgaggcaactagggagtaaaatttaagaaggcactcactctctggattatgtaaatgcaggatcagcagttgtacaaccctaaaagggagtgctttcttaagagaaaggtacctaggatgggagagcagccactagtctcagactgggatttggtcctcttgttccataaagactcacaggtgcctcttgggcaggatttcttgaaaagcggccaagaaaggacaagaattgaccttttrtctgggtgctacagacaaggaattgtgttgttcaatttattattttgcactgaaatggagaaagctttttgaaacaagttctgtcaggtcagtgagtgggcaaagaagttcctgattacgagggcagaatacaggagaaaaggagctgttctgatcctcgaggagctaaccacatggtgggtgaccttcagagattcattcacttgttaattcatttattcagtaaacagaattaattgcctattgctttccagaaactatcaaaagcattgacaaatgcgcagatgaacaaacta

SEQ ID NO: 295484 - DNA, 661 bp, Homo sapiens
ttatgtgttaaagaagacattgtacattgagacaattggattcagtaattcttagagagtatttccttgctgtctggttctttttaggactcagccaagttgatgaggtcaaaaccatggaagagtgaggcaactagggagtaaaatttaagaaggcactcactctctggattatgtaaatgcaggatcagcagttgtacaaccctaaaagggagtgctttcttaagagaaaggtacctaggatgggagagcagccactagtctcagactgggatttggtcctcttgttccataaagactcacaggtgcctcttgggcaggatttcttgaaaagcggccaagaaaggacaagaattgaccttttgtctgrgtgctacagacaaggaattgtgttgttcaatttattattttgcactgaaatggagaaagctttttgaaacaagttctgtcaggtcagtgagtgggcaaagaagttcctgattacgagggcagaatacaggagaaaaggagctgttctgatcctcgaggagctaaccacatggtgggtgaccttcagagattcattcacttgttaattcatttattcagtaaacagaattaattgcctattgctttccagaaactatcaaaagcattgacaaatgcgcagatgaacaaacta

SEQ ID NO: 295485 - DNA, 446 bp, Homo sapiens
ctggtgaaaatatctttcaaatatgcaggagaaataaagactttctcagacaaacaaaagctgaaaaatttcatcaacaccagacctgttctacaagaaatgctgaagagagttctttaaccttagagaaaaagatgttaataagcaataaataatctgaagttacaaaactcactggtaatagtaagtacacagaaaaacacagactattataacactgtgtctgtggaatataaactattcagatcttaattagaaaggctaaatgatgaaccaatcaaaaataataactacaacttctcaagacatagacagtaccgtaatacacaaattgaaamaacaaaaagttaaaaaacaggaggacaaagttaaagtgtagagtttttataggctctctttgcttatttgtttgcttatgcaaacagtgttgttatcagcttaaaata

SEQ ID NO: 295486 - DNA, 602 bp, Homo sapiens
cttttggtacatattttattaatttcttggtataaatttataggaaactatttaataagctatagaatattttctaaaattaatgcttttagaataaattgccaaattgttttccataaaaactttaatttcrtttccagcaatagtatatgaggcttctagtttccatgtaaccctgccataccttggtagtatatatacatatattttttataatatccaatttaatggcttctgtacaatatggaacaagtcattttaactctgagcctcagattcctaacttgcaaaattaactaatggatatagaattcagaactatagtgacagatcacaaagtttatattgattccagaaccaattgatattcaatatttgaactgtagttcaagtgacaaagggccaaggtgaagttgggctaatgccagaagaggctgaagggatgaatactgaggagcatttctctgctaatgccatgactgtccagaatgtcccagtgttgatcagaaagtaatgtagataacagttataatttgaatttctgattgtgtcttattgctgtctatcctgctaaactgtgtgccccatgagggcagggatct

SEQ ID NO: 295487 - DNA, 602 bp, Homo sapiens
ctggggcctgttgtggtgtgggggactagggaagggacagcattaggagaaatacctaatgtagatgacaggttgatgggtgcagcaaaccaccatggcatgtatatacttatgtaacaaacctgcacattctgcacatgtatcccagaacttaaagtataataataataatagtaataaaagaagtatcttttgaatgaataaataagctgaatgaagctaccctatacttgtcaagagactgtgcacctggtaaccggcagtgtgctgtcctctggataagtgtggatgagctgccaagaatgaggcctcttagacttgccttttcccagctcccatgctgtgtcccactgacagtctttctcagatatttaataccttcagcctggttaagattcagcctccycttctagaatccatgctttgcaaagcaatgttgggcccctgtgctctaaaccattatggattggcttaagagttcaattcagagggtagaattatttctaagttcttagggatacttcattgctgtcttttggactacctagagcaactaactcatgggatggttgagggtgtactacatgagataacatatcatg

SEQ ID NO: 295488 - DNA, 600 bp, Homo sapiens
atatctttgttttagttaaatatatcttctttggtggacagaaactgataaagccactcagctatgtactagaagtccagctatgtgctagaaatgcagctatgtgctggaagtctaccctcaccttgggagactgcccttccaggggccatgagacacctcatccgcgagggtgacctgggatactcaactrcttcacatttcataattgaaaagagatacccttccacactccacactttgccctagcagtttcttcctcaagttgtattaattcactgatttaacaggtatttattaaaagctcgctgttctagatatcagaactgtaagactgaaaagaggaaaaaaatccagaaaaatagaaaaaaatctcccacacagaagacaaagaagtaaataaataggtaaataaagaactaaataaattgatcaatagtgattagtaattagtgatgtggaggaaagtaaggcacggacaggggatagaaagctctgtgattaggggtgtctgggcaagggggtgcagtatttaatagggtgagcaagaaaggctctcactgaggtgacagttgagcatagacctgaagaaggtgggga

SEQ ID NO: 295489 - DNA, 600 bp, Homo sapiens
atatctttgttttagttaaatatatcttctttggtggacagaaactgataaagccactcagctatgtactagaagtccagctatgtgctagaaatgcagctatgtgctggaagtctaccctcaccttgggagactgcccttccaggggccatgagacacctcatccgcgagggtgacctgggatactcaactacttcacatttcrtaattgaaaagagatacccttccacactccacactttgccctagcagtttcttcctcaagttgtattaattcactgatttaacaggtatttattaaaagctcgctgttctagatatcagaactgtaagactgaaaagaggaaaaaaatccagaaaaatagaaaaaaatctcccacacagaagacaaagaagtaaataaataggtaaataaagaactaaataaattgatcaatagtgattagtaattagtgatgtggaggaaagtaaggcacggacaggggatagaaagctctgtgattaggggtgtctgggcaagggggtgcagtatttaatagggtgagcaagaaaggctctcactgaggtgacagttgagcatagacctgaagaaggtgggga

SEQ ID NO: 295490 - DNA, 600 bp, Homo sapiens
atatctttgttttagttaaatatatcttctttggtggacagaaactgataaagccactcagctatgtactagaagtccagctatgtgctagaaatgcagctatgtgctggaagtctaccctcaccttgggagactgcccttccaggggccatgagacacctcatccgcgagggtgacctgggatactcaactacttcacatttcataattgaaaagagatacycttccacactccacactttgccctagcagtttcttcctcaagttgtattaattcactgatttaacaggtatttattaaaagctcgctgttctagatatcagaactgtaagactgaaaagaggaaaaaaatccagaaaaatagaaaaaaatctcccacacagaagacaaagaagtaaataaataggtaaataaagaactaaataaattgatcaatagtgattagtaattagtgatgtggaggaaagtaaggcacggacaggggatagaaagctctgtgattaggggtgtctgggcaagggggtgcagtatttaatagggtgagcaagaaaggctctcactgaggtgacagttgagcatagacctgaagaaggtgggga

SEQ ID NO: 295491 - DNA, 531 bp, Homo sapiens
gtttttacctagtgttctttttctgtcccaggatcccattcagaacaccaccttatatttagctgtcatttctccttagactcctcttagctgtgacagtttctcagacgttttctgtttttgataactttgataacttttaggactactggtcagatatattgtaaattggccctctactgaaatacatatgatattttttcatgattagactggggttatggtgtaaccacccaagaggttcaccttgcctactgcctagacagagccaattcatcaagacaggggaattgcagtagagaaagagtaattcacgcagagccggctgtgtgggagaccggagttttattattactcagatcagtctccctgagcattggaggaacagagttttttaaggataacttggtgggttgggggaagccagtgagccaggtgtgctgattggtcagagattaaatcctagggagttcgarctgtcttcttgagctgagtcagttcctgggtagggccccaagatcagatgagcca

SEQ ID NO: 295492 - DNA, 481 bp, Homo sapiens
tcatgttttctgtagctgcatataaaacattartataggatagcacattagaagaaactgtaatattaactaataagctaataaggaaaatatgttttctatacaaaccaagtacatagagctttattctggacatatttgagactcaagatgaacacgtattatcaggacagtcttctccagctctgccattcgtgagagttttgtgggttttttttttggttttttttttaactctcattacatgggttcttattttaggtattgagtgaattctgaatcaagcctttatttctatgattcaatcttaattattctacctgctgtcttccaaaaataaaaatgcttccaattcctgtgagaacatcatagtaaaaaatggaaaaggcaaatgactaacaggaagcacactaaatgtacctggaacataatgagtaatagaacaattaaaggagctaatttttcagtgagccaaaagaga

SEQ ID NO: 295493 - DNA, 579 bp, Homo sapiens
acaactgtgattaacatggtggctttagaaaagttgcatctgtagcaacaatcagattttacactmggagaacagttgcacatgattaaaaattctgaacctacacaaagtgtcattttctagagcaaaaatgtccttgtgctttagagactgagacaaggaaggaatgaagtccacatcccctcctgccccctttgctagactcttcagcatgctgtcaaggtgtcagtttgctggcccacttctgactaaacagaaggatcttttcatacaggtaaggtatttcatatgcatttttccactctggaaacatgagcggtggcctctttaggtcagatatataggtctacattatggatggcacacagtgcctgcttttataagctgattgccgatctgtccttgcttaccctagagcagagaagatgttcaatccaaataagcatctttcagctaaatgacctttgctcagccttactctctttagaactttacctgtctacagcactggatgaaactaggtttaatatctattcagtcattccttaagcattagatgtttacatttcaagcaataca

SEQ ID NO: 295494 - DNA, 560 bp, Homo sapiens
ctctctctcacttttttttttgcattatcttatcccaacttttatactgctctcttatcccactgcagacccaattctctggtcaaaactgctgtccatatctttattaagtattgcttatataatgtaaatgtctttattaaaaatattaaagggcttactatttccaagctcatcaaacccaaatgttttacatctcttgcttggtcctacatcatgtaaatttactattttattcaatcatctaacacaaagctgatgagaaaagaygttgacatggtaaaacaaaacaaaaatgtcttggggtttagattcatactgacttgggttcaattttaacactactacttattaactgacagccttgaggaagtctcctaacttctcttactatgctttctcattggaaaagtgaacactaataatacccatttgagtacagattcatggttgtgataattaatttgaggtgtcaacttgattggattaaggaatacttaggaagctggaaagtattacttctggttgtgtctgtgaggtttccagaggagactggtgca

SEQ ID NO: 295495 - DNA, 639 bp, Homo sapiens
caacaattttactgttgtagcctgaatgcaagtatacataatacataaacaaatgggcatgtttgtattccagtaaaacttaatttataaaaacagaaggcaaaccatagtctgtaaccttcatttagactctattcttatccttctycctccttctctctctccatcttcaaccctagttttcctctttctcttgtgggtatgattgtattctctgcttccccaggtaacctttttcctcaaagataaaagtagccaccactataaaggaagtaaatcccctcctcccctgtgttcttccttgggtaatgtgcccacacttgagccaatctctgctgacagagcatgggaattcccgagtggtcaggcttgagtcatgtgaccaacctgatgatcagagaatggtctgtgattgaggaatctttcaaagccatcaggggtgcagatggaagaaagtaagatgcttggtagacacaacagggggcttcttacaagctcttttctcctacacatgcagagaaataggaaagaacctagtccacaggaccatccttaacaaatatatattgggtagtaggcttgatacttcatagccaatttccctggatattctttaaaggcttcctgtgggatctgcaa

SEQ ID NO: 295496 - DNA, 546 bp, Homo sapiens
aaattgcatattgcagtaaaacgtgatctctcatagttctcatgtatttttcgtggtgtttagtgcaataccataagcctcaaataacaccatagaacccatctagtgatgctggaagtgctcccaagaaacagaaaaaaagtcatgacattacaaggaaacgttgagttgcttgatatgtacctgattgaggtctgcagctttgtttgcccaccattttagacagacaattgaccttgaaaacagaaaacataaacttatggtrtcaatcataattaagaaaattatgaggaagagaaaatacactgcagtgttataaatgtgttttctcttcctcttaattttcttaataactttttcttttctctagcttactttaagaatacagtatataatacatatacaaaatatgtattaattgactgtacattatcagtaagacttttgatcaacagtaggttattagcagttaagtttttgggtagtcaaaagttaaactcaaattttcaactgtgcagggagtcagcacccttaaaccccatattg

SEQ ID NO: 295497 - DNA, 584 bp, Homo sapiens
ctttttgaggctgtcttagacaagtgaggaaatgtcttttagaagatccctgaaaacttgtccttgcatgactttggcccaaactgacttttgttcatatgtgtgatcatgtcaagggaatggggctaccgtgaactataggaaagacttctggaaccagcsgttagcttggcagagagattgtggttacataagtgaaaatcaggaaggatcataagtaatggaagcaaccatgaaatctaccaaacatggctttgaacacttaagtttcatatgatctacacagttaaatatgaactagaaaaaaaaacaaattaatgaaatggaggttttatatggtagctattatcgtaccaagcacatagtaagcattcaataaagatgcctaccttgggctaaccttaaatctgttaaacacagagaacatatctcttagttgacaactaaataacaagaaattgcaggtattttgggggttgccatagtgaccagaggccttctgctgtacatttttgttttaatgcagtggttttcaaacttggctgcaaattggaaccacttagggagctttgaaaaacgctatt

SEQ ID NO: 295498 - DNA, 546 bp, Homo sapiens
aaattgcatattgcagtaaaacgtgatctctcatagttctcatgtatttttcgtggtgtttagtgcaataccataagcctcaaataacaccatagaacccatctagtgatgctggaagtgctcccaagaaacagaaaaaaagtcatgacattacaaggaaacgttgagttgcttgatatgtacctgattgaggtctgcagctttgtttgcccaccattttagacagacaattgaccttgaaaacagaaaacataaacttatggtgtcaatcataattaagaaaattatgaggaagagaaaatacactgcagtgytataaatgtgttttctcttcctcttaattttcttaataactttttcttttctctagcttactttaagaatacagtatataatacatatacaaaatatgtattaattgactgtacattatcagtaagacttttgatcaacagtaggttattagcagttaagtttttgggtagtcaaaagttaaactcaaattttcaactgtgcagggagtcagcacccttaaaccccatattg

SEQ ID NO: 295499 - DNA, 533 bp, Homo sapiens
ataaatttttaagactacccctattcagctccctcattatggyccactgtgtttttaggagcatatgtgttagcggagtgtttgcagtattcataacttgaacttctaatttatgagctcttaaaagtacactaagcatcggcatactaattattaatattgtgctctgaggattttttttctctagctcttattgcaggcaaaaggaatgttcttaaaagtaatattcggcaacttccagacaagcatggctaggtcaggctggaacatggacctctggcattgatgtgtggatagtaatatcataagaaattatttattacatgaaatgccaaccttgccaatttttaaatgttaatggccttatggtgaagataaaaggtttatactctccacctagagatttcagaattttgtaatcctggcatgggaatggtttcattatctcatgagtcatttttagttctcttttaattataggtgtttatgaacttttataaattaaaaatcacaactttctggaatattgtcta

SEQ ID NO: 295500 - DNA, 622 bp, Homo sapiens
atactaatttaaacattttagagggctagccttaaagttcttattttagaatatggttacaacttgctcaaattattcataggatgttactatagttaacatgttatgtgtatgtaatttgtatggatgatactgctaaatctagtagtaatcattacctaaacatgtgcttaatatgaaaaagctatatgcttttcttatctgaagttacttgcratttcaggagatttaaggaaatgtactgccttattaaaattgagtacagagaataaatagaaattcttgtgactgtccataatgttcaagttagaattttcattaacctctttgacaaacacattttcagcaatgattaagttgcaacctaataaaaatgctaaacacaatttagtaatcatagaagctaactttctaacttcccactagtacaaataaatggaacataggtttaaaaatcactcatattactattatcaaaggtaattttatcttttggtatatttatttctattcttttatctacacatagcctgtttgtgtttttaatagtgcaacattaaaatatatcatgaaattctattttacatgatacttatgctgtaaattttttttgtgtaacttc

SEQ ID NO: 295501 - DNA, 537 bp, Homo sapiens
agcatctaccatacctattcagattacatgcattgagaagcatgggccaagataattctggaatcctctgttcatccttttatctctcacttctactgagttgacacatactaggttctcagaaaatacttgtttaattactaaggaaacgaggaatgaagattytggtggaatcttaaactgttccttagttgttactacttgtgtgtgagtgtgtgtgtacatatggatgtatgtgcatttttgtgtgtgtgtttataatttcgagatttctcaaatggagagtgtcataaacattattttgtcagtataacatacatgtattatgtgtgtatctttatgtagatatttgactctattcaattttgacagctactccattcaaaataattcaaagactatacttacaagtgtagtaaaaaattaaatccctaaggttttcagtcacaggtttggggatttttctcctctataagtttagaaaagactataggagttgtcttgagggactgaagaggcttcacttggcaaataggg

SEQ ID NO: 295502 - DNA, 537 bp, Homo sapiens
agcatctaccatacctattcagattacatgcattgagaagcatgggccaagataattctggaatcctctgttcatccttttatctctcacttctactgagttgacacatactaggttctcagaaaatacttgtttaattactaaggaaacgaggaatgaagattttggtggaatcttaaactgttccttagttgttactacttgtgtgtgagtgtgtgtgtacatatggatgtatgtgcatttttgtgtgtgtgtttataatttcgagatttctcaaatggagagtgtcataaacattattttgtcagtataacatacatgtattatgtgtgtatctttatgtagatatttgactctattcaattttgacagctactccattcaaaataattcaaagactatacttacaartgtagtaaaaaattaaatccctaaggttttcagtcacaggtttggggatttttctcctctataagtttagaaaagactataggagttgtcttgagggactgaagaggcttcacttggcaaataggg

SEQ ID NO: 295503 - DNA, 622 bp, Homo sapiens
atactaatttaaacattttagagggctagccttaaagttcttattttagaatatggttacaacttgctcaaattattcataggatgttactatagttaacatgttatgtgtatgtaatttgtatggatgatactgctaaatctagtagtaatcattacctaaacatgtgcttaatatgaaaaagctatatgcttttcttatctgaagttacttgcaatttcaggagatttaaggaaatgtactgccttattaaaattgagtacagagaataaatagaaattcttgtgactgtscataatgttcaagttagaattttcattaacctctttgacaaacacattttcagcaatgattaagttgcaacctaataaaaatgctaaacacaatttagtaatcatagaagctaactttctaacttcccactagtacaaataaatggaacataggtttaaaaatcactcatattactattatcaaaggtaattttatcttttggtatatttatttctattcttttatctacacatagcctgtttgtgtttttaatagtgcaacattaaaatatatcatgaaattctattttacatgatacttatgctgtaaattttttttgtgtaacttc

SEQ ID NO: 295504 - DNA, 622 bp, Homo sapiens
atactaatttaaacattttagagggctagccttaaagttcttattttagaatatggttacaacttgctcaaattattcataggatgttactatagttaacatgttatgtgtatgtaatttgtatggatgatactgctaaatctagtagtaatcattacctaaacatgtgcttaatatgaaaaagctatatgcttttcttatctgaagttacttgcaatttcaggagatttaaggaaatgtactgccttattaaaattgagtacagagaataaatagaaattcttgtgactgtccataatkttcaagttagaattttcattaacctctttgacaaacacattttcagcaatgattaagttgcaacctaataaaaatgctaaacacaatttagtaatcatagaagctaactttctaacttcccactagtacaaataaatggaacataggtttaaaaatcactcatattactattatcaaaggtaattttatcttttggtatatttatttctattcttttatctacacatagcctgtttgtgtttttaatagtgcaacattaaaatatatcatgaaattctattttacatgatacttatgctgtaaattttttttgtgtaacttc

SEQ ID NO: 295505 - DNA, 528 bp, Homo sapiens
gtactgttattcccatttgtacaaaacattgcaaaatgtgcttaataagtataaacataaaaggaaaacttaggttgtgtaacaattctcagtcaggtttccrttacaaacaagtactacttttaggaatatcagcaatctactcttggtcaattgaaattaaataacaaatttctatgttgaggagcattgttctacattagccaggcatctgtttcttgggcagttagcttgttgtatatcatgtaatagttttgagtactgcagctgaataatgcttgattcttaatttccctatgcaaacaggcctggctgaaagcatggtttttttcctttctggattaacagtgcctaattttcaagcattttttacagagttattgtttcccaataaattcttttagactccatagacccttttgtgccccagtcagggaagcagcagcataggataaatctacatttattagacttgctcttagtgtagattttttggtttacttaaaatgaagttataaatcattcaca

SEQ ID NO: 295506 - DNA, 542 bp, Homo sapiens
tttggtctacacttgccatatagtaggtgtttaggacatgttatcttcttatattttatgtaaatatgtgaatgtcagagcaaggatggaacrgataaactgcctactactaacctgtatgctgataatattttattatatgaaaagatgcacatagaagttttacaacttggacttatttactcacctattatcatacctgagtcttctgataataaaatccatgtactcatcacagtacatgatatagatttttatggttaatctctactatggaatacataatagttggccacatgttctaagtcaatataaacaggtcaatgcttattgtatccttccttccaaaagtacattgtgtacgtaattacaggtgaaggtggtctagttaagaagtttagtggtgtctgaccgggagcagtggctcacacctgtaatcccagcactttgggaggctgatgagggtggatcacctgaggtcaggagtttgggaccagcctggccaacatggtgaaaccccatctctactaaaaatacaaaaa

SEQ ID NO: 295507 - DNA, 1261 bp, Homo sapiens
tataaagtacattggtgtaatatatgtgagaacaacagcatggaagatagagggtaaatggaactgtactgttttaagattctggtattttaataaaaataataactcaaggtcacatktggtggttcacacctgcaatcctagcactttgggaggccaaggcaggctgattgcttgagcctaggagttcaagaccagcctgggcaacatagcaagaccctgtgtcaactaaaaataaaaaaatagctgggtgtggtgatgtgtacctgtagtcccaggtttataggaggctgaggtggggaggttatttgagcctggagggatgaggctgcagtgaggagtgattgtgccactgtattccagcctgggtgacagagtgagaccctgtctcaataataataataataataataataataataataataataataataattcaatattaaatctaagaaaattatcatgagctaacaatgcacgttgttaaccctaagcaaccactaaaaaaaatgcaaagaaatatagttgaaagctaacagagggtaaaatgacatactaaaatatttgtggaaaaccaaagaaaagctaggaaaggaggaagagaggaataaaaaagggatgagagaawtataaagtacattggtgtaatatatgtgagaacaacagcatggaagatagagggtaaatggaactgtactgttttaagattctggtattttaataaaaataataactcaaggtcacatttggtggttcacacctgcaatcctagcactttgggaggccaaggcaggctgattgcttgagcctaggagttcaagaccagcctgggcaacatagcaagaccctgtgtcaactaaaaataaaaaaatagctgggtgtggtgatgtgtacctgtagtcccaggtttataggaggctgaggtggggaggttatttgagcctggagggatgaggctgcagtgaggagtgattgtgccactgtattccagcctgggtgacagagtgagaccctgtctcaataatwataataataataataataataataataataataataataattcaatattaaatctaagaaaattatcatgagctaacaatgcacgttgttaaccctaagcaaccactaaaaaaaatgcaaagaaatatagttgaaagctaacagagggtaaaatgacatactaaaatatttgtggaaaaccaaagaaaagctaggaaaggaggaagagaggaataaaaaagggatgagagaa

SEQ ID NO: 295508 - DNA, 623 bp, Homo sapiens
caggaacaatggttctataaaactgttataaaagtctgtgtacccagtaacagagctccacattgcatgaagcaaaaactgtcagaattgaaaagataatagacaatttaacaattattagcaagtatagttacaaatttcaaaactcctttctcagtaattagaacaaataggtaaaaaatcagtaatgatataaaaaaatttgcatagtatcaggggaaacagcccccagtattttaacgtaggttcttttctattttccctaaatgtcagccggtctgagaaataaagagaaagagtacaaagagagaaagtttacagctgggcctccgggggtgacatcgcatattggtaggaccgtgatgacgacctggagctgcaaaaccagcaagtttttattagggattttaaaaggggagggggtgtatgaacagggagtaggtcacaaggatcacatgcttcagaggacaattaagatcacaaggcaaaggcaaaattagaattactgatgagggtctatgtcccrctgtgcaggtattgtcttgataaacatcttaacaggaaacagtgttcaagagcagagaactggtctgactagaatttaccaggctggagtttcccaa

SEQ ID NO: 295509 - DNA, 566 bp, Homo sapiens
taatttaaaaatgttctgagaaagaaaacgataggacatggtggcttcactagtgaagtctatcaaatatttaatgaagaaagtgtaacaatcttacaaaaactgtttcagaaaatagaagagggttcacttcccaacagattttacgaggccagtattacactgataccaaaaccagattaagatattcccaaaattgaaaactacagaccaacagctctcatgaatatagatgaaaacattcttaatattagcaaatcaaattcaacattatataaaaagaatagytcatcacatacaagaggctttaatctcaagaattgaagatttgcttaatattcaaatatcactcaatgcaattcatcatattaattgaataaagaagaaaaattctttggccatcttgatagcagtagaaaaaaattcttaaaaattaacacttattcatgataaaaatttcaggtaactagcatttaaaaataccttcccagcttgataaaggcttctataaaagattcacagtaaacataatacttagtaaaagactaaatttgttataccaaaaa

SEQ ID NO: 295510 - DNA, 328 bp, Homo sapiens
ctagcagtgatgggagacagtggcagatcatcacgcattagattctcataaagagcatgcagtctagatccctctcatgcacagttcacaatagggtccatgatcctatgagaatctaatgccaccacccatctgacaggaggcagagctcagcttcgctcactctcctgtcactcacctcctactgtgtggcctggtttctaacaggccacagaccaaaactagtctgtaggccatgggttggggacccctggtttaaaagatagacaaagaaatcagaggaatagaatagaatccagaratagatccatacatggtcaactgattt

SEQ ID NO: 295511 - DNA, 479 bp, Homo sapiens
ttggcaagtatgtaaagccaatggaagtctcattcattgctgatagaaatgagaaaatgttatagccactttggaagacagattggcagttttttataaagttaaacttgtacttgtttttatgactcatcatgggttcctttcctggtttattatctacccaaggaaaatgaacatgcatgggattaactgcgggggattaactgctcaactgatactgtctaccttagatttgtaatgctgcagtgaatattcaaagyggcattatttgtaaaatccaaaaattagaataagccaaagttttcatcagctgatgaatggataaggaaaatgtggtatatccaaacaataaaacactattaaacagcaaaaaggagcaaaccacttaaacatgcaccaacatagatgactctcaatagatacttcattgttatactgagcaatagaacataaatccaaaagattgtgtattatatgtt

SEQ ID NO: 295512 - DNA, 576 bp, Homo sapiens
gttgtttctacctgttcaacataatcttcccctttcttcacgtaagaaaacattttatttttcctttgggtaactgccgtggtgtcctattaagcagttaatcccgtgggggcactcagggagagcccctcargttctttgattttgttactataattcataactaattttatattctgtctcttatattcctatattaaataattaggtgtctaaatctgattgtttgcttgcttttgctgactctctcacccatggtggtttgtgggctcctactggttgaccttaatgcattggaaaaatagggggttacaccggggataatttccaccatgggggatttgcttttgcatttgctaagggccaggggatattagcctgggacaactttaaacccttcgggggccacaggctaaatctaggaatctcaggttctgctcatctaatcatctctgatagtcatgttctcctgaaatctagacatagacaatattcaagcgtatgcatacataacctctgacagtgtatcagatgtctcttatacagcactttatataacctctttgtgccatctct

SEQ ID NO: 295513 - DNA, 495 bp, Homo sapiens
acagctgtgggggttatagtggcatttccctaaatgctagtatgatttcagaagagacttccacaatatggagaagtcacaattttcatcattagtttaaactaaggcaccttatctcacttcctctaagtcacataattctcattttatgttaatagaagttaaacctaattatcaaggggagagtagatttctaagttatagtttcttcttgaagagttatgagtgtaacctccattaacactaggccatgttaaaaaggcaactctttgaatgttgggataaaaatacatccctctagtggagggttatattttatctgtaactgagtaatttggactcaagtgacytacattgagaaataggtttaatagtgaaaagactgtggattgatggatccctgccaggcaggaactgaaagttcagagcattagcagtagctgacagaatataggacatgatgttattcccaaaattatcaggaagagaaaatat

SEQ ID NO: 295514 - DNA, 571 bp, Homo sapiens
atattacataatgtgtaggaatactacaatgtgtctgaaccacatgttgcaattaatgctctagggttaaataaaaattttgaatggattagaaaataggcagtctctatcagataggtatggttgagtaaaaattcactcaaaatatgttgacttaaaataacaattgtgtatttggcttatgattctgctgggcagtactagtgtgtcttccttgtgtgtctktggtcagctgtgagtgaccacagtagagctgtaggctggctttggtggctttgctaatcaatgtgggtctggcaggtgtctgggacctcaactggcataagtaggctgactggcctctgacccacattgtatctcttcctccggcaggctagcccaaagttatgctcatgactgaggcagagtccccagagaccaagtgagagcccacatggcttctggaggcctaaatctggaataggcactcagccccttttgctgagttcagttggccaagcattccatagccagcaatcatccagtggcctaagaaatacacctcacctcttgatggagggccatcaaagcc

SEQ ID NO: 295515 - DNA, 510 bp, Homo sapiens
tgatatttcatgacattgaaatcccaaaggataaaatgttggaagccgattgagacttagaagggagtatgacaatttgccaaggtatagaaaagatttggcttgagtatagaagttctatgatgagaagaggaaggcaaacactggttaaactactcttgataagtttgtttggttttagagttgaggtcttgctctgttgktcaggctggagtacagtggcacaatcatagctcattgaagcctcaaactcctgggctcaagagatcctcccatgtcagccacccaagtagctgggactacaggtgtgtgccactgcacttggataattttttatgtatttttatttttattttttttagagatggggtctccatgtgttgcccaggatggttttgaactcctgggttcaagcagtcctcctgcctcagcctcccaagtagttggtattacaggcacaagccactgtgcccaactttttgttttctttttaacaaagaaataaaatac

SEQ ID NO: 295516 - DNA, 530 bp, Homo sapiens
aaactaatacaggcacagaagaccaggaacctcatgttctcactcataagtgggagttgaacagagaacacatggacacagggaggggaacaacaaacaccagggcctgtcagggggtggagagcaaggggaagtagagcattaggacaaatagctaatgcatgcagggcttaaaacctagatgatgggttgatagatgcagcaaaccaccatagcacatatataccaaygtaataaacctgtatgttctacatacgtatccggaacttaaagtaaaataaaaacaaacacacaaaaacaatccgatcctgtcatttgcatcagtgtggatgggactggaggtcattacgttaaatgaaataggccaggcatggaaaggcaaactttgcatactctcacttattgtgggaggtaaaaattaaaataattgaactcatggagatagggagtaaagggatgattcccagtgcctgggaaaggtagtggtggtgcttggtggggggaatggggatggttaatggttacaaaaa

SEQ ID NO: 295517 - DNA, 1117 bp, Homo sapiens
aaactaatacaggcacagaagaccaggaacctcatgttctcactcataagtgggagttgaacagagaacacatggacacagggaggggaacaacaaacaccagggcctgtcagggggtggagagcaaggggaagtagagcattaggacaaatagctaatgcatgcagggcttaaaacctagatgatgggttgatagatgcagcaaaccaccatagcacatatataccaacgtaataaacctgtatgttctacatacgtatccggaacttaaagtaaaataaaaacaaacacacaaaaacaatccgatcctgtcatttgcatcartgtggatgggactggaggtcattacgttaaatgaaataggccaggcatggaaaggcaaactttgcatactctcacttattgtgggaggtaaaaattaaaataattgaactcatggagatagggagtaaagggatgattcccagtgcctgggaaaggtagtggtggtgcttggtggggggaatggggatggttaatggttacaaaaawttggaaatatctgaacccaaactatccaatgcattaatacaagattacagaatcaagaaaccaaggcctgtttccatagactcgtttgtaaattcagatatcatgtgaaataaattgacaaatgaatttaatgtgttttctttaaaacttctgcacaaccagtaagaacataagggaagctttccaaagtattgcctcggtttatgacacaagatgtccttgtgtgtaaaattcttttaaatagttgcctagatttttaataatacactttatttttatcaaataaagctgtgagtttctgaacacttcctctttgggagaaaactgggttcaataatttagcatcggagtaaagcactgggtatttgtctgtctgggttataatctcawttccaccacctactggttgtgtgactttggacaagatgcttcagatttctaaacctcaagtttctcatctataaattgggacaattaataagacttttctcgtaggtttttatgaggattaaactaggcaattcatatacagtgcttagaaaaacagctggtatagttgaaggtcaaatcctagcaatttagtagt

SEQ ID NO: 295518 - DNA, 637 bp, Homo sapiens
gttgccagtccctgggttgtcagtctctggctcgtgttgggttgctccacctgcccttggctttgggccctttctccctaaaggggcatgtttggagctgagccagagtccatatactcacagtgggcaccacggctcacagctgctgccagtgtgttgcccrgaacacactctccttgagagagcttctccaagttgtcatcccagtagtggttggagtagaagatatccctttttccagcattaggctacatttctgacaattccaaaaacccatttccgcacagccctggtgccagcccagccagaatttatcaactccaatcccttatccattcctgcaatacttctatctttcaccccaggctgtaaaaatccaggcctatccatatttaaaggtctagtcagaacatttcttgcttcacagctaatcagaaattctctcttttattgaaacctctcatcacactttaaaaagaataaatctaagctctctgtcatgacctgaaagtctttttctgcctctctgattctatttccttcttcatttgtgttcttcagtcacacaaatcctttgtatgttctttggactttccaagttcattatctagtgtagcatttgctgtttaccatgctt

SEQ ID NO: 295519 - DNA, 637 bp, Homo sapiens
gttgccagtccctgggttgtcagtctctggctcgtgttgggttgctccacctgcccttggctttgggccctttctccctaaaggggcatgtttggagctgagccagagtccatatactcacagtgggcaccacggctcacagctgctgccagtgtgttgcccagaacacactctccttgagagagcttctccaagttgtcatcccagtagtggttggagtagaagatatccctttttccagcattaggctacatttctgacaattcsaaaaacccatttccgcacagccctggtgccagcccagccagaatttatcaactccaatcccttatccattcctgcaatacttctatctttcaccccaggctgtaaaaatccaggcctatccatatttaaaggtctagtcagaacatttcttgcttcacagctaatcagaaattctctcttttattgaaacctctcatcacactttaaaaagaataaatctaagctctctgtcatgacctgaaagtctttttctgcctctctgattctatttccttcttcatttgtgttcttcagtcacacaaatcctttgtatgttctttggactttccaagttcattatctagtgtagcatttgctgtttaccatgctt

SEQ ID NO: 295520 - DNA, 631 bp, Homo sapiens
ttttcaacatagtactagaagcactatcaggagcaattagacaagaaaaataaatgaaggatatctaaattggaaaagaaaaagtaaaattgtctctatttgcagatgacatgatcctatatatagaaaaccccaaagactccaccaaaaaacttctatatctaataaatgaattcattaaagttgtgaaacataaaatcaacatacaaaaaaatccatgacatttctatttgcaaatatcaacctacctgaaaaagaaatcaagaaacactcccatcactcccatttatgatagtatcaaaaagacttcaaaataaatttaactgagatgaaagacctataaactggatactataaaacattgatgttgttttaaatcaacaatatatactctctgctttaccttgactaataaagataaagctttttaaaaagcttttaaaaaactagtkaattcagatttttctctcatgaacctatgcctgactttactctcaccaagaatgaatgctaactacaatttacttctttagctgtatgcttttccaaaattctttaaacactttctagcatattctaacataaaatcatatattcttatttggaagaacactttgtatttgtgataaac

SEQ ID NO: 295521 - DNA, 581 bp, Homo sapiens
ccaaaaaacttctatatctaataaatgaattcattaaagttgtgaaacataaaatcaacatacaaaaaaatccatgacatttctatttgcaaatatcaacctacctgaaaaagaaatcaagaaacactcccatcactcccatttatgatagtatcaaaaagacttcaaaataaatttaactgagatgaaagacctataaactggatactataaaacattgatgttgttttaaatcaacaatatatactctctgctttaccttgactaataaagataaagctttttaaaaagcttttaaaaaactagtgaattcagatttttctctcatgaacctatgcctgactttactctcaccaagaatgaatgctaactacaatttacttctttagctgtatgcttttccaaaattctttaaacactttctagcatattctaacataaaatcatatattcttayttggaagaacactttgtatttgtgataaaccagtctagaataaatgaattgttattaatccaactaatgacagtaactaattaattcacctgtttcttctaacaatttcctgataaaatgtttt

SEQ ID NO: 295522 - DNA, 1091 bp, Homo sapiens
aactgagggagatagaggtaaaatggaagatgaacgaagtttattcaaacccaaatattgtttctaaattactggataatatagttccagaaaattcacatgaaaaaaggccactcctggtaagaatgagtatattaatttcctgttgttactgtaacaaattaccccaaatttagtggtataaaaaaaggactggttstattacagttctgtataccagaagtctcactgggctaaaaatcaagatgccaacagggctacgttcctcctggaggcttcagaggataatctatttccttgaggttgccagcttctggaggctgcctgcattccatgtcttctggccccttcctccaccttaaaggccagcagaatagcatcttcaaatctctccctctaactttcacactctcttctgccttccttttccatttatcagaacctggaggcagtcatccttcatctcaaagtcacaatctctttgtgctgtcttctctgtgttcaactttwaattttcctcacaagctttgttatttcaatgagcatgagagtttaaagcagcttctaaaaacacgtaaggtacagaataattacataaatattagagggagtttggtataaggttagaaaaaactattacgttccwgggttaaatttaatcacagacctatagactttaaagtctggtatagttgctagaaagaggccgtagacttgaccctaaacctcctataagccaaagcttatatcacatccaagtccatcggcatttatgtctacaatttctagctgtctacttttcctttctcttctattttattcaatacttttgtagttttaagtaacatagaaaagatttttgcgacagcgtatatgtcagtttctcagtatgattttatatcttagaaaattaacttagctacttaactaatagaatgaaattgaaaacagtttcacaaaacctctttagttaagccataactgaaactcaaatcacggagacatataccaagaacagagaagaaagtagtaataatctaggtggataaatattttaattgccaggtatcagtttttaacagtttggttgg

SEQ ID NO: 295523 - DNA, 567 bp, Homo sapiens
ttttactattatttaagacaaatagaaaagtgctatggtgaattgttctgcaaaagtacaaatcctggtctatttttagaccttttgctccaggcctgaaaatattctcagagtttcttagtttagtattttgggggcatgattttgaagcattctgagacattatgctgcatattagtttctttaacaataatatttscatatcaaatattaaattcttgaactttttgttaatgcttcaaatatttcaggattgtgttatacttccccttttcaaaggaaaccactctttgcatctgctgcagttagagcaagaaagatccttctctccaaattgccgtttttattttttactgttgtgttacagcacaaccttctgtgtacagcatacaaatgataggtggtaaagatattgtgggtttgcatgcataataaatatggttccatttgagtagttggtgagtatttcataatgcaacagtggaaaatgaggcaatttgaatattttgggaggcttcaatatatatttactgtgcatgcatatacatatttacatacaattttcaa

SEQ ID NO: 295524 - DNA, 567 bp, Homo sapiens
ttttactattatttaagacaaatagaaaagtgctatggtgaattgttctgcaaaagtacaaatcctggtctatttttagaccttttgctccaggcctgaaaatattctcagagtttcttagtttagtattttgggggcatgattttgaagcattctgagacattatgctgcatattagtttctttaacaataatatttgcatatcaaatattaaattcttgaactttttgttaatgcttcaaatatttmaggattgtgttatacttccccttttcaaaggaaaccactctttgcatctgctgcagttagagcaagaaagatccttctctccaaattgccgtttttattttttactgttgtgttacagcacaaccttctgtgtacagcatacaaatgataggtggtaaagatattgtgggtttgcatgcataataaatatggttccatttgagtagttggtgagtatttcataatgcaacagtggaaaatgaggcaatttgaatattttgggaggcttcaatatatatttactgtgcatgcatatacatatttacatacaattttcaa

SEQ ID NO: 295525 - DNA, 560 bp, Homo sapiens
attgagatacaggcttcaaaataatccagctggggatggaaggagcaggtaaggtacagagaaaggaattttacttggtttgayaattactgaagctaggtaatgggaatatggggatctgttagacagttctctttactctttgaagtctcccataatcagtttttattacttcatagttaacctattcagtgttttgctggagttggctcacactggctcaaagaactgactgtcaaactttaagaaattttatgagcctgttgttaaagcactgacagcttcaaatcagccatggcagtgtatttatatcatgaaaatcaaggttgcctttttttttctgaagaattgattgttaaacatgaactagcacaccattgattctacccccgatgccaaatgcaaagaactacacacacacacacacacacacacacacacactctctctctctctctctctctcttaggaaaaacagaattaggaaaacctcatcggtagcagaaagggctgaattttcagcttagtttcctctactctccctccctatcaccacgtat

SEQ ID NO: 295526 - DNA, 560 bp, Homo sapiens
attgagatacaggcttcaaaataatccagctggggatggaaggagcaggtaaggtacagagaaaggaattttacttggtttgacaattactgaagctaggtaatgggaatatggggatctgttagacagttctctttactctttgaagtctcccataatcagtttttattacttcatagttaacctattcagtgttttgctggagttggctcacactggctcaaagaactgactgtcaaactttaagaaattttatgagcctgttgttaaagcactgacagcttcaaatcagccatggcagtgtatttatatcatgaaaatcaaggttgcctttttttttctgaagaattgattgttaaacatgaactagcacaccattgattctacccccgatgccaaatgcaaagaactacacacacacacacacacacacacacacacactctctctctctctctctctctcttaggaaaaayagaattaggaaaacctcatcggtagcagaaagggctgaattttcagcttagtttcctctactctccctccctatcaccacgtat

SEQ ID NO: 295527 - DNA, 560 bp, Homo sapiens
attgagatacaggcttcaaaataatccagctggggatggaaggagcaggtaaggtacagagaaaggaattttacttggtttgacaattactgaagctaggtaatgggaatatggggatctgttagacagttctctttactctttgaagtctcccataatcagtttttattacttcatagttaacctattcagtgttttgctggagttggctcacactggctcaaagaactgactgtcaaactttaagaaattttatgagcctgttgttaaagcactgacagcttcaaatcagccatggcagtgtatttatatcatgaaaatcaaggttgcctttttttttctgaagaattgattgttaaacatgaactagcacaccattgattctacccccgatgccaaatgcaaagaactacacacacacacacacacacacacacacacactctctctctctctctctctctcttaggaaaaacagaattaggaaaacctcatsggtagcagaaagggctgaattttcagcttagtttcctctactctccctccctatcaccacgtat

SEQ ID NO: 295528 - DNA, 546 bp, Homo sapiens
aaattgcatattgcagtaaaacgtgatctctcatagttctcatgtatttttcrtggtgtttagtgcaataccataagcctcaaataacaccatagaacccatctagtgatgctggaagtgctcccaagaaacagaaaaaaagtcatgacattacaaggaaacgttgagttgcttgatatgtacctgattgaggtctgcagctttgtttgcccaccattttagacagacaattgaccttgaaaacagaaaacataaacttatggtgtcaatcataattaagaaaattatgaggaagagaaaatacactgcagtgttataaatgtgttttctcttcctcttaattttcttaataactttttcttttctctagcttactttaagaatacagtatataatacatatacaaaatatgtattaattgactgtacattatcagtaagacttttgatcaacagtaggttattagcagttaagtttttgggtagtcaaaagttaaactcaaattttcaactgtgcagggagtcagcacccttaaaccccatattg

SEQ ID NO: 295529 - DNA, 486 bp, Homo sapiens
ctcttgcagtgcatccagagttgttctttccttccagtgggttcgtggtctcgctcacttcaggagtgaagctgcagaccttcccagtgaacgttacagctcataaaggctgcatggacccaaagagtgagcagcagcaagatttattggcaaagagctaaagcacaaagctttcacagcatggaaggggacccaagcgggttcccgctgctgggtgggtgtccagcttttattcccttatttggacccrcccacttcctgctgattggtccattttacagagcgctgattggtccattttacagtgtgctgattggttcgtttttacagagtgctgattggtgcatttacaaacatttagctagacacagagtgctgattggtccgtttttacagagtgttgattggtgcgtttacaaacctttagctagacagaaaagttctccaagtccccactcgacccaggaagtcaggctggcttcacct

SEQ ID NO: 295530 - DNA, 486 bp, Homo sapiens
ctcttgcagtgcatccagagttgttctttccttccagtgggttcgtggtctcgctcacttcaggagtgaagctgcagaccttcccagtgaacgttacagctcataaaggctgcatggacccaaagagtgagcagcagcaagatttattggcaaagagctaaagcacaaagctttcacagcatggaaggggacccaagcgggttcccgctgctgggtgggtgtccagcttttattcccttatttggacccgcccacktcctgctgattggtccattttacagagcgctgattggtccattttacagtgtgctgattggttcgtttttacagagtgctgattggtgcatttacaaacatttagctagacacagagtgctgattggtccgtttttacagagtgttgattggtgcgtttacaaacctttagctagacagaaaagttctccaagtccccactcgacccaggaagtcaggctggcttcacct

SEQ ID NO: 295531 - DNA, 1125 bp, Homo sapiens
aaccacagaagtactgggcttgaggtgccccctaatgcagatacagcttaggtcgtaatacccatgtcctttcaactgtatggaaagctctcccaagaaggatgggaacaaacragctcagactatgaagactacaataaatatctaactcttcaatgcccagaaacagatgaacatttaaaagtatcatgatcatccaggaaaacatgacttaccaaataaactacataaggtaccagggatcaagttaggagaaacagaggtaagtgacctttcagatagataattcaaaattgctgttttgaagaaactcaaagaatttcaagatttcagagagaaggaattcataattctgtcacacaaattaaacaaaaagaatgaaataattaaaaagaatcaagtagaaattctggagctaaaaatgcaattcaaatatggaagaatgcatcacagtcttttaataacagaattgatcaagcagaagaaataattagtgagcttgaaggtaggcwtcgcttacagaattaccaaatgatccaccaatcttacttctgggtatgcawacaaaagaactgaaagtaggatcttgaagagatacttgttcaatgcagcattattcacagtagccaagaggtagaagcaactcaaatgtccatcaatggatgaatggataaagaaaatgtggtaaatatgttcaatgaaatattatttagccttaagaaagaaggccatcttgtcatatgctacaacataaataaaccttgaggacactatgttagatgaaacaaaacagtcaaaaaaagacaaatactgtatgattccacttacataaactgcccaatatagtcaaactcatagaaacaaaaggagaatggtggtttgcaggggctggaggttgtagaaaatgaaagttgttgttcaatgggcccagagtttcagttttgaaatataaaaaattctagagttttgttgaacaacaatgtgaatatacttaacactactgaaatgtagacttaaagatggtaaattttatgttatgcatattttaccaccactaaaaaagtatttaaaaatggatggctgtagctatgcagtgacacataaatcaaatttgtatccacaaat

SEQ ID NO: 295532 - DNA, 613 bp, Homo sapiens
tcgcttacagaattaccaaatgatccaccaatcttacttctgggtatgcatacaaaagaactgaaagtaggatcttgaagagatacttgttcaatgcagcattattcacagtagccaagaggtagaagcaactcaaatgtccatcaatggatgaatggataaagaaaatgtggtaaataygttcaatgaaatattatttagccttaagaaagaaggccatcttgtcatatgctacaacataaataaaccttgaggacactatgttagatgaaacaaaacagtcaaaaaaagacaaatactgtatgattccacttacataaactgcccaatatagtcaaactcatagaaacaaaaggagaatggtggtttgcaggggctggaggttgtagaaaatgaaagttgttgttcaatgggcccagagtttcagttttgaaatataaaaaattctagagttttgttgaacaacaatgtgaatatacttaacactactgaaatgtagacttaaagatggtaaattttatgttatgcatattttaccaccactaaaaaagtatttaaaaatggatggctgtagctatgcagtgacacataaatcaaatttgtatccacaaat

SEQ ID NO: 295533 - DNA, 613 bp, Homo sapiens
tcgcttacagaattaccaaatgatccaccaatcttacttctgggtatgcatacaaaagaactgaaagtaggatcttgaagagatacttgttcaatgcagcattattcacagtagccaagaggtagaagcaactcaaatgtccatcaatggatgaatggataaagaaaatgtggtaaatatgttcaatgaaayattatttagccttaagaaagaaggccatcttgtcatatgctacaacataaataaaccttgaggacactatgttagatgaaacaaaacagtcaaaaaaagacaaatactgtatgattccacttacataaactgcccaatatagtcaaactcatagaaacaaaaggagaatggtggtttgcaggggctggaggttgtagaaaatgaaagttgttgttcaatgggcccagagtttcagttttgaaatataaaaaattctagagttttgttgaacaacaatgtgaatatacttaacactactgaaatgtagacttaaagatggtaaattttatgttatgcatattttaccaccactaaaaaagtatttaaaaatggatggctgtagctatgcagtgacacataaatcaaatttgtatccacaaat

SEQ ID NO: 295534 - DNA, 613 bp, Homo sapiens
tcgcttacagaattaccaaatgatccaccaatcttacttctgggtatgcatacaaaagaactgaaagtaggatcttgaagagatacttgttcaatgcagcattattcacagtagccaagaggtagaagcaactcaaatgtccatcaatggatgaatggataaagaaaatgtggtaaatatgttcaatgaaatattatttagccttaagaaagaaggccatcttgtcatatgctacaacataaataaaccttgaggacactatgttagatgaaacaaaacagtcaaaaaaagacaaatactgtatgattccacttacataaactgcccaatatagtcaaactcatagaaacaaaaggagaatggtggtttkcaggggctggaggttgtagaaaatgaaagttgttgttcaatgggcccagagtttcagttttgaaatataaaaaattctagagttttgttgaacaacaatgtgaatatacttaacactactgaaatgtagacttaaagatggtaaattttatgttatgcatattttaccaccactaaaaaagtatttaaaaatggatggctgtagctatgcagtgacacataaatcaaatttgtatccacaaat

SEQ ID NO: 295535 - DNA, 598 bp, Homo sapiens
ggacaccctttaaacctctcctttgaggcacagctaaagaggaactaattccctgttttctcactggcttccctgcagcaaacatttgcctacatgagaagcagttaagggcaggagctaagarcattagtctgggagccgagctgcagctcaggtgattctgatgggcacccatgattgagaaacgctgcaggcactttggcatttctaggctaaatcattatataccaagcttccctccccctaacgtggatttaaagcattacaaataacaagctaactttgggaggaggttacaagttacaaaacacagcctgagaggtaatggagggaaagtaagcacaaacacttcagaacttctaaacaccagttgcctaacatgagttctagcagaaaaaaatgacgcaaattttcgagttgcttaaaaaaactcgattaagtatttaatataggtggtagttggtatcaaattattataatatttatatcccactggatgcagttaatgacaatattaacaagatttagcagaaattacatttgcaacaataaaacattaataaaaagtttaggtgtgatttttaaaatatgcaagaag

SEQ ID NO: 295536 - DNA, 499 bp, Homo sapiens
taccggtttgagccacaaattaagagaagaacatttccttggaattattatgagcattacatagagattttctgctaacaatagggggaagaaaccaaacagccctaagaaaaataggaaataaattagagaaatcctagatttctaamgtagaggtaacacattgtacatggaatcaggtacttgggttctgggcctggctctgtgtcaagctgttgatttactttaggaaagactgtttggtgctatcgagtgtgctgcatgcaacctcagctctaatgttaagtgttactacctttattatttgtagtgctgttatcatgtggcaggttctggtcattacatgttattgtatttattcttcacaatgcaattactgaagtttcacaggagaaaatggatgtcagagagaataagtgttcagaataacactgcaagtaatcatgggggcaatatttgaatccaggtttgcactgcaaaactgcaatctgatgttcct

SEQ ID NO: 295537 - DNA, 499 bp, Homo sapiens
taccggtttgagccacaaattaagagaagaacatttccttggaattattatgagcattacatagagattttctgctaacaatagggggaagaaaccaaacagccctaagaaaaataggaaataaattagagaaatcctagatttctaaagtagaggtaacacattgtacatggaatcaggtacttgggttctgggcctggctctgtgtcaagctgttgatttactttaggaaagactgtttggtgctatcgagtgtgctgcatgcaacctcagctctaaygttaagtgttactacctttattatttgtagtgctgttatcatgtggcaggttctggtcattacatgttattgtatttattcttcacaatgcaattactgaagtttcacaggagaaaatggatgtcagagagaataagtgttcagaataacactgcaagtaatcatgggggcaatatttgaatccaggtttgcactgcaaaactgcaatctgatgttcct

SEQ ID NO: 295538 - DNA, 499 bp, Homo sapiens
taccggtttgagccacaaattaagagaagaacatttccttggaattattatgagcattacatagagattttctgctaacaatagggggaagaaaccaaacagccctaagaaaaataggaaataaattagagaaatcctagatttctaaagtagaggtaacacattgtacatggaatcaggtacttgggttctgggcctggctctgtgtcaagctgttgatttactttaggaaagactgtttggtgctatcgagtgtgctgcatgcaacctcagctctaatgttaagtgttactacctttattatttgtagtgctgttatcatgtggcaggttctggtcattacatgttattgtatttattcttcayaatgcaattactgaagtttcacaggagaaaatggatgtcagagagaataagtgttcagaataacactgcaagtaatcatgggggcaatatttgaatccaggtttgcactgcaaaactgcaatctgatgttcct

SEQ ID NO: 295539 - DNA, 499 bp, Homo sapiens
taccggtttgagccacaaattaagagaagaacatttccttggaattattatgagcattacatagagattttctgctaacaatagggggaagaaaccaaacagccctaagaaaaataggaaataaattagagaaatcctagatttctaaagtagaggtaacacattgtacatggaatcaggtacttgggttctgggcctggctctgtgtcaagctgttgatttactttaggaaagactgtttggtgctatcgagtgtgctgcatgcaacctcagctctaatgttaagtgttactacctttattatttgtagtgctgttatcatgtggcaggttctggtcattacatgttattgtatttattcttcacaatgcaattactgaagtttcacaggagaaaatggatgtcagagagaataagtgttcagaataacactgcaagtaatcatgggggcaatatttgartccaggtttgcactgcaaaactgcaatctgatgttcct

SEQ ID NO: 295540 - DNA, 569 bp, Homo sapiens
gactgacaatctggacccagtcttcatccaggtgcctaatagtcaatgctcatttcctgttcataaatcaaaaaccagagttaaattgggaaccgcatcagataatttatctattgtctcttgaattttgttctttgattaatgcttcttagcataactttatcagttcattttattgtaagcagacaaatttttcacttcttttggaagtcaacaatgtatagactttttatttttaaagcataccattttaccttaacaacaaatgtatacaaaaacacacaaatacttttctcccytgatttcatttttccatgtttacatttcaatcaattcggcaagcataaattgcacactttgtgccacacactgctaaacataacaaaagataaagcaggccaggcacagtggctcacacctgtaatccaagcactttgggaggccaaggcaggagaaattgcttaagcccaggaatctgagacctgcctggggaatatagaggtgttggcagcagcagcccatctggagaggttgctgccatgacactggctacagtaggggaggcgtgg

SEQ ID NO: 295541 - DNA, 611 bp, Homo sapiens
cgggtagaaataggaataaaaataggaataatcaccaccaagccttgtgcatggtaataattagctagcactccctatgaaaaaaatttataattgtgttataatatatacaattttcacaaaataattatgttcaaacttacgataaattctcacttcctcattgtttttctctaaaatacagactaacacaagcagctttgtctatgatatgaaagggctgtaatgtaccaaaaataatggagagttattgataagtggaaagcattaaaaaaactacttcttaaaagactttygtctcagtcttttatattttaatggtataagcttccagctatttcaagaaacaaacagtaaaattatttaacctattgaagagtctctacataaaggttaaaaaaatatgtcaatcaataagaataaactattgattgacagcctctagaaacttcacattatttcctagtcttaaaaaaaggtatgtttctacaaaataaaatatccgttagttctctatagaaatttgacacataaatttcatatgcctaaaattcatatgaacattttattcaatattcttttaaaagttcttttattttgacatatatcta

SEQ ID NO: 295542 - DNA, 611 bp, Homo sapiens
ctaacgaattactgaaatttctcagaagatcagctttacagatttaaatttatcataatctgcataaaatgtttatctaaaaagtggaataaatgatatatcactcattaattccttagttctcaaatggatcaagcatgcaaacttcaaagaaacaaacatattggcaagcagtaaactatgtatgtagcaataacttaaacaatattctgtttgattgaggggagtttcccaatggaaagtctcattactttgctaaaatgagctaaatgcccattttgtctcttccatttatcatacccatagcttcccattgacagataaggggaggtagagatgtaggtagaaaagagacaggaaataacatgagtcaaaccatacaaactagttataatcactgatttatctttccaaatggcaattgttggcaaattggctatggytccttagattatggataatttaaaattattagaatgttaagctagagattttttttgtattgaagtaaaagaaagtgatgaaatggaatgcagctagcatcccactaaatattagtatgtttatggaactatccatgtttataaaactatttatgtctataaatacat

SEQ ID NO: 295543 - DNA, 589 bp, Homo sapiens
acccaaaaaactatttaaggcaccagtagctaatttggaagagacagagatatgtgacctttcagacagataattcaaaatacctgttttgaggaaactcaaagacatttaagataatacagagaaggaaatcagcatcttatcaaatacacttaacaaagagatggaaataatttaaaagaatcaagcagaaattttccagttgagaaatgcaattgacatactgaagaatgcatgcagcataattgatccagcagaataaagaattagtgagcttgaagacacgcaatttgaaaatacaaagtcagaggagacaaaagaaaaaagaataaaaaacaatgaagtgtgcctacaggatctagaaagtagcctcaaaagggcaaatctaagaattattgaccttaaagaggagatagagagagatacrggtagaaggaagcccaatgtccatttaagtaaaaattcaggattaattgaaattgtaccacaggtgagaatgccaaaattaaacataaccacttttttgtagttttagtatgctttatttaaaaactgtatataattaaaatatcagaataatttacaaaga

SEQ ID NO: 295544 - DNA, 587 bp, Homo sapiens
atcatccaaatttctagagaaccgttttttatagagatgattcctgggatgtggtatgtatgggagagaggcatgacaacatacatggtgccagaaacatttcagaaatgttctaatttgaaccacagtgatattgcttatagcaagagccatcagtaatcaacctaaagccacagtgaagatagttgtctctaaagcggcaccagaggaatgaccamcttgtttttaactatacttttgcttctctttagacacatttcaggagatcagtttgaataaaggagcaagtgaattgttgtattcctcatggattatctaccctctattcttaaatatctctgtttctatttccttgtcttcagcctaatctctctttaattaactgcagtctggtttctcctttcactaccacattgaaactactcccattaagtctgtgatggttttctaattgctaaaccaagtctcaagtctcagtcagtgctgtgccaaccctaatcagaaactgtggtaaaaggaaaaggcgggcctctgtatacatctattaaaaaatcctcccatattttcaaccaagtggaaaagttaat

SEQ ID NO: 295545 - DNA, 459 bp, Homo sapiens
agttgggatcatactttgtagccttttcagattggcttctttcacttactaatatgtacttaaggctcattcatgtctttttgtggcttgataactcagttttttttagtactgaataatattccattgtatggatgtacaaccgtttacttatacattcacctctaggacatcttggttgcttccaggttttggcaattattaataaagatgctrtaagcatccatgttcatgttttaatgtggacttaagttttgactcctttggatacataccaaggagcatgatttctggattgaagcaattgttggggtatgaattgtccccaagaagtcacagaaaacatcaagggaatatgaacttataataagcctttaaagggaatggtaagtcacaaatttgaaagggcactgatagttggaaggaatggaagaagttatgtattaggatacacattga

SEQ ID NO: 295546 - DNA, 564 bp, Homo sapiens
tctaatctttctctctgatctgtaatttctcatgacctctataataaaatcaatcaactcagtatgtcttaactatgccatactttgtgatagtcccatttaaaatcatttttgtcttcttgatgctgtagtttcttgatatatgcaatgccatatttaaagctatgtaatgtatttactggataaactccagtgatttgtatagtgatttgtaatgtgtgttcctgaaaggaaccgtacagaaataaatagcattataaaaaccacatttgatggtcctattccttataattgtgaaaattctaccacacataggtcagagatactgctttgcaggcatcagtatttccatccycatggattaagaatttctgattttttattatatcctatccccaactgaacaccaataataaaacaaaattcatagcaaagtagcttatctgattgtaaataaataaaactagtcttctgattaggacccttgcgtgggtacataagctccaagtaggcaacttattgaagagagtgagagcttgtcatagagacaaaagaaacagcaaa

SEQ ID NO: 295547 - DNA, 620 bp, Homo sapiens
tactagcttactatcattctacacaactgacctaaatttatttgtttaaaagttttcttcagacttgtcttgtcttttaaccgtgatcattggtttatttcctcaaagaggagarttgtcatttactgatgtcaaataaggcaatacagagtgttaagtctacccatattttgatttttgagtcatacctttaacaggacttaatccaatcccaagaggaaattcttttccttaattagggaactgtgcatggagcaaataatgaatcactcagagatatggagtacatccagtttatgactcaaattctctgtaattgaattatattttaccactacataattatgtattccatactggtctttagggaaaaaacagaatgttattcccctaccacaaccatttaggaaaaaaaaaaaaacaatttaacagaatttttcaaatatgtatccttacattataaaattaattatagagtataatacaatattttaaatatctgaatagacatataaggttattctagacatattcaatacatcaaaattattgaaagcaggtcaggatttgtaatcacattatatggttcagttcataagtaccatatccactttcaaaaa

SEQ ID NO: 295548 - DNA, 615 bp, Homo sapiens
cccagcatacctaggaagaggttgtgttgttatgcctgtgggtgtgtggagtggggggctgggagtcatagagacaagagaagttttgtcacataagataggaaatggtagggctaaaatttggtcccaaatgggttagattctagttagggtcttgtgtcctcattttacccatgcaaacattaaaatgatattgtaaacattaaaaatgttattgaaaaagaattgtaacaacgtgrgtaaaatgtttacccaatattagtaaaggaaaacatatattgtcccatcttttaaaaaaaaatgcactttcccagagcaaagaggttgaaaagatatagcatactaaagtattaacagtgtttctctggttggttgaaatgttttcttgtttctattttccatggtttccaacatttctacaaagaatgtgtattatccttgcgataatggaaagtggcagaatgagttattacaagacagcgactggctctctcctggccctgctccagatcctgctctctgctctcagcctctaactgtatctgggaccttgggtttgcctggcttctgtgaggaccgtggtcctcagggagacagcttccatgtccagcccta

SEQ ID NO: 295549 - DNA, 615 bp, Homo sapiens
cccagcatacctaggaagaggttgtgttgttatgcctgtgggtgtgtggagtggggggctgggagtcatagagacaagagaagttttgtcacataagataggaaatggtagggctaaaatttggtcccaaatgggttagattctagttagggtcttgtgtcctcattttacccatgcaaacattaaaatgatattgtaaacattaaaaatgttattgaaaaagaattgtaacaacgtgagtaaaatgtttacccaatattagtaaaggaaaacatatattgtcccatcttttaaaaaaaaatgcactttcccagagcaaagaggttgaaaagatatagcatactaaagtattaacagtgtttctctggttggttgaaatgttttcttgtttctattttccatggtttccaacatttctacaaagaatgtgtattatccttgcgataatggaaagtggcagaatgagttattacaagacagcgactggctctctcctggccctgctccagatcctgctctctgctctcagcctctaactgtatctgggacctygggtttgcctggcttctgtgaggaccgtggtcctcagggagacagcttccatgtccagcccta

SEQ ID NO: 295550 - DNA, 623 bp, Homo sapiens
tgaacaaaactaacatcaccactatgataccctgggaaggacacaatgtcacttatatgcattccagctagaaacgaagaacctcaatctaatcacaaggaaacatcagacaaactcaaaatgaggaatcatttatttaaaaaattattccaaaaatttcaatgttacataagacaaaggaagactgagaaaatgttccagaacaaatgacaccaaagagacataacaactaaatgtaatttctaattttaatttctgatcaatgttcggtttattgaagttgacagctacatggaagaggatgttcttattcttagagatgcacactcaactgtgatttatgcagcttactctcaattgtttcaaaaaaatcrtgtgtgtgtgtgtgtgtgtgtgtgtgtgtagatagagcaaatgaggaagcaaatggggcaaaatgttaataacaggtaaatcttacgaaacggtaaaatgattttctttgcactataattgcacattttctataagtttaaaattactttcaaattaaagttcaaaactcatacatttgtatagatatttctgattcaatttccaattattaacttctttgagttgatatttatactgaacatcttgtt

SEQ ID NO: 295551 - DNA, 615 bp, Homo sapiens
agctgatgcagggagcaggtattaactttgagaaacagtgcaacatagtgattgagagcattgtctctggatccagattgatggaattcaaatcctagttccaccacttacttgaacagattagtaaattctgggtctcagtttccaactctgtaaaacagggtsgttactgtagtcctctcacatgattgatgtgaatattaatagattttacacttaacatacttagcacaatgtctggtacataataaatgcaaacaaaatttttaactattggccaggcatggtggctcatgcttgtcatcccagcactttgggaggccaatgcaggcagatcacttgagcccaggagtttgatactagcctgggcaacatggcaaaaccccgtctctacaaagaatacaaaaattatccaggccttgtggcatgggcctgtgttcccatgactcaggaggctgaggtgggagaatcacttgaacccaggagaccaaggctacagtgagctgtgatcacaccactgcactccaacctgggctacagagagagaccctatctcaaaaaaaaaaaattgttaaccgttattattatattgatctgtacccataaaccttacca

SEQ ID NO: 295552 - DNA, 561 bp, Homo sapiens
tttttaaacttaaaaaaaattattgtaaattgacaaattatagttgtgcatatttatgggacacaaagcgatgttatgatatatgaatgcaacgttgaataattaaatcaagctaattaacatccatcacctcacatacttgtgatttttgtggtgagaacatttgaaatgtactctcagcagttttgaaatgtacaatacrctattattaactatatccactatgttttgtgcaataaatctaaaaaaatttattcctcttgtctcactgaggctttgtgccctttgaccatcatctccccattcctccatcctccagtctctggtaaccaccattctattctctgcttctatgagttcgatcatcttagattccacatataaatgagaacatgcagcatttgtctttctgtgcctggcttatttcagttagcaaaatgttctctaattccatctatgttgttgcaaatgacaatttctttcttttcaaaggctgaatagtaccattttgtgcatatgtacacattttctttatccattcacctgttaatggacacttag

SEQ ID NO: 295553 - DNA, 607 bp, Homo sapiens
gaatgataataaaaacacagcataccaaaacttatgggatgaacaaaagcaatagttactgctataaatagctgtgaatgcctacattaaaaaataatcttaaatcaatagttatcttcgtgcaccaacacacccggctaatttttgtakttttagtagagacggggtttcaccatgttggccagagtgttctcaaactcttgacctcaggtgatccgcctgaattccttgaggaattcaaaaaagaaaagcaaacgaaacctaaagctagcagaaggaataaaataataaagattaaaataaagataaatgaaataggaaaatgatagaataaatgaaagcaaaagttgattctttgaaataattaaaaatttggcaaacatttagtgagactgagaaaaaaagaaagaagatgtaaatagttaaaatcagaaataaatgtggagacattactaccaaccttacagaaataaaaaggattataagagaacactatgaacaattgtatgccatcaaatcagataaccaagatgaaatagacaaacttctggaaacacataacttaccaaaactaagtcaaaaaaaaatagaaaatctgcctgtaaca

SEQ ID NO: 295554 - DNA, 619 bp, Homo sapiens
aggattataagagaacactatgaacaattgtatgccatcaaatcagataaccaagatgaaatagacaaacttctggaaacacataacttaccaaaactaagtcaaaaaaaaatagaaaatctgcctgtaacaagcaaagagattcagtaatcaaaaatctcccaacaaagaaaagttcagaaccagatggcttaacttatgaattctacaaaacatttaaggaagaataacaccaatctttttcaaactcctccaaagaacacaggagagaacacttcctatcaaattctataaggtcaggattatcctgataccaaacccaaagataccacgaggaaagaaaactacaaacctagatctcttatgaatatgataaaaatcttcaacaaaataccggcaaattggatcctayaacatattaaaaatattttacaccatgaccagtggaatttatcccaagaatgtagaaatggttcaccctaagaaaagtgatcaatgtaacacatcacattaatagaataaagggaaagccccatatgatcatctcatttgacacagaaaaagcacttaacaaaaccaacacccttttataataaaaatactcataaaactagcaata

SEQ ID NO: 295555 - DNA, 237 bp, Homo sapiens
actcggtggggcggcactcgttggtgtcccaagggtcggtgccgttctcgtgctccaccccgactagcacgaagatgggcccggcgctgcagaaggccacggcccagatgacgaagatgaccagcttcacycgccccttggtgaccaccaccttggcccggagtgggaagcagatggcgaagtagcgctcgacgctcagcgctgtgatggtgagcaccgtggcgtaggtgcagctct

SEQ ID NO: 295556 - DNA, 653 bp, Homo sapiens
aactatattagacatggtttgtctgttaatgacattatctttatcctttaatgacattatttacaagagattcagtgtttgtgaaagcagaaagctctattcactcattgtgacaagaaattttgacacgtaaatatgtatgtcatgttttaaagatatacatactactttttaaaagacaggagagtctttcaggcaccaaacttgcaaaaaatctcacagttttttttaacagcataattcaagtatatgagtaaataaaaaaatagaaaaaaaagttaaaactgccagtgtggaactaaaaattataaaatgcttgtaatgatatgagattcttaataaaagtattggcatgaaaaagtggaaattcaagtcaaatcgcatcacaacaacatgcactgcaataaaaagtttactataaaatgattttcaaggtgtggccrggcactagaggtgtttctaaatctcattacagtgaaacttctaattttgagtaactcatggcaatgaatgtttaaagcaatcatttaaaagttcttacttatacaacagttactccctgtaatgaaaatgatccaacacttgattatgtgccacagtgtaaggtgtggtgacaaacacctcattgctcgataaccaggaaaatggaaaca

SEQ ID NO: 295557 - DNA, 515 bp, Homo sapiens
tgaatcttttttaaaatgaagtagggtgcttctggagaaactgaatccactatccctaagatgcgtcactacgttattgatggtcacttaccaaggctgatgaacaggaaacaggataaactatcggaaagggtatattgatggaatattctcaggtacaggcatattttctgctctacttgttacattgaaatatcaacttsattacaatcactaagtactttaatttaaaaattctatcaccagacagaaccttctcagaggagagttaatggtttcctccctgccgttgcactgggcattgactcaggaaaaatctcagtagaggcaacactttcctaataattttatctaaagaggaggtaacgttttacaccacagccaccgtggtctgctcttcggggccaaattacgggaaatgatggagattctgataaaagactttggggaaaagagttcatattcacattgccagaactcagtatatttatatgaaatttgaattggagaaaatt

SEQ ID NO: 295558 - DNA, 646 bp, Homo sapiens
caggggattggtagttccatagatttatggcaaaattaggtaacacagtgcaaagaagcagttcgtgctaagccagaggaaaaatgattccccttatttttttttaattaagaaacacttttatttccccagtagaatgggcttccttcttttccagaaaatctacaatttaccataaggcacaaaatttatagagcatgtatacaatacatcctagtggttaaatgattgtgttggaaagaatcttagaagatatctagcttggctttcctccaaataacggggtcctgtctaccgcatccttgaaagacaatgatgttatttacacaaaacctccattctactgctggacagtcctaattaagttaaggttctctgtaatgaagcaaagtaaatcttccaaagtgtattttctcccaggctgcacstatcaaataagggggggagaaaaatctacctatacataaatatgatagtccttaaatacttgagcataactaccagatgtgctacttattctttaattccccatgttaaatatccctaatttcctcagctgtttctgtgatttacaaatctattatccccagctccctcctctaagcaatttattactccagtcttatcctttgtgtataatactctg

SEQ ID NO: 295559 - DNA, 515 bp, Homo sapiens
tgaatcttttttaaaatgaagtagggtgcttctggagaaactgaatccactatccctaagatgcgtcactacgttattgatggtcacttaccaaggctgatgaacaggaaacaggataaactatcggaaagggtatattgatggaatattctcaggtacaggcatattttctgctctacttgttacattgaaatatcaacttcattacaatcactaagtactttaatttaaaaattctatcaccagacagaaccttctcagaggagagttaatggtttcctccctgccgttgcactgggcattgactcaggaaaaatctcagtagaggcaacactttcctaataattttatctaaagaggaggtaacgttttacaccacagccacygtggtctgctcttcggggccaaattacgggaaatgatggagattctgataaaagactttggggaaaagagttcatattcacattgccagaactcagtatatttatatgaaatttgaattggagaaaatt

SEQ ID NO: 295560 - DNA, 645 bp, Homo sapiens
taactgacaaaaacagctttgaagaattgaaaattaatccctgtattcttacattgccatattattttagatatgataatttatactttttttcacccctcagctttttccccatctggacatgtttgagtcctttcaattttatatgaacagcttatcaatacaaacaaaacttcaccatttactttaaaaaatatcttcaagtgattgacacgcttaattgaaatttttactgagataattacagattcataaggacttttaagaactaatacagagagttaatgtgtacccctttgcccattcccccaatggtaacattttataaaaccgtagtggaaaatcacaaccagaatattgacattaatagaattcatccatctaattaggatttcccattttacctgyattaatccatgtgtgcatgtgtgtgtatttagttctacacaattttatcacatgcatattcactaccacattatatagttccagctcctcagaagtctcttgaattctccttttattaaaaacaacaccaaaaaaacaaaacaaacaaacaaaaaaaaccactttcctcttcccttccttcccatccctaagcactggcaaccactattctgttctccatttctaaaaatttgtcat

SEQ ID NO: 295561 - DNA, 1198 bp, Homo sapiens
ccttgatatactatacaacaacttcattgrattactgttgaattaccaagaggacagaaaaacatttgcttagggtaccaaaaaaaaaaaaaaaaaagaaactgtacaaacaaaacaaaacaaaaatcaaaagagaaggagaagatcagaaaggctatagggcagttgttttacctttttcatgatgtaagttttatgtcatatttaaaaataaaatcataagttaattaaaaaatatattcgagaagacataataatttaaatatttatatcttctaaagaatttggctttgaatgagattagaaggcaggggatatcaaaaggtatctattgaacctaaaagaagagaagttcaaaccagagtaaagactcattgctagattcttaaaggaagtgaagtatgctgttattagaagctcatgctaaaatatctatactatggtgtagatgcatttggttcaatgaattaatggtgaaaatagtggttttcattaaagtgaactttaattcattcacagtagattctttcattacttttataatgtctcaacttaggaagttctwtaggcatattggaaaattaagaaaatagtgttgttgttttttcaacaaatagcatcagaagccttgatatactatacaacaacttcattggattactgttgaattaccaagaggacagaaaaacatttgcttagggtaccaaaaaaaaaaaaaaaaaagaaactgtacaaacaaaacaaaacaaaaatcaaaagagaaggagaagatcagaaaggctatagggcagttgttttacctttttcatgatgtaagttttatgtcatatttaaaaataaaatcataagttaattwaaaaatatattcgagaagacataataatttaaatatttatatcttctaaagaatttggctttgaatgagattagaaggcaggggatatcaaaaggtatctattgaacctaaaagaagagaagttcaaaccagagtaaagactcattgctagattcttaaaggaagtgaagtatgctgttattagaagctcatgctaaaatatctatactatggtgtagatgcatttggttcaatgaattaatggtgaaaatagtggttttcattaaagtgaactttaattcattcacagtagattctttcattacttttataatgtctcaacttaggaagttcttgatatat

SEQ ID NO: 295562 - DNA, 1210 bp, Homo sapiens
ttccttaactatactacattcctctctgaatctgattacttcctgcattatttactcatttatttcatcttcttttgaccagcctgattctgttgtgtggcttttcatctttcatcttcaaagctcgattctggatcatatgtgactgtctaaagttagttgctggtataaacttcaaatgcaaaacttttgttaaaaaattccagctgaggtttatcatccctaaaaatgtactgctgtttctaccacactattctttttattgtcatgatcataaggctgaatagagaaacaggctgttttcatttcaatcatgctaacaatccaggaaaattaggctttgatctttgggaagaagatttgggacacccagtgtgttacaattggctttagagatttattttacaagaaacttgcrtgtatgtatcagaatgtgttttatattcattgccaagggggtagagttgaggtaggaagtcattctgctgtctgccatgaagaaatcaggtttaagtgatttgaaaagacttaggtgggacttctatgactgaatgaaataggtttccaggttaatagtaatgcctctggaaatgtttcctaaaaattgaacgcaggaaagwttaaacattatgacttaatttcctgaatattttgctttgaccacttttaattatatttcactttattccattcaactcaactacctaaatatwtattgagtttactgatgtccagcgccccagcaatgcatgggaagttgagaatggtatgtttaaagaaaaataagactcattcttcacccttaagaaagttttattcactggaggtaccagtagaaacccacatagctttttaaaattcttaacctgagtgacctgaagcgttttccaaacgcataacaaaggtataagttttgcatatttatctctactttaaacctctgtcccaagctccatactcaacttccaaagccctctggacgtttcctatgtatgtccctttagattttcaaattcactgtgtttaaatgtgatcttggtatacttccttctaaatgatatttcctcttttctcaagctcagttagtaagtaggcacatgattcttcctggtatcaatgctagtagccttcagtttttcttccctcaccttgaattagtctaagcacttaagacagcttcttttaacaagtctcccacctttactctcca

SEQ ID NO: 295563 - DNA, 270 bp, Homo sapiens
aagtatgggatacctctactccttccttgacaactgatcatgtaccccttaccatcccattaaaacctaatcacccttaccccactcaacgccagtatcacatcccacagcaggctttgagaagactaaagctgttatcattcgcctgttacagcatggccttttaaagcctacaaattctcctyacatctcccctatcctatccatccagaaaccagacaagtcccacaggctagttcaagacctttgcctcataaatcagattatcct

SEQ ID NO: 295564 - DNA, 559 bp, Homo sapiens
tctgagcatttttctcctatccatgcttctacttgtcaattttggagagatggctttcttttctggccagttttaacagatctttatgagcagtgccttcacaagaagtgcaggtaatgtgcttgttgagagaaaagattaatagtgctatgtgtagtgttttcatgagatgattattgttatttatcagtgtaaatgctagtggtactgatggcattacagggaacgaaggatataataatgttttgatgggaacacaaaatataaacaattttcatgccagttttaactaatttggacattgaaaagtaaacaatgaactttcagttactgacaggtactgtggagttttggctaccatcagtcatktgtcaatgaggtcacaaagcaacaagcttttagtcacaagaacttcttcctaaaactccatcatgagcaacttattatatacatttttctagattttactgtttgctcttggctgtttttgcttagtacacttaaaattgagccaagaattggaagagtcgtttaataattaaatctatatgatttaaaa

SEQ ID NO: 295565 - DNA, 559 bp, Homo sapiens
tctgagcatttttctcctatccatgcttctacttgtcaattttggagagatggctttcttttctggccagttttaacagatctttatgagcagtgccttcacaagaagtgcaggtaatgtgcttgttgagagaaaagattaatagtgctatgtgtagtgttttcatgagatgattattgttatttatcagtgtaaatgctagtggtactgatggcattacagggaacgaaggatataataatgttttgatgggaacacaaaatataaacaattttcatgccagttttaactaatttggacattgaaaagtaaacaatgaactttcagttactgacaggtactgtggagttttggctaccatcagtcatttgtcamtgaggtcacaaagcaacaagcttttagtcacaagaacttcttcctaaaactccatcatgagcaacttattatatacatttttctagattttactgtttgctcttggctgtttttgcttagtacacttaaaattgagccaagaattggaagagtcgtttaataattaaatctatatgatttaaaa

SEQ ID NO: 295566 - DNA, 369 bp, Homo sapiens
  misc_feature (1)...(369): n = A,T,C or G
nnnnnnnnnnnnnnnnnnnnnnnnnnnnnnnnnnnnnnaatgtatcatttttacattctcaacagcaatatatgtggattcagtttctctgcatccacaagaacatttagtgttatctgtttttttattttagctattatgataggtgtgtagtgaacctcattgttgttttaggttatatttctctgatgacaagatgttgaatatcttttcctttgcttatttttcatttatgtrtcctcttccatgaaatgtctgctcatgccttttgcccattttttgttttttagtttgttttactattgagttttaagagattttttggtataccttcaatattagtcctttgtcagatatgtgtttgcaaat

SEQ ID NO: 295567 - DNA, 544 bp, Homo sapiens
caattacttcagcatcaattgtcgggctaagatgatttgatgtaagttttagtataaatatttttatcccactgatatgacagcatagataacatcactaccaagttgacagagggctttaaacacttttgttatatttttgtttagagcaattctttttaaatgacatgtctatcaagccattaacagagatttgctgttacacaatatttggcattataatgacagctgttaaaatcaatgtctcctataccacctttaatgggccatcagggtgaatgggttagcagactgtatctcttttatgaaagtagaccacttaatccaggagggctaagagacatcagamctctgcaattaaaggccgaatgtgatattcttactacctgctgttgatggcctagtagcttcagtcaagtgccagtgggagtgaggcaaaaatttgttttgaaggccatctgtgttttctcagcttgtgattgccacctacatttaacaaatgagggaactagggctcagagagttcaagattcatcccacactt

SEQ ID NO: 295568 - DNA, 599 bp, Homo sapiens
ggctctgaaggcaagctttgtgtatgttacaccatgagccagaatgttaataattacagaacacagtgcctttgtggtctgatgtattaaatattcagagataagtagttacgtggctcacgggtgtttgaagacatgattggtactgactggctgaatttcaagtggattgtccaaatttggaggatatggtttacaaaactatctgtgtactgtgtttctttgggttcttttgtgctaataatgtcccagacctacaaaatcattctattttgattcctatttggaattcttatgttcataagaaggcagaaaaacttttttcagggaaccatacatcagtggtcttggcctttccgtgcaatacatgaatttgatttcacttaatatgcatatcactcatatataatctgtaattttttaaagatcaygttcatgctttattcacttgggggaacttttattaacaaaatataattttatgctttttttgcatgttgtctttgaaaagtctgttttttatcattcttagtgtcacacaagtaagaatgtaaatctagaaatggaatctatcattttataaatcacaaaactcaaat

SEQ ID NO: 295569 - DNA, 587 bp, Homo sapiens
cgatgttttgatatccatatatattgtgaaagattaccacagataaattatttaacatgttcatcatctcacatagtttcctttcttttgtgttgagaccacctaagatacactctcttagcaaatttcaagtgtgcaatacattattagtgtttacagggtgttcaaatcaagatttccaaactagtcttgaactacctgttcacaagagagtatgttattgttttgagaatatttatttccctaagtattagaaactgtgctcagatagcttgaaactccaacatctgtcagtttcattcggtttatgctgatatatttgaaaccaaatgatcacaaagacaacaattakcttttatattctaagatactacatattcacttggataaattaaaattggctttcaaattaggtgacattaaacatatgctattagcaattctaggtaatcaaattaacacttaaaaatgtcaaagtatatcttcaactcaaaagtaagttatatatctcactttgtgcaggcacttgatgtgatacgtatctatcacattgaatgcctctacataagacatctttatattaaata

SEQ ID NO: 295570 - DNA, 579 bp, Homo sapiens
tctggctaaagtttgagaaccacaggattagaagaaaacttcacattgtgatgaattgtctrggaaaatttttagtgagctaacatgaaatcaatatttttcatgttaatgtggcattgaaatccacaatcaaaacttacaaaatgcctgaagtgtataattgtattaacttttttccaaaaagggaataaatgcttcatagtaaaataaagtcccttaatttccagttttatgattttttcatcattgctcagaggaaaaattgcctaaatccatgaacagaaagacagcaaggccagtgatgctacatgtggttggaaccacgcctggcacataataggcactacatgattgctagcgattgctattattttcattattgttttgttgttatcgttttctttgctagatggcaggttctgaaagggctctcacaaggtgatgaatgaactgctgttgaatgagaaaacggccttatgatgaagtatttttattcatatgattcaatgtgaggtatgtttaccagtgaatttaacacaaggctctgaggatcatgaggatagacactgcaggaagaca

SEQ ID NO: 295571 - DNA, 645 bp, Homo sapiens
tgctaattcatttattccaccgaatatttattaagcatcactcatgagtcagatgctgagacaagctctggaaacacatagttaaaacattacagtctctatcctcagggaattctcaaatccatgtgatatttacaacggagcactgcataaggtattcatgttttgcctcctggcactccagggaccaaaacttgkttttggcctgcagctcggttccgtactccagcagacaagtcaggtgtttttctttgtttgttttttctctcttgctttttttttttttttaaacacacaccaaggaaacattttatagtagtttgttgtgactcttcttgacattttaggagctacttgttctctctatgtagcaaagaagtaaataaaaatagagctgtcataaaatagcaatccacaggctaccaaatctcaaaataggttcacatgttaggaaaagttgctagtcaacatttgtgttatctgaagggcttattgagattatgaacacactggctcccagttaatccatctaccaccattgctactgccttaaatgtgactctaaccatactgaccaccaacactattattataagcagaaaaccataaatataagacttaaaatatctcacatataacttgaaa

SEQ ID NO: 295572 - DNA, 563 bp, Homo sapiens
tacagatttagtaaaaactgtcctgtgacttcatggtacttacagtttaagaagagaaagagtaaataaaaaataaaagcataaataaacatagctgtaaactgtaaaataaatcataagatgcaacaaaaatagaatgaattaaaaaatatactggagatatatgaaattgactcaggacagagaaatctgtggtaaagatgctatcttttatttattatggttccagcaagaagccaatgaaaggattttgcacaggaaggtaatatgatccaatttctatttttaaaagatggctgtttgtggaggaaggatcasagggagttagtagcagaatataaaagaaaatatagggagcaaagttagtggtccaggaagaaatccaaaatgatcgaagtaaggtgggaagaatagtgctagagagacttggtatgatttttcaagagatgtattatagagaaaatcacctggctagcatggtagattttacatgggcaagagtagcaaaagggtgatgttgatttcagccactctgtgtatgaagtggccatttagtaaaacga

SEQ ID NO: 295573 - DNA, 613 bp, Homo sapiens
cattattactggcatgttatatttgtgtttgctaagaaattcaacaaaagttaacatgaaccatgctgcttctcatgacagctacttttaaaatatagtaattccttcagttaattaaacatatgccaaacatggaattagaataactgtataattaacacacttatggaattttctcagtggtgaaattccaatcagattcccctaaatatatgtttatgcagaatccactttatactgaaattcttccaattttaaaatttattttaatgtattgtaaattcttctactccttgcactaagaacttkagagcaccttactctaaaaaaaatgatagcatattctaagcaaaatgagaggcagtcactaaaatcctctctctctctccacaaatctaaaaactcaactaaattaaatttctttagctcttttactgaggggcttattgtggagatggttatatgattgacattttgcaggttaaaatatgaattttaaaagaactgcccctacatattagcatttggtttggacaagttataggtatgaacagaaaagaaatatttctttaacctttggaaagaaagataaagaatgaattgcttgtctttc

SEQ ID NO: 295574 - DNA, 659 bp, Homo sapiens
taataaacagatatttattgttctatgtatgctagggaaaagcacaggacggaaaataatgtgtattaaatgatgaacaagataacatctctgctctcaaatacactctagttcatcaggggagttaagacacatacacaaataaccatgattaatttcaatgacaaagaaaatgctatgggaacgcagagagcagtcacttctgatttgcagaattagtaagacttcctgaaggagaaagcatttaaactaggccaaggaggatggttgggataataggasgaaatgttactcaagaacatttcatgcagtgaagagagcaagagtttccccatgcggtggatcattccaaaaagtgcccaaggaatgaggccaccaaatgcttcttctgcaggtacttagctgctcctatgaaactgtgcaaagttaaaagtagatatgatgagccctcatcaaagattttaaaactatataaattattaagggaactagcaggatgataatgctggttcaaaaaagtaataggctgccaaatatagagtcagtggagaaaaataaatctctggaatcatgttacaaaattagatataagattggttaacatcctataagcaaaaaaaaaaaaaaaattgaaaactattttttccacgggacagaaa

SEQ ID NO: 295575 - DNA, 608 bp, Homo sapiens
atgatctctcatcttccggagttatgaagcacatgatattttaagacttctttaatcttcattacataagttttagaacattttttcttgtattctgtatgatacagttttgtcatacatgaaatggtaagaaaattaacagatatttcctgattaagtyaggagagaggtagaattctgaaaataacatttatgcatccataagatgtacaacagagatattttctttcttatttgaggagcagggctataaaactagatggatgactttaagtaaaaagagcagaaaattcacatttttgacgattcttgcacaagttattaatgtaaatcttcagcagcctgtatgtttctaaaccagattaccttccttaaatttcaatgagcatgttcatatttgaacagtagagggagctctaaaaaaagcttagcaaatagatgaaaagttgcagtttgcacaaaattctaagtaaaaattccttaaaaagcttttgttttaaatcaacacattgattttattttaaaagattgtgtgcttttaaaagctccttatatggttaatatgttttgctcatttttactatttgataattgagttattttaaagc

SEQ ID NO: 295576 - DNA, 575 bp, Homo sapiens
acctgtctccaaactgtcttcagtcttgatgatcatgtttaacttatgatgttagaaaatatagatgggtgtctatcatgcagagaagatccatgcaataacccatcttcaaaaggcccataatacatacagagatttatatctatatcaagtcattgaataatcgatatctaaatgatctaaatattaaacagcattatgtggaagcactttgaattcttgttactcatagggactacttgtttatgacatttatttagttgcagatttagttgcaggttttacrtatcaattctaaaatatatttacatcatttagtagaacatagaatgctatgggtctgcatattgtaaaatacagtaaaatctattagataagaggtgacaaatcaaagagaaaatgattcagattaaatttagaaaaggggctggtgataaataaataaggtacaatatatctcacagattcttaaaataatcttgattatgctttaatgatgactgtaataggtgggatggcagaaatactaccagaatttctcttaatgaaataaaaaccttctttaagaaaagcaa

SEQ ID NO: 295577 - DNA, 541 bp, Homo sapiens
  misc_feature (1)...(541): n = A,T,C or G
agctaagcagggctctctagaagactcaagacaamaaccagttcagcactaccctcctatcttggcataaagccttataatgaaggtgtttttgattaattaattaatttatttattttgcatctaaaaagaggaatggttctcttctaaggtcagtaaatcagtactctaaccaggggcctgtggactttttctgggtaaagttagagagtaaatattttagctttgtaccacatacagcctctatgccaactcttcaactctgcccttgcagtgcaaagcagtcacggacaataggtaagtgaatgacattttagttacacaaatacaggagactggatttggcccacaggtatggtctgcccacctctgatctcactcattatctctgtgtatgttgtacttttagctctgtgataaatgccttataattcttcatattgaaaaacagatatcccagttgcctgaataatacaatatatcccagttgcctagagtaatacaatgtatagtaatacaatatagcnattacaattaactt

SEQ ID NO: 295578 - DNA, 482 bp, Homo sapiens
agaataatgaactattgaaggattacttttttgtttgtttcttttgaaaatgtgagcaacttgatcgtatttacagacttaggggagcttagagaaatgagctaaagatataacagataagatgcaattaaaagagaggagagctgaacccatcctcagacaggatgatgcgatagaaagtgagaaaaaccagacaaaagaaaktagttcacggctagcacttttccttcatttatctgtcatttatcaataatcttttacattctgtttcctgatattgggctttcaaaattatagaaaatacaatggaattgtagattttgattttaaaatggttgactggtccatagaaaatttaagatttatattattgctatcgctgcttttccaagtttgactatcgtattagtccattctcaaatgctatgtaaaactacccaagactgggaaatttataaagaaaagaggtttagttgactcac

SEQ ID NO: 295579 - DNA, 610 bp, Homo sapiens
cattgtggaaagcaaagcggaagcaagcattttcttcatacagcagcaacagagagaaagagcgaagggggaagtgtcgcacacttttaaaccatcaggagaagagcaagagggaaatctgcccccatgaacaaaccacctcctaccaggcccctcccctgacacgtggggattacaacgaaacgtgagatttgggtgggtgcacagagccmaaccgtaccaactatgttcattgtatttcacaattatctgtaattcagattcccgtctttaggtggatagacaaagggaaaggtgattaggctcactagctggaaatagaaattttaagataacgaaatccatccacacatctacattaagcacctgtcaaatggcaggcactgtgcaagaacgcctaacgtacaacagagtagggaagcttgctaagtcgaccgtctagaatggtgcacacttagatagccacacggtgctgggcaagagtcagttttcatcatgcaccatgctgcttctcacttacctgtcatgaaagcactctttctggaatctttttctgcttcacgctttgaccccttcgaaactcctattgattttaacagattcaagttaa

SEQ ID NO: 295580 - DNA, 610 bp, Homo sapiens
cattgtggaaagcaaagcggaagcaagcattttcttcatacagcagcaacagagagaaagagcgaagggggaagtgtcgcacacttttaaaccatcaggagaagagcaagagggaaatctgcccccatgaacaaaccacctcctaccaggcccctcccctgacacgtggggattacaacgaaacgtgagatttgggtgggtgcacagagcccaaccgtaccaactaygttcattgtatttcacaattatctgtaattcagattcccgtctttaggtggatagacaaagggaaaggtgattaggctcactagctggaaatagaaattttaagataacgaaatccatccacacatctacattaagcacctgtcaaatggcaggcactgtgcaagaacgcctaacgtacaacagagtagggaagcttgctaagtcgaccgtctagaatggtgcacacttagatagccacacggtgctgggcaagagtcagttttcatcatgcaccatgctgcttctcacttacctgtcatgaaagcactctttctggaatctttttctgcttcacgctttgaccccttcgaaactcctattgattttaacagattcaagttaa

SEQ ID NO: 295581 - DNA, 610 bp, Homo sapiens
cattgtggaaagcaaagcggaagcaagcattttcttcatacagcagcaacagagagaaagagcgaagggggaagtgtcgcacacttttaaaccatcaggagaagagcaagagggaaatctgcccccatgaacaaaccacctcctaccaggcccctcccctgacacgtggggattacaacgaaacgtgagatttgggtgggtgcacagagcccaaccgtaccaactatgttcattgtatttcacaattatctgtaattcagattcccgtctttaggtggatagacaaagggaaaggtgattaggctcactagctggaaatagaaattttaagataacgaaatccatccacacatctacattaagcacctgtcaaatggcaggsactgtgcaagaacgcctaacgtacaacagagtagggaagcttgctaagtcgaccgtctagaatggtgcacacttagatagccacacggtgctgggcaagagtcagttttcatcatgcaccatgctgcttctcacttacctgtcatgaaagcactctttctggaatctttttctgcttcacgctttgaccccttcgaaactcctattgattttaacagattcaagttaa

SEQ ID NO: 295582 - DNA, 529 bp, Homo sapiens
cagaccactctagtgcatcagtcccagggaactttcttagccatcagcacagagacaattttaaatgaatatatgcagcatttccccagacctactcgtgatacccaggagaccaactacccatgaaaaatcagttcactacaagaggaggcatgggggctttgaagtacttcttattgcatggtagtcaagtaattttttgaaaaaagtaattttactttcttgcattcagggctatccaaaaggctatatgcaaatctccaaaaaagcagaggttagtttttgtctttgttctagagaacatccctacatagcaaaatcaagaactcattgtccatggatccttcctgatgctcacaaactggttttatgtatttatttgcaacatgaaggaaagcagacttaaamtaacgttataaaaagaccacagcacattgcacacatatatttaattcagtaactatgatgtatagaaacgcttctggaaaccttagaacttaaactattaggtcgggtttcaaacacctgc

SEQ ID NO: 295583 - DNA, 610 bp, Homo sapiens
atgcacagctgggtctgtgttgtccctggtgggaggcatatcactactggagcacaggaggattttgggaggcccatggacaaagcatccaaaaaaccatcagatcacaaggtgagaagttattccctctccacttctctctccagcctcaagagcaggactctgtctggtgctagggtattttaacgcctctctaacacttactaatgtccctttgtaataaagtgagaaggcaagcctctgaacagggctttcagcaggcaatggtacccagctagaatttaataactttttttcatgayattcatgaaatatagcttctatatttatagcaagggatactggttttctatttgctgcagtaattatgagtttccttttcattgaacaatgtaagaaacataaaaattaaatgaaaacataataagtaaacaacataggtattatgtagatatgacaaaagtgttgaaggttgggaagactgaggaggactgaagtttgggaaaaccacccttggtacagtgacagacctttccccttttgggcttacttccaaagtagatctaccttcccttgaagccagatgtctggatgcattagtttgtgagat

SEQ ID NO: 295584 - DNA, 526 bp, Homo sapiens
taagtaagtaaagcctgaaactcttaaaaaattatctttggctatttagattatacttttctgaaaaggactctgtggtaatgaatcatgtggtttcaagattcacatgcgttaaaattacttcaggacactagtcatttttcaattaccagtagaagtaaatctcaaaggaagagttctgcagattcttgagccatcaatggcctgtaggaaatcttttgaacaactgggtacatgttggagaaagtagggtcttgttaaaacattttaaaaataactaaactaagccaaaaatccattttggatccatggggtagactgtctcatagaatgtttctaaaaggaggtttttaaagtgttgttggatggtccctcttttgagttgytggaacataaatcatttgagacatttgatttgatggtttataaagtttccatgactctgtggtttattattcccaatttaggcacagggagttggtttatatttatctaatccaggtaatagagtatttaatttcctgtc

SEQ ID NO: 295585 - DNA, 573 bp, Homo sapiens
attgccagcctcatcaaggatctgtcacatggtgagtgagacaactgcagcttcattcagcaacccttgggctgttgagctccttgtgcatggtgaaggcaataaccctttctcactactgctcaagaaactgcaattcaaagtcattttctggtaggcaaaggatacagagagmagctaaaacaccaaaatgcaggtgcatataaccctggagggttatatgggaagataaagagagttcttttacacaattaatctgatgttggtgtcttgatggcttcaagaggctgaggagtcagtacatagtttcagaatgtttacctttgttgtcctaatggtactcttgctatgctgaggattaattctttatatgtaaggaagatatagaaataatacttaccaaggagttgctaggtgtattagtttgttctcatgctgctaataaccacacactcaagactgggtaatttataaaggaatgaggtttaatggactcgcaatcatggaggaaggcaaaagaggagcaaagccacatcttacatggcagcaggcaagacagcgtattcaggggaa

SEQ ID NO: 295586 - DNA, 423 bp, Homo sapiens
ctgtgtaacctccctacctgggtgccccaggagaacaataaaggagtctgtctggttcagtgttccagtgctagktctggcccctggcattacagagacagagcaactgtcttgtgtgttaacaagtagtcaccgccctcccctgtgggcagccaaagtaatctagaaggcttatcagaagtgaaactcctccattaaagttcacccacggcaaatactgccttttggataaactactatttaagatcattagggctttctctccgttagccaggcaagaagttgcagccaccaggttcttgggttgctttagggaaatggaactttactccaaactgtagcatttttagtcttcaagtcacctggatggatcttctaggacacaagtcttgcccaccagggcctttcccaggctccctattt

SEQ ID NO: 295587 - DNA, 616 bp, Homo sapiens
ggctctttctttcctctgttatattaataaatgtggggattagagtttacacagraaaataaaacacatctatagcactgctacaaagaacaaaaccaggatttttctttttcacacaaagactctgagaatctctttaggcttatgggccactcccagaccccagtaccatcaccaacatgtggtgtatcagtttcctgtgtctgccatagcaaatgaccacaaatggaaatttattctctcacagttttggagaccagaaatccaaaatccagcaaggtcatgctccctccagaggttctggggcagcacccattccatgcctctttcctggctgctgctggtggctgatgatccttggcgttccttggaatcttgctggtctctgtctgatctcactttcctcctcctcgctctgtgtctctctcctctgggtgactcttatcagaacacttgtcattggattcagggcccgcttgaataatccaggctgacgatctcaatatctttaacttcattacatctgcaaactccctttttccaaataatgtcacatacacagatttcagggatttgacgcagacttatcatttttgggagccaacattgaaacagc

SEQ ID NO: 295588 - DNA, 536 bp, Homo sapiens
tttttcttccattttgtctatgcaactaaaatgctgggagagtttcattcctacctgtcaatccatgggttttctcatttcaggctcttcctgtaattctggcatggtttggaggctgtggaggctgcaggtggggaaggccagcctgaaacactctatttccatgctggccccatgaggccattgtaaacacgaactgtttccagagccttttaggagatgttttttcagaggtgtgtgaaccacagcaactccatcttgagtaggagatcattattatatagggtaaaatgaggctgaaacctactgggctgcattcccagacggttaaggcactctaagttacaggatgagattggaggtcggcacaagatacaggttataaagatcttgctgataaacacaggttgcagkaaggaagccggctaaaacccaccaaagccaagatggtaatgagggcgacctctggttgtcctcactgctaactcccaccagtgccatgacagtttacaaatgccatggcaatgtcaggaagg

SEQ ID NO: 295589 - DNA, 650 bp, Homo sapiens
tttttatttaacaaatatttatgcaacacctattgtatgccaaatactatatgtactaggtgctggtactcagtgctgagcaaaatcatctgtaagtaactgttactctccttctatagacaaggaaactaaagcttaaagagttggtaacttgcttcaggtcagacacaaataagaatgcctgtctatatatgaactccttgcccttttccctatgccaagctgtttttcagaaggcaggaagagtgagaacagtagatgtcctgtgggctaactcttgtttttccctacagaccaggcccaataaacatacctactttctcagatgagaatttgcaggtgaagcagtttaggccactaagtctcratctgtgtcagttcaatgagcatttactggataacttctgtgtgcccatctcagggaaggccttggagagctaatgggactttcctggattctttagttcactctgcaaatgtcacactatcctctcattttctgacagcacagcagcattttgctcactctctgagcattttgtctcatcaccctggcttggggtgaacacctccctttggtatgcctggttcctaaggaaggatttcaaatagtgctcccagattctaaaagagtcccgtgctgctggtcc

SEQ ID NO: 295590 - DNA, 578 bp, Homo sapiens
cattttgctcactctctgagcattttgtctcatcaccctggcttggggtgaacacctccctttggtatgcctggttcctaaggaaggatttcaaatagtgctcccagattctaaaagagtcccgtgctgctggtccagggtcacacttcagtaaatgaacttcctatccaggttgctcaggtctcccacttttctaattttctttcttgcccctcaccctttttctttttttctcctttattctttttcttcttgctgccagagagaataaaataagtccataaytttgtgagacagtctaaagcagtggttctcatgcctacgcctccatcagtatcaccaagatactgatatttaaatacttgttaaaactgattgcaaggccctacttccagagtttcagattcagtaggtctgcagtgggtccagggactgacaagttcccaggtaacatggatactggtgggtcagggcccacactttgaaaaccactggcctaaaggaatatttttttttaagtaaataaaatgtgttcttaatgcagaatctagctgtttttcaggccctgtatttaacat

SEQ ID NO: 295591 - DNA, 486 bp, Homo sapiens
atcaggccactcaagcatttccagtaggtttttagagttatttaacactgcagaagccttcttgtctgggctaattaagtgattagtttagatcaatagtagatgaacaataagaaagtggggcagctacagctcactaccaacttaataaaatggtgctcacttcagccgagagaagtagcatgggtttaaaattggtcttagctgctaaagactttaatgtatctatcttcagggaaaaggagctcatccatgctccagctggatctatggttacggttgctgggcttrattggtcaatgaacttccttaaaagccaaaagtgccattttgaacaactgacattcatgtatgtctcccacaactggatatcaagcatcgccagaaactccatgcatgggtgtgtataggtgcctcagcactcataaaccccattgaggtggtgcttcattcacaattcagtaaggttcaaaggctaaagaccca

SEQ ID NO: 295592 - DNA, 564 bp, Homo sapiens
cctggcatgagttgttttccttggtgctttatgtgttgcttaaaaaaataagacgacaatcacctgaaaaccacaccatgcagtaggtgtgatgtctgagccttcaccatctcaacttctcacaccttcttttgtatttcaggcactgggctaggctcaaggatggactgaaggcacttcctgccatgtcagggatgaggggctcatggtctggccagaggcagcaggcagcattgcaaggagtgtgggcagaatgttcgaaggagagggagagattgcacatacacaagactgcacctcggagataacttttgaaggtgtttcgggtgtgagaggaggcgtgacaggcctagggagcagtgagaaacccagcttagttgaagcatcaggtgcaaggcagcttgggggtggrgtgtccatttaccctttggaatacagtcttcctgttggcatggcaactgctgcaaaataaattcaaggtggtacttcaaatgatgcctctgagactgtccaggagtcatttaaattgcttgtttgttatgtatgagaatttgcctaacctcc

SEQ ID NO: 295593 - DNA, 581 bp, Homo sapiens
acagcagaagtagcatgctctaatttttgtttgtttgtttrtttgttacccctctaccttgccagatgcccatgaagggagctctcccttagccaataaacaaccaagactaatagaatatctttggcaaaggtggttggcagaagtcactgccatctcaagcatcagactctaagcagggacccagtttccttgttatacaagcaaaatgttggcaggccacatggtgaaaaaagacttgggaaaaacatatacttcttgagggaaaaaaagtccctagttgagccatattgtttatgttcggaagaatctttctgtttgaatttggtttccaattggaaaacatccgagatattgatctttctaccagaaaaatagggataatgagaactgctccatgcacacaagtaacttgccaaggaccagggaaagacacagtcactctgttcatgtctgattgatcttcctctgacattggcatcagggtcagagggtgggcagagtgtgtaaagatgtctgaagtcatttattctccaggcactgtgtcagcagcaagtctttcgtgtctttcgagccctgat

SEQ ID NO: 295594 - DNA, 581 bp, Homo sapiens
acagcagaagtagcatgctctaatttttgtttgtttgtttgtttgttacccctctaccttgccagatgcccatgaagggagctctcccttagccaataaacaaccaagactaatagaatatctttggcaaaggtggttggcagaagtcactgccatctcaagcatcagactctaagcagggacccagtttccttgttatacaagcaaaatgttggcaggccacatggtgaaaaaagacttgggaaaaacatatacttcytgagggaaaaaaagtccctagttgagccatattgtttatgttcggaagaatctttctgtttgaatttggtttccaattggaaaacatccgagatattgatctttctaccagaaaaatagggataatgagaactgctccatgcacacaagtaacttgccaaggaccagggaaagacacagtcactctgttcatgtctgattgatcttcctctgacattggcatcagggtcagagggtgggcagagtgtgtaaagatgtctgaagtcatttattctccaggcactgtgtcagcagcaagtctttcgtgtctttcgagccctgat

SEQ ID NO: 295595 - DNA, 598 bp, Homo sapiens
ggccaagaagattaagcttctaaaaacttttaagaacagtttcttattagtgttttcagagatgacctccagacaatggattcagatgtgtagtcaccagcaggctgtaaaagtgactacagttgccgtgcctgcccactccaccactgtgccaggcacttagcaggtgctctataaacatcaacaaagactggataaatttctactgaacacctactacattaagcactttgacaggaaatggtggcaargtcttttgcctttgagtatttgggaaggcagaatacacccaacttctgctcaaggggtcagcagtccctgggaagtcaataaagagtcttagagaatatagttaaagaaaatagtaggagaggagtccatagtcagaacctaaggctaaaattcaggcttatggccatggagaaatgttgagtgatcacagggtctagggtgtaacttcccaggaggtgatagagagcaaatagaagaggggcttattggagatgaggatgtcagaacctgagaggcagggatgcagatagattgccacataaaaagcattgtctcggttgaagaggcagtccatgagtcagatgcc

SEQ ID NO: 295596 - DNA, 553 bp, Homo sapiens
gataagtcacaacgcactctacaagtgcacaacgttctgacttattggtgttgtccttatttagagtgtgacctgaccaaagggcatgcattgcttggctgttaagagacagggatcgtgaggctgaagcaggagaatggcgtgaacccgggaggcggagcttgcagtgagccgagattgcgccacagcactccagcctgggcgacagagcgagactccgtctcaaaaaaaaaaaaaaaaaaaaaaaaaagmcagggagatctgagggagcgtataggagcaataaatgcaacgaaaagatggtggtggtagtcttgagcgggctttgatgaggacaagtagggaaagggggcaggaatgtgagtgaggactgagctatccccgctgttcattgagagtgaattgaaggatgtcctccaatagcagttgaaagccagggctcatcttgagtaaataaggtttttcaaggggctaccaagaggtgaaagagccactgagataaaatctgactggtgtcagtctcagtaagttcaactgcttgccacagagagga

SEQ ID NO: 295597 - DNA, 553 bp, Homo sapiens
gataagtcacaacgcactctacaagtgcacaacgttctgacttattggtgttgtccttatttagagtgtgacctgaccaaagggcatgcattgcttggctgttaagagacagggatcgtgaggctgaagcaggagaatggcgtgaacccgggaggcggagcttgcagtgagccgagattgcgccacagcactccagcctgggcgacagagcgagactccgtctcaaaaaaaaaaaaaaaaaaaaaaaaaagccagggagatctgagggagcgtataggagcaataaatgcaacgaaaagatggtggtggtagtcttgagcgggctttgatgaggacaagtagggaaagggggcaggaatgtgagtgaggactgagctatccccgctgttcattgagagtgaattgaaggatgtcctccaatagcarttgaaagccagggctcatcttgagtaaataaggtttttcaaggggctaccaagaggtgaaagagccactgagataaaatctgactggtgtcagtctcagtaagttcaactgcttgccacagagagga

SEQ ID NO: 295598 - DNA, 649 bp, Homo sapiens
tctttcctttttctctctccctcttttactatatatgctttttcttytttcttaacattttgatatcttcccttaaatgagagggtttttttatgtttaatgatatttattatatagttttaaattccttattacaaaatttaacagatgagtgcaatagttacactaaatttagcctctttttatttaatgtagccttgcaggatttttctacaggttatttatgctttatataaaactatctcttcatctggcacaaatacatgtaccttaaataaaatccctttcttcttccatacattgaggagaacacaaattgtaagccctctcttgcgggcattttggcaatatgtggcaaaattgaaagcacatgcaccatttaactcaagtactcctattccagaaaggtatccaacatgcgtgttcatgtgttcaaaggtgttcattgcagcactgtttatattgaaaaaaaacgtctgtaaagagtttaaatatcctttaatatggtgctggttaaataaagtatggtacatatatgcagtgagagatcatgtagttatttaaaagaatgagacagctctgcagctcagatcaatcagctggagtccaggagagagatcatgtagcataagcttagcttccagggacc

SEQ ID NO: 295599 - DNA, 598 bp, Homo sapiens
ctctttcctttttctctctccctcttttactatatatgctttttcttctttcttaacattttgatatcytcccttaaatgagagggtttttttatgtttaatgatatttattatatagttttaaattccttattacaaaatttaacagatgagtgcaatagttacactaaatttagcctctttttatttaatgtagccttgcaggatttttctacaggttatttatgctttatataaaactatctcttcatctggcacaaatacatgtaccttaaataaaatccctttcttcttccatacattgaggagaacacaaattgtaagccctctcttgcgggcattttggcaatatgtggcaaaattgaaagcacatgcaccatttaactcaagtactcctattccagaaaggtatccaacatgcgtgttcatgtgttcaaaggtgttcattgcagcactgtttatattgaaaaaaaacgtctgtaaagagtttaaatatcctttaatatggtgctggttaaataaagtatggtacatatatgcagtgagagatcatgtagttatttaaaagaatgagacagctctgcagctcagatcaatc

SEQ ID NO: 295600 - DNA, 554 bp, Homo sapiens
ggttacttgggcataagcactgtgatttcatgacagtcaacctggtaacagagatggctactcagtgactaacaggcgggtagtgtagacaacatggctacactggacaaagggaggatccgcatcctggscaggacagagtgggacggcgtgcaattttgtcacactgctcagaacgttgtacaatgaaaacttatgaattgtttatttctagaatttttcatttagtagtttcagactatggtaaactgtgaaaagtgaaactggagataagaggggactactgtagtaggttttcaataagcattggtcaaatacgtcactaaattacacttttcctcccaatatactggctatgctagctcatcatccccattttccacataaaacaaggaacttaaatcactcaaccaatgtaacatggataactcagagtggtatttgtttggatgagacatacaaacactggatccactagtggatccagacatgcagcaaactgtatgtctcatccaaacaaatttgctgtatgtctagtgctcttctgatccact

SEQ ID NO: 295601 - DNA, 610 bp, Homo sapiens
tataacttcatgaatgaaaaacctataaaaatcacttaagggtcctaatctttcagttaatctcacctcagtgccactcaagggtttaaaggagtttcactgattggtttttaaaggacaacgataaaaatgctttgaaataactaattataatttcaggtatctatgtaaaggtccagacacaaatatttgaaaatggactgytcctagaatcagggattgacacagatctttaaaactttctagcccaaacatccatgtgacatttgtatccctttggccatattgctttcaaggcttcaatgctctaggaaagaggatcttactgcagtactgctagatttaggtggagatcaaaattaccaatgtttgaaagtgatatttttacattaacttgatcaagagttagaacttggacttattactcagacagtctgatccttcattgacaagctgtgctgagaaaccattctgtgggctaaagaggatatggactcccaggattgctctggcattgcggttgagaagatatactggaataacctcttttgaaaacagtttagcattacctcctaaagttgacatctacaacaatatgactgccaggtat

SEQ ID NO: 295602 - DNA, 677 bp, Homo sapiens
gtagaccatcccatctagcataggtgtgttgtaggctataccatctagacttgtgtaagtgcactctgatgttcccacaatgatgatatcccataacaacacatttctcagaatatattcccatgttatgacacatgactggacttaagattgctgaactctgcatttcaaaatggttaatacgatgggccaggtgcagtggctcacacttgtaatcccagcactttgggaagycgaggcaggtggatcacttgaagccaggagttcgagaccagcctggccaaaacatggtgaaaccgtatctctgctaaaaatacaaaaattagctaggcatagtggcacacgcctgtagtcccagctactcaggaggctgaggcaggaaaatcacttgaacccagggagtggaggtttcagtgagccaagatcgtgccactgaactccagcctgggtgacagagtgagaccctgtctccaaaaaaacaaaaacaaaaacaagctaatatgctgcgtgtcatgtgtattttgtaagtaaaaatgtttaaggaaaaaaaggaagaaaagaaattttttaatcatgcataatttcatctggaaataaccactgtttaaaaaatcagcatgtaaaaacttttagacatgttctatgtaaatgacacatgggaatctttatatgtttgc

SEQ ID NO: 295603 - DNA, 677 bp, Homo sapiens
gtagaccatcccatctagcataggtgtgttgtaggctataccatctagacttgtgtaagtgcactctgatgttcccacaatgatgatatcccataacaacacatttctcagaatatattcccatgttatgacacatgactggacttaagattgctgaactctgcatttcaaaatggttaatacgatgggccaggtgcagtggctcacacttgtaatcccagcactttgggaagccgaggcaggtggatcacttgaagccaggagttcgagaccagcctggccaaaacatggtgaaaccgtatctctgctaaaaatacaaaaattagctrggcatagtggcacacgcctgtagtcccagctactcaggaggctgaggcaggaaaatcacttgaacccagggagtggaggtttcagtgagccaagatcgtgccactgaactccagcctgggtgacagagtgagaccctgtctccaaaaaaacaaaaacaaaaacaagctaatatgctgcgtgtcatgtgtattttgtaagtaaaaatgtttaaggaaaaaaaggaagaaaagaaattttttaatcatgcataatttcatctggaaataaccactgtttaaaaaatcagcatgtaaaaacttttagacatgttctatgtaaatgacacatgggaatctttatatgtttgc

SEQ ID NO: 295604 - DNA, 677 bp, Homo sapiens
gtagaccatcccatctagcataggtgtgttgtaggctataccatctagacttgtgtaagtgcactctgatgttcccacaatgatgatatcccataacaacacatttctcagaatatattcccatgttatgacacatgactggacttaagattgctgaactctgcatttcaaaatggttaatacgatgggccaggtgcagtggctcacacttgtaatcccagcactttgggaagccgaggcaggtggatcacttgaagccaggagttcgagaccagcctggccaaaacatggtgaaaccgtatctctgctaaaaatacaaaaattagctaggcatagtggcacacgcctgtagtcccagctactcaggaggctgaggcaggaaaatcacttgaacccagggagtggaggtttcagtgagccaagatcgtgccactgaactccagcctgggtgacagagtgagaccctgtctccaaaaaaacaaaaacaaaaacaagctaatatgctgcgtgtcatgtgtattttgtaagtaaaaatgtttaaggaaaaaaaggaagaaaakaaattttttaatcatgcataatttcatctggaaataaccactgtttaaaaaatcagcatgtaaaaacttttagacatgttctatgtaaatgacacatgggaatctttatatgtttgc

SEQ ID NO: 295605 - DNA, 578 bp, Homo sapiens
ccaattgaaacccatgtgtgcaaagcatatctgtttcctgcaggtatcatgagactggctaacagaaggtagcctggagaatgtcccccaggatcccttttcaacaccaatcagaaacaaatgcggggaggcaaggctggttcagggtaggcaagagtttgaacccttggcttctatgggttttctccccaaactggagtaaaaagatgtcaagggtttgactctgttttgaggtctgactgctgatagcttccaagctctattctactctcaagcccctttccgacctgacctcaatctgggcaagtcaatgaggaagcccagatatgctgtccctttgtgcttgcagtgaggttcaaatcactcagaccccagcttgtgcatggaaacctgaaccccagccccagcccctgagctctgtaaaacccraagccctgatgttgcctgcccatggccctcacttcacgctgaacagagagcctgaacccttctccttagggagccctttgcctgtttcctgtgtgattaataaacatgatttcacatccatcagtgcctgtgtgtcatttatcttgcca

SEQ ID NO: 295606 - DNA, 592 bp, Homo sapiens
ctagctagtaacaatgcttgattcatatcaccatcctatcctgatcaagatggagaactgctgggccttgctcacctgaaatgggaggaaatagacatgtttgtaagttgctgagcctaagaggcccatggagctttccctttgctgaatttcagcagtgcgtctccctttatgacctggggaatctcttgagggaaatttcaggggatgacagtcggctagctgaggatatttgtgtgttatatgttggttgctcaaataytgagagtgaatatcccagaaaggtcaactgtctttatccatacatagcaaagtttcacatgagaattgtttttgctgaaaccactaaaggatattatttggggctttaaacatgaatgtaaagcgcagtaaaaactgtcagattggatttgctttaggtaagcatccttgggcttccactgcctacttaaagtgactaaactagcaaatcagggcctctgtgatgctgattaaaaccaaattttattaatgtgaaatgagactacactctcttcaagttgatggaatttcacatttgcttaaatttttaagtgagatttcagctgcaata

SEQ ID NO: 295607 - DNA, 592 bp, Homo sapiens
ctagctagtaacaatgcttgattcatatcaccatcctatcctgatcaagatggagaactgctgggccttgctcacctgaaatgggaggaaatagacatgtttgtaagttgctgagcctaagaggcccatggagctttccctttgctgaatttcagcagtgcgtctccctttatgacctggggaatctcttgagggaaatttcaggggatgacagtcggctagctgaggatatttgtgtgttatatgttggttgctcaaatattgagagtgaatatcccagaaaggtcaactgtctttatccatacatagcaaagtttcacatgagaattgtttttgctgaaaccactaaaggatattatttggggctttaaacatgaatgtaaagcgcagtaaaaactgtcagattggatttgctttaggtaagcatccttgggcttccactgcctacttaaagtgactaaactagcaaatcagggcctctgtgatgctgattaaaaccaaattttattaatgtgaaatragactacactctcttcaagttgatggaatttcacatttgcttaaatttttaagtgagatttcagctgcaata

SEQ ID NO: 295608 - DNA, 593 bp, Homo sapiens
ccaagtgtttccctaacaacatggaaactaaaatcatcactcttacttgagtcctctccactraaaatagggtgggatttgcagaagattagcttgggcttccatttgctttcattcaatagattaataaatacatacatatataaataaaaagtccaaacctagaaaatactggtttaattaaaggccattagctcatacattatacatcatctactgcactgtaactagatgctgcatgtaggtgttcactttacactagattccaaaggttagggtgattttgtttcatgtcacagagaagaaaatgcaaattttcattctgcttctatagttggaatgacttccctctgactttgtaggaacttggtaatttctagtgaatgagattccctctgggatccttctctagagagcaagctcaggtcctgcttctgcagtctacagacagaaaggcatgtggactaagacagcaggcaactcaatactatgcatcacctctttttgttcccctagtttcttaaaaaagtcgttgagatgactgcctttattttaacaaccctaaaaatatttgctttggacataatgcccaa

SEQ ID NO: 295609 - DNA, 593 bp, Homo sapiens
ccaagtgtttccctaacaacatggaaactaaaatcatcactcttacttgagtcctctccactgaaaatagggtgggatttgcagaagattagcttgggcttccatttgctttcattcaatagattaataaatacatacatatayaaataaaaagtccaaacctagaaaatactggtttaattaaaggccattagctcatacattatacatcatctactgcactgtaactagatgctgcatgtaggtgttcactttacactagattccaaaggttagggtgattttgtttcatgtcacagagaagaaaatgcaaattttcattctgcttctatagttggaatgacttccctctgactttgtaggaacttggtaatttctagtgaatgagattccctctgggatccttctctagagagcaagctcaggtcctgcttctgcagtctacagacagaaaggcatgtggactaagacagcaggcaactcaatactatgcatcacctctttttgttcccctagtttcttaaaaaagtcgttgagatgactgcctttattttaacaaccctaaaaatatttgctttggacataatgcccaa

SEQ ID NO: 295610 - DNA, 593 bp, Homo sapiens
ccaagtgtttccctaacaacatggaaactaaaatcatcactcttacttgagtcctctccactgaaaatagggtgggatttgcagaagattagcttgggcttccatttgctttcattcaatagattaataaatacatacatatataaataaaaagtccaaacctagaaaatactggtttaattaaaggccattagctcatacattatacatcatctactgcactgtaactagatgctgcatgtaggtgttcactttacactagattccaaaggttagggtgattttgtttcatgtcacagagaagaaaatgcaaattttcattctgcttctatagttggaatgacttccctctgactttgtaggaacttggtaatttctagtgaatgagattccctctgggatccttctctagagagcaagctcaggtcctgcttctgcagtctacagacagaaaggcatgtggactaagacagcaggcaactcaatactatgcatcacctctttttgttcccctagtttcttaaaaaagtcgttragatgactgcctttattttaacaaccctaaaaatatttgctttggacataatgcccaa

SEQ ID NO: 295611 - DNA, 559 bp, Homo sapiens
ctttatattcatgacttcatttgattttcacgccaacccatggagtcagtacagagtttctgttgggctgtagatagacaggaagagatacacacacacacacacacatgcacacacacacacacatacgttaggaaggaggagaagtaggtgtaccccaaagcccaaagcgacatgtagctgccaataatattgtccagagatgatgaggacttgcttaatctcaggagctcaattcttgctatgctatgaccctctgaagtttgcttaccatttcagaagaatataacattactttcttatacactttcctaaagtatcttatattacttttataccatttcagaaagcatataacaatctccgtttacaggaatgtttataratatcagactctgcttgatcttgaaaagaagacagtctcagagaagcctcaccctcgttgctgaatgatctctctgcctctagctttctccaaaatgcagaaaaactcattttcccaccattgttgtatgttatgactcacgtctccatgtaacagggtgagaaagaagtagag

SEQ ID NO: 295612 - DNA, 559 bp, Homo sapiens
ctttatattcatgacttcatttgattttcacgccaacccatggagtcagtacagagtttctgttgggctgtagatagacaggaagagatacacacacacacacacacatgcacacacacacacacatacgttaggaaggaggagaagtaggtgtaccccaaagcccaaagcgacatgtagctgccaataatattgtccagagatgatgaggacttgcttaatctcaggagctcaattcttgctatgctatgaccctctgaagtttgcttaccatttcagaagaatataacattactttcttatacactttcctaaagtatcttatattacttttataccatttcagaaagcatataacaatctccgtttacaggaatgtttataaatatcagactctgcttgatcttgaaaagaagacagtctcagagaagcctcaccctcgttgctgaatgatmtctctgcctctagctttctccaaaatgcagaaaaactcattttcccaccattgttgtatgttatgactcacgtctccatgtaacagggtgagaaagaagtagag

SEQ ID NO: 295613 - DNA, 586 bp, Homo sapiens
ttgcctcttctggaattgaagccaccactgacttcagacatggaccttgtaataatgatgcagtggtggcaatgacagtgatagcaaacacatgtgccaggctctctgctacgtgctttacatatatgtagtccactaataatcctaggacacaggtcctattatgatttccattttgcatgtgagaaaactgaggcacagagaagcctcacagccagaaagcagcagaggcagatgggakcccgggctgttagtgagctttgccattgcagtcgagatggctcagtggtacaatttactgaactggctttacagttcactcccaggcagaatgtgagaatttctctttcatgacatctttccaggttgctcctctgctattcttcgtctacacctctgttaagatcatctttttcaagccctccccactccaggatacatatattttttataataatgctgtcaatgctgggggctcatttctgtggccccctcaataatcagtgttacatctgggcctttgagtcctgctctgctcctctgatgccctgcaagctccctgctgctttttatgtgggtcattcgc

SEQ ID NO: 295614 - DNA, 586 bp, Homo sapiens
ttgcctcttctggaattgaagccaccactgacttcagacatggaccttgtaataatgatgcagtggtggcaatgacagtgatagcaaacacatgtgccaggctctctgctacgtgctttacatatatgtagtccactaataatcctaggacacaggtcctattatgatttccattttgcatgtgagaaaactgaggcacagagaagcctcacagccagaaagcagcagaggcagatgggagcccgggctgttagtgagctttgccattgcagtcgagatggctcagtggtacaatttactgaactggctttacagttcactcccaggcagaatgtgagaatttctctttcatgamatctttccaggttgctcctctgctattcttcgtctacacctctgttaagatcatctttttcaagccctccccactccaggatacatatattttttataataatgctgtcaatgctgggggctcatttctgtggccccctcaataatcagtgttacatctgggcctttgagtcctgctctgctcctctgatgccctgcaagctccctgctgctttttatgtgggtcattcgc

SEQ ID NO: 295615 - DNA, 584 bp, Homo sapiens
cagctctctccactgaatgaggctggaggtggaggagaggggaggagatgagagcaagagaataagaacgggtttcacagttggaggagatgataactgaggcagagacaagggagctccttcatggggcaaaagatccactaccatttcctacaaatgctaccttgatttggacagaatatggacttctaagaacagatatgagaagcaaatttgttgaccttgggatactgaatttyatgattatccttttgatatatttccaaggtgacctcaagtagaaactaaatacaatttgcattatgtcttgctttaaaatcactacatacccgatgagagtaataatgataatgatgaaattacaaaatgatatttattggtaacttatttgtgtgagaagcactatgttaaaagtcttgaatgtgttaactctttaattctagggaaggaagtgctattatttcccccatctgcatgtgggtaaattgagagattagattaagtgcccaggctacccagctcaatgcatagcacacacctttatgctgttttgtctgctgtaatcaagaacttccagagacaga

SEQ ID NO: 295616 - DNA, 647 bp, Homo sapiens
tatactgcttgtccagcttttytgggtggctgcgacttgtgggaaacaggcacgggctagactccaaaaattcgtctacatcaaaaacttgcctttgcatcctattttctgttggggatccactgcttagcagaatcataactttaggaaatagcctttggataagtcaatggggtaggcaaccaggggactattcagactttcctgtttgaccactgcactgcagtgaaagtctgaggtgcttaattcaaatgcgaagcccaaggggttggaacaattagcttactatctgctctttgtgatcaatacatgactaaacctgtgttgaatatatgattaaacatctcagagaggccaccgccactaaaactctgaggccaaaattaagcttctaccttaacagaagtccagtctccccagtgacaactgtctttaacagtgagatttgatttcaaggctatgttttgggctcagaactggtagaaagatttcttgaaagcccttacatggttaactgcagtctcttaggaggatgactatgccttcctaagacatgactgaaactcataacttccaattaggcaaagaatctccactgccattcccctggttgcatggtaagtaaaatcagggaggacttgattaca

SEQ ID NO: 295617 - DNA, 646 bp, Homo sapiens
atgttcttcaaggcccatgaacacagatttccagtgcactggtgctgtatgtgtggaggttcagcaagacctcagttgagtaaagagtaagctggttgttggggtaagcaattgagtaagcaatagacaactaagtaagcaattgcagatagccctgagaggccacactttcaactggaatcagaatttcgctagaatttcagaaagagaccaattatattctaagaaatmctaatgaccaaggaaccttactatatcttttctcatttgtattacttccctgcattagtcaaccactgatgtgaaaattatgacatagaagaacagtgaaagataatgcaattcgtgttcctttttctttcagtcattcctcactcgttagtaagccaaaagtggagagcattggtagaatgtgtgcataccaaactaaatagcaacatccaagtcagctttgttcagtgtttccattgttctggtaagaaaaatacataaacatgtagaaactacaagttacaaattgtataatttcagtgattctgtgtttgagttaagtgctcttatatttaaactagcatttaaaactggcatggtacagtataaagatgaatagtgaagttcatgctaataattaacattttaattattc

SEQ ID NO: 295618 - DNA, 463 bp, Homo sapiens
tagctgggtctacaggcatgtgyccccacacccagctaattttttaaaaaaagtagaaatgaggtcttgctatgttccccaggctggtctctaactcctgacctcaagtgatcctcttgcctcagcctcctaaagtactaagattacaggcatgagccacctagcctggcctatttccccattttagaaatgggaagactaagccacacagaagttaagtaacttactggaaatcgtacagctagtgagtggtggaaccagtattctaatctaggctctctggcaccagagccctggttggacctggatcgcttgctcttggcttaaagggagaagactgggtccactgaatgttataactcagcataatcattacaaaaatagaaagtgaggagatggtttcttcaaaggaaagatgatggagaggaaaaaaaaaacaaaagactaagacaaactttttctt

SEQ ID NO: 295619 - DNA, 463 bp, Homo sapiens
tagctgggtctacaggcatgtgtccccacacccagctaattttttaaaaaaagtakaaatgaggtcttgctatgttccccaggctggtctctaactcctgacctcaagtgatcctcttgcctcagcctcctaaagtactaagattacaggcatgagccacctagcctggcctatttccccattttagaaatgggaagactaagccacacagaagttaagtaacttactggaaatcgtacagctagtgagtggtggaaccagtattctaatctaggctctctggcaccagagccctggttggacctggatcgcttgctcttggcttaaagggagaagactgggtccactgaatgttataactcagcataatcattacaaaaatagaaagtgaggagatggtttcttcaaaggaaagatgatggagaggaaaaaaaaaacaaaagactaagacaaactttttctt

SEQ ID NO: 295620 - DNA, 496 bp, Homo sapiens
caaatctgtcatataaaatgattcatttattgaacaaatatttatttagctcctactgtgtcccagacactgtcctaggtgattaaaatatatcagggaacactacagacaaatattcctgtccttatgggggttaccctttagcatggaagtttagaaatatgtgataaatatagaaaatatatcatctagtgtttaaaatgataagcacaatagatcaaagaaaaagtcaatcagagtgaaggaaaacaggagttgtgattggtgtggaaatacatgttttagtgctaaacagatggtcagggtaggtggttaagggcaggacagaaggaggggaggaagttaacactggatattcttgggaaraacattccatgcagaaagaattgttgatgaagatcctaaggaaagatttaggagagcaaagaagtcatatgcttgaaggttaaaaagcaaggagggaaacatcaggtcttcgaggaagtgaaagtgctaa

SEQ ID NO: 295621 - DNA, 607 bp, Homo sapiens
tctccatttcacagatgggaagactgaagtttcagaaaggttatataattagcccccactcacatagctagggaatagcagcagtactgggacatgaattcagacactcagactccaggggcatcttgataactattgtaagagaagcacaaaagtcaatggctaacagagtgtaagctagcaaatgctgacttcgggagataagaacataaaaatcttcatgataatgcatgtgtgtgtgtatatatgcatgtaaactaatacatgtttatgtatatgaataacttgaaggtttgacttcttatctggaaattaccaaagtttatgaaggtatccatgaaatgaattacttttgcctgctaaaatcgaagtctggcagaattttgtagcaggtaaacaggaaatgaattagaaagcatgataaagcatggcaccacagctcagagtacttgatcctcccacarataccaaatcactatgcagacctccaggctttgtcactatgtaagaaagctgactggtttccttcttccaactgtcctctgactttacatacccatcatcagtgctatgacccctaccatgacttgagaattaaaggtgaatg

SEQ ID NO: 295622 - DNA, 594 bp, Homo sapiens
aatttagactagcagccaatagcaaaatcgggaaaagaaacataataaaaaagtaatactatcagaatcaaaatcagtatattatgattattccacagttctgtagctttaacattattgttctcaacttttagtttaatgaaggtatgaataggtgtatgcccatgaatccaytattacctgatactaatcactttctaaaaattaaaagatgtttgtttcctatttttgccataaactagagtctttctattttctctcctcttctgtttcttgtctccaccatctttgccttcttctactctctacagcaatctgtttccttctgataagtctcatatcaacttttctacatgattctgaatgtgatgtgttacataatcctggcaaagagagatagggagattactcctggaattcagagtgaaagtggaaatggctcagggtcacttgtgatgcaagtgtcacaatgtattccacagatccatttaattcacccccgtatctaaactaagaatcacctgtaatataatgggaatggccatagattgggagtcaggacacctgtcattgcaactcatttactgcaagacc

SEQ ID NO: 295623 - DNA, 658 bp, Homo sapiens
tgacacatgtaatttaccatcacagcagaattgcatttcctgactttattgatgctggctggggccatgaaattgggggggatcattattgtaagccaaagtaatgtatgctgcttttgagctaaagcatttcattgccagcccaagacctaccaaaagtctcttttcctctgctacagtgaccagcagtgttctaggtcggcactgtccagtaraattttctgcaaagatggaagtattctccacattatccagtataatagccactagccacatatggctcttgaacacttgaaacatgattaatgaaactgaggagttgtattttaaattttattcaattttaactaatcagcagttaaatttaaatggtcacctgtggctcgaggctaccatattggacagcatagctataggtactggcggctgtctctgggttctagagaatgatctagaacagaatctccagcaaatgtgctgagaattagaattaaaacttgtttaagttcctgagacttcaaggctgttaccaaagcctaacttagctttttctcatagatatgagttcccttccagctcttttagttgctgaaaactagctacctcacaaacacacccagaaataagtttacccacagggatagtctctcaacaaaca

SEQ ID NO: 295624 - DNA, 588 bp, Homo sapiens
gggtaaacataaaagattaaaataaaatgagacacacacaaccaacttggaccaaaaaagaaaagaaaaaaaaaagcagtactgagcacagttttagtacttctgcattgctcaaagggggaaaaaggaaaagatagaaattctgacttcttaraaaaaatgaaggtgcagccatcctattttatttcaatctgttttcttctctgtaaatgacttcctgattataccatgcaattgcttaatataataacatacaaattttgtagtttctcaaagtatatttcagtgaccgataaccagaattatggagtcaactctctaatgtgtgatgaaatcattaacatctgagacactggggcacactaatatccctaaatccaaaatatttcacctagttcagaatatgcacctccaaggaaactaacatcatgcatcatccattcaaagagtggcaactcaacaggcatgctatttctgcagtcacccaaatgtactgcatgaccatagaggatgtcaatatacggtatcagtcctgctcaggctgtgaaacgagatagcccagggtgcaaatttcagcagcacactcac

SEQ ID NO: 295625 - DNA, 593 bp, Homo sapiens
caaaactccaattgccagaaacctgttttcctaggctcccttgcagctatggtatagcacatgacctaggctctgaaaaggaaatgcacctaccccagattttgaatgggaagcttatggcacaaagacacacagactgacagaattcattttagtgcagtggcacagttgtggtggtactatctattcaccacaccatttcctgagacacttcgttttcatgacagtctaattccagggcttaacacagagcccgttctcattgtgtgttttctgaataaaccctgaattaactctatctcccatccaatttttagagcctgggaatattagccaatattcacattgctcttgggctatttgtttatctattcattcattcaacaaagatttactgggtctgcaccaagccaggagctgcaataagcccaatggataggagyggtccctgctcgctgatgatgttcatattataaagaagtcagtcaataaaaaatgcgatgaaatattgttagccaagtgacaagggagatactctggtgtgtacaatgcttatgctatggaggagatcaaggatggagtcccatcccagc

SEQ ID NO: 295626 - DNA, 514 bp, Homo sapiens
ccaggctcaagtgatcctcccaactgtgcctcctgagtggctgggactacaggtgcatgccgctatactcaacaaatttttaatttttttttttttttttttttgtagagagggggtcttactatgttgtccaggcttgttttgaactcctgggcgcaagtgatcctcccaccttgggctcccaaagtgttgggattattaacatgagctatcatgcctggcctagcatgacttctgaatctctgatagatgactatgaaatagctgaaattatttcaacacgtttgagttcctgctgtrtgatacataccactttaagcactacagtgactacataacctaaaatctgatacctacagatttgctactagggagcagggggcacttgcatatcctccaagaagggacctttttgaatcttgagaagacaaagagtggatcatttcctctgctgacagtcgatgatgcttctgggtacctgttttcaagatgctcagaatagcatggaggagat

SEQ ID NO: 295627 - DNA, 627 bp, Homo sapiens
aaatgacctcaaacccaaatagcatagttctctctcatttaaccaatgcatatttcatttttactacctcacaagatctcaagttattctaaattattcatgatcactccttctcggtaacatccatatgttctcattcacccaaaacagaaagccatatccgttcttgattagtagcatttgcaacctattgcctttttttaagtgaaagaaggttgaatatctcaaaaaataatcatgataatatgggtaaaagttaaggtcttgggtcacatactaacattaattttagccaaaagttttatcttgaactaatgatagatgttactgacagaaatccatgattagatattttaatattaattacattactgaaacatatgcaatttgcagaatcttgaaacatgccyggcacaaggcaagcattccatatgtatttgttaaatgaacaaatgaatgctaactcactgatgaaagttgcattttaaatgtaaaaaggagatatatttatttcaaatgttctgtacttttattgaaataaatttctaataaacccctgccaatttgcaaattaaacactgaaaatatcaacctccttacaaggtcaagttgacgctatttaatatt

SEQ ID NO: 295628 - DNA, 590 bp, Homo sapiens
gtggcaaacttttggcagggacactccacagctctcctgtttaaatgctggaggaaatttgtaatttaacatcgtggaatattagccaaaaaacagtttattcatttrttcttacacattcagtatgaccaaaatggcatatcgccaatcaacaatgattgaaagaacaccaagggggaaacaaaatctagtgcattaggaaaaatattctagtgtattaaatattttcttaggaaaaattttaaaattctagttagtttaaaagagaaatctaatgttgactgataatttctcctttctttcttttttcctgcagtggctcttgctattattaaacaccactaaggtgtacaattctttaatcaaaaggcaaatattttgtttttatacgcattatggacttttattttggttttctatggacttttttaggcttccactcaataatttattatatacatttatatttaaacaatccagaagagcattaacttaatttatatattaaattcaaaaatgttcctgtccaatggaagtatcttttttcaatggtatatagggtttttttgaagtaaattagtgaatagtca

SEQ ID NO: 295629 - DNA, 578 bp, Homo sapiens
ctctgcaccagcagaactagacctggatgtgaattgaatccctgtgctgctaactagtatgggacattagggaaagtccttcacctctttgagtctcggtttctctaccttcaagatgaggataatattacctactttataatgtcactgtgaagcttagggataatatgggcaatactgtgtgtggtgcctggcgttcaataaggactcccaaagtgcctgtcgccattagtattattaataccagtgttgtcatttctcagcatttcaaacaaatgtaaagcagcagtctatggaagaagtaaaaactgaagacacctagtctagaaacttggtccaaggaggacagggttatttggttgaaaggagattgcaagttacacatggatttccctcttcatttctccatccccccactaccttggttaattgaattggccactagatggaagcatatatgtttaytggtttttttaatctgtgaaccaataggtcatttataatgtgtaaatctgaaatcaaaatatcatctacagtcaattcaatctgataatttttgaaatctttaactaactaga

SEQ ID NO: 295630 - DNA, 547 bp, Homo sapiens
actttatcatgatgtatgccttttcatatactgtttaatttcattgctaataatttcttttgatactttatctatgatctatatttttcttttcagaatctttgtctatagtctgtatttttcctttctggtaatattattgccaggtttcaaatcaaggatgtgctggcccataaacaacagagaggaattccccagtttttaaattcttggaccattttgtgagataggttttctttcttttgtaaatatttgggaaaattctccaatgaagctatctgggactgggaatttgttttgttgttgttgttgttattattgttaattgttgtgttttstttgagggtagagtttcaataataaattacatatcttttataaatacagaagcattcaggtatattattttttgtggtctaatttggcaagttgtatttatcaaggaatttgtttattttatctatatcaccatatattggtataaagtttttcataatatctttttattatccttttaaactctgtagcatctataatgatgcccttc

SEQ ID NO: 295631 - DNA, 559 bp, Homo sapiens
aaattacccaaacttattgacttaaaacaacataaatatattatttcatagttcaggaatgtcaggagtccaaaacaggtattatagactaaagtcaaggtatcagctgagccgtgttccctcagaaggctttaggatgttgcattttccagcttctaaaggttgtctacattgcctgatttatcctgattgatgacctcctttcaagaayagcattgcatccccctcggcttctgtctccacatctccctctccgactctgactctcctgcctcactcttataaagacccttatgattacaccggtcccaccagataattcaggataatcctaccatttcatgatccttaatttgatcatgcccatcaagtccattttgccatatgagataacctgttcgcaggtttggggattcgaatgtgggcttcctcggtggggggtattattcaggcctccgcactaagctaaagcaggtggaattctgcattttctaatgtaagtgtggatttcctaatctataaggcaaggtagggagagaaagccatatttgccccagag

SEQ ID NO: 295632 - DNA, 535 bp, Homo sapiens
cattctttgccattttagtacaaacttatttttgaaccccttttttaatttacatgacattaaccaaaatagattcaaagagtaaatgtacagttttggcaagtagaattttgctggtcaaayagtaccctaataaaattaatttgcaaactggaagtaaaagaagagtaaatgagagagacatcaatgctatctgcattacaaattcctagagaacacaagagaagttctcctaattatataatcttattactagtaacaatttctgtcttgtatttatgtactccttctcacctatgcaattcagaaaacagagtatactaccacttttagattaaaaggagtagtttatatcagactaaactcctgctgaaagtaactataaaagctgaataaaacagacaacacagatgttgaaatcaccaggcagcaactaaagcagctataatgtgaaggatcgtgacaatcaataaaaaggctttagagaagtaagcccattgtggttttgatttgcatttctctgatggccagtgat

SEQ ID NO: 295633 - DNA, 535 bp, Homo sapiens
cattctttgccattttagtacaaacttatttttgaaccccttttttaatttacatgacattaaccaaaatagattcaaagagtaaatgtacagttttggcaagtagaattttgctggtcaaatagtaccctaataaaattaatttgcaaactggaagtaaaagaagagtaaatgagagagacatcaatgctatctgcattacaaattcctagagaacacaagagaagttctcctaattatataatcttattactagtaacaatttctgtcttgtatttatgtactccttctcacctatgcaattcagaaaacagagtatactaccacttttagattaaaaggagtagtttatatcagactaaactcctgctgaaagtaactataaaagctgaataaaacagacaacacagatgttgaaatcaccaggcagcaactaaagcagctataatgtgaaggatcgtgacaatsaataaaaaggctttagagaagtaagcccattgtggttttgatttgcatttctctgatggccagtgat

SEQ ID NO: 295634 - DNA, 535 bp, Homo sapiens
cattctttgccattttagtacaaacttatttttgaaccccttttttaatttacatgacattaaccaaaatagattcaaagagtaaatgtacagttttggcaagtagaattttgctggtcaaatagtaccctaataaaattaatttgcaaactggaagtaaaagaagagtaaatgagagagacatcaatgctatctgcattacaaattcctagagaacacaagagaagttctcctaattatataatcttattactagtaacaatttctgtcttgtatttatgtactccttctcacctatgcaattcagaaaacagagtatactaccacttttagattaaaaggagtagtttatatcagactaaactcctgctgaaagtaactataaaagctgaataaaacagacaacacagatgttgaaatcaccaggcagcaactaaagcagctataatgtgaaggatcgtgacaatcaataaaaargctttagagaagtaagcccattgtggttttgatttgcatttctctgatggccagtgat

SEQ ID NO: 295635 - DNA, 555 bp, Homo sapiens
tgaattgtgcatgtcaccatgtcctgtatggtatctattctagtgcttgactttaattatgctcaataaatgtagacttggatgaatagttcactgattgtgcttaggaaagggccaaaaatgacaaataggaaaaaggaggagaaagaaaaagaaagaattgctccaagcactgttgataaaacacaaataatcaggtaggtagggcaaatggaggcatttatgcagayggaaaagatgggttcaacaaattattaataccgaatgagtgtaagttatcaatatgagataatattatccacttttcccctgtctgtgtttggctagctggtattacttagagcacactaataatgtataattagaaatgatattttatagcagcacagcaatttgaagcagacattctaccacacttgtcagtgatactccatacctctcttaattcctacctccttctcttgaggtactgaatgaggtactggtgagatctcctaatgtcaccagatgatctaaaaagaattggcaaaagaatttgaaaagggaaagctccag

SEQ ID NO: 295636 - DNA, 555 bp, Homo sapiens
tgaattgtgcatgtcaccatgtcctgtatggtatctattctagtgcttgactttaattatgctcaataaatgtagacttggatgaatagttcactgattgtgcttaggaaagggccaaaaatgacaaataggaaaaaggaggagaaagaaaaagaaagaattgctccaagcactgttgataaaacacaaataatcaggtaggtagggcaaatggaggcatttatgcagatggaaaagatgggttcaacaaattattaataccgaatgagtgtaagttatcaatatgagayaatattatccacttttcccctgtctgtgtttggctagctggtattacttagagcacactaataatgtataattagaaatgatattttatagcagcacagcaatttgaagcagacattctaccacacttgtcagtgatactccatacctctcttaattcctacctccttctcttgaggtactgaatgaggtactggtgagatctcctaatgtcaccagatgatctaaaaagaattggcaaaagaatttgaaaagggaaagctccag

SEQ ID NO: 295637 - DNA, 512 bp, Homo sapiens
catcacagtaaaataagagtggtaattagtaattagtaagtattattgggctgagtgcagtggctcatgcctgtaactttgggaggccaaggcaggattgcttgagcccaagagtttaagaccagccttggcaacataatgagaccctgtctctccaaaaaaaaaaaaaaaaaaaaaaattggttgggcatattggcatgtgcctgtagtcccagctatttgggagactgaggtgggaggattgcttgagcctaggagttcaaaggctatagtaagccatgttcataccactgcactccagcctgggtgacagagcgagtgagaccctgtctcaaaaaatatatgcaataaatgttcatgactgactggaaattctagttctaagagaaaaactatcatcccatggtgtgagtacatctaatgtggccagkggatcagagaagagaaaaggataaagaagcatcagttcttgggatctgcacaaagtggagaaattattaatttcacctctt

SEQ ID NO: 295638 - DNA, 1156 bp, Homo sapiens
cctttgtccaccatcaaaatttgcccattctgcaaagcctagcttagagtacatatgatcacaccagttctctattttgaattttcttctgagtttcaggtgtaactagaattagaataattttatttcctccttcttcatgctaattagccttatcaaattttctcattttctctccacaaatagattaagacttagtgagggtgagaaccatgctttatatttttctttgcatcctcaaaccttacctagcacagagctacccattactgaaggccacctaatagtgagtttagaaattggtgcagttatatgcaatttgacaaaattggacatttgaacaacttggacagtaagcttagaatctcgcaatattagaagttcaaagcattagggacctcagggattaatatactaaattctcccttttatagacaaaaacagccaagagctaaatggaagyagtaaattggccaaagttaaactgtaagtaaatgaaaagcttggatctaatctcatgtcttttgactcaaaatccatgccctttttccttctccagtagtttgaaacttttccctcattatgacatatwtatattgaaactcaagtatattgaaacatattagcttaatctatgatcagtaaaattgttgctcaacawagcactattcagcatcattagcaatttcatcttttatgaatgtttgaattataaatatttccagaaaatgagtctaagcgcaaaaatgtgacaacagatacactgctctaaacggaatacaggcatatctcaggggtattgtaggtttggttctagaccacaacaataaagcaaatattgcaataaggaaggccacacaaattttttttcccagtgcgtataaaagctatgtttacactattctggagtctattaagtgtagaataatactatgtctaaaaaaaagttcataccttaaaaatactttattgctaaaaaatgctaatgatcatttgagcctagagtggtaatctttttggtgatggaggatcttgcctcagtgctgatggttgctaactgaccagggtggtggttgctgaagattggggtagctgtgccaatttcttaaaataagacaataaagcttaccatattgattcactatttctttcagga

SEQ ID NO: 295639 - DNA, 558 bp, Homo sapiens
atgttgtgttaacaggtataaaaacattaatctctttgtacatctctgtcagagcttgggtgacaaggtacacgtagatgagaagtmatattttgaaaggaatttttttttctgcagagtagatctcaacactgtacttaaaatatttcggtaggtaaaccatgctgtaaagagatatgctgtcattcaggctttgtttttccatttacagagcacaggcagagtagatttggaataattctaagggtcataggatttttgaaatagtaaatgagcatcagtttcaacctaaagtcatcaactgcattagttacttacaagagagttagtctgtcatttaaagccaggcattgacttcttttcttcagctatcaaagtcctaggtaacatcttctttcaatatatgcatgctttgtctacattgaaaatctgtttagtatagccactttcatgaatgaacttctggataacttgataaagcttccatattagcccttgatgctttaccttgtacttttagttatgaagatggcttttttcctcaaatctcatcaacca

SEQ ID NO: 295640 - DNA, 558 bp, Homo sapiens
atgttgtgttaacaggtataaaaacattaatctctttgtacatctctgtcagagcttgggtgacaaggtacacgtagatgagaagtaatattttgaaaggaatttttttttctgcagagtagatctcaacactgtacttaaaatatttcggtaggtaaaccatgctgtaaagagatatgctgtcattcaggctttgtttttccatttacagagcacaggcagagtagatttggaataattctaagggtcatagratttttgaaatagtaaatgagcatcagtttcaacctaaagtcatcaactgcattagttacttacaagagagttagtctgtcatttaaagccaggcattgacttcttttcttcagctatcaaagtcctaggtaacatcttctttcaatatatgcatgctttgtctacattgaaaatctgtttagtatagccactttcatgaatgaacttctggataacttgataaagcttccatattagcccttgatgctttaccttgtacttttagttatgaagatggcttttttcctcaaatctcatcaacca

SEQ ID NO: 295641 - DNA, 663 bp, Homo sapiens
gtcattcaggctttgtttttccatttacagagcacaggcagagtagatttggaataattctaagggtcataggatttttgaaatagtaaatgagcatcagtttcaacctaaagtcaycaactgcattagttacttacaagagagttagtctgtcatttaaagccaggcattgacttcttttcttcagctatcaaagtcctaggtaacatcttctttcaatatatgcatgctttgtctacattgaaaatctgtttagtatagccactttcatgaatgaacttctggataacttgataaagcttccatattagcccttgatgctttaccttgtacttttagttatgaagatggcttttttcctcaaatctcatcaaccaacccctggtagcttcaaatttttcttctacagcttcctcacctctctcagccttcaaggaattgaagacagttagggccttgctctggattaggctttggcttaagggaatgttttgactcactgatctatccagactctaaaactttcttcatatcagcaataggctgtttgactttcttatcattttttgtgttcactggagtagcacttttactttccttcaaaaacttttcctttgcatgcataactttgctaactgtttagaacaagaggcccagcttttg

SEQ ID NO: 295642 - DNA, 663 bp, Homo sapiens
gtcattcaggctttgtttttccatttacagagcacaggcagagtagatttggaataattctaagggtcataggatttttgaaatagtaaatgagcatcagtttcaacctaaagtcatcaactgcattagttacttacaagagagttagtctgtcatttaaagccaggcattgacttcttttcttcagcyatcaaagtcctaggtaacatcttctttcaatatatgcatgctttgtctacattgaaaatctgtttagtatagccactttcatgaatgaacttctggataacttgataaagcttccatattagcccttgatgctttaccttgtacttttagttatgaagatggcttttttcctcaaatctcatcaaccaacccctggtagcttcaaatttttcttctacagcttcctcacctctctcagccttcaaggaattgaagacagttagggccttgctctggattaggctttggcttaagggaatgttttgactcactgatctatccagactctaaaactttcttcatatcagcaataggctgtttgactttcttatcattttttgtgttcactggagtagcacttttactttccttcaaaaacttttcctttgcatgcataactttgctaactgtttagaacaagaggcccagcttttg

SEQ ID NO: 295643 - DNA, 663 bp, Homo sapiens
gtcattcaggctttgtttttccatttacagagcacaggcagagtagatttggaataattctaagggtcataggatttttgaaatagtaaatgagcatcagtttcaacctaaagtcatcaactgcattagttacttacaagagagttagtctgtcatttaaagccaggcattgacttcttttcttcagctatcaaagtcctaggtaacatcttctttcaatatatgcatgctttgtctacattgaaaatctgtttagtatagccactttcatgaatgaacttctggataacttgataaagcttccatattagcccttgatgctttaccttgtacttttagttatgaagatggcttttttcctcaaatctcatcaaccaacccctggtagcttcaaatttttcttctacagcttcctcacctctctcagccttcaaggaattgaagacagttagggccttgctctggattaggctttggcttaagggaatgttktgactcactgatctatccagactctaaaactttcttcatatcagcaataggctgtttgactttcttatcattttttgtgttcactggagtagcacttttactttccttcaaaaacttttcctttgcatgcataactttgctaactgtttagaacaagaggcccagcttttg

SEQ ID NO: 295644 - DNA, 459 bp, Homo sapiens
tgtgagaattaccaaaatgtgacaaagaggcacaatgtgagcacatgatgttagtaaaatggcaccaacagacttgtttgacccagggttgccataaaccttcaatttgtaaaaaccatggtatctgcaaagtacaacaaaggaaggtatgcctgtaatcacttctttctctgaacatgacatacgttttcattctaccatggaatttcaaatggctctayaattccctgaattatatcaaaataaatgtgttcaaaatgaaataatggctcagatagtattaaatcattaacctgtatgaaaaatcaaaactatgggtagaagcttaaggcatcagccaatgtggcaacttcatatttagagacagattaattgataacatgtgtgtacatatttagttcttatagtttcatttctttactgtcaaaatcaacaacactgtaacttctaatcaatgtc

SEQ ID NO: 295645 - DNA, 546 bp, Homo sapiens
ctcaagccagttgtaacaaaatgtttagagcaatctcagttggcagaagatttaacattggtcatcacttatttttgaccacagaaagaaagctagactaactactgttttgtaatatagcatgagctagtgtaaggcctcaaaggttttccattaattgtatcagacgtaattctgaatatccacctgttttatgaacrataacagtcacattaactggctcttctagttcatcaactttgcttcccacaaatatggtttgccttttccataacaatttcttcatttagaaacatttgagagtcaatcttctataaaatattataagtagttaaatgatagccggtatcttaagcattacatttggtgtgttcttaggaatatagaataaaacgtaggctttggacagaatatcttatttttcaagtgtatgtatctggacatttttgttgacaggtgaaaacataagatctttttaatgattaataattatcttttattcttttaaagaaatatggaggtacaaagaatcaaagaccttgccca

SEQ ID NO: 295646 - DNA, 582 bp, Homo sapiens
cttcttactatttccctgcaagtgtaacctcccaggattttttctttctttcattttacaatgaatgctgtgaaaatttttattttcttaaaagggtatccgtctctcatacttctctaaggtgccctgcccagaagttgcttgcaacctcatccctaagagaactggcaaatattcacctcacccaaactgtgaacattagcctgcattataattatagataaaaagaaaagtgtgacctgtggttgtctaaagattaaaaacatagactcagtctgtaccaacaaaataatggcttattgtgttcgttttggggtcttagacctcaaaggtgatttaagtaagagcttgcctttagaatacaccttaaatattgaagattaagaaagcatcatatggaattagattgccgagaagtgcttatgtgattsttaataggagtttcaagtgttgcctgtgcaaagatattacttgaaaaattgtgaatggagagagcattttagaaaaattgagcaacttttcctattttcagctctcaaaattgaaagaggtaaaagatttaagtttctgcaggaaagttta

SEQ ID NO: 295647 - DNA, 561 bp, Homo sapiens
tccgggatttttgcaggtgcttagcgactgccatagtgggtcggtgatgttgggaggaacagtagtgtctgcatggtgtacaattgtattaggtttgttgagtcagcagagtgaggaagccgaaagagcttgtactttggagtaagacatcttgatttgaaaattcaaatctgtatgttaaaaatgtccacgttttaaattatgtcaattgtttaaataattttaaaatattactaggccaacacgcacacacacaactacaaatttatacaatctaagataaacttcagtacccagaccatgagacctgaattctagtaacaacagccattaaaagcttaactgtgatgttaaccatttattctttgaacccattaggaaaaaattctgagaagcagctactcttttggtagtatatccyctgcttactttaatttccttatatggattcatacatcaggatttttaaaaattgaatgcctatattgtcccttggtaaaaagctgggtaaaaatctttgtaatatagttgatgaaaattgcgccagaagacttagattcc

SEQ ID NO: 295648 - DNA, 355 bp, Homo sapiens
tttgcctaagtgtcagttttctcatctataaaataacaatttctaattccaaataaggttttgcagatactatgaacaatgtgtgcaataattttttttaactggaggtaacatacaatttttttctcaatgaccaatcgaaataatatacaatataggtatcttttattaacttggaatcatggcttcacatatatattgatccagaaaagactttttagaccattaactttatctcccctcttgtagctcttgaaaaaactcagctatagggcaatgtagagacttctgaaagtcagacaacaagaatraatagctaaacagtggtcaagaattcaatgtttttagatgaatt

SEQ ID NO: 295649 - DNA, 636 bp, Homo sapiens
atgtttcaggagttaatattccttatttaaaaattgattacatacccttaattcttttaactaatgcccattttgtcaatttgccaacaaataagagaaaaattttgttctttaatatatttcggctctctaatagccaaggtgcctaaaaataaatcatagtattgaacacaatgtgactaacaaactaatgaaatataactcaccaagaaactgagatgtatactgttttctttagcagtcaagagctacmaaataaaggtcaaagtgctaattatgcctttgatagttgcgaagtggaaagaattctatacatatgtgaagtataggtaactgacaaacagctaaagatcagatatgaaattgaatttattagcaatatctttaatctaagtaattgcactttgtggctgatttgtgtgtgtgtgtatttgtgtttaggtaaaatacagtataaaaagaaaaatgaagatgaatacttaatgttattatccgtatagctactactatttaataaaaccagttcattttctacacaggtatgacatcaaagacgattacacactaagaattaaaaagaccatgagtacagatgaaggcacctatatgtgtattgctgagaatcgggttggaaaa

SEQ ID NO: 295650 - DNA, 1149 bp, Homo sapiens
ataagtgaaagaaagcattacttaacttcacagtgcactagaataaattaactgtcttttcagtggracttgttgatcacgtgagggaaattacatagttcaaggtaccaagtagtaccaagtagacactcacactaattcttgaaacagacattagccatggcatcatctacactcctagaaaatcaaacaaagataggcaagcacatcctttctcccactgctaactgtgcctccttctctcatccttcgtgataaagagattggctgcatgttttcatccaagtctcagttacatcttaccccatttagtcatacctctgacccttgtgcagctttgctcccaaagagtttcagaaggttaggaaaaaggttcggagaagtttgaagttgcaggaaaggtgtgagggattctcaggttagtccttcgcgtggtaagaaaaaggatttttaccaggtttatgatttgggcttcaaatcatacaaaactcaactacctccaggttattattaggagacaggcattttgggtacctggaaaaatattggtgcttttcatactactcaatatttcwataagtgaaagaaagcattacttaacttcacagtgcactagaataaattaactgtcttttcagtggaacttgttgatcacgtgagggaaattacatagttcaaggtaccaagtagtaccaagtagacactcacactaattcttgaaacagacattagccatggcatcatctacactcctagaaaatcaaacaaagataggcaagcacatcctttctcccactgctaactgtgcctccttctctcatccttcgtgataaagagattggctgcatgttttcatccaagtctcagttacatcttaccccatttagtcatacctctgacccttgtgcagctttgctcccaaagagwttcagaaggttaggaaaaaggttcggagaagtttgaagttgcaggaaaggtgtgagggattctcaggttagtccttcgcgtggtaagaaaaaggatttttaccaggtttatgatttgggcttcaaatcatacaaaactcaactacctccaggttattattaggagacaggcattttgggtacctggaaaaatattggtgcttttcatactactcaatatttc

SEQ ID NO: 295651 - DNA, 617 bp, Homo sapiens
tgcttagtggatagaaggatggctacttaccaacagggcgagctgtagacattacaatggtgtggtgagaacataaaaaagaaattaaaaaaaagaaagaaaaattatcagaatgcatgatgtgtaatgttacatttaagtatggacaatagagtgatttctagtctcacaattcaagtatgaccaagatgtctgagtctgataaagttgagagttataaatataattctaggaaaataattactttgagaactgactgtaagcaatttgagagatattttaggtaaagtcttatcatcatcacttactgcagttattatttcaaagatcttgagttaaacagccttgtgttaccccaaagttaaaaacctgatgaatataactattcaagtcacagactagcaaatgtcatgtcaataaaagaaggcctcgcygtctgatttaaatagcaattggattttaagcatggttagtcagaaccattacaaggactgcagaaaagcccctgacgctgcttttcagtcagtaataagttgagattacatcacttttcatccatggacagggtggatgaaaatataacagataggttggaacatccttagagatttcaactc

SEQ ID NO: 295652 - DNA, 553 bp, Homo sapiens
tagaaaatattttttaaggcagctgtcctctctttcctgatcgcattttgagtcttgtgactgacctccctaaatcccagtagttagtcttcacactgaaattcatttgaataaattgctattgtcatttgtcatcagaaagaaatactagatattcattttaaataatctaataaaatcctgctgaatcagagggattcagaaagtatatatatccatacttactaggcatattctggacacttargagacagtggtaaatcaaacggtaaaaatctttgcctccctagaattcacatttcaactgttaatattaatcatctttgtttcatcttaattgtatttaagagataattcttggagaaaatggcaggttggataaaaacaaacacagtttataaaatggtaatatgtattagtataaaccattagcatctaataggttccccttcaagatttcttaaatgagaagcatttattggctgataaaaacaaatgcaataatattaaaatatgtatttgctaaggaggacattaaagcagagttaggctt

SEQ ID NO: 295653 - DNA, 553 bp, Homo sapiens
tagaaaatattttttaaggcagctgtcctctctttcctgatcgcattttgagtcttgtgactgacctccctaaatcccagtagttagtcttcacactgaaattcatttgaataaattgctattgtcatttgtcatcagaaagaaatactagatattcattttaaataatctaataaaatcctgctgaatcagagggattcagaaagtatatatatccatacttactaggcatattctggacacttaagagacagtggtaaatcaaacggtaaaaatctttgcctccctagaattcacatttcaactgttaatattaatcatctttgtttcatcttaattgtatttaagagataattcttggagaaaatggcaggttggataaaaacaaacacagtttataaaatggtaatatgtattagtataaaccattagcatctaataggttccccttcaagatttcttaaatgagaagsatttattggctgataaaaacaaatgcaataatattaaaatatgtatttgctaaggaggacattaaagcagagttaggctt

SEQ ID NO: 295654 - DNA, 556 bp, Homo sapiens
aattcacatttcaactgttaatattaatcatctttgtttcatcttaattgtatttaagagataattcttggagaaaatggcaggttggataaaaacaaacacagtttataaaatggtaatatgtattagtataaaccattagcatctaataggttccccttcaagatttcttaaatgagaagcatttattggctgataaaaacaaatgcaataatattaaaatatgyatttgctaaggaggacattaaagcagagttaggctttcagtaaatctataactcatagtttcttttccagtttttttttttggtactcatttaattcaatattagctttacaatgattgagtgttcttgaagaaatacaagataagaacatgttggttttctccattattttttaatttcacaggcaaacacaactcatgtacgttggctcttatcagagatgtttcaagatttacaacttgtcatgttctagaaaggaattttcaacttttttttacataggtgaaaaagaccattaacctgttctcaattctgtctggtagaataaa

SEQ ID NO: 295655 - DNA, 485 bp, Homo sapiens
ttgacctttttctctaatttctcctttaaactttccattgtagctattatgagttagctaaaatgcaaatgtgatcatgtcaattccctttttaacactttttaatggctcttaagataaaattctctccttaatatgatttcaaatgttgtttggaaccaggtccctgcatatatctccaggctcatcagggacatttmtgtaacctccatgccctagggatatgaaggaacacctaattatcattgtaagttggcatatgatggtctttctgcctgcaagtaactcctagctgtccctttgttctcttacttttgcctgtgcctttctgaagtacatactgttcattcagtgtcaactttggactcactcatctgaagtctttccttatctacttaactggactgggtaaccctccaaagagctctctagttgaagggtatcagaaaagttaaccaaataatgtcgattggttgattgaattg

SEQ ID NO: 295656 - DNA, 577 bp, Homo sapiens
tgttgagactacctctgtgaggtaacagaagagttttatttctcaatcacccactttttaaattcaagtatgtactgcacatgttgttccagtctctatatagcacactttaggagtacaagatatttcaatgaaagatggtcccctcatggtgctaaagagatttaggaaagttaccatacctaactcaaaaaccacaaactgaaagatgaaagtatgaattattggggacaagtatacttaaaatgccataaggtaaaatggaggaaactttgttttcataaggaaggctttttggaggagcgagtttcagagctgggtttggaatatgcattgtatgctttaattaattagaaaaggaaaagaaacatgctggaatgtgcttgcatgcacataaaacaatctctgaaagaacacayaagaaactaataataacaaatgcacttgcaggaaaaaaaaaatactggaaagtaaagaataagggaggaagacttccctgcatctactttatacttctttaaaaccctgtaaatgtattaactacttattaatacgtatgtttaccaatgtataaatt

SEQ ID NO: 295657 - DNA, 594 bp, Homo sapiens
tagtccaaaaccataagccctagttaacaaaatagtctctgagttcagtaatcttgtactagtaatcctgaaagcatatatattataaatatttatcatcttggttagtaatagcttccttaaaagtttggttttactcaaggtaatgaagatacaatcgttttatattaaaatatttagcaaatgtacaacactgttagtgcatatgtttcattgattttaattatgggagtaaatactctctgatatgtytctttaaaaaaatccaggaaggtcaaaaaaaaaaaagagagagagaactcaaataacactattttaaaaaacacaacttacctccacggccaaaatttccaatctcatttgggccactgttgctattatttactggcaagctcgtggctggccaagaatcagcaagccatggatagctgggatcaccagcattgagaagacctggacggctaaaacagaaattacaaggaaatcaacacatggagctcaatgcaagattttgacactcgtctcatgcaatataaagcgttaagaaatggaagattttcattgacttcaaattaatataagtagactccctgg

SEQ ID NO: 295658 - DNA, 581 bp, Homo sapiens
atgataaattgtacttcattaaaatgtaatgcttttgttcatcaaatgacactattaagaaaatgaatagggaagtcatggactgggagaaaatatttgtaacacatatacatggaaaagaatttgtatccagaatgtacaaataactcctactaatcagtaacaagagacaacccaatttttaaaaggcaaacatgtggtcaattcacaaaagaaattatgtgartggccaataagcacatgtaaagttgcttgacattattagtcataaaagaaaatttaagttaaaatcacaggttatcccaattagaatggctaaaatcacaaaaactggaaacatcaaatgttggtgacaatgtagggcaactagaagtcatttttcttgctggtgggagtacgaaattatataacaatttgaatattgtttagcagtttctcataaactcaaactatacaactcttttacccagacattagaccctaggtatttctccaaaaggacacaaacatttacacagtaatattcattctgtcaggtgaaaagcagataaacaaaatatggcatattcatacaattgaat

SEQ ID NO: 295659 - DNA, 494 bp, Homo sapiens
tttttttagcattaatttttttccctgtagttaactgcattattaataaatgccaccartcaggtggatttgtaaaactgaggcaccatgtatgtgcatccattgtacaatgtttacagtgctttgaaatggttatatcattttaatagccctttgagttagaatggatggcataattcttcaccctataagatcagtaaaaatataggttaatcaccagtcctaccacattgctgggccatattttcaggatgtaaaacatagagtttaaatagcttcttcaagatcacattcctagtttgcagtagagaaatttgtcaactatcatttccagaaaacggcagtgtaaataaactaaatgatcaaacagtagcagaacaaggcctaaagtctaaaaccccttggcaatggcctaaatatttgtatgttattgtaatttgtattaaaaggtcccacagtcattgctcatgaagtttccaattgtttttagacag

SEQ ID NO: 295660 - DNA, 1213 bp, Homo sapiens
ttcatttgtttatttggaaaactcttctgatgaggaaactgacagaagaaaatggtctaaatagggaaaaatatcttgcttcctatacccatctgtcttatttttctattggaagcctctcccaagcctaaaaataaaaaaagaacatctattttggagatgggcaccacattttttcccagcagcaactcaaaacatgatgagtaatttggaaaggaactgtggaatctaccagctgccttgcttacgaagccgtcctgttccgtttggtgacttgtataccatatgcyagatgctgattgcctggagtataaaactgaaagctgagtacttcacgtgaaacttgtttaaaatatcaaaaaacaaactgacaattcacaacttgatggaaacttctaagtattttctaacttagtgacccaaaagtatgcttccttttgatggatgaatgtaattggccacacaagaatttagaagtaataagaagtacacatgctttttggcaaaattcaccatttaaaaattattttttaaaataagcagccactactctaaacagaaatctacagggacatttttttttaatgtttcaactgcttaaccacawttcatttgtttatttggaaaactcttctgatgaggaaactgacagaagaaaatggtctaaatagggaaaaatatcttgcttcctatacccatctgtcttatttttctattggaagcctctcccaagcctaaaaataaaaaaagaacatctattttggagatgggcaccacattttttcccagcagcaactcaaaacatgatgagtaatttggaaaggaactgtggaatctaccagctgccttgcttacgaagccgtcctgttccgtttggtgacttgtataccatatgctagatgctgattgcctggagtataaaactgaaagctgagtacttcacgtgaaacttgtttaaaatatcaaaaaacaaactgacaattcacaacttgatggaaacttctaagtattttctaacttagtgacccaaaagtatgcttccttttgatggawgaatgtaattggccacacaagaatttagaagtaataagaagtacacatgctttttggcaaaattcaccatttaaaaattattttttaaaataagcagccactactctaaacagaaatctacagggacatttttttttaatgtttcaactgcttaaccaca

SEQ ID NO: 295661 - DNA, 505 bp, Homo sapiens
taagaagtacacatgctttttggcaaaattcaccatttaaaaattattttttaaaataagcagccactactctaaacagaaatctacagggacatttttttttaatgtttcaactgcttaaccacagtaattaaatatactattttagaaagttctgttttatgagtcgaagcaaagttttgttaaagcatgtttgaaagcagtctattctgaggccaccaagaagtccaaaaaaaaaatggtttgtgattgaaaaattcattcagcatgaattataaatctgacattacttgaagaataatgtaacaratattttgatacccccatctcccaccccaacttgaaatttggaaaatataatgtgctgtacataattggatattggaaaatcacagttttttaaaataagaaaacttaaaggtattatgtatgaaccttttcatgtttggatgcactttttgcaaaagatgttctaagtgtaccttgaaaggagacctagaatttt

SEQ ID NO: 295662 - DNA, 1040 bp, Homo sapiens
cttggaacaatcctagaagcaggcaaagctgcattttatgttcttcatatattatttgaaaattactagtggtcaagaaacattccaactgtttgaattctcctctccaaacaggaaaattctgtaaaattgtttttcatatatatatgtataacacacatacattttataacacatacatacacatataagcatatactaaatgagttagtaaatatacaacactttgaactgttgcctgggatataattactggcataattacatgtgctcgttattatttttctaaatcaaaggtctggttttcataggcttaaaaaataataaaattggatgttaatggtacaagttttgaaaatatttgatattgattcaggagatgaaactgtctagaaattactcttgtctattataattaagtccagagtcttattttcagagataagtacatgatccctacttttgtgtgtcaatttgaatttaattttttaatgcatgtcttttaatactrccctttattatagatgcagacgttaatgaagaatccagtcccatttgtacaaatgccaaggagtttacwatcctctgaataaggaaccatgatgctcctaaagacatactaaatatagatcttgggtaatattggagtcagtgctggtcatcaatgattttctctgtgatgatagagggggtccactatgaatgatagcattaattttgctgtatgttcttgcatcattggtacataataattcatagacttcataagttattaatatacaagttacagaatttaataatgtaacccacctttgatatgttttcatatacattatggggaaaccatatttttttgaagtcaagaaatgtatattgcttcatgttgcaaaatttgtatgctwtgtcaaagaagcattgccagaaaatgatctgaaatgtagaacaataaagttacattatagatgtcttaggtgaaccaagagaaaaattagtgtcagagttaaaaagatgcaagtcaggaattaaggcaaaacattgac

SEQ ID NO: 295663 - DNA, 604 bp, Homo sapiens
gctgcacttgttcattaatttataattgtttacctaattcacacaggattaattctgaggtgatgctttagctatacttatgtcgcatatttctattgccctatcaatcaggcttccatcatggtggtaaagataaactttagtcatggggccccttacacctgtcctttacttaaagtacgttccctggagatttatggtgagacattccagtattctcactttctttagtgtttaatccctctactgactattcgggtaatttgggcattttaatctcrctcaccgtgggctattctgaactatcatttgagtttaatctcattcaaacttttttaagtttccaggtccagccctagcagcaagtttgtgccattctctggggaccttgccaggatgttaaatcctgtatactgaagtagtgcactatgtctacatactgtcttttaactaggcttgtgtgtgtgtgtatgtgtgtgtgttttgatcaagcaccctcagattcctgtctcactgttcctagtgataaatacttcctttttccagcaactatttcaggaataatctctttgctctccagttagtctcaatatggcatgactag

SEQ ID NO: 295664 - DNA, 590 bp, Homo sapiens
atacttcctttttccagcaactatttcaggaataatctctttgctctccagttagtctcaatatggcatgactagattatgcagcaggcctggagagaaggtggaaacatctcctgatggtagttaccatagccttgtgaggaaagctctctgtattttcctctttggaggactgttaattcttaatgagagttggaaaacatggaatacatctttaagatcaagtggttcagacaaatgtgaggyatcaagatcttttgaaacatatacacatatgtccccaaatcacatgttcaagtatcatgctttcccaactaggatcttgaatttggcatgacagacctgcctcagttggacatttaatgatctttgaagttcagctcttctgactattaaatcttttgctgattttccattttttttctgcttacctactactgcatgtgatccttctttgtgtttccagagactcagattctcacactaagtttctaattcttaattgctgtaatctttatattatccacttgcaaggtagataatgacatctaatttctttgcccttttatctattttttgccttgtatatt

SEQ ID NO: 295665 - DNA, 595 bp, Homo sapiens
tcaacaacccttcaaaaatagggggctatctaagctcagggttcctcgactgtaccacaaacccgctgtgcacgcagcatccactgagcctttctgcctggcacccatgcaacttgaggtcaagaggaactgatacaaacatgaagctcatgatgccttctatgctatgcttaataatcctctgtttctgactcacaagtttttagtaatgtctatgacactgtgataggctaacttgttagcttgcatacagggtaaaatttcatatccttcatcatttttaaaaatggaagaagtaatattagttaggacactctgattcagtagctcgcacttgaaaccaaaaaaatctgaatattaaacagtgtctactcagggagtcagctaaaaataaactagggcaaatataatgaggaaccttgctgcttcccttagtgagatcaaattcttgtcttcccaagttgacaggttcaataatttytgtccaaaaaccaaaccagcactagacagattaacagaagaaaaagcataaaaatttaataacatgcaagctcacaggggtcatacaaagtataaaactcaaagaagggtcaga

SEQ ID NO: 295666 - DNA, 595 bp, Homo sapiens
tcaacaacccttcaaaaatagggggctatctaagctcagggttcctcgactgtaccacaaacccgctgtgcacgcagcatccactgagcctttctgcctggcacccatgcaacttgaggtcaagaggaactgatacaaacatgaagctcatgatgccttctatgctatgcttaataatcctctgtttctgactcacaagtttttagtaatgtctatgacactgtgataggctaacttgttagcttgcatacagggtaaaatttcatatccttcatcatttttaaaaatggaagaagtaatattagttaggacactctgattcagtagctcgcacttgaaaccaaaaaaatctgaatattaaacagtgtctactcagggagtcagctaaaaataaactagggcaaatataatgaggaaccttgctgcttcccttagtgagatcaaattcttgtcttcccaagttgacaggttcaataatttctgtccaaaaaccaaaccagcactagacagattaacagaagaaaaagcataaaaatttaataacatgcaagctcacaggkgtcatacaaagtataaaactcaaagaagggtcaga

SEQ ID NO: 295667 - DNA, 543 bp, Homo sapiens
aggggtcatacaaagtataaaactcaaagaagggycagatgattgaagcttaaatatctcttcataacggagtgggaaatggaagatgtaggcaatttttgaggaagagtaaatgatttttaggagaaataaatgaactcacagaacccacagtagtctgggacaaagttcctttggtctctgagtgagatagcaacaaattttggtaaagcgagaggcaaaactgtactggggataacgttgtcttattatgaactatctctcaggtaaaagagcacaaaataatagatgaaaaatctgcccacgtgggtgttatttggttattgttctccatggttaatatgaccttagacaggttattgaaggcaactgtgtttcttttggaaaaactttcctcagtcaaataaggaagcttcagaaaaagtccctccctatggatgggacaggggagaaacaagggaagatgagagaccttcattttgaggcagcttctaaggccttttaattttctttaagtcaaagtcctcaggatgccaaagggcc

SEQ ID NO: 295668 - DNA, 556 bp, Homo sapiens
tgatttttgtttttgattttctttgattctgtttatgtggtgtatcacatttattggcatgtgtatgataaaccatcccttcatccctggtatgaaatccacttgatcatagtggattatctttttgatatgttgttggattcagttagatagtattttgttaaggattttagcatctatgttcatcaaggatattggtctatagttttcttttttggttatgtcctttcctggttttggtactagagtgatgctggcttcatagaatgaattagggaaggtttcatctttatcttctggaatagtgtcaaaaggattggtaccaattctttgaatgtctggtagaattctgctgtgaatccgactagtcctggactttttttttgttggtaattttttaactaccatttcaatctcactgcttgttattggtctattcaaggtgtctaattcttcctgatataatctaggagggttgcattttttcaggaattttgkttttgctttttaactcatatttttctttatagatcctatgtgatatattctttaaaga

SEQ ID NO: 295669 - DNA, 409 bp, Homo sapiens
caagcatcagaagcagactcagatatggcagtgatgttgaaattatcagatcaagcatctaaaacaactattattaatatgcttgaatgtgtaaagtagacagcaagtaagaaaaaatgaacagagagatagaaattctgagaaatattttttaaatgctaaagatcaaagggaytataacaaaaaagataatatacttgatgagcaaatcagtagactggacacagctaagaataaaagaaatctgggcttgagaatatctcaattaaaacttccaaattagaaaatcaaagagaagaaagagtgataaaaagttcccacagaatacccaagaatgaaagatatttacaaaatgtgttatatacatatgaggataacgaaaaaaaaatggggaaaagaagaaaataat

SEQ ID NO: 295670 - DNA, 1140 bp, Homo sapiens
ctgtgcattaacttcagtccaagatcaagtgtctggtgaaggagtatttcttggcttatagatggctgcctcctcaatgcaacctcacatagcagacagcaaagatctctctgggatctcttttataagggcatttaatctcattcatgagggctccacctcaataatatgattacctccaaaggcctcatctcctaacatcatcatgtaaggggcttaggatttcaagatttggagaggaacacaaacattcagtctatataacaggtgacttgtttttcatcaatagaatatcagaatatgatttgattccaaaactaccttaacagaaagctaaaatagggggtattggcttggggacaaggtaaaagatataagctaggtggatgaagggtaactaatgacaacattcacaaacagaaacagctctttgtgccttactctgaccttaaatcataatgcttgtcgcttttgaataccgtgcaaatttctctatggccaacctaaactggaacaacacagggtaaggaattttgaaaaaccttgtttctgcttaattaaactgatttgaaaccacacactrtatttgacatgaaaaatatagccacagctgwaagtgctttttgttatacttgaaacattttacaaaatgatttgaaatgcacagctacagttttcaaaaatagacctaattatattctataaaatgaagattggcaaatttaacatatatgagacacacatttatcaaactatttatcttcctcttctttagaagcatttaaaataaaaacgatcaccaggagtcaatattggttcacttaaaacaaactatgtttgaccttttctttttttctgttttgttgttgttgttgttgcttttatttatctattttaggactgttattctggcagactaaagaaawctgttaagcattgatattcatcagtgttctttgaatgagagtaatatactgaacacaagtgagaaacatgaatatgagtattgtgaaaccatccccacaagattgacaagaattgcatgctgtgtttagacagacatatagttactatataattaagcattaatcaggctgcacttccttgttgctaaaagtcacttagcactagataccccct

SEQ ID NO: 295671 - DNA, 611 bp, Homo sapiens
agcatgcgcagtgtatttactggagttgtatacacactcgcttggggcattcttcccttaccaggaagaataccagttaaatgccacctttttgcctcttaatgcacatgcatgagcccacttgcccaactcctgagatcttattgagaagrtaatctcaattttaggttttttctatctattgggagactgcctttccctggcgccagcttcagccaattattttttagagaggcagcttaacaactgcctgaccatcttccagtggttgctagcattcttggtatggggaggccctcttctgccctgttcatgtctgactagctgcctactataacagctttcttttaaatgtttcagagtagatctctttcttcattctttatttcttttaacctactgtaaatgtatttacattttttatttatatatttatattatgtatcatatttctaagaaatttttatacatgctgtatttatcttcaaagtagttttcttccataaagcatttgagttttgttattttatctgatttacaaactctgtcttataattggagtgtttagacaatttactttgagttaactattgatatggtcatatttaaat

SEQ ID NO: 295672 - DNA, 555 bp, Homo sapiens
agttgcgttagacttaagggagctgtttcccccaaggttaagccttctcctcagggcaatttgtatccaaaaactggtcaaaatggtggtaccaaaaaaaaaaaatagtgctacccttgcttcaacgggtggagggttagacaacttagagggcatgtcctagcttgaaagctgcttagggtattaattgaagtccttgttgaaaatactttgcagtttaactactccgtgtatccaattctgtttatctcactctctcacaggtgtttattccttcccccaataaaccattctatatgcaaatttccataaagtctatgtctgagctaacataagggtattaaaatattacttatagagcagttgactgttagtaacaggagtggtaattagtaaaattagtaatattcrtttttagtagcacttatttatttttaactggagaaggactttataagaaatcctgtcttatcgccattataaactcattattaactctgtgtatgtattttgaagtggattactgcttatgctttgattattttcttcttcact

SEQ ID NO: 295673 - DNA, 511 bp, Homo sapiens
aataaacatttcagcagaacacagtaaaaaaagttggtggtcaatgaaagctgctcttctctcttcctttcctgcccagtgtacaagtaaaggaactaaaagaaaaaagaaagcaaccacattaagaagtgaagctgaactcaaaccagtcttacatttcagtttagtgctaagttctattcatttatttatttccttctctacatcacagctgtcttatgcacacttctgtgctagctgaaattaacactcctgctttggcagtcaaatttcttgattrtatacattgtagttttcgtgaggatgctttaaaatcagaccatttcaaaaacaaatttcttttcatatcttatatgcattgggaagaagttttccaaacatattaaatcctcccatcccagaaattctcaaggctaaatgaacacagcatttaacagtaatagactacttttcaagtacccatgcaagatattggagaagccttaaaagaccaacatacatttacaaaaca

SEQ ID NO: 295674 - DNA, 512 bp, Homo sapiens
gaattccaatatcaaggcactagtagatttagtttctggtgagtacccaccytctggttcatagatggcaccttcaaattttaactgtgtcctttcatggtggaaggggcaaaggagctctctggagccttttatcataagagaactaaccctattcacgagggctccacccttagaacctaattacctcctaaaggtccccaccttctgatatcatcacattggtgattaggtttcaaaacatgaattttggggagacacaaacattcagatcatagcagacagtaaacaggtcaatgaaataaatggatattaaagacatctggtaaaatactctgatgcatttatctgaccacagggacactcaacaatgaatctccaacatgccagaccactggcgaaagtcctttattttctcaatagtatttagaatggcctaaagaaagtttaattctgtgattttatctgtcacaaatactttatgttttaattattaattaaatcatttctgg

SEQ ID NO: 295675 - DNA, 602 bp, Homo sapiens
gtagtgttggagaagtttcctgttgtactcgcatctgagcagactgttctgtgaacaaagccagcctttttttatcctacatcagttggccataagggatatccttcttcctgacatgtagcaataagcaggagccaaagaataaatgcggaagtgataatggtgtgccctctgggccatctgctcgtgcatcttacttgtgccccttgaccctgttcttgtcagatcccagatgttccatttccatcttatgatggattgctgttgggcctgcacaagtttatgattttgtgtatctgacataaaccaaaattataaagaattgttctgrctgcatagtcacaatatgtccctccttctatatcatgtcccagtaggaatccaagacctattatttgagtggcctattctgtgctggaaaaggcactgtcatgcatgtcacttattgggatgtactctcagaaacaatatctgtaaaagatgaacaaagcaagattggtcagggaaaagagttaaactgtgatgatgttacaacagtaacctcagttaatctctcagggaactctgaggcttaaatggctgtctagagataccacaaaatg

SEQ ID NO: 295676 - DNA, 538 bp, Homo sapiens
atttttggtgttaaaatgtcaagtaaaggtctgaactatttggaaacatttcagttttcatgttcaatagataagatgccaagaactcacaatagaagatgagggttttgagaacagtcacctctaattaggagagaatatcgtatttgtaggctgatttcttccatatctcttgctaatatttttttctgcttgacttagcatgtctcttattatagtatttggaggataatggaaattggattaaggcagcaaaatgctgaaatgggagaaaagagtgtgtgtgtgtgtgtgtgtgtgtgtgtgtgtgtgtgacttttatgtgttttagtaaaaaagtagttctttaaactgtgtgagagattccatagccttgttcccattaagtagcaaacaccagggcttatacaaaatgttctataatgtttcagrtcaagctaaagctatcttctctttcttatcttagaattccaaatgttcatgaagccacaaaaaatacgatggagtcctaatgcttttatcaggataacaaaagtac

SEQ ID NO: 295677 - DNA, 589 bp, Homo sapiens
gactcaactgccaaatggggtgactcctagagtccttatcagttttcacgtagttctgtaaagcaatttagagccagaagttaaatgcaaaagagtttgaaaaattacttgagcatacctaaaattgcggtgttgaccattttctataatcaagtaatattcacataggagcttgaattccttcactagggctttctgtgatccacttagtttttgcattatattatattactttagtattaatgtaactgtgattaaataaatggcatatagtaatttagatggctaataaaatggaaacctttaatcaccatttttcartgagcttcagaaatattttcaagataagtgtgaccgaccatttttaaagaattctagaattaaatgcaagtgttctctctctttttccctagaacttggttattttctgtttttggtgtgtatgattgtacgagtttcctaggactgctataacaaagtaccataaacctgtcacttaaaacaagaaaaattgattttcacaattctgaaggctagatgtccaaaatcgaggtgctggcagggtcaggctccctttgacatccatagg

SEQ ID NO: 295678 - DNA, 589 bp, Homo sapiens
gtacctattttttttcctttttcttataaagacaccagtcaaattgcattaagcatcaaccatacaccagtatgacctcatcttacttcaactgttacatctgcaattaccctagttctttttggttggttgttttctttttctttttctttttcttttctttttttttttgagacagagtctcactctgttccccaggctggagttcagtggaacgatctcggctcactgcaacctccgcctcccaggttcaagctattctcctgcctcagcctcccgagtagctgggactacaagcacgtgccaccacatctagctacttttttgtatttttagtagagatagggtttcactgtgttagccaggatggtctcgatcccctgacctcgtgatttgcccgccttggcctcccaaagtgctgggattacaggcrtgaaccactgcacctggcctaccctatttctaaacaaggtcatcttctgagatattagaggttaggacttccacgtatctttttcaaggacaaaattccacccaatacaataatataatacagatgaaataactcagaaatgcaagcacagcttca

SEQ ID NO: 295679 - DNA, 518 bp, Homo sapiens
ctgatcaacatgcagtcctgactatttcagtacataccagtagaatgcattaacctcgaaaacaattcctttttttcattagctctcagacaggaactacttaatttacacaaaagataaggtactggaagactttaattattattctttttaatcactgctgtggcctttatcacttttcccggatagaatttactttttgtagtgtttgtttttaaaataacaaatgcttatttaaaaaaaaaattttaacatatttatattatggaaaacattttcttttaatatattttctttttttattttgagctgtattatctattaaaataaaactcaaaatgcaacatttgtaaacgtttttagtataaaacacttaacataaaatgtatcatcttaactatttctaagtatacagttcggtagtgttaagtgtattkacattattgtgcaagctggatatattatgttttataaattctacattttctaacactaatctattttgtgggagtatttgt

SEQ ID NO: 295680 - DNA, 509 bp, Homo sapiens
atatcctggaaatttaggaatgtaatatctragtcactatcagaggccatgttggtaaccctcacattgagaatatggccttctctagccttgaccccagaaaagaatgaaattctagatgatgagcttgaggaaatgattgctgagatttcaacaaacatatacctgtactccattctcctaagagatcatataacttcaaagcgtaagtaagatagctatggacatatgaatatgtatctgctgataggtatgagatttatgaaggaaacagttagtacggaagtgaagaataaagatctgagccctcccaggtatcagaaaaactatattctcttgttatttcaatatgctttatgaatagtccatggagacctaaacacatttcataagtcctctaggacttcaccattggatcatgaaccaggatttaacttgaaccatgtgctggatccttccgtttcaccacaaatgtttattctggcaaattttgaccataatttcaatca

SEQ ID NO: 295681 - DNA, 1019 bp, Homo sapiens
atatcctggaaatttaggaatgtaatatctgagtcactatcagaggccatgttggtaaccctcacattgagaatatggccttctctagccttgaccccagaaaagaatgaaattctagatgatgagcttgaggaaatgattgctgagatttcaacaaacatatacctgtactccattctcctaagagatcatataacttcaaagcgtaagtaagatagctatggacatatgaatatgtatctgctgataggtatgagatttatgaaggaaacagttagtacggaagtgaagaataaagatctgagccctcccaggkatcagaaaaactatattctcttgttatttcaatatgctttatgaatagtccatggagacctaaacacatttcataagtcctctaggacttcaccattggatcatgaaccaggatttaacttgaaccatgtgctggatccttccgtttcaccacaaatgtttattctggcaaattttgaccataatttcaatcawatatcctggaaatttaggaatgtaatatctgagtcactatcagaggccatgttggtaaccctcacattgagaatatggccttctctagccttgaccccagaaaagaatgaaattctagatgatgagcttgaggaaatgattgctgagatttcaacaaacatatacctgtactccattctcctaagagatcatataacttcaaagcgtaagtaagatagctatggacatatgaatatgtatctgctgataggtatgagatttatgaaggaaacagttagtacggaagtgaagaataaagatctgagccctcccaggtatcagaaaaactatattctcttgwtatttcaatatgctttatgaatagtccatggagacctaaacacatttcataagtcctctaggacttcaccattggatcatgaaccaggatttaacttgaaccatgtgctggatccttccgtttcaccacaaatgtttattctggcaaattttgaccataatttcaatca

SEQ ID NO: 295682 - DNA, 599 bp, Homo sapiens
tctgcttttctcagtctactgatttcagtgttcagccatctaaaatataccttcttagaaacatctagactggtgtttgatcaaatatctgggtactgtggtctagccaagttgacacatcaaattaaccgtcagaactcataaaggagcctagagccctctcaatcttgtttcttatctttcacctcaaaactcctcccagatctatgactctgaggactaaactactaacagcataacatttggctctactttcagaggggtttgtaattcagtgagggggggaaaatgtttttaacctaaaatgattaaatactcaatataaatatactttcaatttcactttattagcagggaatgattattttgagtaataatctttctcttggttcatatgcctagcmcataatctgttttcttttctgtgtggacacgcaatttgtcctgattataagcacccagacattgctgcttccccatgccaattgatttaattcaataacattgattaagtgcccaccttgtgccaggactgtgcaaataatcttaatataaaagcagataatttcataaacgacttcacagtctagccaggggga

SEQ ID NO: 295683 - DNA, 576 bp, Homo sapiens
catagacaaaaaatgaggagtactttattggaaactggaggaaaggcaatcgttattacccacaatgtggtaaagaacttggctgaatcatgttcatgttctagtactttgtagaaagcagctcttaagagcaattaactgggatttctggtggaagaaatctctaagcaaaggttcagggtgctgcattgctcttcttaactgtttatagtcaaatgtgggaagagagaaacacattaaaaatggaatttatgattaaaagggaaccagaacttaaagatttggaaaattctcagcctggccaggttgaaaacacatgtttgagagagaaaagcaagggtgtagccaagtgaccatttgacaaggaaattagtattgatggaaragagccagatattatccataaagacaatggagcaatgaccctgcaaggcatttcagagattattggtgtctctctgcacttcccatcagaggcccaggatgtcaaagcctaggagacagaactgtgtccaaaaaggggtcctgggtgcccacgggggtgaagttgccatagagagtccccactaaggcagt

SEQ ID NO: 295684 - DNA, 556 bp, Homo sapiens
tggagtggacctccagcaaactccagcagacctgcagcagaggggcctgactgttggaaggaaaactaacaaataggaaggaatagcatcaacatcaacaaaaaggtggtccacacaaaaaccccatctgaaaatcaccaacatcaaagaccaaaactagataaatccataaagatgaggaaaaaccagcacaaaaaggctgaaaatgccaaaaacmagaacacctcttctcctccaaaggatcacaactcctcaccagcaaggaaacaaaactagacagagaatgagtttgatgaatcgacagaagtaggctttagaaggtgggtaataataaactcctccaagctaaaggagcatgttctagcccaatgcaaagaagctaagaaccttgaaaaagttggaggaattgctaactagaataatcagcttagaaaagaacataaatgacctgatggagctgaaaaacacagcatgagaacttcatgaagtgtgcacaggtatcaacagccaaatcaatcaagcggaagaaaggataacagagattgaagatcaactt

SEQ ID NO: 295685 - DNA, 556 bp, Homo sapiens
tggagtggacctccagcaaactccagcagacctgcagcagaggggcctgactgttggaaggaaaactaacaaataggaaggaatagcatcaacatcaacaaaaaggtggtccacacaaaaaccccatctgaaaatcaccaacatcaaagaccaaaactagataaatccataaagatgaggaaaaaccagcacaaaaaggctgaaaatgccaaaaaccagaacacctcttctcctccaaaggatcacaactcctcaccagcaaggaaacaaaactagacagagaatgagtttgatgaatcgacagaagtaggctttagaaggtgggtaataataaactcctccaagctaaaggagcatgttctagcccaatgcaaagaagctaagaaccttgaaaaagttggaggaattgctaactagaataatcagcttagaaaagaacataaatgacctgatggagctgaaaaacacagcatgagaacttcatgaagtgtgcacaggtatcaacagccaaatcaatcaagcrgaagaaaggataacagagattgaagatcaactt

SEQ ID NO: 295686 - DNA, 637 bp, Homo sapiens
acaattatctttattatactagagagtaagcataagcaaacctattctttcctctggagagtggtacaatcttccaaggctgttcatgttttattcttgaaaagataatcctgaaaaaggaggagcaatacctcactcgcaatctatgtagaaaagtaaaagagaaatagaggtttattcttttctaaactatcttggcttctggcaaattttcccctgaggatgccactctgttggtgactgtgattaatctgacagaggctgggaattagtgtatctaattggtcttatacaagcatttagttaaggctactaccaataggattcaaatcagtggctgttgaccttctgtgytgagcttaactgtgcttcccagggtccaaggtttaaccaacagaaataaaagtcataaaccattacagtctatcttagaagccatgtggctttctttttaagtttctgtattgatggctccatttgacctgggacattaatacagttacaaaagcaattgcacagacctcatattggtttgcacctatctatccataacaaccctggccagtaaattgagctgacctgatgacttctaggactaaagtggtgtcattgaccacttcagctaaagtaagaaaca

SEQ ID NO: 295687 - DNA, 658 bp, Homo sapiens
ttagtacaatgttaattaatataaacaataatagcctagacactgtacaagtgttcaaagtgccttccatatcctcacagattcagtctctttggctaagctctgatgttgtacaggtttttatgtatttttttaactggcacataatatacatacttatttatgtggtacactataatattttaatacatttataaaatgtgtaataatcacatcgaggtttaatatattcatcacctcaaatatttatcatttgtgttgggaacattcaaaatcccctcttctagctatttgaaaatatgcaataaattattgttcattatagccaccccacagggctatagaacaccagaacttattcattctattcagctataattttgtatttgttagccaacctctccctattcccccacccttcccagcctctagtaatcactattctagtctctcctgctataagatcaactttttacattccatatatgagtgagaacatgcaatatttktctttctgtgcctggtttatttcatttaacataatcgcctctggttccatcaatgctgctgtaaattacgggatttcattcttttttatggctgagtagtattccattgtacatataaaccatattttctttatccattcatctgctga

SEQ ID NO: 295688 - DNA, 658 bp, Homo sapiens
ttagtacaatgttaattaatataaacaataatagcctagacactgtacaagtgttcaaagtgccttccatatcctcacagattcagtctctttggctaagctctgatgttgtacaggtttttatgtatttttttaactggcacataatatacatacttatttatgtggtacactataatattttaatacatttataaaatgtgtaataatcacatcgaggtttaatatattcatcacctcaaatatttatcatttgtgttgggaacattcaaaatcccctcttctagctatttgaaaatatgcaataaattattgttcattatagccaccccacagggctatagaacaccagaacttattcattctattcagctataattttgtatttgttagccaacctctccctattcccccacccttcccagcctctagtaatcactattctagtctctcctgctataagatcaactttttacattccatatatgagtgagaacatgcaatatttgtctttctgtgcctggtttatttcatttaacataatcgcctctggttccatcaatgctgctgtaaattacgggatttcattcttttttatggctgartagtattccattgtacatataaaccatattttctttatccattcatctgctga

SEQ ID NO: 295689 - DNA, 624 bp, Homo sapiens
tgcgcttccctggtgaggtgacaccccaccctgcttcggctcaaccagtcccaatgagatgaactgggtacctcagttggaaatgtagaaatcacccacctcctgcgtcgatgtcactgggagttgcagaccagagctcttcctattcagccatcttgccagcaatcccacattcctctttctaggcaacttaacatagcaaaagaataaagtgactacaactaaatcagctgaaaccactagatttactggacaaagtgctctgagttcattgacagttttcaattatctgtgtgtatcacagaaagtgtaagtacayaatattaaggtgttcacttaaaagtaatatttaccctatgtactctggatacttgaaaacagttcagaagcatgttcttgctttaaattcataggaaaattatattactccctcatttactattaagtttactaagtgctatttatgcatgtgaatacaaggaagcacagactctttaatttaattatcagacattgatatgttactgtattttgaacaccagactggcaattgtttcaatttgaaacaatcagccagctgaaaaaaatctaaaatcacttaaaccttaaaaatttgttttgtta

SEQ ID NO: 295690 - DNA, 565 bp, Homo sapiens
agattgttaacccttaaaaaacagaaaaaaaaaaaagaaatcaacaagttagaggcaaataagtgtgaaagaaagtggrtagtctatttggggattctgaaagtccctgaggaaagttgactttggagaccagatcacgaagcacgacctcttaattgccgaccttttgttatagattaactcccttattttcttgttcccagctcagaccagatggcatctgagataaaatacgcattgaataagataaatgaccgcttgactattacatccttaatgtggaatgttaaatagacccttcccaaaaagaaacactgccttgaaccaatcaaattgctatgcgttaaccttctatggaaaatgttgacatcctgttaagcttcccagaccctgcctgtgtaaacgaccctcaaacttctccctttcgaagcactgacccccatcttttggagtctgtgtcctaccgggtcgccatcctcaaactttgcactcaaataaaccaatatttaatcatattgcccgaatctcattattaaggtttacgtaagcgtttacttagtaatga

SEQ ID NO: 295691 - DNA, 477 bp, Homo sapiens
gaaaccactggaagaatttaatctaggagggcaaaataacagagttgttttatcagtaagaaatctgttacagtatgacatgtgaaagagaacagaagtttgactagctagtactagggaatttgatgacccatggataaattaagtatacatttctaagctaaaatctattgcaaaaatttctgaaatttttctttagagaaagttggtagatatgcacatttgtaggcagtatctcatagtgataaaaagcaaaacaccatctttagggttagcatgtgtattagtccattttcacattgctaataagacatacccaagactgggcaatttataaggaaagagaggtttaatggatkcacagtttcacgcggctggggaggcctcacaatcatggtggaaggtgaaaggcacacctcatatggcagcagacaagagaagaaagaacttgtgcagggaaactcccctttataaaac

SEQ ID NO: 295692 - DNA, 529 bp, Homo sapiens
caaaataacagagttgttttatcagtaagaaatctgttacagtatgacatgtgaaagagaacagaagtttgactagctagtactagggaatttgatgacccatggataaattaagtatacatttctaagctaaaatctattgcaaaaatttctgaaatttttctttagagaaagttggtagatatgcacatttgtaggcagtatctcatagtgataaaaagcaaaacaccatctttagggttagcatgtgtattagtccattttcacattgctaataagacatacccaagactgggcaatttataaggaaagagaggtttaatggattcacagtttcacgyggctggggaggcctcacaatcatggtggaaggtgaaaggcacacctcatatggcagcagacaagagaagaaagaacttgtgcagggaaactcccctttataaaaccatcagatctcatgacacttattcactatcacaggaacagcacgagaaacacccctaccatatgattcaattacctcccacga

SEQ ID NO: 295693 - DNA, 647 bp, Homo sapiens
gtaatacatactcaataaatatgtgttactcttaaagctttgtgcgctaacactgaaagacacttgaatctttatcttttttctagcytatcaataattaagcagatttggagggcttaggaaaaataatagaaatacctcaaattttacttgttacttcaaatgtctggagatcttggatttgggtgatggtatcagtatgttttttattttgaattgtctatttagagaaactaaataggaaccaataattcagaaaactgtacaaaattagcaactcaactttgtttcatctccctaaaatggaaaaacatatgtgtatacatccctatagcacacataaacttagaagaataatatcttagtgcatggcaacaatacaattaaaaatgtaggccaatcactgtgattctttttctggtattcatatctaaagtatcttatacataaaatcaaaatagcacaaacgttagtagcacagatcagaccacctcatttcaaatactaaatcttctacatgtcatctaagtgaactccagcaaaatttgacttctgtcttcttcaatttaaaactaacttacaggcatgcctcggaaatattgtgggttcagttccagaccaccacaataaagcaattattgcaataa

SEQ ID NO: 295694 - DNA, 477 bp, Homo sapiens
aatgacaatattgaacagagaatttccacctgagagccatgtactgccttgctatggaattttaactgaagccacccctatgctaataaaaatgatggtgcccaaaagagttccataaaaaaataaaaatgatttacatagaatcttgctacctggggatattaggagaaaatactgataagtagggggcctctttcctagattctaccatgcctgatagacagctttcatgagctgttggcttgtaaatggcatttcccaaataaacattgtttgaaagctctggctctggttaaagcagggtcaacaaaatctttttcttttgagttatttgagtgaagtatgtttttgtaagcaaatttatatttctctttgagttctaaaatttggattgtgattttatgacagtatagtcatttgcataaattcaaaaagcatcttttaaaayaaaagaatttgagacactggttattttac

SEQ ID NO: 295695 - DNA, 616 bp, Homo sapiens
cctgggctgtctatcagatattaacattttatagatgagaaacatgaatgttctcaggcccagaaamctcaagttgttttgggacctcaagaaaagaggaattcacccaattcatacaggtatctgcaagcacagatcaattattggttgtgctcgagaggcctttaaaaatcaaatctgagattccttatgaaaagttccagcaaagccaatttaaaaaagcctatatgaacaataattcttgcttcagtttatgcaaataatcaggcaaactataataagattaaaacagattttgcaaataaattggtcctactgtgatttgcctttcatggaaatggggagctggagagagaaacattatgttttggaagaaaactgcagtacacctgttattagattaatctttgacctatggcaacctggtcatccatggtatggagatacatctgtgctgtgctgcattcagttattaaaagtataagttaccagtggaatttagatatggattcatcacctcagaagttggttcactggatgcataaggaaataaaaactaatttttaaaaaagcaaaattttcaatcccttggtttttgttatcgatataaaccaaa

SEQ ID NO: 295696 - DNA, 616 bp, Homo sapiens
cctgggctgtctatcagatattaacattttatagatgagaaacatgaatgttctcaggcccagaaaactcaagttgttttgggacctcaagaaaagaggaattcacccaattcatacaggtatctgcaagcacagatcaattmttggttgtgctcgagaggcctttaaaaatcaaatctgagattccttatgaaaagttccagcaaagccaatttaaaaaagcctatatgaacaataattcttgcttcagtttatgcaaataatcaggcaaactataataagattaaaacagattttgcaaataaattggtcctactgtgatttgcctttcatggaaatggggagctggagagagaaacattatgttttggaagaaaactgcagtacacctgttattagattaatctttgacctatggcaacctggtcatccatggtatggagatacatctgtgctgtgctgcattcagttattaaaagtataagttaccagtggaatttagatatggattcatcacctcagaagttggttcactggatgcataaggaaataaaaactaatttttaaaaaagcaaaattttcaatcccttggtttttgttatcgatataaaccaaa

SEQ ID NO: 295697 - DNA, 616 bp, Homo sapiens
cctgggctgtctatcagatattaacattttatagatgagaaacatgaatgttctcaggcccagaaaactcaagttgttttgggacctcaagaaaagaggaattcacccaattcatacaggtatctgcaagcacagatcaattattggttgtgctcragaggcctttaaaaatcaaatctgagattccttatgaaaagttccagcaaagccaatttaaaaaagcctatatgaacaataattcttgcttcagtttatgcaaataatcaggcaaactataataagattaaaacagattttgcaaataaattggtcctactgtgatttgcctttcatggaaatggggagctggagagagaaacattatgttttggaagaaaactgcagtacacctgttattagattaatctttgacctatggcaacctggtcatccatggtatggagatacatctgtgctgtgctgcattcagttattaaaagtataagttaccagtggaatttagatatggattcatcacctcagaagttggttcactggatgcataaggaaataaaaactaatttttaaaaaagcaaaattttcaatcccttggtttttgttatcgatataaaccaaa

SEQ ID NO: 295698 - DNA, 616 bp, Homo sapiens
cctgggctgtctatcagatattaacattttatagatgagaaacatgaatgttctcaggcccagaaaactcaagttgttttgggacctcaagaaaagaggaattcacccaattcatacaggtatctgcaagcacagatcaattattggttgtgctcgagaggcctttaaaaatcaaatctgagattccttatgaaaagttccagcaaagccaatttaaaaaagcctatatgaacaataattcttgcttcagtttatgcaaataatcaggcaaactataataagattaaaacagattttgcaaataaattggtcctactgtgatttgcctttcatggaaatggggagctggagagagaaacattatgttttggaagaaaactgcagtacacctgttattagattaatctttgacctatggcaacctggtcayccatggtatggagatacatctgtgctgtgctgcattcagttattaaaagtataagttaccagtggaatttagatatggattcatcacctcagaagttggttcactggatgcataaggaaataaaaactaatttttaaaaaagcaaaattttcaatcccttggtttttgttatcgatataaaccaaa

SEQ ID NO: 295699 - DNA, 523 bp, Homo sapiens
tccagcctctgtgatcacacacagaaggatgagccttcctcgtgagggttggagatggagggagaagggatggagagtaaggatgggacggaggttgtggagcagcagaccaacacgccaggtgggtgaggttgtgtgattattctagcatcttttcttgatcaaagcttgcacccttttagcattgggagggaagggcagggtaggggatagcgaccataatatagrtcttaagtaaaagcagttttcattaataaaacaaagacttcaataataatgataattggcgattccagcctcctccatcatattggaaaagacagtatttcattaaaaatacttggaattttcccttggaaaaggcagtattttattaaaagacgctgcgaggaaactgttggttttctgttctggaagcagggcagaagaattagtaacacagttctgccaaatagcacaggaaagtggagccaaagcaccttcgaggctcctgatgttcaaacgttaggtcttagttcccttt

SEQ ID NO: 295700 - DNA, 530 bp, Homo sapiens
  misc_feature (1)...(530): n = A,T,C or G
atcacactcaatataattgggacagaatttttcaaatgattgggttgtatgaagattttatttctttatgagatgaagccatggaaaaagaacatgttcaggaaagtcatgatttctcactcgngtgtgtgtgtgtgtttttttttttataaraaaatgctttgtgtcagacagagagccctttataggatttcatttgactatctaccaaactaagcataaatcaccctaaaatttttcctacttcttttggagattttttactatcttactaaaaaataaaacatgttaagttaaatgaaatgaatcattaaggaataaaggaagaaaagtggctcataaataggggaagacataatatattcataatattcaaaaccacattatatcaagtaactttgcatttttcaattaaaattaaaatcatgaaataagtggtccatctgtggtgactttcacttacacaaaactactcttcatcttactcagaatcctatagtttcctattatgaatggctatggccttccgc

SEQ ID NO: 295701 - DNA, 530 bp, Homo sapiens
  misc_feature (1)...(530): n = A,T,C or G
atcacactcaatataattgggacagaatttttcaaatgattgggttgtatgaagattttatttctttatgagatgaagccatggaaaaagaacatgttcaggaaagtcatgatttctcactcgngtgtgtgtgtgtgtttttttttttataaaaaaatgctttgtgtcagacagagagccctttataggatttcatttgactatctaccaaactaagcataaatcaccctaaaatttytcctacttcttttggagattttttactatcttactaaaaaataaaacatgttaagttaaatgaaatgaatcattaaggaataaaggaagaaaagtggctcataaataggggaagacataatatattcataatattcaaaaccacattatatcaagtaactttgcatttttcaattaaaattaaaatcatgaaataagtggtccatctgtggtgactttcacttacacaaaactactcttcatcttactcagaatcctatagtttcctattatgaatggctatggccttccgc

SEQ ID NO: 295702 - DNA, 558 bp, Homo sapiens
agtttttatatacattttaacaaatattttatttgctctgcttatcagtattttatgatttttttctatagctattagccaagaaaaataatattctgtttgattttaaatgcattggtcactctgcatctttcttatctttccttagagagcagaatcaaacagaaaacagttgagtcactgaaacttttctatggggaaaacaattgcagtccttaactgtttagattatacatttaaatatagaactattttagttacactgttaattaaatccattgttctcgaactgtctggggaagtgtccttttaagcatagcctcatcaaacgttaagaaggctcarcaactttgaaattcatgtttcgatatcagcttcatcgtgggagatcacaattttttaatttgtttgaaaggcagctatgctaaccacattctaccaatgccactaatttttctgataactcatgtaaataattacagcctcctaaataagtattgagaattcagtaacaatgaaaagattctgggaaattaaaaacaactgaaaacaacttat

SEQ ID NO: 295703 - DNA, 515 bp, Homo sapiens
aaagataagaaacctcatcagaaagagcttgattttttaacacttcttttttctactaatttggggtttggtttgttcttgctcttacaaatcctttaagttcatcattaggttatttatctgaagtctttttacctttttttaaaggcatttattactataaacttccttctttgtactgcttttctgcattccacagattttagtttattgtgcttccattttcatttgtttcaagaaatttttaaaattttcttaatttcaacattgactctttggtcrttaaggagcacattatttaattttcatgtttgtgcagtttctgaggtttctcaagttattgacttctagtttcatcccattgtggtcagaaaagatacttgattagatttctactttttttaatttattgagacttgttttttggcctacaatgtggtctgttctggagaatgctccatgtactgataaaaataatgagtattctgcagcagtgcttctgtacgtgtcagttg

SEQ ID NO: 295704 - DNA, 515 bp, Homo sapiens
aaagataagaaacctcatcagaaagagcttgattttttaacacttcttttttctactaatttggggtttggtttgttcttgctcttacaaatcctttaagttcatcattaggttatttatctgaagtctttttacctttttttaaaggcatttattactataaacttccttctttgtactgcttttctgcattccacagattttagtttattgtgcttccattttcatttgtttcaagaaatttttaaaattttcttaatttcaacattgactctttggtcgttaaggagcacattatttaattttcatgtttgtgcagtttctgaggtttctcaagttattgacttctagtttcatcccattgtggtcagaaaagatacttgattagatttctactttttttaatttattgagacttgttttttggcctacaatgtggtctrttctggagaatgctccatgtactgataaaaataatgagtattctgcagcagtgcttctgtacgtgtcagttg

SEQ ID NO: 295705 - DNA, 576 bp, Homo sapiens
tggggatggtagtcctgcctccccactttgtctctgcctgtcctcgttcaggcaccccgatgcttcccaagtgttaaggcaggggcaagtttcctgccaggaaactcaagctggtggggaagctggttatccatcttgatctcactttttccagtatagaaatgatgtttccatgcccttgggtaccggaaagattgcagggagagtcctcatggatatggaagtctaattctcttattatctgtatggagttttttgttggtttttcactttcctgtggctccaggaattgtcttcttctcatatttgaattctaggatattgctggggataatcacagcactaatattttgttgttgttttctgtgggggacattaaagccaacttacttttatgccatcattttggagccagaagtctcctaaatgtctttatttttatttytcaggtatgatgaccaaacataaaaagtgttttataattgttggtgttttaataacaactaatattattactctgataggtaagttacatcctttattttatttttcatggctttctatgtgtgatcctat

SEQ ID NO: 295706 - DNA, 576 bp, Homo sapiens
tggggatggtagtcctgcctccccactttgtctctgcctgtcctcgttcaggcaccccgatgcttcccaagtgttaaggcaggggcaagtttcctgccaggaaactcaagctggtggggaagctggttatccatcttgatctcactttttccagtatagaaatgatgtttccatgcccttgggtaccggaaagattgcagggagagtcctcatggatatggaagtctaattctcttattatctgtatggagttttttgttggtttttcactttcctgtggctccaggaattgtcttcttctcatatttgaattctaggatattgctggggataatcacagcactaatattttgttgttgttttctgtgggggacattaaagccaacttacttttatgccatcattttggagccagaagtctcctaaatgtctttatttttatttctcaggtatgatgaccaaacataaaaagtgttttataattgttggtgttttaataacaactaatattattactctgataggtaagttacatccttyattttatttttcatggctttctatgtgtgatcctat

SEQ ID NO: 295707 - DNA, 545 bp, Homo sapiens
tagtcaattttcatggaatcattatcttaatattgaatcatacatttaaaatattgattcggtgttccgtaatttctgccagcaattttttagttttcagaatagatttcacacacatccttttaagaattttttaaagactcaatgcgctataatgcaattgtaactagcatagaagtattttcattaacactattgtcctatttagtctsttgctggcctataaaattatctatataaatttaatatatacctatataagcctcatatagcaaatttgctatagttaactattcattttcataaattttcttcagtttcttttgcaagttctatgtaaaaatttacattatctgaaaataataattgttttacctattctgttggaaaccttatgccttttttattcattgtattctcttattttattggctataacttccagtataaggttgagtataagtagtaacagcttacatgtttgtctcattcttaaatcagtaaaatgtttttaatatttcccaatttagtagtagtatttgcag

SEQ ID NO: 295708 - DNA, 596 bp, Homo sapiens
ttgtaactagcatagaagtattttcattaacactattgtcctatttagtctgttgctggcctataaaattatctatataaatttaatatatacctatataagcctcatatarcaaatttgctatagttaactattcattttcataaattttcttcagtttcttttgcaagttctatgtaaaaatttacattatctgaaaataataattgttttacctattctgttggaaaccttatgccttttttattcattgtattctcttattttattggctataacttccagtataaggttgagtataagtagtaacagcttacatgtttgtctcattcttaaatcagtaaaatgtttttaatatttcccaatttagtagtagtatttgcagatattcttaatcagattaaaggtgttttatttacttccctttaatttaatttaaaatatcaaatgctttatcttgatctattgagatactttcttttctctgctaatatgtagaactacacagattttgtaatattgagataagataatcttcaatttctgtgatagattcaacttgatcataacctattaaccttttaacattcttcaat

SEQ ID NO: 295709 - DNA, 596 bp, Homo sapiens
ttgtaactagcatagaagtattttcattaacactattgtcctatttagtctgttgctggcctataaaattatctatataaatttaatatatacctatataagcctcatatagcaaatttgctatagttaactattcattttcataaattttcttcagtttcttttgcaagttctatgtaaaaatttacattatctgaaaataataattgttttacctattctgttggaaaccttatgccttttttattcattgtattctcttattttaytggctataacttccagtataaggttgagtataagtagtaacagcttacatgtttgtctcattcttaaatcagtaaaatgtttttaatatttcccaatttagtagtagtatttgcagatattcttaatcagattaaaggtgttttatttacttccctttaatttaatttaaaatatcaaatgctttatcttgatctattgagatactttcttttctctgctaatatgtagaactacacagattttgtaatattgagataagataatcttcaatttctgtgatagattcaacttgatcataacctattaaccttttaacattcttcaat

SEQ ID NO: 295710 - DNA, 596 bp, Homo sapiens
ttgtaactagcatagaagtattttcattaacactattgtcctatttagtctgttgctggcctataaaattatctatataaatttaatatatacctatataagcctcatatagcaaatttgctatagttaactattcattttcataaattttcttcagtttcttttgcaagttctatgtaaaaatttacattatctgaaaataataattgttttacctattctgttggaaaccttatgccttttttattcattgtattctcttattttattggctataacttccagtataaggttgagtataagtagtaacagcttacatgtttgtctcattcttaaatcagtaaaatktttttaatatttcccaatttagtagtagtatttgcagatattcttaatcagattaaaggtgttttatttacttccctttaatttaatttaaaatatcaaatgctttatcttgatctattgagatactttcttttctctgctaatatgtagaactacacagattttgtaatattgagataagataatcttcaatttctgtgatagattcaacttgatcataacctattaaccttttaacattcttcaat

SEQ ID NO: 295711 - DNA, 613 bp, Homo sapiens
tatatacatatatatatacacactgtgtatgtatataaaattttatcttctatagactcttggcascagatgactataggtgataatttaactgattattttgctactatgctccactgccatcagcattctatttataactggtagttggatcaatgcctttaaagtgaatgatattgaaaaactaacaccatatctcatcctcaaggttctgtttccttagaatcatgtttggtgccaaaaactgattcagtctgggtgtgttccaaaatacaaacacatattatgagaataaggcttttatgtagaaattagggataacatgaatgtgggaagatctggaagtgatgcatagctcaaggctggggctgtgctacaagctggaggagaaatggtcactaataatattggcataatgcactcatgcatttggaggaaagtctaagaagctaagatatctagctgccaaggctgcaacaggggaacacatggaaagacctgtgaagttcctatgctcatggtctccaggaattatatcttctgctttacttccaccttccaaatctcatgttagttccattcattggctaaaccggagctatacagtgatggt

SEQ ID NO: 295712 - DNA, 486 bp, Homo sapiens
actgttccactcaacatgccgacctaactataattgacaacatagaagaaatggtaagtaatttaatatacattctttgtgaattttcttgagtcggagcattagaaatattcaaacacyattataatcttgaagtcttttcactcatgcctatctatgcagaaaattgaagatgttcagagtatgccatgtgacataaaggtgaaacacctagtgatgctttgtttgaagaatgtaagactaacatcaagtagtagacttaatacctatctttatattttaaagagtgtacacagaagagcttgataatgtttgaaaacgttttaagagccaatactccaccaagaaaggagaattgtctgaggaaggaggggattctgcattctacttcctgagagaaactttgctctgacttctccattttgttttgctgcctgtctctgaggtcccgtggcagcttccattagaacactctctaccagtaat

SEQ ID NO: 295713 - DNA, 621 bp, Homo sapiens
aaggcctttgaatataggacaatgtttttattaatctgtttatttgtaaagccaaaacttagcccaactaattatttttttcaaattagtttatgcaatgctgtgaagatagtgtattraaatgtcaaaagtcacaggtgtcactgttggggcagataggatttgactatagtggtgtgatctggcctacctcctttatatttctcttaaattgaaaagtagagtgatacagtgtgaatatagtttccaagctatttagtagcagagtagcctcaaggactttctcatgtaattctatgattaaagaaaaaggtcgagggttaagcaaggtcgaggtaagttaaacaatgcatcagaagaagaaatgtcaggaaaaaaagcattgtatttatttctgaatgatgtatttggaaatttaaatgttcagcagaaaaataaaatttgataattaggttctaaagaaactggatatatgaggatgtgtatgtgtgtgtatttacctatgtagtttgggaagataaactgaagtaaaacataacactaaaatgaagctactactatttactgggaagtggacaaatagtgtaataaatatgtggtaattggaaatgctgtgcgaga

SEQ ID NO: 295714 - DNA, 621 bp, Homo sapiens
aaggcctttgaatataggacaatgtttttattaatctgtttatttgtaaagccaaaacttagcccaactaattatttttttcaaattagtttatgcaatgctgtgaagatagtgtattaaaatgtcaaaagtcacaggtgtcactgttggggyagataggatttgactatagtggtgtgatctggcctacctcctttatatttctcttaaattgaaaagtagagtgatacagtgtgaatatagtttccaagctatttagtagcagagtagcctcaaggactttctcatgtaattctatgattaaagaaaaaggtcgagggttaagcaaggtcgaggtaagttaaacaatgcatcagaagaagaaatgtcaggaaaaaaagcattgtatttatttctgaatgatgtatttggaaatttaaatgttcagcagaaaaataaaatttgataattaggttctaaagaaactggatatatgaggatgtgtatgtgtgtgtatttacctatgtagtttgggaagataaactgaagtaaaacataacactaaaatgaagctactactatttactgggaagtggacaaatagtgtaataaatatgtggtaattggaaatgctgtgcgaga

SEQ ID NO: 295715 - DNA, 621 bp, Homo sapiens
aaggcctttgaatataggacaatgtttttattaatctgtttatttgtaaagccaaaacttagcccaactaattatttttttcaaattagtttatgcaatgctgtgaagatagtgtattaaaatgtcaaaagtcacaggtgtcactgttggggcagataggatttgacyatagtggtgtgatctggcctacctcctttatatttctcttaaattgaaaagtagagtgatacagtgtgaatatagtttccaagctatttagtagcagagtagcctcaaggactttctcatgtaattctatgattaaagaaaaaggtcgagggttaagcaaggtcgaggtaagttaaacaatgcatcagaagaagaaatgtcaggaaaaaaagcattgtatttatttctgaatgatgtatttggaaatttaaatgttcagcagaaaaataaaatttgataattaggttctaaagaaactggatatatgaggatgtgtatgtgtgtgtatttacctatgtagtttgggaagataaactgaagtaaaacataacactaaaatgaagctactactatttactgggaagtggacaaatagtgtaataaatatgtggtaattggaaatgctgtgcgaga

SEQ ID NO: 295716 - DNA, 602 bp, Homo sapiens
tataaactatcctgtccaattatatgactcttctttaaactttttgttgactattttctgatgtcttttacagttcaatttcaatttgacgttcattttcatctgattttatttgcaatttcactgttatgcagtttgtcctggacttcatatctttagcattataatttggaaaatgtgtgtacacatcccaaatggtgactctcagtcacttagccacttagtttatgttagtttctcaatagaaacactactgatattttgtactgaatacctctctgtygtggaaaaggggcacttttctttgtgcattgtagggcattggcagcacccctggataaactatccaccctactcacctctgcctccgcttgagacaataaaaaaaatccaaatactgtcaagtgtcccttggtttggaagcaaaatcacccctaattgaaaaccattggtttatacgaactgatagctccactgattacatgtaaccaacctaatgccagtttaacatgtacaaattcttggaaaagaaactcttttgatccaaattggtataggtatctcaacactagcaagagagaactgtgccatagtacaccttg

SEQ ID NO: 295717 - DNA, 1235 bp, Homo sapiens
acttaaacctgggaggcggaggttgcagtgagccaagattgcaccactgcactccaacctgggcaacagagtgagactccgtctcaaaaaaaaaaaaaaaaaaattaagagactgtatctcgtgttgtgttctgataaaaataaaagcagatagacacaaaagaacataaggacatatttggaggtgatggatacatttagtaccttagctgtggtgatggcatctcaagtgtacacaaactcaccagaaagtaaaaattaagtatgtgcaatattttgtatatcartttgacctcaataaagctttaaagaataaagacatgtattaaaaataaaaacaagttattgtagttttttcatttagaagcattacattaaaattttatatttggataggaaaagaaataaatttgtatttcactaaagaaaaagaataggcagtgttaacatccgtacatatttctttcaattcttaatttacatgcacggatttgctttttttttttgttttgaatatttggccacatgactttattttattttatttgaatacatttaaagggtacaagcataattttgttacatggatatatcacaaawccggctaattttttgtatttttaatagagacggggtttcaccgtgttagccaggatgatctcgatctcctgacctcgtgatccgcccgcctcggcctccccaagtgctaggattacaggcgtgagccaccgcacccggcaatttgaggaactttttaatcattacacttcttgtaaaaagtagtactatttacccagtttctaaattctttcgactacattatgaagtctttcatagactccattatctatgtttaaggctgaataatgagttaaagacactaataacaatgacaaggagtacatgcagtaagaatgaaaattagtggaatacgtaacattgtggttaagactgatcaatatacagggatgtcctgtatatattttacacatgtaaaatatgtgtaaaagagaaagacaacaagatgttgaccactgtgggtgttataatgattccagacagaaacaaaaggaagtgagtattttgcaactggtgatagctattcwgagactttttaacataaaccacttttaaactaaagctgtttgcctttgacttaccaggctttccacaaatactaaatactgtttaatttggtaatggtaggatttcctgtcatagaaaagtataattaa

SEQ ID NO: 295718 - DNA, 476 bp, Homo sapiens
ttaattccacatggaaaacagaaagatttgtttataataatacaactcaaaatgatttaaaatttttcatatgacacaccagaataagaacattgctaatacattggaaactcaccaaycattgaatgtggtgccatttgtccatttccaagaatctccttgtttcctgcttagtccaatccagtgcatatcagttcctgcgtacctcttcaaaaattcctttcacaaaacaaagggaatcagcgattacttaatatgttacagcacattgctgaacatgcttcccaccccaattattctatcttttaggattcacattctaatttgtcttccctgatgcttctataacaacaaacagcacagatgttgatgtttgggttagttttatcagaaagattttcattttgcttttttgcatcttaagtatctccagataattgggctacaaccaagtcattgataccctttagtatgaa

SEQ ID NO: 295719 - DNA, 527 bp, Homo sapiens
tattttgcctatttttgatgcttctaaaactggaatcatatagtatgtactccttcgggtatggctgcttttcagttcactgtatgtgtttgagatttacttaggatgttgagtgtaactgttccttttcattgctgtacaatattcactgtatgcttatgctataatattttttatccattctggtgttgatggacatgagttgctgaacatatgcatgtatatatctcttggttaggtagctaagagtgtaattgttggatcataaattatatttacttatgtctagtagatattgccacactgtatttcagagtggttctgygtgttcataagtttggattaatgggagttggttcctaaatttgtatacaaaaacatttatacacacacaaagcacactatatatgcatgtataaatgtgtatatattaatagataccatcatacctacatacagttcatcctcttatgaaacctttttttctgggatgggtaaatgtttgatccttaactatggtacatgtt

SEQ ID NO: 295720 - DNA, 534 bp, Homo sapiens
gctattttttttgtagaaatggggttctactatgttttcaagactagtcttgaactcctgggctcaagggatcctcccacgtggacttcccgaagtcctgggattacaggcatgaggcacagcacctggccctggtctctgttctatgcaacctagagctgtaacggctgcagtaaagcactcatctactcaactaaacatgcagtaaatatttatgaaacatctactctgtccctggcagtctcagtgtcagccaaggtgattttccagactgattcatkgttctatgcccttggagaagactggaatatatacccagaatcagaaaaaccatatcctcaacccctattgcttgagaaactccccagagtgctacagcaagccagctaccagaatcttcaacagctaaaaacatggaagcctctacaaggtagaaatttttctccctagacgggtaacttaaatacactttgataaagaccttctgaggcaaatagtcacttacagctaagaaatttaaaccagacaggttag

SEQ ID NO: 295721 - DNA, 469 bp, Homo sapiens
gctcggcggcacctccctccccgggagttctgctgattccatcttggggaagcagggtggaccagggcccaaatgcgccctggggagattgcgggggcgggagaggttgcaaggggcaagtggcaagagcctgttaamgtcttagggcctccaggcctttctgtgcccctagctgtgcctgtacgctttaccccatctcaggaggcttggtctccagcggttgaggctggaagcaccggggtgcggtggaaagggctctgtccaggaagaccggatccgcagagccgggagtccgggctaggaagtccctttctcggtgggagactgaggccgccttggcggggcgggacgagactcctccgaggtcgggaaagggggccccgcagcagccccttggcttcccttctcccttgcctcccctccggggctccggttcagaggcactctgggcgcctgctacagcttccaa

SEQ ID NO: 295722 - DNA, 469 bp, Homo sapiens
gctcggcggcacctccctccccgggagttctgctgattccatcttggggaagcagggtggaccagggcccaaatgcgccctggggagattgcgggggcgggagaggttgcaaggggcaagtggcaagagcctgttaaagtcttagggcctccaggcctttctgtgcccctagctgtgcctgtacgctttaccccayctcaggaggcttggtctccagcggttgaggctggaagcaccggggtgcggtggaaagggctctgtccaggaagaccggatccgcagagccgggagtccgggctaggaagtccctttctcggtgggagactgaggccgccttggcggggcgggacgagactcctccgaggtcgggaaagggggccccgcagcagccccttggcttcccttctcccttgcctcccctccggggctccggttcagaggcactctgggcgcctgctacagcttccaa

SEQ ID NO: 295723 - DNA, 453 bp, Homo sapiens
tacaaatcaaaaaacaatgggtttgtgactctacttgtgtcatgaccctacagcctccatttacccatttcttccctctcctaaaacaggaagctttacgcttacactttcattactgccaggatactcttgtacaatatmtggtgtccagattttgaaagtataaggttatttcatgaaatttactatgaacagaatagagggtgttgcatagcctgccctacagatatgtatgtgtgtgtgtgtgtgtgtgtgtgtgtgcaagagacatatatgtgtgtgtgtgtgtcttggtgtaatactgtgaatgagaagaccagaactagcacccaaggaactgtaccactgtcataaaccaccaggtcaaagttcacattttcactgcatagaaacagaactctggcccataactcagatgttggttaattagtaatatagggatactccacttgt

SEQ ID NO: 295724 - DNA, 548 bp, Homo sapiens
aatgaatgaaattacaaaccctgctgggtacacatcagaatgttttcagtctccattcagatggaaatttcctgtgggtctggaagcgggaagcagtaggaactgctaaaatgagatggtgaaatgcacattcctaaaggtataaagtgggcacaggaacacctgccacttatctacctcacaaagataaaacacaaattagattcctataaagtgctttgagttctctgccattgtaatagacccaatacctatctttcagccttcagagaacagttcttaacatttgctgaactctccagcattcctgggaggtagatattatcgttggatgaggaaacaaaggccacacagcaagtcaaaagccaaggcaagattagaacagggcctgccttctgtgtggggaagtccagttggctagattccttttgtgtcastaacaggttctttgatctgtaatacagaagaggcttgtttctggggaggctgtgaaaatagatacattaatgaccacaaggttctctgaaacttaccaagggggttgtggg

SEQ ID NO: 295725 - DNA, 611 bp, Homo sapiens
gtcacaccaacccatgtacagcaaggacacagacagacaaggaggcgtcatcagcacgtttgcaatcagtgccattctccaagaaggaggcaagcagtgcagggggtcttgtgccaaattttaattatttgcagcttcatttagaagggaacggttcttacaggagtgctgtaggacaaaggcactaagccaactcaktaatgaagccagtttggtaaatgaagtattttgtgtagtctttcaaatgactgcagaagtgaagagtaaagtgagaaggataatactgcacattggcacagtgccggtctctgaactgattgcagcttttaaaagccatatgttaatccaaatccgaacaccaaattcaagcaagctttatatatttgagtgtggatagaaaacagaggcatgccctctctctgcctaagtttttggtttcctttccattggcagcctgccattaagactaatggctcaaaagcttgatgactttatcagacttctttgggtagttgtggtcctacctgtttttgttaactttcaaaattacataactgattatatcctttttactttggttgttagaaagcctagagccaagtctttggttg

SEQ ID NO: 295726 - DNA, 598 bp, Homo sapiens
gagtgcagatatcttttccatatattgaaacttatagatgttatcctaaaaagttaaaagcctcccctcagtctgaactgctttgacatctggaacttcctttttcaaacccaaagctgcctgtcataatcccaactgattcctactgcttgtctttaaattttccatcccaataggccaccagcccttctgctataaacttgcacattcttttttttttttatttttttgagacggagttttgctctgtcatccaggctagagtgcaatggccctatcttggctcactgcaacctctgcctcccaggttcaggcgattctcctgcctcagcctcccaggtagctgggattacaggcatgtgccaccacgcctgggtaattttgtatttttaggagagatggggtttcaccatgttggtcaggctggtctcgaactcctgaactcagatgatctgtccgcctcaacttcccaaagtgctgggattacaggcaggagccaccgcrcccggcatactcgcacattcttaagtccctactctttcctggcattcctcccttacctagaatgggtttctcatcaccaaaagcatcctaccca

SEQ ID NO: 295727 - DNA, 580 bp, Homo sapiens
tggggtatagtttaagcagatgtgtatgtgtgcaggtgtggaaatgtccagcaagtaggttggtgaggttcctgccaagacagtagggaagtttaacttgattctgtaatcacagctggtgtggctgggttattcccccaaggaacaagaccatcttttgaagttttccaaaagttatgaatgggaaaaagcagaaccatatactkgggatgaggatggcactttggtgagacaggtcatcagtgctagaggaagatgagtggcggtggcactgttgatgcaggacagctctgtggacacgcacagacaaccaaggaggaggtgtgtggggcattccctctgttctgcaatggtgttcgccacagtgagagtcccaggaaaagggaggggtgcagaaataattctttaattgtaactcatgcctctatttggttttctcatggttggtgcggtctgggaaacaaagctccagtgtatgtggctctgtgctaattaatcagggatttatcatcatagtagttactccagggaatgagcctcaccaacattccagctattgtgctaagtgcttaatatttac

SEQ ID NO: 295728 - DNA, 543 bp, Homo sapiens
cactgcacctggcccttgtatttattgtacgaattgcttgtttatggcttgtgttctattttaaaatagggtttttttttggtactgatccataggcattttttttaacatattctggatattctccctttaaaaaaaatacattgcaattattttctgtcagttgccctatttacggtttccactgtacagatgttctacatgttcaggagtttgggatgaacttatcsccagtcacaccatcccacctcccctcaccttccagcctgtggtaaaagagactgagcaatgaagacccctgaaactttgacaaaactggtagaatatgaggatgtcatcatttatgaagctgcaaataagcttcctggtagacttgacttccttttctgtacaatcacaatactggaaaaatcatcacaatggatatttacatatgcaaaaatgtagctgagactctagtctgaaatagagattttggagaagtatgactctgcttaatgcaactaaactgctttttgctaatgtgatacattttctacactg

SEQ ID NO: 295729 - DNA, 508 bp, Homo sapiens
ggtccgggcggcctggggtctgtgctgccccgaccctccggctttgcagcctctgaggctcagggttgggggtggggacacggagcgctgtttgcccctccacatatcctgccagcaccaaggaggtggcgtgcggaggcgtaaagggaccatgggcgctgggacccgcgagccagccggcgtgcgccgcagccaccgccgagagggcacccggggatcctggagccccagtgaagggcgggagggacgcgcagcctcgcgggtaagcccaggagccgtgggggccgagakaatctgctctgggaccctcttttgtcgaatcgccggcgaggttgtgcaattgggaagccaagaggagtgtccagctcctcgttcactattgttttcttgtaaaagggtctgtacgcgaggagggttgaggggtctggaaggttctggtctcttaccgtataaagtttttcgagaaaccctttttccctccacaatggaactagacctaacaaaacaa

SEQ ID NO: 295730 - DNA, 615 bp, Homo sapiens
tttgggctgctgttaattttcaagataagggagaagcaacttgtcattttgaggccgccggctccggagatcccggcaatctcaagcctctttcttgtgtgctgttattttggcttaaaagaaaacctataaaaagcgacgcccagaaaccaaaaacaaacccaaagcaccttcttttaggatttttcagtagcgagggttggcggggacagtggggaggagcaggagggggagaagaggttgctgttgaaaggtaatgtttaaaaacagtgtgtgggggtagggatgaaaataacrtggtgactgctagtgtatcagaaatcacaccgagtctaaagtcgtaagtcccatttgccttacgaggaccagctgggtgctgtgagtaggtggatagttaaggaaactgtagatctgctgaaagctcctcgtggtctgtggtctcgtgtccacgctgacctttgaacctcgtaactcttcgggtctccagcggccacctcttttaggctagcccgaatgtttgactttccggtcctcaatcttcctcacctagctgcagaacataaaactgtctttttatttacagggagatgttaaatatttgggaacatctgctca

SEQ ID NO: 295731 - DNA, 1194 bp, Homo sapiens
gtgttccacatcatgtggaaccttatgggagaagacgtgagtaatgccatgtttcccgcatttccctgataagcatcatctgctaaccatgcagactgccagatggcttccatggaaattgtgcttccatccaggagtggtgaccagagatctgtttagtatgcattttaggtgatgcttattgagaaggtgaaggaagcatggaactcctatttggcacccactctgatttttggtgtgttytcatatgctattttatttaatcttcctgacaaaactcctgcaagaaaggaatttttagccccattttatagcttaaaaaaccaagattgccttaggttgagttgcagtggctcacataaaggtttgactctacctctgcctacaccatcccaggaatcctctgcagtatacattctgcacaaattcttccatttcctgtgcatatctttctcctttgcctggcatatcctccatttatatataccttggtctgaatatgcctttctagttatccccaggctgggctttttgaataggtggtctgcgtactttgccttccttgtgawtgcagggagtatttttgtttgctgccacagaacctctcagtggtggcatgaatgagttcccagggcatttgcttccctttgggcagggtgcccgattctggtttctgactgacattatttttgtctcatagggtggcacctgtggaaatgaaacggagaaataagatccagccttgtttatcaaagccagcttttgcctctctgctgaggtaaaaatataccagaaaaacctgtggcatacaaaatattctaaatgtgcttgtaatcattttccacacttgtttatttttttaatgcaaatcttagcagtataaagtggacaccccatatttaaggaagagcttgaatatcctgtctctttttgtgcttttagtcagagctctgcatatattttaagaaaaggcattgaggaactcaatcaaaccagtattcttttcacacaggtgaggctagagaggtctatttgtgtttgattataaaaaagcgaattgttctttagggttttatttttcccccttgttgctctcatgttattttccacccttattawtttgtggcttctccttccttgcctctaggttaaactttttgagtagaaattttcccttttattaacttttaatga

SEQ ID NO: 295732 - DNA, 628 bp, Homo sapiens
cactaactgtcctggaaaaaaagtacactttctagtcatgagatctcttataattggtgtattatcctatttcagaggtcggaagattattttaatctctctgactgcagtagaccttgtatgtacagtgtcctttggatgtgatactacatgcctgcttccagagatgtgacttttcattcttcatagtactcctctcccagccccaaccttgtcaaaatagttcatcaatccctctaaatagtgctggtgacagaagctacctatttcttcactttttaagcccatctacaatgtttttataatttattttattttctttaattgacaaataataattatgcatatcaggagatacatagtgatgtttcaatatatgtaatgtatagtaatgaggtcagggtacaattttttaaggtaattcatctcagacaacagataagatgactttgcttttagcagctactactctcagtctcattagaaaactccttatgcrtttggagggtacgagggaatacctttcgtatctgcattgtagccttttccattcacaacctaatttcccattaaaacaaatcctcttcttaaaattcagctgaatttcattacaccaagcccacacgaa

SEQ ID NO: 295733 - DNA, 547 bp, Homo sapiens
aacatggtgaaaccccgtctctatgaaaagtacaaaaattagctgggcatggtggcacgtgcctgtagtcccagctactcaggtggctgaggcagaagaatcacttgaacctgagaggcagaggttgcagtgagccgagactgtgccactgcactccagsctgggtgacagagcgagactccgtctcaaaaaaatatatatatttacgtccaaagcagctttctcaggaagctactgatatatgtataccacttgaaaatgaaacaaaagaataaaacaagaaagagaaagatgtgggttcattccaggaaacaggaagtctcacagggagagaagagaacagcatgctttggaaggcagtgccagggccacagctgtgcagggagctgtccagaccagatgaagtaagagaatgaaggaagggtggtagcaggggtttctctgagaaatgcagctgtttatccaaaatgtttgacatatggaaatcagaccactgcaagttcacatgggagtctaaggagaatcgaacccaagtcatactttttat

SEQ ID NO: 295734 - DNA, 629 bp, Homo sapiens
ttgactagctttaatcattagaaagcaaaacttcctttctacccatgccttggaattttatacagatatgtgtcacttcgtaaatataaattttcagaatcaaccattatttatrtatcagctatatataaattcatgtaaccactttgcaaagcaatttggcaatatgtatcaaatttttaaatgcagccaacaattcttctccaaacttattctgagattagcttgtgtagatgaagaaagccataaatataaaaatacttatggtagcattatttatataagaaaatgtctagaaaccacataaatgttggaggctagtgaattaaattatattacctctttacaatgaattactttgcagcccttaagataaagtagatctatatgttttgatatggaaaaatcttcaaggatataatgttaagtgaaataagaaggtacagcattggtattaaatgcttccattttggttataaaaaagatatagatttataacttatgaatctagatatatgcttgcatgtgcatacttgcatttttctggaaggaaactgttgccagtggtttcctctgggaatgaagattgatagtcttgggagggagggagacctactattcacagcttg

SEQ ID NO: 295735 - DNA, 574 bp, Homo sapiens
actttccaagcactattaatgaaaagatctttttactatcaatcaaatgtctttctttatcttttttccattgtggcactggttgaaaatgcaagtgtccacaggaaccaggccaaggagagcaatgagaaaatagtgccatgttaaaggtgatcaagggaaccaatagagaagggtaaggatggtggtgggctggacagacagtgaccacatcaaggggcagctgcccagctccttcccatcatgagatccaagggcttaaacaccagaccttccaactttccagtggcgctggaaacaccttgctccttgtataaactatcttgatttttaaatgttaatatttaactttttaaatagctgaacattgtacaaggtgatcacgtacmtcttcagccaagttttgcctactggctgccacattgttttctctgctttagggcaggggctggcaaactacagtttccaggccaaatccagcccactgtctgtttttgtaaataaagttttactggaacacagccaccctcattcatttatgtactgtcttctgctgctttcgtgcaacaatagc

SEQ ID NO: 295736 - DNA, 590 bp, Homo sapiens
ccttctttcttcttctacctgagacaagagatttttaacattgcattttgtaattcaagggaacgaaacatagaagcacacatgttgagttttccccatgttctaatgaaaattcagagctttgcatgcttttcgcatataagtgtatctttctgaatttatagcactttcaatatatgaggcatttaagagtttacaaaatgtgtttgtgtgcattagctcatgtaatctttctaacaaatcaaggcagtgagctggttacctctggtttgcagatgagttggccgagagaaaggtgcagrgacttgcccagcatcacttagctggtcggtgagtggcagaccacagccctgtgtgattccttttttaatacttccagctaagagacgcttctttcaatttattggtggaaagtggttctatactgagacactctcccctccaccttgcccttacagtatgaagtaatctccttccttggaggtggaggccagtgtttgtggtttcttaagacaaaatggaaacaagaaattaagcaataattataatatgattaatgataacatttatcaagcatggaccctgtgcca

SEQ ID NO: 295737 - DNA, 486 bp, Homo sapiens
atatatattctagagttcctaattaaaattagtaattttgcaagccagatgataggtctgaatatctattggcagggggaaacttgatttggaaaaataaaacttagcaattttatgaaacttcatttcccatggagagtgttgagaggtagggagcaggggcacctagatataattgctgtcaccctggtgtggttctttgttttgttttatttttagtttatttttaaagataggcttgtaagcggctctgtcttgggttgtgtcaggcaccccctctccccaccccctgcaatgcattttgtggggcacattttcccctgcggcatttgcttgcagcccaacatactctcttcatcggcttgctgagatgactcatmctcccaggcacagcaagaagaaacaggcagcatgcccattgcttgtttattccttgttttaattttcattattacgtttctcaggaaatgcacgccttagctaaca

SEQ ID NO: 295738 - DNA, 630 bp, Homo sapiens
gtttactttcagtctgtctccccagctcctcaacacctcccctcagttaaggataaaagagcagtggatttttgtttttggacattttggacctagaactgtgcctggtccctagtaagaacaccagaaattgttatgaatgaatagatggatgaatgcaaagccccttcttagtgtctgccctgcagtgggtgcccaatgatgacacctcaaggttgtcccaagagcatttggaaattttgatgaaaccgtgtctaytctggctaagtgttaggaagaaatgtgtgacagtgttctgagaagtttgcttggtacacacaaatctggttttaaaaggctttgcataaaatgactgcaagattttgttttaaaaaagtgatattcattttttttttggttaagacaagctcatttcttttttccttttgggttcttatagcacccgtctataagaattgtcacttgctgccattttctttgccggagacccaaaaaagttgggggtgggggagatggagtgagtttcgttctttcaaaacattttcactttcattatgggatgctaagagagcattatactgtcataacaagcgtgcttttggcagaccttagcagaatgaaatcgtgtct

SEQ ID NO: 295739 - DNA, 459 bp, Homo sapiens
cttcctttaaaactactttattgggatataatttgtatacagtaaatrtagatttcttaagtataacttttgacaagggtacgcacatacaaccatcacgcagatcaagaagaaaaaagtttcccttacaccagaaagtgtcttcgtgcccctgccagcctccatcccccaaagcaaccactattctcatttctaccacattacattcattctgttactgaattttatattgatggaataatacagtactatattattgtgtctggtcctttgcactcaatgaatattgaaggattgaatgaatgaatgaggccgagcatggtgactcttgcctgtaatccccgcactttgggaggccaaggtgggcggatcacttgaggtcaggagttcaagatgagcctgagcaacaaggtgaaactctgtctctactaaaaatacaaaaattagcctggagtggtg

SEQ ID NO: 295740 - DNA, 919 bp, Homo sapiens
cttcctttaaaactactttattgggatataatttgtatacagtaaatgtagatttcttaagtataacttttgacaagggtacgcacatacaaccatcacgcagatcaagaagaaaaaagtttcccttacaccagaaagtgtcttcgtgcccctgccagcctccatcccccaaagcaaccactattctcatttctaccacattacattcattctgttaytgaattttatattgatggaataatacagtactatattattgtgtctggtcctttgcactcaatgaatattgaaggattgaatgaatgaatgaggccgagcatggtgactcttgcctgtaatccccgcactttgggaggccaaggtgggcggatcacttgaggtcaggagttcaagatgagcctgagcaacaaggtgaaactctgtctctactaaaaatacaaaaattagcctggagtggtgwcttcctttaaaactactttattgggatataatttgtatacagtaaatgtagatttcttaagtataacttttgacaagggtacgcacatacaaccatcacgcagatcaagaagaaaaaagtttcccttacaccagaaagtgtcttcgtgcccctgccagcctccatcccccaaagcaaccactattctcatttctaccacattacattcattctgttactgaattttatattgatggaataatacagtactatattattgtgtctggtcctttgcactcaatgaatattgaaggattgaatgaatgaatgaggccgagcatggtgactcttgcctgtaatccccgcactttgggaggccaaggtgggcggatcacwtgaggtcaggagttcaagatgagcctgagcaacaaggtgaaactctgtctctactaaaaatacaaaaattagcctggagtggtg

SEQ ID NO: 295741 - DNA, 1663 bp, Homo sapiens
ataacttttgagttttcagcctgcgagtgtccataacagctgataaattgtccttagtatttaagaactggccaggatactatcttgtaagtaatttgaggatatgcttttgtcccactgtcttyttattttattctaggattgtatattaatttttttttcttcagaaacagggtctcactttgtcacccaggcaggagtgcagtggtgctattatagctcactgcagcctcaaactcctggtctcaagagatcctcccaccccagcctcctcccaagtatctgggactatagccatgtgctaccacacccagctaaattattttattttttttgtagagatggggtcttgctatgttgctcaggctagtctcgaatttctgacctcaagctgtgttccctccttgacctcccaaagtgctcagattacaggcatgaaccactttggcctgtacgttgatccttttactctcactccattagcactaaaaaaaactgcttctccaattatgtctgtgttttcctcccatatgtgtttagatgaaaggtaaaaatcatgtgatattaatgattgtcwataacttttgagttttcagcctgcgagtgtccataacagctgataaattgtccttagtatttaagaactggccaggatactatcttgtaagtaatttgaggatatgcttttgtcccactgtctttttattttattctaggattgtatattaatttttttttcttcagaaacagggtctcactttgtcacccaggcaggagtgcagtggtgcwattatagctcactgcagcctcaaactcctggtctcaagagatcctcccaccccagcctcctcccaagtatctgggactatagccatgtgctaccacacccagctaaattattttattttttttgtagagatggggtcttgctatgttgctcaggctagtctcgaatttctgacctcaagctgtgttccctccttgacctcccaaagtgctcagattacaggcatgaaccactttggcctgtacgttgatccttttactctcactccattagcactaaaaaaaactgcttctccaattatgtctgtgttttcctcccatatgtgtttagatgaaaggtaaaaatcatgtgatattaatgattgtcwgatcacaactccacacttgggctctctctttaagccaagccctttttggaattcaaaggaaaacccatttctctctcaagtacctagctcttgtaaatcagaagcactttgctttcagcctttgtgtctgctgtgagttaaaaacatccattaaactcttcagttgcctattcggttcagatgcctattggccctgcccataaataccacttattcagttggtgggaagccccaggcaactagtaatacctaatgagcaaaaatatttgttttgtttttttggaaatactctcttgctacacatgccacaaccttggaataaatcctggaattttttttttttttttttttttttgatgtgtgtttgctgggtggttttgtttctggtttgttttacaaaacagacatatcactttgttgtctgtcaacacatgacatcttttcttctgaagaatttccaagtgcattctttttcttcagaacwtttcagtaggaaattgaggaggaaa

SEQ ID NO: 295742 - DNA, 587 bp, Homo sapiens
ggatttatcaagtggtcagcatattaatgggtctaaccatactttgtttccttccttaggcctagcaagtgctttcactttgcatttcatcattacattttccagtgaaatagctgtatccttatacagaggaggcaacgtgggtttcacgggctacatgacctgtgaaggttatgctgagaacctaggtcttaaatccaggtattagactccactggacaggtgtcttccctgcctcagtttctccaggagaggtgccagattggtgttccagaacatacctcccaaggagtggattgctgtggtcaaargctgaccctcctgcattcagctaagttccccaaggacccgtcacagtgctctgttcacaactgatggtcacagatgttgactgaatgaatgatgttcaacttttatacctctcctagtcttagggtgattatcaaggcttttgggaaaaaaaagcatttaaccatcattaataaacattgtgcttagttttacttttactgcaatcttggatttgcaagtctaacagaattaattataagcctaaaggcttctgaaatctatttgcaagattttat

SEQ ID NO: 295743 - DNA, 1131 bp, Homo sapiens
ggagtgtatacaataatatccctcctgtgactagcctgcctttgagatgtagttatcatttaatgagaggagagaggcgaccactttggtaagtgtctaacgtgtaatttaaggtcaaggtgggaggaaaatgtttgtgaacctcataaaagatcatatcacctgagatgtgtgtctcacatggacaacatagaaagtctgtgataccartcatggcccagggtctgggggtaagtgtcctccttctttaatagcttgatgtagtgatgaagatggacagtaagttagtttgcccaggctggagtcccagttagtaataaatccttatgtcatgtcattcagtctttctgcattatttactcattaataaaatggaaatgtacctcatcttgattagtagcaaatgacagaaacctaatttgtttttgtggggttttttttgttgttgttgttgtttggttggtttcttttttttgagaccaggtctcactctgtcaccaaggctggagtgcagtggcaccatcacggctcaccacagccttgacctcccaggctcaggtgaacctcccacctcagcctcccaagtagctgagactacaggtgtgtgcwggtgttcttaaaatttcactatgaacactttttgcctttccatgttctttatttactcactttatttactagactttgaactctagtagaagtaatcatgatgtcaacattccttgaaaagcggctgaaaggcagttttgtcctctccttgttagctcacttggctgcgttgggtcwcaaataataacgctttcatatccgtgcaaatgccctcatcccaggcagtttagcctacttttcatcatcaaccagtgggagtcttgtgggccaatcctgtctgaattcaaagcagaagggtgaagtctcccttcccctaacagcctctcgcagctctcaacttcatcagtaacagcttgaaggagtgtagctggacagatagaaaacggaagcaatgattcctaggtgggagactcatagaccagaagggacaggctaggaaagagaaaagaaaagaatgaaaggtcacttttcagttccctggctaactgccatggccttggttaaagattcagcgagactgct

SEQ ID NO: 295744 - DNA, 608 bp, Homo sapiens
atgattcctaggtgggagactcatagaccagaagggacaggctaggaaagagaaaagaaaagaatgaaaggtcacttttcagttccctggctaactgccatggccttggttaaagattcagcgagactgctttaagcttgtgaggacataataatacacactattattatagttaatatgtrttgagcacttggaatgtagcaaacacacagctgtttatggcatggatcttaaatgttaagcccttttattgcagtcattgtactaagccctttgtgcacacttgttgactaatttcatacccacaacagccctggaaggtcggacctattattatttccttgttcacctaaagaaactgatgaccagagaggttgttaacccatctggtttgcagatagcaagcagcctctaaggattcaaacctagtttgggggcaatttggagcctgtgaatcacaggaaggaggataaatgggaccaagaacttttcaaaggaagtaatgtgtgtggaaataatgtagctgtctattggatgccactattagatcatgaggagaaagaaactccagtatttctcattggtaggaggcagaccggagcgtgcac

SEQ ID NO: 295745 - DNA, 540 bp, Homo sapiens
ttgccgtccctggaaatcctagcaagacacaggacccagaatcctccccattaatattgacgctgtagtgaccaatcaccattaagaggtgccagaaaggaactggaactggcargtagtcaggtctttcagcggcacccccagaaatcctgtcctataaatggtacttcactctaatgcaaactttgctaaatgttttaaccttgttgtgtaacgcgggggtaaaaagagtacttgatagggttaacacatataatgcatttagaagagcaattcgcaggtggttaacatctgtaacatttgctattattattattggtagtaaaaattatctagcatctgtaaacacttgctattattattgatactaaaagttatccatgagctttttttcttcttcttcttactatgcaaagttgggattctgaagtgaacagctgcacggtgttatcatctttctacacattcacacataacaatcttaatgatatatcacaatgaataatttgacgttatttagctctccttactctgagctgt

SEQ ID NO: 295746 - DNA, 635 bp, Homo sapiens
aagtaaattgagtgtttctgagttttctatagaaaatttatgctacctctcatcttttcacatacaaataagcaacttttaatgaaggcttagggtgaaaattttaattttagcactttacattacatgatgaatggtgaatattaaaggactttgaacattttaataaacttacagtgtttctgttttcaaatagaggtattgatgctgtggatatacattaaattctccccaaagttctcagactttaatcagataatgtggcttacaaccattgtttttgtttttaagttttaacactgtcttttcagtattcatttaaaacaagtcaccatgactttgaatatattctcatggagaatttatttcaatgattrtataaaagaatttcaaaatttaaactagtgagcatactttagcttgagacagctaacattatttgtcccaaatttaaaatcttacattgaaagttattaattctttagaatagtcttacctgtgtaagttgaaccaggtttgtttgattatgttttggatctgcttgtgcccccacccccctattttataccatctgtgccctgtgcagttggggaccctttcacatctggctacaagctggtgtaatgcccttcctt

SEQ ID NO: 295747 - DNA, 609 bp, Homo sapiens
ggatagccctcctcccactgcttcccaatcactcgtaagcagcaacccttccgaggccacttccacaggcaaagccaaggtctttcacaaggtaaactgccatatttattgtagtatttatgtatttcttagccatttaaaatatgtaaaaccaggctactctttttactaggytcctgtctttttttattatgggtcgctgacaaggtttctgaatattatgtccctaaccccactcccttcataagccctgtagtttttgttgtgagattttgcatatcatggtatttttcagaaatgcctctggctgtatttctactagatagggctgagctacagaacttcagttcccaaagcacattctggcatctcaataatacttttcagccacctgcttaatagaagcctagatctttctttaaaataattttttaaagctgtatttctacagaactgtagggccacacaccatataatctatatttatatggctagtgatgactttgatttaataacgttcctgctaacattgctgtaaacctgaaaacaactgttatacgtttatgagcaatgctgaggggaatgaaataaataagcggtcttgctgct

SEQ ID NO: 295748 - DNA, 609 bp, Homo sapiens
ggatagccctcctcccactgcttcccaatcactcgtaagcagcaacccttccgaggccacttccacaggcaaagccaaggtctttcacaaggtaaactgccatatttattgtagtatttatgtatttcttagccatttaaaatatgtaaaaccaggctactctttttactaggctcctgtctttttttattatgggtcgctgacaaggtttctgaatattatgtccctaaccccactcccttcataagccctgtagtttttgttgtgagattttgcatatcayggtatttttcagaaatgcctctggctgtatttctactagatagggctgagctacagaacttcagttcccaaagcacattctggcatctcaataatacttttcagccacctgcttaatagaagcctagatctttctttaaaataattttttaaagctgtatttctacagaactgtagggccacacaccatataatctatatttatatggctagtgatgactttgatttaataacgttcctgctaacattgctgtaaacctgaaaacaactgttatacgtttatgagcaatgctgaggggaatgaaataaataagcggtcttgctgct

SEQ ID NO: 295749 - DNA, 609 bp, Homo sapiens
ggatagccctcctcccactgcttcccaatcactcgtaagcagcaacccttccgaggccacttccacaggcaaagccaaggtctttcacaaggtaaactgccatatttattgtagtatttatgtatttcttagccatttaaaatatgtaaaaccaggctactctttttactaggctcctgtctttttttattatgggtcgctgacaaggtttctgaatattatgtccctaaccccactcccttcataagccctgtagtttttgttgtgagattttgcatatcatggtatttttcagaaatgcctctggctgtatttctactagatagggctgagctacagaacttcagttcccaaagcacattctggcatctcaataatacttttcagccacctgcttaatagaagcctagatctttctttaaaataattttttaaagctgtatttctacagaactgtagggccacacaccatataatctatatttatatggctagtgatgactttgatttaataacgttcctgctaacattgctgtaaacctgaaaacaactgttayacgtttatgagcaatgctgaggggaatgaaataaataagcggtcttgctgct

SEQ ID NO: 295750 - DNA, 465 bp, Homo sapiens
gtatccctcagatgactttatacaagtatttgatgtcacaaatatatactgtggttgacaatgatcttggagatagctgagtcactttcgtcctttcaaaacctaccaggtcactcagaaatacactgtgaattatcctaaatttgttagtaggtcctatcattcctaaaatgcctaagggtcatgtctgcttgccttattggactaaaatattttataacacatgaaacataaatttgtcaattaaatgcagtatcatgtttttcatagtttgcaaaagcacagttaatgatgcaaataatttcctatttttcattctgagggaaaatcattaataaaaccaaactccttattagaattgaaattcagcagtaagagggcacaagccacccataaaggcaagatataaattagcagtgaaaaaaacaagccaactgattataacrtccagatggaaatgaataa

SEQ ID NO: 295751 - DNA, 469 bp, Homo sapiens
tactgacttctaattttaggttaaaaagtttaacagaatttgatgtttttaagtagtactgagatgtttaaataactgaatttattctttatgagtctagtatatttgattcaaaacatggcttcaaagcttagaaaggttttgcttgttaaggttgtgagcttgtactgccaagtattcgaagtgtttacaaagaaagtaaaattgttaaatgtgtaaagttattttaaaatattgatgaatacatttaacaagtaaatacaaaagtgtatttaagtagacattattcttttatggcattcataaattcataaattgcacaagataacctgagttgctctaaatgctttkcaaacttaagtttaggggagcaacatcagcaagatggctcactagaaactccagcactcatcccttccacagtgacagccaaaacaatgaataaacaactacactttaatgtacataa

SEQ ID NO: 295752 - DNA, 578 bp, Homo sapiens
ctcaggacagccacaaagagaatggaaggaaacatcacaactccaccaccctatccccagctgagatgagccagaaacccagaggaaactttccctataggaaaaaggcaagcaagaggattccagtagcctccaccaacaccttggacacccacagtcctcactactggagtccttgtagtcttcactggcactaagtccagctgagggagctgcctacaggccacacagccacactcacctcagagaaggaactaatactgtgctctattccctgtagcccacatggcaactgtgctatatcatcttagaactggaactactgctgaagtgtgattttctctgagggtgagcaggcttgacacccctgcctccrtaaggctaagctgcctccaaaccaccccaaaccagtggccacagccaagctgccagcagctgttaatgcctttccccatggagccaaacagtgaaaactgctctacctgccctccctcaccttcacctgccctctcccttcacctgccctcttgtgctagagatgaagcaatacattccctcctggggaaacagtgctttgg

SEQ ID NO: 295753 - DNA, 631 bp, Homo sapiens
atatatcctttagaaatgaggaagaaataaaacgtttctcagagaagtaaaaacagggaattcatcaccactagaacagttttacaagaaattctaaagggactcctgcatctggaagcaaaaaatgattatcactactaagaaaacacacaaaagtataaaactcactggtagaggctgagcatggtggcttacgcctataatcccagaattttgggagtccaaggtgggcagatcacctgaggttgggagttcaagaccagcctgactaacatggagaaatcctgtctctactcaacacacaaaattagctgggtgtggtggcacatgcctgtaatcccagctacttgggaggctgaggcaggagaatcacttgtacccrggaggtggaggttgcagtgagctgagatcgtgccattgcattccagcctgggcaacaagagtgaaactcatctcaaaaacaaacaacaacaacaacaacaacaacaaactcactagtagagcagatacacagaaaaaaagagaaaagaagcaaaacttatcactacagaaaatcactaaaccacaatgataaataataagagaagaaagaacaaaggatatgcaaaataaccagaaaatagttaacaaa

SEQ ID NO: 295754 - DNA, 1263 bp, Homo sapiens
atatatcctttagaaatgaggaagaaataaaacgtttctcagagaagtaaaaacagggaattcatcaccactagaacagttttacaagaaattctaaagggactcctgcatctggaagcaaaaaatgattatcactactaagaaaacacacaaaagtataaaactcactggtagaggctgagcatggtggcttacgcctataatcccagaattttgggagtccaaggtgggcagatcacctgaggttgggagttcaagaccagcctgactaacatggagaaatcctgtctctactcaacacacaaaattagctgggtgtggtggcacatgcctgtaatcccagctacttgggaggctgaggcaggagaatcacttgtacccaggaggtggaggttgcagtgagctgagatcgtgccattgcaytccagcctgggcaacaagagtgaaactcatctcaaaaacaaacaacaacaacaacaacaacaacaaactcactagtagagcagatacacagaaaaaaagagaaaagaagcaaaacttatcactacagaaaatcactaaaccacaatgataaataataagagaagaaagaacaaaggatatgcaaaataaccagaaaatagttaacaaawatatatcctttagaaatgaggaagaaataaaacgtttctcagagaagtaaaaacagggaattcatcaccactagaacagttttacaagaaattctaaagggactcctgcatctggaagcaaaaaatgattatcactactaagaaaacacacaaaagtataaaactcactggtagaggctgagcatggtggcttacgcctataatcccagaattttgggagtccaaggtgggcagatcacctgaggttgggagttcaagaccagcctgactaacatggagaaatcctgtctctactcaacacacaaaattagctgggtgtggtggcacatgcctgtaatcccagctacttgggaggctgaggcaggagaatcacttgtacccaggaggtggaggttgcagtgagctgagatcgtgccattgcattccagcctgggcaacaagagtgaaactcatctcaaaaacaaacaacaacaacaacawcaacaacaaactcactagtagagcagatacacagaaaaaaagagaaaagaagcaaaacttatcactacagaaaatcactaaaccacaatgataaataataagagaagaaagaacaaaggatatgcaaaataaccagaaaatagttaacaaa

SEQ ID NO: 295755 - DNA, 554 bp, Homo sapiens
ttcaacttaaaggaaataaaagaaagctaaaccatcttatgaaaaataattggaagcagatttcaataaaggaagagggatggaaaatagactaatgccaaaggggaactgaagacaatgatgtctggattcagtcatttgggagctgcctagaggccacagccattggcactccataaatttgtgatggtatgcagcaataagtaggaagtgcaaactaggggaaagaggaaaaggaagtgactgagttgcattgcaccataaattcaggagtaacatattctctctacatatgtcaaggataaaattgtgcttcaagttctttatttcatttggcatactttattcccataaagaaataccctggagggagttcatayggggaccaaaaaaaatgagtgtatcacagaaatgtcgactaataggaaaattcatttgactttccttcttcctgtggttttaccacaggcagaaatttcaaggtaaggaagaagaaaagaagaaagggaggaaggaaaggagaagggacggaaaaggattccagtttctgaatt

SEQ ID NO: 295756 - DNA, 593 bp, Homo sapiens
ttaaaagcttctaggaattacagtagtctctcacacatacaatgatcaaaatcagggactttaacgttgatagaatactatcttacacgtagtccatatttacttttcttcaatcccgagtgtcctgtatggccactttcctccagtctaggatcgcactggcttttagctgtcatgtctctttagcctccttgaagctggaatactttctcagcyttcctttgcccatcatgtcattaacattcttgaagaggacaggcctgtggcttttcagagaatctatgctggtctgactgttatatgaggattagattcatagtacatgtttttgaaaggcatactacctaagtgatagcatatccttctcattgcattacatcagttggcacctgatgaaacttggtcccattcttgatgtgttaaccttgattccttaaataaggtgttttctgccagattacctcactgtatgtgtgtgtatgtgcaggtattcctctttttcccttttataattaataatgtatgggaagacttttttctgactgtgtaaacaccctgctaatcaacaagctttcactcaatggtttaacacc

SEQ ID NO: 295757 - DNA, 593 bp, Homo sapiens
ttaaaagcttctaggaattacagtagtctctcacacatacaatgatcaaaatcagggactttaacgttgatagaatactatcttacacgtagtccatatttacttttcttcaatcccgagtgtcctgtatggccactttcctccagtctaggatcgcactggcttttagctgtcatgtctctttagcctccttgaagctggaatactttctcagccttcctttgcccatcatgtcattaacattcttgaagaggacaggcctgtggcttttcagagaatctatgctggtctgactgttatatgaggattagattcatagtacatstttttgaaaggcatactacctaagtgatagcatatccttctcattgcattacatcagttggcacctgatgaaacttggtcccattcttgatgtgttaaccttgattccttaaataaggtgttttctgccagattacctcactgtatgtgtgtgtatgtgcaggtattcctctttttcccttttataattaataatgtatgggaagacttttttctgactgtgtaaacaccctgctaatcaacaagctttcactcaatggtttaacacc

SEQ ID NO: 295758 - DNA, 1261 bp, Homo sapiens
tgtggcttttcagagaatctatgctggtctgactgttatatgaggattagattcatagtacatgtttttgaaaggcatactacctaagtgatagcatatccttctcattgcattacatcagttggcacctgatgaaacttggtcccattcttgatgtgttaaccttgattccttaaataaggtgttttctgccagattacctcactgtatgtgtgtgtatgtgcaggtattcctctttttcccttttataattaataatgtatgggaagacttttttctgactgtgtaaacaccctgctaatcaacaagctttcactcaatggtttaacacctattgacaattctactctgaatcaattattactataatagttgtaaaaaagtgatttttctaactctattatttctttcacagcaattagttggttttctagtgcaagaaacagctgccctttctcccttctttccttcctttccctccttccttccttccttyctttctttctttctttctttctttctttctttctttctttctttctttctttctttctttctttcttctttcttttggttatatcttactcatttgattcttaagtgtcccatttcaagctggttcctgtgtcattcagacaggtcctcattttttttttaatcagtttttattttctggcacaacwagaataaccgatatttattctggtaaagacttttctcatatcagcactttaccactgtaagatgctgacaataattatgtgaatgttgctataaaaaaattaaatctcccatctcatgggtttaaaggtgtttccgcctctgccttacacacacacacacatacacacacacacacacacgtacacacacatatttcaggtacctctgtcaggatctcccaactcaattatactgcatggaggaaaaatatgtatactactactactagaataagaataaactagtaaacaaacaaatagaatacaatgtaagctgcagtacatgtaatctgaaggcctgaagctcatgtgtgctaggtttttgattgagcagtggtgggggtaaacgtggcacagcagttatcagcctggactgtggaatccgatcataccgggaaatgaatcctggcttactcattgagtaacctggtaactgaacctccctgaggcccaggttattcatcaacaaactgatgwcagttatcccatggggttattatagggattaagtgagaaaatgttatataaaggtgaggagt

SEQ ID NO: 295759 - DNA, 576 bp, Homo sapiens
tttactatgcttgcaagaaattatatttggagaagcagcctgtgatatcaataggtaagttttctagttatccaggtgtccctgctgttagccttttaaatttcactttgggagcaaatgctcaaaagtttcaaaatccagcacaagaacacatagactgaaggaatgttcttctggttgctttagagggcaaagtatttccaagacatgcaaggctcttttggttaggatcatagaaatgataattttgtctctaggtggcatttataagaaactatttatagtggtggaagtctctctctgactgtgtttttatttagcatttttctaaaagatagatttgtatcttgatattrttggaacataataaggtacttatttcacttctcttttgtgagaaaaaaacctgtcgtatgagactttccagcctctggaaccacctgaatgcctcggtcagcttcatttcagccccaaagtcagaaagaattctctgtggttctcctttttagcttgtggttcccagtcctaactcaccttcacattgcctggggagtttttaaactccattcctacgtg

SEQ ID NO: 295760 - DNA, 541 bp, Homo sapiens
accttttcagtgagatctttcctgatctccttgctcaaaaatgcaacaatctccccaaacacactgtattgatttcctagggtggcagtaactaagtaccatatactgagtggcttaaaacaaccgaaatttattgtctcatagttctggaggctacaagtctgaaatcaaagtgtcaccagggccatgctccctctraaatctgcaggggaatctttctttgccttttcctaacttctagtgatttgctggcaatccttggcttgcagctacataactccaatctctgcctttattctcacatggcgttccttctcccgtgtgtctctgtgtcttcacgtggtcatcctcttatatccaatcatattggatgagaggcctgcccaccgatctccagtatgacttcatcttaacttaaataattatatctgtatcaatcctattaccaaataaggtcacattctaagtactgagggttaggacttcaacatatcttttttcctgatggggaggggttgggggaacagaattcaacccatag

SEQ ID NO: 295761 - DNA, 541 bp, Homo sapiens
accttttcagtgagatctttcctgatctccttgctcaaaaatgcaacaatctccccaaacacactgtattgatttcctagggtggcagtaactaagtaccatatactgagtggcttaaaacaaccgaaatttattgtctcatagttctggaggctacaagtctgaaatcaaagtgtcaccagggccatgctccctctaaaatctgcaggggaatctttctttgccttttcctaacttctagtgatttgctggcaatccttggcttgcagctayataactccaatctctgcctttattctcacatggcgttccttctcccgtgtgtctctgtgtcttcacgtggtcatcctcttatatccaatcatattggatgagaggcctgcccaccgatctccagtatgacttcatcttaacttaaataattatatctgtatcaatcctattaccaaataaggtcacattctaagtactgagggttaggacttcaacatatcttttttcctgatggggaggggttgggggaacagaattcaacccatag

SEQ ID NO: 295762 - DNA, 541 bp, Homo sapiens
accttttcagtgagatctttcctgatctccttgctcaaaaatgcaacaatctccccaaacacactgtattgatttcctagggtggcagtaactaagtaccatatactgagtggcttaaaacaaccgaaatttattgtctcatagttctggaggctacaagtctgaaatcaaagtgtcaccagggccatgctccctctaaaatctgcaggggaatctttctttgccttttcctaacttctagtgatttgctggcaatccttggcttgcagctacrtaactccaatctctgcctttattctcacatggcgttccttctcccgtgtgtctctgtgtcttcacgtggtcatcctcttatatccaatcatattggatgagaggcctgcccaccgatctccagtatgacttcatcttaacttaaataattatatctgtatcaatcctattaccaaataaggtcacattctaagtactgagggttaggacttcaacatatcttttttcctgatggggaggggttgggggaacagaattcaacccatag

SEQ ID NO: 295763 - DNA, 541 bp, Homo sapiens
accttttcagtgagatctttcctgatctccttgctcaaaaatgcaacaatctccccaaacacactgtattgatttcctagggtggcagtaactaagtaccatatactgagtggcttaaaacaaccgaaatttattgtctcatagttctggaggctacaagtctgaaatcaaagtgtcaccagggccatgctccctctaaaatctgcaggggaatctttctttgccttttcctaacttctagtgatttgctggcaatccttggcttgcagctacataactccaatctctgcctttattctcacatggcgttccttctcccstgtgtctctgtgtcttcacgtggtcatcctcttatatccaatcatattggatgagaggcctgcccaccgatctccagtatgacttcatcttaacttaaataattatatctgtatcaatcctattaccaaataaggtcacattctaagtactgagggttaggacttcaacatatcttttttcctgatggggaggggttgggggaacagaattcaacccatag

SEQ ID NO: 295764 - DNA, 509 bp, Homo sapiens
tccaaagtcacttgaaacccacggtttatgcaaaatttgcaaagttgggcaggattgcccctagagttgtagaactgtgagacattgctgcatcttgttgtgggatgaggcaggcatctttacttcctaatgtgccagatttttctctggcaggtcacctgcctgtttagatggtttacctggaaaacaaagtttaaaggcagtaaatgaaatgaggtaaaatggagcactggtgttatgtgccttttcatatgagcctttacatataattatttgatccttttgttattgtttgggttagtgttttaagccctgaaggagggctttcttttttgaaatggagtctcgctgtcgcccaggctggagtacaatggtgtgatctcagctaaccgcaacctctacctcctgggtttaagcaatttttgtgcctcagcctcccaagtagctgggattacaagygcccgccaccaggcccacctaatttttgtatttttagtagagatggggtt

SEQ ID NO: 295765 - DNA, 557 bp, Homo sapiens
aagtagactgtgaaagatcaagaatatatgttttaattcctagaaaaaccactgaaaatccaaagataaaatagaatcctaaattaagaaaaaaatgatccaaaagttgcagagggaagaaaaagaaaaacaagaagtggaggagcaaacagaaaacatataataaacttgcagctctaaatgcaaycatatcagtaatcagactaaatgtcagtggactaatcactaattaaaatgtagcagtgtcatagcaaaattctacctgatgtacaaagaagagctggtacaattctactgaactattccaaaaaattgaagaggagcaactcctcccaaactcattctgtgcatcaccctgatagcaaacctgacaaacacacaataaaaaaaaaagaaatcaacaggccaatatccctgatgaacatagaggcaaaaatcctgaacataataccagcaaaccaaattcaacagcacatcaaaaggttaatttaccatgatcaagtaggcttcattctggcatgcaaatttggtccaacatgagcaaatacaaatgtgat

SEQ ID NO: 295766 - DNA, 557 bp, Homo sapiens
aagtagactgtgaaagatcaagaatatatgttttaattcctagaaaaaccactgaaaatccaaagataaaatagaatcctaaattaagaaaaaaatgatccaaaagttgcagagggaagaaaaagaaaaacaagaagtggaggagcaaacagaaaacatataataaacttgcagctctaaatgcaaccatatcagtaatcagactaaatgtcagtggactaatcactaattaaaatgtagcagtgtcatagcaaaattctacctgatgtacaaagaagagctggtacaattctactgaactattccaaaaaattgaagaggagcaactcctcccaaactcattctgtgcatcaccctgatascaaacctgacaaacacacaataaaaaaaaaagaaatcaacaggccaatatccctgatgaacatagaggcaaaaatcctgaacataataccagcaaaccaaattcaacagcacatcaaaaggttaatttaccatgatcaagtaggcttcattctggcatgcaaatttggtccaacatgagcaaatacaaatgtgat

SEQ ID NO: 295767 - DNA, 525 bp, Homo sapiens
tattcacaatagcaaagatatggactcaacctaggtgcccatcaatggtggatcagataaagaaaatttggtacatgtatatcatgggatattatgcagtaataaaaaagaatcgaatcatgtcctttgcagccacgtggatgcagccagacaccattatcctagcaatttaatgcaggaacagaaaactaaatgccacatgttctcacttgtaagtaggaactaaactttgggtacgtgtggacgtgaagatggtaacaatagacactggggactactagagcagggaagaagggagaggggaaaaggttgaaaaaccaaatggtgagtactatgctcagtacctgggtaatgctaccattcatatcccaaacctcagcatgatgcaatatacccaggtaacaaacatgcaaatataccccctgaatctaaaatgaaasttgaaaaaataaacacataaaaacagatgaatgaattttttttaaaaagacctaagcccaagggctttatgaatgcaagctactt

SEQ ID NO: 295768 - DNA, 477 bp, Homo sapiens
aataagtgagtgatggaaaggaaactatttgtagttcatgtagacctctcttacctccaccagcatccaaaaggggggaagaaaatccacagaaatcagcttgtctataaattctacaacttctagatgaataaaatagttaattgttcacttgaaaatgactactttacacttttggagagaggcctgaaaatttcttggcaatacttcaactgattaataatttagaacaatgattgactggagaatggaagtggcgctaatagcctctcattttcctctttattatttcagacaaattggtragtcatggtggaggtgtgggatgtttctgggtcaactggctagaagctttaaattaaaaatgaaggatgatatttgatcttaattttctaagatgttggcctcaccccttgatggtacgagatacctttgcgattgcattgcttctgatgcttaatccttctatgcactcct

SEQ ID NO: 295769 - DNA, 573 bp, Homo sapiens
cttaatccttctatgcactcctggcaaagtctatgtgaattacagcaaacttttactgtgactctgctacgtgtgccatatcatgttaagcactggttgggataaaacaatgggtttgatgcaattctaaccttaagtagttaaaaggtctggcaagaaagacacatatgactataaatcatcctcctaccaggtaaaaagtgttaagtatcttaagagaaagatatgaacaaataccatgggagccattagcttayggtattgatgtgaggaatctgcctaataggaaattagtgatttaaaacaatgtgaaaaagtcaaatcagtacaaatagtgtatgctgataacagcaatttgaattatgaagtgactaaagaaggggtgctggcatgagaagctggttcagagtttcagggctacataaagctgcaggtccgccttcaaaagaaaagattcagataaattgatcctagaaggaccaaagtgagcctcctcctagaaagtgcacaggagtttagctgggaatttgcatttgttcttgggagaggcaatggctttaacaggagacaggg

SEQ ID NO: 295770 - DNA, 595 bp, Homo sapiens
gcacacaccaggccctggtcactttaacatggtgctttttcccattaacaaagagcaaccccaccgatttcagttgtgattcttgaaactcagccctttgcccagtaagtrctaaccggaagacttgttttcttacactttctaggtggataatctgatcaccagaaatggcaagggtgatgccatcaacagttgaaaacagaaactctcctatttatttatttatttatttatttcggtttggtttggcaaacatcccattgtctccaaataggattgcttggtattgggagagcagccttgtacataggcaagacagaagaggaattttaatcagctttacatttgttttgaagattcaggaaagatggaggctttatctcataccaacgtatctatgccatagattgctgggaaacaagagttgtcctggttactaacgtagtgtacattaagtttcctggaattttttttttaagcctgtttatttgatgctggcacctctgttcttctgaaggcagcatattaggtttactaataaatgacacccagttcctaagagactcggcctaaaagctttcctgacagggcagga

SEQ ID NO: 295771 - DNA, 595 bp, Homo sapiens
gcacacaccaggccctggtcactttaacatggtgctttttcccattaacaaagagcaaccccaccgatttcagttgtgattcttgaaactcagccctttgcccagtaagtactaaccggaagacttgttttcttacactttctaggtggataatctgatcaccasaaatggcaagggtgatgccatcaacagttgaaaacagaaactctcctatttatttatttatttatttatttcggtttggtttggcaaacatcccattgtctccaaataggattgcttggtattgggagagcagccttgtacataggcaagacagaagaggaattttaatcagctttacatttgttttgaagattcaggaaagatggaggctttatctcataccaacgtatctatgccatagattgctgggaaacaagagttgtcctggttactaacgtagtgtacattaagtttcctggaattttttttttaagcctgtttatttgatgctggcacctctgttcttctgaaggcagcatattaggtttactaataaatgacacccagttcctaagagactcggcctaaaagctttcctgacagggcagga

SEQ ID NO: 295772 - DNA, 413 bp, Homo sapiens
accatgaaagcataaatcattaatgattccacaaccatttgagttcttctctggtctagaatatgccaattaccatgaaattagtcctattagcaacatgattgaatgatagtaacctgactgtaacttgttggcagaaattctctcataatgacagtaatgaactgtgcatttgagtccttgctgggctctgttaaacaggaaggttggatattatatgtttctaaccccttatgaatgatacttcttaatgattatgtgaattgaaggaaatgttctgttttgccgatttctttcaatgtaggaatttatcatttttacttaatttgttgggggarggaatcactgtttgccattaaaaatgttgttcagggactactttgtgctacacacatattacgatcatcaccagt

SEQ ID NO: 295773 - DNA, 635 bp, Homo sapiens
agcatttcactgtattttgatacaaatgttcaaactacacattaggggtaatttctgcctcatttggagcacgaatctaaatgattgtatctccattagagaaaatgaagagccctctgtgtctgatactacttcgttaaagagaaaatattctcctagtaggcaaaagttactgaccaaatacagccccaaatcaaagatcattcctactaagaactcttacattagcttcctttttcatgaattaaygtgggtctgtggaatctacatttctttgaaatatttgcacattttcccttttcagcagatgagagaaaatcttcattgaagacacattcctttgtcactttgggggctgataggggatgagagtctttgtatttcaagacatctaacctgcttacagaatttgaggttatacatcttgagtaagctttaggtctgaaaattgagacttcagctcacaaagtgttgattacatccctttgcttagcaatacagtttagtcatttgtaaaaagtcaactgaatacaatttggcctcatcaatgaaatgtatcaagaaccataaagtagtagaatgatgttaagaaaaataacctttcctttttttctttgctttctttgtattaaaaa

SEQ ID NO: 295774 - DNA, 1271 bp, Homo sapiens
agcatttcactgtattttgatacaaatgttcaaactacacattaggggtaatttctgcctcatttggagcacgaatctaaatgattgtatctccattagagaaaatgaagagccctctgtgtctgatactacttcgttaaagagaaaatattctcctagtaggcaaaagttactgaccaaatacagccccaaatcaaagatcattcctactaagaactcttacattagcttcctttttcatgaattaatgtgggtctgtggaatctacatttctttgaaatatttgcacattttcccttttcagcagatgagagaaaatcttcattgaagacacattcctttgtcactytgggggctgataggggatgagagtctttgtatttcaagacatctaacctgcttacagaatttgaggttatacatcttgagtaagctttaggtctgaaaattgagacttcagctcacaaagtgttgattacatccctttgcttagcaatacagtttagtcatttgtaaaaagtcaactgaatacaatttggcctcatcaatgaaatgtatcaagaaccataaagtagtagaatgatgttaagaaaaataacctttcctttttttctttgctttctttgtattaaaaawagcatttcactgtattttgatacaaatgttcaaactacacattaggggtaatttctgcctcatttggagcacgaatctaaatgattgtatctccattagagaaaatgaagagccctctgtgtctgatactacttcgttaaagagaaaatattctcctagtaggcaaaagttactgaccaaatacagccccaaatcaaagatcattcctactaagaactcttacattagcttcctttttcatgaattaatgtgggtctgtggaatctacatttctttgaaatatttgcacattttcccttttcagcagatgagagaaaatcttcattgaagacacattcctttgtcactttgggggctgataggggatgagagtctttgtatttcaagacatctaacctgcttacagaatttgaggttatacatcttgagtaagctttaggtctgaaaattgagacttcagctcacaaagtgttgattacatccctttgcttagcaatacagtttagtcatttgtaaaaagtcaactgaatacaatttggcctcatcaatgaaatgtatcaagaaccataaagtwgtagaatgatgttaagaaaaataacctttcctttttttctttgctttctttgtattaaaaa

SEQ ID NO: 295775 - DNA, 504 bp, Homo sapiens
caactaactctaccttagggattaggagagagcctcagtgaggaagtcaggattgggacttcccaggcaaagaagagagggaatgcttcccagtaaaaggaaatagcacatrcctgtttcagggaagtaaataattctgctagaaaatattaactgagtctgtaacttggggtacagaagtgtggagaagacagataaagcaaatctggtaagactggctggagtctggtaagattatggaaacttgtttgtcaggacttagaacttgattttaaatgaatatgaaggagagaaatgcaactgtgtaaagaagaaacttcagatggtgttgggaagatctgaggcactctaccagctgagtattaaaactgtctatttggcagcactgtagaggtgggttggaggaaagcaaaggacaagtaaagggctagtccaggtaggactaggacaaacctaacttcaggaatctcttagccatctctgaccttgcaggacatcatggaa

SEQ ID NO: 295776 - DNA, 504 bp, Homo sapiens
caactaactctaccttagggattaggagagagcctcagtgaggaagtcaggattgggacttcccaggcaaagaagagagggaatgcttcccagtaaaaggaaatagcacatgcctgtttcagggaagtaaataattctgctagaaaatattaactgagtctgtaacttggggtacagaagtgtggagaagacrgataaagcaaatctggtaagactggctggagtctggtaagattatggaaacttgtttgtcaggacttagaacttgattttaaatgaatatgaaggagagaaatgcaactgtgtaaagaagaaacttcagatggtgttgggaagatctgaggcactctaccagctgagtattaaaactgtctatttggcagcactgtagaggtgggttggaggaaagcaaaggacaagtaaagggctagtccaggtaggactaggacaaacctaacttcaggaatctcttagccatctctgaccttgcaggacatcatggaa

SEQ ID NO: 295777 - DNA, 504 bp, Homo sapiens
caactaactctaccttagggattaggagagagcctcagtgaggaagtcaggattgggacttcccaggcaaagaagagagggaatgcttcccagtaaaaggaaatagcacatgcctgtttcagggaagtaaataattctgctagaaaatattaactgagtctgtaacttggggtacagaagtgtggagaagacagataaagcaaatctggtaagactggctggagtctggtaagattatggaaacttgtttgtcaggacttagaacttgattttaaatgaatatgaaggagagaaatgcaactgtgtaaagaagaaacttcagatggtgttgggaagatctgaggcactctaccagctgagtattaaaactgtctatttggcagcactgtagaggtgggttggaggaaagcaaaggacragtaaagggctagtccaggtaggactaggacaaacctaacttcaggaatctcttagccatctctgaccttgcaggacatcatggaa

SEQ ID NO: 295778 - DNA, 504 bp, Homo sapiens
caactaactctaccttagggattaggagagagcctcagtgaggaagtcaggattgggacttcccaggcaaagaagagagggaatgcttcccagtaaaaggaaatagcacatgcctgtttcagggaagtaaataattctgctagaaaatattaactgagtctgtaacttggggtacagaagtgtggagaagacagataaagcaaatctggtaagactggctggagtctggtaagattatggaaacttgtttgtcaggacttagaacttgattttaaatgaatatgaaggagagaaatgcaactgtgtaaagaagaaacttcagatggtgttgggaagatctgaggcactctaccagctgagtattaaaactgtctatttggcagcactgtagaggtgggttggaggaaagcaaaggacaagtaaagggctmgtccaggtaggactaggacaaacctaacttcaggaatctcttagccatctctgaccttgcaggacatcatggaa

SEQ ID NO: 295779 - DNA, 567 bp, Homo sapiens
ctcaatatataaacatgtataatgtggcacaactgcagtcataatgagagatttacaactttcagtaactcataggacaagcagacaaaagtcagaacaaatatagtaggtttgaactaaataattaacaaatattgattcaaagtttaaaaaaatagagtgtgttcaacagaaaaatatactacatggtatttttataaaaataatggccgggcatggtggctcacacctctaatctcagaactttgggaggtcaaggcgggtggatcacttgaggtcaggagtttgagaccagcctggccaacagagcaaaaccccacctctactaaaaatacaaaaattagccaggcatggtggcsggtgcctgtagtcccagctacttgggagcaattcaagcatgagaattgcttgaacctgggagactgcatgagctgagattacgccatggcactccagcctgggcaaaagagcaagactctgtctcaaataaataaataaataaataaaataaaataaaataaaatttgaatgtttggatgttaactataaactcctaaaataattgat

SEQ ID NO: 295780 - DNA, 1211 bp, Homo sapiens
ggtttttgatggtgaattcccttattgtatttacctaaaataatgaagttcagaaagttatactaaaatagctaaaatattaggtgtcactaactgaatcagaaatcaagaaagctcatttttttttaaattttattattattatacttaaaagtttagggtacatgtgcacaacgtgcaggtttgttacatatgtatacatgtgccatgttggtgtgctgcacccattaacttgtcatttagcattaggtatatctcctaatgctatccctctcccctycccccaagaaagctcattatttaaaaatgacaaaagtcaatttacatctttttaaaggactgaaactcagaaggttagaaacacctgcttgagatcacatggtccagcttattcattttcaaattgggaacctgaggccctgacaaggcaagcaacttgcttagagtctcatcacaaaggaaggacagatccagatcttcttatttagaatcttgaagtctttcacgaggcttcaaaaactcaacccttgggtggcataaaattatttcgagagatccaagaatgtatatacacatttggatttgtttgatttttacgtatataawggtttttgatggtgaattcccttattgtatttacctaaaataatgaagttcagaaagttatactaaaatagctaaaatattaggtgtcactaactgaatcagaaatcaagaaagctcatttttttttaaattttattattattatacttaaaagtttagggtacatgtgcacaacgtgcaggtttgttacatatgtatacatgtgccatgttggtgtgctgcacccattaacttgtcatttagcattaggtatatctcctaatgctatccctctccccttcccccaagaaagctcattatttaaaaatgacaaaagtcaatttacatcttttwaaaggactgaaactcagaaggttagaaacacctgcttgagatcacatggtccagcttattcattttcaaattgggaacctgaggccctgacaaggcaagcaacttgcttagagtctcatcacaaaggaaggacagatccagatcttcttatttagaatcttgaagtctttcacgaggcttcaaaaactcaacccttgggtggcataaaattatttcgagagatccaagaatgtatatacacatttggatttgtttgatttttacgtatataa

SEQ ID NO: 295781 - DNA, 605 bp, Homo sapiens
ggtttttgatggtgaattcccttattgtatttacctaaaataatgaagttcagaaagttatactaaaatagctaaaatattaggtgtcactaactgaatcagaaatcaagaaagctcatttttttttaaattttattattattatacttaaaagtttagggtacatgtgcacaacgtgcaggtttgttacatatgtatacatgtgccatgttggtgtgctgcacccattaacttgtcatttagcattaggtatatctcctaatgctatccctctccccttcccccaagaaagctcattatttaaaaatgacaaaagtcaatttacatctttttaaaggactgaaactcagaaggttagaaacacctgcttgagatcacatggtccagcttattcattttcaaattgggaacctgaggccctgacaaggcaagcaacttgcttagagtctcatcacaaaggaaggacagatccagatcttcttatttagaatcttgaagtctttcacgaggcttcaaaaactcaacccttgggtggcataaaattatttcgagagatccaaraatgtatatacacatttggatttgtttgatttttacgtatataa

SEQ ID NO: 295782 - DNA, 423 bp, Homo sapiens
agtccacaaagtttgtggcaagtaactatgaaactgacagcagaaagtrtatggtattaggaatctgaggacacggttccaaaaatttttacttgtttactctgtgtgtccttggtgtcaggatatcctaagaacttcattgtcttgtaagattttgtgtgtgtgtgtgtgtgtgtgtgtgtgtatgtagaatctggccatctatctcacaggcatattgtggaatatatcaaagtatgtcagaatatactgcaaactctaaagctgtatagcaatataagatgttagtatatttgtaataaaagattttcaaaattaatgtagaatcttccttcggaacaaccttatgaataaaagtacagtatgttctactttgcatcatttccagtccctacagtaaaccttttgacctgaattcaaagg

SEQ ID NO: 295783 - DNA, 519 bp, Homo sapiens
aatacttgagcacttgtcaggagcacacgttgtttcccagatgctcattgccttctcaccactctgcataatcctaacacatgacacattagtttcagatgagccagatgccaaatgggagacattttacagtacagagaaatcagagtggtggagtaatacagaaacttttagccaaggcayattctctgggctctcaatcctttgcagctgccacacctctcgctagaatgcagtgcacacagaaaacagttctgacatctgcctcgcttgtggtccccagtaagaattctcgacattgatatatgctgttccactcaggactggagcatgagaatcctcaccagggacacttcattaattctgcaaaagcatgcacttatcatacactatacactaacaacttccaaaaataatagtgtaaggtaacttacaataacaatatatgtagccagaaaatacaatggtacaagctaggacaaaaactatcacatatggaggagtgattgattgtacttg

SEQ ID NO: 295784 - DNA, 602 bp, Homo sapiens
ttttacagtacagagaaatcagagtggtggagtaatacagaaacttttagccaaggcacattctctgggctctcaatcctttgcagctgccacacctctcgctagaatgcagtgcacacagaaaacagttctgacatctgcctcgcttgtggtccccagtaagaattctcgacattgatatatgctgttccactcaggactggagcatgagaatcctcaccagggacacttcattaattctgcaaaagcatgcacttatcatacactatacactaacaacttccaaaaataatagtgtaaggtaacttacaataacaatatatgtagccagaaaatayaatggtacaagctaggacaaaaactatcacatatggaggagtgattgattgtacttggaaagtgaattgcgatgcctctatttattccacgagtatgaggtaaacctcgtctaaatgtcaggtaaggctattgtcactatgatttagcggagggaagaaaaagggtctctgttctcaataacatgaataaagtgaagacatgcagtaaccagaaaaacgtgtgaaatcgctaagattaatatagatacaacttctcactaaaaa

SEQ ID NO: 295785 - DNA, 1799 bp, Homo sapiens
tcaatacatatggagaaaatagtttcayggaatcaaagttatctggttcacctcctttaagtgcatttcccaatgtgagttctgaagcatatttgttccacgacatgtgaaaaactgaggggcttaaataaattgggaaatgccgggttacacaaagttaaacagctttctttattgtggaactttcagagtctctaatatgctgatgcacattgtaaatattcaagaggtcaacatactctgtaatatctctcaaagctggttgacccagaaacttgcaaaatatcttacaagggtggtaatttgcaggacatgcagtgaaaaatgctaatataaatcaatctaaaatgttcatccagtctctgattaaattttccccatgtgaacaaaattgctactttccaaaagagttcattctgtcctacgaaagatctaagtcaaacgggatttctttcttacgctgaaccataatctatctctctataacttccactattgctcttgattttgcactttggaagaacaaaaagaagagtaatgcaattcctttttcctgcaatagctttttagatatttgaaagcgacaatcatattcacaawtcaatacatatggagaaaatagtttcacggaatcaaagttatctggttcacctcctttaagtgcatttcccaatgtgwgttctgaagcatatttgttccacgacatgtgaaaaactgaggggcttaaataaattgggaaatgccgggttacacaaagttaaacagctttctttattgtggaactttcagagtctctaatatgctgatgcacattgtaaatattcaagaggtcaacatactctgtaatatctctcaaagctggttgacccagaaacttgcaaaatatcttacaagggtggtaatttgcaggacatgcagtgaaaaatgctaatataaatcaatctaaaatgttcatccagtctctgattaaattttccccatgtgaacaaaattgctactttccaaaagagttcattctgtcctacgaaagatctaagtcaaacgggatttctttcttacgctgaaccataatctatctctctataacttccactattgctcttgattttgcactttggaagaacaaaaagaagagtaatgcaattcctttttcctgcaatagctttttagatatttgaaagcgacaatcatattcacaawtcaatacatatggagaaaatagtttcacggaatcaaagttatctggttcacctcctttaagtgcatttcccaatgtgagttctgaagcatatttgttccacgacatgtgaaaaactgaggggcttaaataaattgggaaatgccgggttacacaaagttaaacagctttctttattgtggaactttcagagtctctaatatgctgatgcacattgtaaatattcaagaggtcaacatactctgtaatatctctcaaagctggttgacccagaaacttgcaaaatatcttacaagggtggtaatttgcaggacatgcagtgaaaaatgctaatataaatcaatctaaaatgttcatccagtctctgattaaattttccccatgtgaacaaaattgctactttccaaaagagttcattctgtcctacgaaagatctaagtcaaacgggatttctttcttacgctgaaccataatctatctctctataacttccactattgctcttgattttgcactttggaagaacaaaaagaagagtaatgcaattcctttttcctgcaatagcttttwagatatttgaaagcgacaatcatattcacaa

SEQ ID NO: 295786 - DNA, 498 bp, Homo sapiens
gttaccttctcttataaagttataatatctcagcttcatgcaaattctattacattagaagaatgaagagtattagcctgaaacttactacctatactagtgacctccttccagcttaataccaattcattacttgataccargtaaattgtttcacaaacctacacaataccaatgataatacatttatctagctggtcatgaagtcataatataaaagatactgtcaaatgccttctgaaattaggatattaatctgtagcaatttcctaatctgcgaactgaagcagaccagtcatagctataggtagtgcaggtcttgttagttcacctgtgacatcaataactgtatcatcatgtaatttgataagttagaatcaataatgcagaaacaggacaatgctaatgccatttgatgcgggtacaggttaggatttaaaggaaataggctattaatagctgggaggttactctggatgagaaaagagtgaagaggca

SEQ ID NO: 295787 - DNA, 498 bp, Homo sapiens
gttaccttctcttataaagttataatatctcagcttcatgcaaattctattacattagaagaatgaagagtattagcctgaaacttactacctatactagtgacctccttccagcttaataccaattcattacttgataccaagtaaattgtttcacaaacctacacaataccaatgataatacatttatctagctggtcatgaagtcataatataaaagatactgtcaaatgccttctgaaattaggatattaatctgtmgcaatttcctaatctgcgaactgaagcagaccagtcatagctataggtagtgcaggtcttgttagttcacctgtgacatcaataactgtatcatcatgtaatttgataagttagaatcaataatgcagaaacaggacaatgctaatgccatttgatgcgggtacaggttaggatttaaaggaaataggctattaatagctgggaggttactctggatgagaaaagagtgaagaggca

SEQ ID NO: 295788 - DNA, 1587 bp, Homo sapiens
gttaccttctcttataaagttataatatctcagcttcatgcaaattctattacattagaagaatgaagagtattagcctgaaacttactacctatactagtgacctccttccagcttaataccaattcattacttgataccaagtaaattgtttcacaaacctacacaataccaatgataatacatttatctagctggtcatgaagtcataatataaaagatactgtcaaatgccttctgaaattaggatattaatctgtagcaatttcctaatctgcgaactgaagcagaccagtcatagctataggtagtgcaggtcytgttagttcacctgtgacatcaataactgtatcatcatgtaatttgataagttagaatcaataatgcagaaacaggacaatgctaatgccatttgatgcgggtacaggttaggatttaaaggaaataggctattaatagctgggaggttactctggatgagaaaagagtgaagaggcawgttaccttctcttataaagttataatatctcagcttcatgcaaattctattacattagaagaatgaagagtattagcctgaaacttactacctatactagtgacctccttccagcttaataccaattcattacttgataccaagtaaattgtttcacaaacctacacaataccaatgataatacatttatctagctggtcatgaagtcataatataaaagatactgtcaaatgccttctgaaattaggatattaatctgtagcaatttcctaatctgcgaactgaagcagaccagtcatagctataggtagtgcaggtcttgttagttcacctgtgacatcaataactgtatcatcatgtaatttgatawgttagaatcaataatgcagaaacaggacaatgctaatgccatttgatgcgggtacaggttaggatttaaaggaaataggctattaatagctgggaggttactctggatgagaaaagagtgaagaggcawgcaaatagggtcaaccttaactgactgtggtgatatcacttacatttatctgcgttagctcttctttagattgtttcagtgatagctcatattttcacagggcagaatggtaggtaaacagcacattgtgcttggagtgagaaaactgtggcagaggttttgatggtcactgactggctatagaacttcagcaagtcacttattctctaccagcctcagtttcttctttggtaaaatgagatacaattgctttatagggcaaaagatgctatagactcataggtaaatacagctatgaaagtattttataaattacaacacactctataaatattaaccatttgtattattattatgttgtattgttacctcatttttgcatgttatggggatactwatgaagttccccaaatttaggtcacattccttttccaggaagtgatgatgcccaataacttagactggctctaagataaaagctgagaaaagggtgtctctttctagaaatacgcaggaagaagctgaggtgaggaggagaaaattgcacagcttcccaacatttctcaatttggaagtttgtagtctggtg

SEQ ID NO: 295789 - DNA, 521 bp, Homo sapiens
cttactgactgtgtctgggatagaataggtgagtttaaaaggccaggattayagagtaacagacataaaatgttaagtatatatagtgacaattttatggatagaaaattaagtattcgagaagtaacttctttgtaattagaggtatttttttcatagagtccagacgataatctacttttctagatttttttttttttttttgagactgagtctcactctgtcacccaggctggagtgcagcagtgtgatctcaccttactgcaacctctgcctcccgggttcaagtgattttcatgcctcagcctcctgagtagctgggattacaggcatgcaccaccaggctcagctaacttttgtatttttaatagagacggggtttcaccatgttggccaggttggtctcgaactcctgacctcaagtgatcctcccgcctcggcctcccaaagtgctaggattgcagtcgtgagccaccatgcccggcctatttctctagattttaagttcactgcaacatgct

SEQ ID NO: 295790 - DNA, 521 bp, Homo sapiens
cttactgactgtgtctgggatagaataggtgagtttaaaaggccaggattatagagtaacagacataaaatgttaagtatatatagtgacaattttatggatagaaaattaagtattcgagaagtaacttctttgtaattagaggtatttttttcatagagtccagacgataatctacttttctagatttttttttttttttttgagactgagtctcactctgtcacccaggctggagtgcagcagtgtgatctcaccttactgcaacctctgcytcccgggttcaagtgattttcatgcctcagcctcctgagtagctgggattacaggcatgcaccaccaggctcagctaacttttgtatttttaatagagacggggtttcaccatgttggccaggttggtctcgaactcctgacctcaagtgatcctcccgcctcggcctcccaaagtgctaggattgcagtcgtgagccaccatgcccggcctatttctctagattttaagttcactgcaacatgct

SEQ ID NO: 295791 - DNA, 549 bp, Homo sapiens
tggcatgagctgaaactccagaaatgcatgtccaacgagatggaggatatgcttccttccatatcctattctgaagtggatttttataaattatttgttatctctacaattccagaaatgtttatggtagcagtgcctggtctacattgtttattttcaacagagraatatttttttttcaaagcactatatttctgtaggtgtgttgtcaaaatgctgactcattcactcaagtataaaatttactatatgaattgccttaggagcctgaatattttccaaattccatgtcttaaatcaacatgtgaagatttcagttccataatttctgtgatttagtctcaagaaattcacagtaaaaattcaacattaaagttttggtaacatcacaaaaagaaggaggaagagaaggatgagaaagaggaaaaggataggaaggagaggagaagaggaaatgcaggcaagcaggttggctcacaacacatgaaggtcaactttggacacagactcaaaacccatgagaacatttatgggtacatttagagcttt

SEQ ID NO: 295792 - DNA, 549 bp, Homo sapiens
tggcatgagctgaaactccagaaatgcatgtccaacgagatggaggatatgcttccttccatatcctattctgaagtggatttttataaattatttgttatctctacaattccagaaatgtttatggtagcagtgcctggtctacattgtttattttcaacagagaaatatttttttttcaaagcactatatttctgtaggtgtgttgtcaaaatgctgactcattcactcaagtataaaatttactayatgaattgccttaggagcctgaatattttccaaattccatgtcttaaatcaacatgtgaagatttcagttccataatttctgtgatttagtctcaagaaattcacagtaaaaattcaacattaaagttttggtaacatcacaaaaagaaggaggaagagaaggatgagaaagaggaaaaggataggaaggagaggagaagaggaaatgcaggcaagcaggttggctcacaacacatgaaggtcaactttggacacagactcaaaacccatgagaacatttatgggtacatttagagcttt

SEQ ID NO: 295793 - DNA, 549 bp, Homo sapiens
tggcatgagctgaaactccagaaatgcatgtccaacgagatggaggatatgcttccttccatatcctattctgaagtggatttttataaattatttgttatctctacaattccagaaatgtttatggtagcagtgcctggtctacattgtttattttcaacagagaaatatttttttttcaaagcactatatttctgtaggtgtgttgtcaaaatgctgactcattcactcaagtataaaatttactatatgaattgccttaggagcctgaatattttccaaattccatgtcttaaatcaacatgtgaagatttcagttccataatttctgtgatttagtctcaagaaattcacagtaaaaattcaacatkaaagttttggtaacatcacaaaaagaaggaggaagagaaggatgagaaagaggaaaaggataggaaggagaggagaagaggaaatgcaggcaagcaggttggctcacaacacatgaaggtcaactttggacacagactcaaaacccatgagaacatttatgggtacatttagagcttt

SEQ ID NO: 295794 - DNA, 549 bp, Homo sapiens
tggcatgagctgaaactccagaaatgcatgtccaacgagatggaggatatgcttccttccatatcctattctgaagtggatttttataaattatttgttatctctacaattccagaaatgtttatggtagcagtgcctggtctacattgtttattttcaacagagaaatatttttttttcaaagcactatatttctgtaggtgtgttgtcaaaatgctgactcattcactcaagtataaaatttactatatgaattgccttaggagcctgaatattttccaaattccatgtcttaaatcaacatgtgaagatttcagttccataatttctgtgatttagtctcaagaaattcacagtaaaaattcaacattaaagttttggtaacatcacaaaaagaaggaggaagagaaggatgagaragaggaaaaggataggaaggagaggagaagaggaaatgcaggcaagcaggttggctcacaacacatgaaggtcaactttggacacagactcaaaacccatgagaacatttatgggtacatttagagcttt

SEQ ID NO: 295795 - DNA, 538 bp, Homo sapiens
ttccctctgtagaatctgacaaagaccagggacaccctctgctctgcccttgagcgatgatcccttctcctccactgtgatgtaaaccaggsagcagccatggtacatgagatacttacactgattcatttaacaacaaaggcctccaaaggcatggaaaaactgaatcatcattctttgagaaactatgttggcaacgttggaaagataaaaatatatatatatatttacttggtaatagaataaaattttcaattaacaacaacaacaaaatagtatcatggattggcacatgcagaagcccaaacaatagtaataatgtttatgtctgcaaatattttatagtttattctggccaatcatatagctcatctcatttgacacttaggagtgaagggattatctgcccatttcatatattaaaaaaacattgtggttggataacttgagatcatatagctggaaaggagagcattaaggtgtataatttataccttttcaacttaattctagaattctgacactgccttccctaaaa

SEQ ID NO: 295796 - DNA, 598 bp, Homo sapiens
ttttcttaactctagggcaatacataaacagactgcaggtccaattgagccacagttttcctatctgtcctttagggagtctcaggtcttaaagactaaattgaatcaaaggcasaaatggagaaatctgagatgcctgcttcactcctgggcttcagaaactccacctgacactgactatgctggaaaatgtttaacaatttgcttaaaaaaaaactatttagcaatatttgttaatagatctggcatcaaaaattcaatgacatactggagacaactccaaccagctcagcagacgaaattgttaaattttcagtagttttacaaagttgattcaactacagtgaggatacttatgccacaacattgatacatgctataaatcaggtcatttttcttttggagaactggttgttaaacatttaccagcataccactaaaatattctcaccatggaagacttcagactaacaactcaagatcattggatgtggagttaggaagctgtatgcagaagcatgtcattgtatagcattgttaaaaaaataactttagaaaaattaaactagtttgagcaaagaatgattcagaaattatt

SEQ ID NO: 295797 - DNA, 636 bp, Homo sapiens
tgtattgtatttacaactcatctctaaatctgaggttatttcaaaacaaaagtttaaaaatatagaaattcctatggtaatcaagtctccaaagttaggaaataaacaacccaatgaatattgaccaaatatttaaatttttttggcaaggaatttatagtgatagtaaatgagtatatgaaaaaatgtacagcatcataatggaaataaaaattcaaaccaaaatgagatttagttacatatttgttggaatggctaaaaataatgactgactgtgtcagtcatggagcaacttaaactctaaaactgatggtatactttaaagcttaagctgcagcaatatgatgacttagccacttctatcttagacatttaagcaagagaaatgaaaatctgtgttgatatagagacctgtttacaaagtgaagtttacaatagctttatttgtaaaagtcagtaattaaaaatataccaatgtccatgcatagatgacagtaaaccttttgtgatacattgagattatggaatattacttgtcmaataaaggagtgaaaaatttatacacatgacaacttggatggatctcaaaataattactttgaatgaataaagccaacaacagagtacatactatat

SEQ ID NO: 295798 - DNA, 549 bp, Homo sapiens
ctttatgatgcttctctgctatgtgtataattttaagctctaaaaatttgccttatattaggtaaagatttttcaaaaccaaattcaacttttcacgttttaaatttttaaatttagatttcttttcttttaaaattcgagttttaaaaagcagcttacttaacttcaccctaaccttaatctcttaaataggtaaatgcattagaatgaataatggccacaaaaggggacctaatctggaacctgtatatatatatgtatatatatacacacacacacatacatggtgattatataaggtattatatacacacagtattatatatataaggtattttttatatatatggtgattatataaggttttatatayatatatatatgatctctgctcattacatttctgcctcccaggttcacgtgtgtttaaggattttgaatttaagaaatatgatttttaattttctttgaaacaaattattgcttttatttgaatttggaatgaagatccattaagatcaagttaaggttgtgcaatttgaagtaaca

SEQ ID NO: 295799 - DNA, 582 bp, Homo sapiens
cctttagaattggaacaagaagaggatgcccactctcatcactcctattcaacatagtgcctgagagcaatcaggcaagagaaagaaataaaatatatcaaaataggaagaaagtccaaactatctctcttcacagatgatatgagtttatacctagaaaacccatagtttctgcccaaaagttcccagatctgataaacaacttcagcaaagtttaagcatacaaagatcagtacatttctatacacaaacggcatccaagctgagacccaaatcaagaacacaatcccattcacagtagacacacacacacacacactcacacacacatacctaggaakacggctaaccagggaggagaaagatctctacaacaagaatgacaaaacactgctgaaagaaatcatagaggacaaaaacaaatggaaagggttcaatgctcatggatggaaagaatcaatattgttaaaatggccaaaccgtacaaagcaatgtaaagattcaatgctctttatatcaaactaccaatgacatttttcacataactagaaaaaagctattctaaaattcatatggaaccaa

SEQ ID NO: 295800 - DNA, 538 bp, Homo sapiens
tttattaaaaatatcatttctaaattccttgtatgtaatacttacacaatagttttaaaattacaaatttcaaaaactaaaaaaaaataaggatgatattaaaaatgaaacacaccaaaatattctgcctctgtcatccatttataattctgagtcagttttttcattttgctgtgtgtatgctacaactgccatgtttataaaaygagggacataattcttctcatgagcaaattaaaaataagtatttgaccggtgtgttgaccctactaaaataatggtacgaaatttcttaaatggagtattttgcatcttcatttcaaagatagtcctgttcatccatttgtgaaatatgcatgtactctgtcaatgtgtgcaacagtttatcagtaacagagagatatgcaagtagtataagtcatggttcattacctttaaagaattaaattctacttggaaagatacaaaagggcaaaaaaaaacacctcaaaaaatactacaagcaatatgtgccacatgttatacatgctggtttaag

SEQ ID NO: 295801 - DNA, 635 bp, Homo sapiens
gagctaactcctctgttaaggacagaaaaactgaacaacaggtttctgttaaaatcttctttaagagcataagagagctaatgagatagtgaagaaccaccaggttaggttgcagaaaaaaaataaaaggaaaaaaagatactcacttcagctgcttctccctggtggcattttcagtttcatcagaagtgtctgaaagacagactgagaagaattttgacagcttcrtgggatccagaatacaataatgtcagggagacttagaaaacatccctgttcctgaagcctagggtggggatcctgaggaaagcatctcacaataaatgtgaaccaaaattggagcagctctcagagactgaagcacagctctgaggcataccagtctctgagagtggagtaaaattactagtgacacaaagcaccggtcaagatccagtgtcaatcttctctaggagaagacaatgtcatctaggcctcaaactgttctacacatagtttttcaaatgcaatgtccaggatgtcatcgacatcatcatctctgccatcatcatcaatatcaccatcatccttatcatcacaatcaggcacataaaaagacaggataatgacaacagaaacaactgccaatagaaaca

SEQ ID NO: 295802 - DNA, 635 bp, Homo sapiens
gagctaactcctctgttaaggacagaaaaactgaacaacaggtttctgttaaaatcttctttaagagcataagagagctaatgagatagtgaagaaccaccaggttaggttgcagaaaaaaaataaaaggaaaaaaagatactcacttcagctgcttctccctggtggcattttcagtttcatcagaagtgtctgaaagacagactgagaagaattttgacagcttcatgggatccagratacaataatgtcagggagacttagaaaacatccctgttcctgaagcctagggtggggatcctgaggaaagcatctcacaataaatgtgaaccaaaattggagcagctctcagagactgaagcacagctctgaggcataccagtctctgagagtggagtaaaattactagtgacacaaagcaccggtcaagatccagtgtcaatcttctctaggagaagacaatgtcatctaggcctcaaactgttctacacatagtttttcaaatgcaatgtccaggatgtcatcgacatcatcatctctgccatcatcatcaatatcaccatcatccttatcatcacaatcaggcacataaaaagacaggataatgacaacagaaacaactgccaatagaaaca

SEQ ID NO: 295803 - DNA, 1181 bp, Homo sapiens
gagctaactcctctgttaaggacagaaaaactgaacaacaggtttctgttaaaatcttctttaagagcataagagagctaatgagatagtgaagaaccaccaggttaggttgcagaaaaaaaataaaaggaaaaaaagatactcacttcagctgcttctccctggtggcattttcagtttcatcagaagtgtctgaaagacagactgagaagaattttgacagcttcatgggatccagaatacaataatgtyagggagacttagaaaacatccctgttcctgaagcctagggtggggatcctgaggaaagcatctcacaataaatgtgaaccaaaattggagcagctctcagagactgaagcacagctctgaggcataccagtctctgagagtggagtaaaattactagtgacacaaagcaccggtcaagatccagtgtcaatcttctctaggagaagacaatgtcatctaggcctcaaactgttctacacatagtttttcaaatgcaatgtccaggatgtcatcgacatcatcatctctgccatcatcatcaatatcaccatcatccttatcatcacaatcaggcacataaaaagacaggataatgacaacagaaacaactgccaatagaaacawactttcctctaattggatcccctggaaaggagaacagccccaatcccagccagcccatccatccatccattcattcattccttgagaacccatcatgtgaatcagggccctgagctggggtctgggtgagcaggaagaggaagggctgcacagatggcgcacacacttgggcggggagacccacggtcctaggcaggcagggatccgaagcatcatgwggaaggcagagatccaaagcatcatgcaggaggcagagttaagcagggtggagcgaccgagcaagtgcttctccgaggaggtaacatttaagctgaggcctgaatggaaaaatggagccagccacaccacagtctggggaggtgctcccagaggaggggactgcaagtgcaaaggccaagagaccagtaggaatgggggctgtttaaggaccagcaccggagaagggggaggtcaggatttcagcgggtgcctctcaggcagggcctgtgtctgtggcaggaataatctatattttacaccatgtgcgctcggaggaggctgcttca

SEQ ID NO: 295804 - DNA, 484 bp, Homo sapiens
atagcagttgccatcccatagtgccaaacctgttcttagccaagagggactttactgaaaagggcctctaaccccctaagtcttaggaaggactctaaccctcctaagttggtcctcaaacccaaggttggtcaagcgtccttgccttttatcgggaagagcctttaaccctgtgtcttaggctagactccaactcccctaagttgggcctctaacccaatcccaccctttacctgggtacaccatcacttacccaaagtcagccaatcagtgctgcagyctatttccttcagatggttgcgggggtgggaggggggcgatgtgggggttgttcttcagtatcgtcccttctgtggttcaccagaaagatattaccagaccccaccactcacccaaagttagcctttgggtcggggtttcggcactatagtctcttcagtggtcgcaagaaagatattaccggaaaggggccccgatccagacc

SEQ ID NO: 295805 - DNA, 574 bp, Homo sapiens
cttccaaagagagctgccctgaggacccaatcagcccacagcctgcagctgctgtgcctgcaaaacctgccaagtagccaggctgaggccacactctgctagccaaaagcccagtgtggcagcagtaccagggcctgggcattcctgctcagcttggggctcctctgtggacagtctatcagggagtcccactgggccggagagattttctcagagctgtgctgcaggctaacactcttcttacccaatctgcctgccttattctctcttcttagaaggctcaaacccacagtatggtctcaggcaatccccacccactcctgctccttctcctctggatttcttgcaggtgattcctgccataaatcccttgcacttcttgctccgtcatcttggcatctgcttttcagtgttcctaactggcacgacacatcatccaaaccacaaggaagacttctcagttatggaatcatgcagkacatggcatatgagggtggctcctctgtgcttctaaggttccagtggtggagaaacctctgacagctaaagcctggagccctctgaccatttgcac

SEQ ID NO: 295806 - DNA, 565 bp, Homo sapiens
ggtccctgctcgggaggagagaagggaaacaagattgacaggtgaagagatgggggagggcaagagggggccagggctggagcaggcagggacacaaagaggtactctcctcctccattcagttctgcccagaacacaggcaggaccctgcctggtgccagactggacccccagagatgggtccctacccactgcatctggccaaatggggagagcctgcagaggggcagagaagtcagagccatcagcgcccccacagaaaaaggtgcaggcctctgaggaagcacaggagtgcagcaggcagaaasaacaacgtatgcaggcaggaggtgtgtgcatgatggcagggtttcgaggacagcccagtaagaaacaaagccagaaaaaatgctgaggtccctgaatgtcaccgacagcagtgtgggaagaccttgccttgggggagaacctgatcttagatggactaaaaggcctttgtccctctttgttcagaaatgcaccttggggaccaaatcctgtggctagagttacacgtctgtgcaacaggctgccacaagtctgaaca

SEQ ID NO: 295807 - DNA, 589 bp, Homo sapiens
gaattaatacgtgagcatttatcattttacccaacaaacagagaatgtgccattggtgggaaggttcagggaacatcgttaaaagctgatcatatcatcagtcccggtgaatatgtcaaaaagatttttcaaacagatcttttagagaccacagtcttgaccacaatataataaagctagaaatactttctaaaaatagaaagaaaagtagagatttaaaactactctcctaaataacatctaggtcaaggaggaaatcaagtacacagtaactgataacccagaaacaatgaaaatcaaacctacatatcaaaacccacaggacggtcctcgccagcctcagaggctcgcccataactttaaacgtgtttattktcaaaccagctcacacacgcaaagagaacgtgaagagatgaggctttcaacctcggatttttaagaaaagaacaaacctgaagaaaaataggagaaagaaaatcctaaagataaaagcagataaataaattagagaacatgaaagcagtgaaaataacaaataaataccagacctggttctttgaaaaaaactaataaaatagaaaaacttcct

SEQ ID NO: 295808 - DNA, 595 bp, Homo sapiens
tccgtacaaaattcatatgcacacaatcaggagtgaaacttttaacaacataaagataacttcccaagcatttcaccaatacttgttattcccactgcaaaagaataaagctcctattgaagtctataggaggaaagactacaactcagtggtcagagggaaataaaacaactccaccaatgacactggtcaatgatctgcaagctggtatttttcccaagagaaaatgctatttcaggtcctaatattttttaaaaaaaatttgtaagtrtatctataatataaatttaattaaaacgcacaacttgaatgatctccaagaggtaaagcaacaaagtcagtctcaaatcctcacatatcttacttccacatcacaaaggcaccactcaatctactattaaaattcacaacagataagctgaaaaccaagtgcccgtgatattcactgggctcattttagaagcacctatttatttactcagctatggtagtgaaaaggtcaagcaaaaattcacctccaaagccacggttgctaagcaactctcctcagaagttctgcaacattgatcaagcatattactggtgccaccaactg

SEQ ID NO: 295809 - DNA, 583 bp, Homo sapiens
gttttttaaataatgaacttctggttctttggcttttatgaattatttttactttattaccacatttgtatttatttcctctgatttgttttcctttattgtttctttggatttactatgttgcagtttttctagttacttgagtcaaaccttgggcttataggattccagacttagtgtttttctcttgggtaacaaaagctatatattgccgtgaaagtattccattagctctatctctcacctactgtgcttttattatcactccrctctaaaactttgctattcttgttattatttcctatttaacctgagggttatttcatagtatgtcttttcatatccagatatataggatgtttttgctatctttttgttaacagtgtctgattttatagcactgttgttaagagaacctctaagctgttgattttttagaatttgaggcttcctgactcattgaaagttgaagcttgtgtctaatccacatgccctctgaaataaagtatgctctgcttttgttgaataagttctatatacatgagacatcaaattgttatccaaatctctctttgtctcattg

SEQ ID NO: 295810 - DNA, 494 bp, Homo sapiens
cctgtctcctaaaaagatgttcagggattacatatacttaataacctttcctcatcaaactctaatcacctattcatttaataaatatgtattatatacttgccatattccaaatactattctagtggtaaatatgacagaccagccctctgctctcatgtagtattctaggcacagggtgcrtattgcaagcagtagagactacaagccagtcaacaaggaaaaatattctgattgtgacttgaaggaaatgatcaaaatccaagaacaggaagggacttggaggaggcagaagtggctgcctaagtgtcaaaggaaaggggaatctcacgtttgatctgcgagttgaatgataagaagtccactgtatgtgactatatggggataaaatgttccagatggaggaaacagcaattgccaaggcaagaatgatctcaagatcttagaggaatggaaagaagagtgtggggtggagcctaacagcaggcagcaag

SEQ ID NO: 295811 - DNA, 494 bp, Homo sapiens
cctgtctcctaaaaagatgttcagggattacatatacttaataacctttcctcatcaaactctaatcacctattcatttaataaatatgtattatatacttgccatattccaaatactattctagtggtaaatatgacagaccagccctctgctctcatgtagtattctaggcacagggtgcatattgcaagcagtagagactacaagccagtcaacaaggaaaaatattctgattgtgacttgaaggaaatgatcaaaatscaagaacaggaagggacttggaggaggcagaagtggctgcctaagtgtcaaaggaaaggggaatctcacgtttgatctgcgagttgaatgataagaagtccactgtatgtgactatatggggataaaatgttccagatggaggaaacagcaattgccaaggcaagaatgatctcaagatcttagaggaatggaaagaagagtgtggggtggagcctaacagcaggcagcaag

SEQ ID NO: 295812 - DNA, 576 bp, Homo sapiens
taggtgtgtaacgctgcctttgtcycctgtagctgctgccttctatccaaggtgaccaccgtgttgaacactgtctaggaaatactgtgctcagggcaaaggatgctctctttttttcacatttttatacagctaagagaagtcatttctgaaaacaggacttggaggtcaacgtttacatatgatgccaccaaggacatctcctgatgatacccatgaaggagagaccattccgttagaaaacttgtgcagtaacatttaaaattggcatttgttaaccatactaataagagctaatattcctgtagcccttgctatataccagacattatgctataaatgctttatgtaaatatctcacttactcctctccaaagcctctgaggtatttttatcaccctaattttacaaaagaaaacactaagagtttaagtcccttgcccaagtacacacggaagcaagtgatggagccgagatttgtacccaggtatgtgacactggtctcctccccacctccaacagtgctaagaaagatcttctgcccacattgcattatgtgctgtacttttttcatgt

SEQ ID NO: 295813 - DNA, 497 bp, Homo sapiens
caagcaacttgatcaaggtcacccattagtgaaaaccccaaagctcttctcagtacaagtggtcacccaacaccgctcagaaaacggttaggcaaaatgagggcctggggtgggttttggaatagcaacaccctgaaggtaatagaggctggtggtagagaagaggagcagtggcatcacctaggtgtgtaacgctgcctttgtcccctgtagctgctgccttctatccaaggtgaccaccgtgttsaacactgtctaggaaatactgtgctcagggcaaaggatgctctctttttttcacatttttatacagctaagagaagtcatttctgaaaacaggacttggaggtcaacgtttacatatgatgccaccaaggacatctcctgatgatacccatgaaggagagaccattccgttagaaaacttgtgcagtaacatttaaaattggcatttgttaaccatactaataagagctaatattcctgtagcccttgct

SEQ ID NO: 295814 - DNA, 598 bp, Homo sapiens
aacagcttcctaccaaatggtacaggctttggcagcctcttttttaaaaggccttttagtaactagtcaggcaccattcttaatatcaaaacattctctcttttttattgcccagactmtgggaatctggaaaatgaaagaaaagaaaaaaaaagaaaagagagagaaagagagaaagaaaaagagaaagagagaaacagagagagagagagagaaagataattctgactcttcctaggtaaagttatgctttccagttaacttgatccactagttattacccgaaaacatgctttccctatgtttgagttctcattcatttattcaacatctactatgtgccagaccctgtgttagatgctagggatacaacggttaatgagaaaaagaaaatgtcttatcatggagctcattatttatctgtcttataattaatctatattactttatttaacaactacatacattaaacactgcccttttatggttacggaaagacagcagtgaacaaaacagacagtctctattctctgatccagggggaaaagactaaatgagttagtaacattttcagatagttaggagagctggaaaaaca

SEQ ID NO: 295815 - DNA, 598 bp, Homo sapiens
aacagcttcctaccaaatggtacaggctttggcagcctcttttttaaaaggccttttagtaactagtcaggcaccattcttaatatcaaaacattctctcttttttattgcccagactctgggaatctggaaaatgaaagaaaagaaaaaaaaagaaaagagagagaaagagagaaagaaaaagagaaagagagaaasagagagagagagagagaaagataattctgactcttcctaggtaaagttatgctttccagttaacttgatccactagttattacccgaaaacatgctttccctatgtttgagttctcattcatttattcaacatctactatgtgccagaccctgtgttagatgctagggatacaacggttaatgagaaaaagaaaatgtcttatcatggagctcattatttatctgtcttataattaatctatattactttatttaacaactacatacattaaacactgcccttttatggttacggaaagacagcagtgaacaaaacagacagtctctattctctgatccagggggaaaagactaaatgagttagtaacattttcagatagttaggagagctggaaaaaca

SEQ ID NO: 295816 - DNA, 507 bp, Homo sapiens
ctggcctctatcagtcattcctttgtttattttggaattcatttgagaaatttgaggacccaggcatagacaagggctgctatttattggaggtcctcaagatcctctaaataaagggaagaacaagtacaaagccctgatatgggccaggctgaattatgagtgaaatcaacagaaataaaygcaagccatttaaattttatccctataaaatggctagcctttggaagtttttaggcaagggagaagtaatatgttctacgtgaaactttggagcagtgactctgggtgctgcagagagagtggacaatagccaagcaagcatggagaaaccacacagttaagaagctacaaaggcgagcccgatgggaagcggtagggacttgagttggtgaggcagcagtgcacttattctggatatgtcttgggagaagagctaataatacttactgatgaatagaaatgtggggcagcagttaggaaagaggatggtcaaagaaccagtca

SEQ ID NO: 295817 - DNA, 507 bp, Homo sapiens
ctggcctctatcagtcattcctttgtttattttggaattcatttgagaaatttgaggacccaggcatagacaagggctgctatttattggaggtcctcaagatcctctaaataaagggaagaacaagtacaaagccctgatatgggccaggctgaattatgagtgaaatcaacagaaataaacgcaagccatttaaattttatccctataaaatggctagcctttggaagtttttaggcaagggagaagtaatatgttctacktgaaactttggagcagtgactctgggtgctgcagagagagtggacaatagccaagcaagcatggagaaaccacacagttaagaagctacaaaggcgagcccgatgggaagcggtagggacttgagttggtgaggcagcagtgcacttattctggatatgtcttgggagaagagctaataatacttactgatgaatagaaatgtggggcagcagttaggaaagaggatggtcaaagaaccagtca

SEQ ID NO: 295818 - DNA, 443 bp, Homo sapiens
ctagcttcatgtctcaggcaggcaggaatgtaatccgcttctctatcacacccctgctccagggctcatgatttctaacttagatagacactgtcactatctccaggctgcattgtagctgagggccacagaaaacaactttctygtgactcttcctccaaatggccttggagggtaacttcttacctcagcgcaaaacagatggctttgccagtcacctgatctctgctgcaggaatgctaccactctgtgtagagagggggaaatgctgtgccttctatgcaagtctgggcctggtgggcacactgacagttgggttgcagccaccctaatattctggaatggccatccactggcacacccacgccagcacctcatgggaatagccacagtggcatccacagcagtgggcgacagggaaggagaagtcacccttttcacat

SEQ ID NO: 295819 - DNA, 443 bp, Homo sapiens
ctagcttcatgtctcaggcaggcaggaatgtaatccgcttctctatcacacccctgctccagggctcatgatttctaacttagatagacactgtcactatctccaggctgcattgtagctgagggccacagaaaacaactttctcgtgactcttcctccaaatggccttggagggtaacttcttacctcagcgcaaaacaratggctttgccagtcacctgatctctgctgcaggaatgctaccactctgtgtagagagggggaaatgctgtgccttctatgcaagtctgggcctggtgggcacactgacagttgggttgcagccaccctaatattctggaatggccatccactggcacacccacgccagcacctcatgggaatagccacagtggcatccacagcagtgggcgacagggaaggagaagtcacccttttcacat

SEQ ID NO: 295820 - DNA, 571 bp, Homo sapiens
caacttggaaaaaccccatctctactttaaaaaaaaaaaaaaattagccagatgtggtggtgtacaccagtaaccccagctattcaggaggctgaggcacaagaatctcttgaacccaagaggcagaggttgcagtgagcagagatcaygccactgcactccagcctgggtgacacggtgagtgagactctgtctcaaaaaatatatattgaaagtataaatactactataccattttaaagtacacatacatagaggagtagcaataccattctgtgaagacaactggttagttgtagttactttcatattctggagctgtcttctgcctggactattctcccctcaatcacaaattttcactgggtcagtgcctgctcagatatcatatctaggcttaatcaactgttctgtagaaagaccttcccagatcctatagatgcaatgctgtcaaacagagctctctacaacgataaaaatgttccagatgtgtgttgcccaatatgggagtcatgagccacatgtgaccactgagcacctgaatatggtagtgtgcctgaggaggtgaaca

SEQ ID NO: 295821 - DNA, 568 bp, Homo sapiens
acacattggctgagattaagttgcgtgttcattcttgagctagttaattactgagaagactagttagtttgcactttaatccaggctkctgctggaggtgagaaagttgtcaatttcttctgagatacacagttttgagggaaatgttaatacattgacagtattgatagttgattaggaagcaaaataatgggaatgggacatgttgatagccaacatcattatagattctaatataacatgagggaatagcatacttgcatttttctctccttctactgatattttttttaatttctaaaacaattaattggaaactttttagacaaggttgcgaattagttttacccaacttctcttaatgatcacatctttcataaccatagtataaggagcaaaaccaggaaagtaacattagtacgatactgttcactaaacaatgagaacgttagtattgctagttaaattttgtagtttgtttcctacatattttaaatatgagacattaattctttttattattctaagaacctcagactgaatcttgatccttcatatgtaataacaa

SEQ ID NO: 295822 - DNA, 568 bp, Homo sapiens
acacattggctgagattaagttgcgtgttcattcttgagctagttaattactgagaagactagttagtttgcactttaatccaggcttctgctggaggtgagaaagttgtcaatttcttctgagatacacagytttgagggaaatgttaatacattgacagtattgatagttgattaggaagcaaaataatgggaatgggacatgttgatagccaacatcattatagattctaatataacatgagggaatagcatacttgcatttttctctccttctactgatattttttttaatttctaaaacaattaattggaaactttttagacaaggttgcgaattagttttacccaacttctcttaatgatcacatctttcataaccatagtataaggagcaaaaccaggaaagtaacattagtacgatactgttcactaaacaatgagaacgttagtattgctagttaaattttgtagtttgtttcctacatattttaaatatgagacattaattctttttattattctaagaacctcagactgaatcttgatccttcatatgtaataacaa

SEQ ID NO: 295823 - DNA, 568 bp, Homo sapiens
acacattggctgagattaagttgcgtgttcattcttgagctagttaattactgagaagactagttagtttgcactttaatccaggcttctgctggaggtgagaaagttgtcaatttcttctgagatacacagttttgagggaaatgttaatacattgacagtattgatagttgattaggaagcaaaatratgggaatgggacatgttgatagccaacatcattatagattctaatataacatgagggaatagcatacttgcatttttctctccttctactgatattttttttaatttctaaaacaattaattggaaactttttagacaaggttgcgaattagttttacccaacttctcttaatgatcacatctttcataaccatagtataaggagcaaaaccaggaaagtaacattagtacgatactgttcactaaacaatgagaacgttagtattgctagttaaattttgtagtttgtttcctacatattttaaatatgagacattaattctttttattattctaagaacctcagactgaatcttgatccttcatatgtaataacaa

SEQ ID NO: 295824 - DNA, 568 bp, Homo sapiens
acacattggctgagattaagttgcgtgttcattcttgagctagttaattactgagaagactagttagtttgcactttaatccaggcttctgctggaggtgagaaagttgtcaatttcttctgagatacacagttttgagggaaatgttaatacattgacagtattgatagttgattaggaagcaaaataatgggaatgggacatgttgatagccaacatcattatagattctaatataacatgagggaatagcatacttgcatttttctctccttctactgatattttttttaatttctaaaacaattaattggaaactttttagacaaggttgcgaattagttttacccaacttctcttaatgatcacatctttcataaccatagtataakgagcaaaaccaggaaagtaacattagtacgatactgttcactaaacaatgagaacgttagtattgctagttaaattttgtagtttgtttcctacatattttaaatatgagacattaattctttttattattctaagaacctcagactgaatcttgatccttcatatgtaataacaa

SEQ ID NO: 295825 - DNA, 614 bp, Homo sapiens
aactgtgccttagactgctttgcaggcatccaagtttttactccactttgaaggaatcatcactggtgcacagtgggtaacatttatttgagaaagtagaggtgagactccaaccagtcaattcatatttaaggaggtctagaaccaagaattaccaaacagatgcacattataatgtcctaaaaacatttaaatagcatttttatttcttggtaaagcaacatttkttgctctagccaagagtttcaatcaactgacaaactagaagtcctaactgatttgaataaagggcttctactgtgctctgtgcaaagccttgggtagctagaggcaagattctctagcaacacaagctctacccaccccggttacccacttcagaaccctgcttttagttttgggtacggcctcgaaggattacaggtgatcagatggatgacatcctgagtcatcagtcagtgattcctggtctcagtcagtgattcctccaggcacatctcccttctgatactcctaaataccagaacagcagcctgggaaaagagcaagtaacactcacttctctctgggcatcatgtgtctcccaacccttgagtgtcaagaatcactctttt

SEQ ID NO: 295826 - DNA, 599 bp, Homo sapiens
caccactgtattcttgaaaataagctttgaaactgaccagcagttgagtgcattgattggccgtatktgtgcacacacacaggtttgtgtgcgcatgtgtgcattttaactgattacaagagatttcagataaatactgtggtactttgtgtattgtaacagctgtcaacaaattattactcaaccctcggtgacaaaggccccaactgtaatatggtgagcaaggtgctgaactgctataaaagacatcacagaaaaagaaagtattttatcttccaatgtctagatttaatttattgtttggcactcatctcatactcagctaactagccactagctggtggcctctttttttaaatctgtgaaatattctattgtgaaaaagtaatctcataaaagtagatgtaaatatagttcttataagaataatcctttaaattttttttctaaatataataataagtatttaggtcttgttcattgtatgctactagatatctaaaagttgatggacatgttcctcatgtcactgaatgattactttcaaaggtcaaaatacactttaaaaaataaatatagaatattaattttctagtctg

SEQ ID NO: 295827 - DNA, 543 bp, Homo sapiens
cttgatgttggatagatatgtccagtgtaatatcagtggacaagactttaagttagggattctcttattgattcatatacttggttgtccagcacctgtgaatattttyagacatctaaggatttttcagagtctcaagatatgattacactctgtttctctttattttaaaagccaaatcacataatgcttttaggagaagctgtggttgccaggaaatcgtttaatgattgtcgtagcttcacaaaggttagcaatcatgagctcagtatcattgaaataaatgtattattggagtcagaaaccctcagtttacattctggctctataaattatttggtacatgatcaactacagacaagttgctctgctgaatcccattttctcatcacttgagtattatttttttaaattgttaaaaactaaagggagtacttttaagaagtgcccagcagtacctggcacatagtaaaacttcaattatctctatcaaaatccataagagattatccatctgggttttgccatttacagggtaccatg

SEQ ID NO: 295828 - DNA, 524 bp, Homo sapiens
tgtgcgtaaatatacacctaaaatcacaaatataaaggcttttttactraaggccatcatgctttgcatatttcctgtaacttgctttgctaactttacaatatatcatgtgcaatcatccatagcagatatacattctaattcttaatgacctaataatcatccatagcatgtataacacagttcattcaactagtctcaagtgatcaaaattctttgttttcatttttttgccactgtgaacaatgctgcaataaataattttgtatatatatttttatctatacagaataattcacaaagagattactgtgttaaaggctatgtgtattttttttatttaaaatgatacagccaaactgctaagcaatatatatagctcctagcatttctccacattctaacagcattggatgtcatatattattaagttgtgcctacatcccaggggagaaaaacctatcttattttacttagcaattctctgagattaacttttcctttttactggctatttctctctg

SEQ ID NO: 295829 - DNA, 575 bp, Homo sapiens
agttcacaaatctaaggaaaatgatatatctatacttatttccctaaagagaacataatttttcttcttttggttgataaggatttaattgcatttagaaggatttaatcacataaggctaaccaatgaaacactaactgtgggcagaactctgtttcagttggccctattggccctaaaatgtcattgatagtgactaaatatacacattactcctctcycccgccatcctttctcctccttccatttctccttctcagaacagagaaataaaacgtctaggaaacccatcatttactggggaaaggaaggggacgtgtaacatttcaaactgtaataaggcatgaacttgccaagctgtccatgtgggaggttatagcatgcccagagaagttgcccagaaaatagacatggtttccaatcaaaaaaacttagaccagttgaaactctggctttgggcaatttacttaacttctctgggcatcagtgttaacttatgtaaaatggagacaatcacaatatgtaccttaccctgttgtggtaagattaaataattggcacagggcctgacacaa

SEQ ID NO: 295830 - DNA, 566 bp, Homo sapiens
tctatacacagtttctgtgggtttttaatcatgaaaggatgttgaattttatgaaatgctttttcagcaaaaattgaaataatcatatcgtttttgtccttgtgttcatatgatgtatcattgattgatttgcatatgttgaaccatccttgcgtaactggaataaatcccgcttggtcatgataaatgctttttttaatgtgttgctgaattcagtttgttagtattttgttgaggatttttgcatctatattcatcagggttacttgcctgcagttttttttttttttttttaatgtgcctttgtctggtttttstatcagggtgatactagcctcctagaatgaatctgcaagtattccttcctcatcagttttatgaaacagtttgagtagcattggtattagtggttctttacgcatttgctaaaattcagcagttaagccatcaaatctagcgcttttctttgctgagcgacttcattatggcattgatctcattacttcgtctgttcaggttttgcatttcttagtggttcaatcttggtaggttgtgtgtgtctagaa

SEQ ID NO: 295831 - DNA, 485 bp, Homo sapiens
tttgtattttttcatttcaatttcatttatttctgctctgatctttatttttccttctactaattttgggtctggttttcacttgcttttctagttgtttaaaatgtatcattagtttttctactttttgatgtaggcaattactactataaactttcctctgaatactgctttcaccayatctcataggttttgatacattgcgtttccattttcatttgtttcaatatatttttaaaattttcttaattttttcattgacccactggtcattcagaagcatattgtttaatttccatgtgtttgtataatttccaaaatttcagctgttattgatttctaattttattccatggtggtcagagaagatatttgacataatttttaaaaaaatgttttaagatttgttttgtggcctgaaatatggtctttcctcgagaatgatccatgagctgaagaatgtgtactctgcagccattggataa

SEQ ID NO: 295832 - DNA, 485 bp, Homo sapiens
tttgtattttttcatttcaatttcatttatttctgctctgatctttatttttccttctactaattttgggtctggttttcacttgcttttctagttgtttaaaatgtatcattagtttttctactttttgatgtaggcaattactactataaactttcctctgaatactgctttcaccatatctcataggttttgatacattgcgtttccattttcatttgtttcaatatatttttaaaattttcttaattttttcattgacccactggtcattcagaagcatrttgtttaatttccatgtgtttgtataatttccaaaatttcagctgttattgatttctaattttattccatggtggtcagagaagatatttgacataatttttaaaaaaatgttttaagatttgttttgtggcctgaaatatggtctttcctcgagaatgatccatgagctgaagaatgtgtactctgcagccattggataa

SEQ ID NO: 295833 - DNA, 952 bp, Homo sapiens
gactttgtcccttaactgacatcaaagttacagtgttatgcagtgatgcccaaaagcatttgcaaatattcagaaacaaagttttgagtgtcctaggagatgactatcataccaattgatccaaaacacaatggtcaagaggcatggaaaacctatggttggggagggagaggaagggtcataaatatatacagtcatgcaccacgtaatgacattttagtcaatttactggatatatgatggtggtcctataagattataatgtatctggaaaattcctattgcttagtgacatcctagctgtcttaatgacatagcacaagacattacttatgtgtttgcagtgatgctggtataaatraacctgtgctgccagtcatataaaagtattgcatattaggtacagcaggggtccccaaccccctggwtgtgcgtaaatatacacctaaaatcacaaatataaaggcttttttactaaaggccatcatgctttgcatatttcctgtaacttgctttgctaactttacaatatatcatgtgcaatcatccatagcagatatacattctaattcttaatgacctaataatcatccatagcatgtataacacagttcattcaactagtctcaagtgatcaaaattctttgttttcatttttttgccactgtgaacaatgctgcaataaataattttgtatatatatttttatctatacagaataattcacaaagagattactgtgttaaaggctatgtgtattttttttatttaaaatgatacagccaaactgctaagcaatatatatwgctcctagcatttctccacattctaacagcattggatgtcatatattattaagttgtgcctacatcccaggggagaaaaacctatcttattttacttagcaattctctgagattaacttttcctttttactggctatttctctctg

SEQ ID NO: 295834 - DNA, 519 bp, Homo sapiens
acaactttgggagtgactgtttagacactgtcaaatgatttctaagcaaccctgccacaagcagactggcttgctataaacacaaggtgtaggatacataagaactaatatttgttaaggaatttctgtgtgccagactcttggctgatctctttgggtttgattgaatcgaatagtcatcacaatctgcagaaaggtttggtgacttgatcgcaagaasctggctagtaagggactgagtaagagacttcactaggcaagttaaagtgctgctctacactcccattgctgtctctgtacccagcacgtgggcacaaatgtaagagcctcgtgaaggaaagcataagcaagaacacactgagcagctctaggaagctccttaaggtagaatgagaaacttactcaggcaggctcctgcagttgcacaattatcattcttcttaagtgtgattactgctcaaagtcagaaacatcaaatgtggaaatattatccaagtaggggatccatccatgaaagca

SEQ ID NO: 295835 - DNA, 363 bp, Homo sapiens
catcatgactaagaccaagctggagtgctctagaatctagctkacaactgtttggcctaaggagcctatagcattgaccctgcatacattaaagccacctgtgctcaagtccacttatcactcacacctgcttacaccatgctactgctcactacaataccaataagaacatctgcctgctttagataaagattctctgcacatctaaattagaataacaagtttttgaactattattgcaaaagaaacagcagtcaatgtggtaatttttggggatctctgcctaggtttcattaggctcaccctaatgtctttttcagttttggcaggagggcctctgcctgttttcatagccaaaagact

SEQ ID NO: 295836 - DNA, 363 bp, Homo sapiens
catcatgactaagaccaagctggagtgctctagaatctagcttacaactgtttggcctaaggagcctatagcattgaccctgcatacattaaagccacctgtgctcaagtccacttatcactcacacctgcttacaccatgctactgctcactacaataccaataagaacatctgcctgctttagataaagattctctgcacatctaaattagaataacaagtttttgaactattattgcaaaagaaacagcagtcaatgtggtaatttttggggatctctgcctaggtttcattaggctcaccctaatgtctttttcagttttggcaggagggcctstgcctgttttcatagccaaaagact

SEQ ID NO: 295837 - DNA, 625 bp, Homo sapiens
aaactacccaataagtctctttaacgttatggatatagtctttctaaggaataggaagaaaatattttttcattgtcttacagtttttttgtttcaatgaatacatcacgtacctggtaaagaaaccttgctaccgtctcaacctttgccaacattatcattcacagagattccaatgagtgatacaaaccctagcagcttcagcctacagcttggtgaggttgactacaaagagcgcccatcccagagttactagtactcttattttgccatctttatttttgtctctggaaaatgaataaaatgtcagcttcagtagcaacatactgtggaattcataaaacaaaggtcaggtatgaagaacacaggaaaccaatggtagcaaaaggaaacccaatgcctgagctggccatcttggcgagtggggaaaactagaacagcactgaaaaccaagcatagttaagccaggattgatgggtaacagctgcactttgcaattcacctgcaattcagatccaatttcacatattctgcaagcccaaaaaaggccaattattgtkaagtttctataagagtttaaacggccatgattcatttttgttttcctttaggaattttaggaccc

SEQ ID NO: 295838 - DNA, 578 bp, Homo sapiens
ccccccacacacacaatatagaaatacctaatttgtacaattacgaatccaaaatattaaatttaaatttaaggttttagcacaatggcacataggaatgactatagtgccattattaaaaatccagtaagtgcatttatgcaccatataatgtagtatatgttgtaaattcaatagtayataatagaatcatagtctctaacctcggaggtcttacatctaatgttaatgacaaaccaagaataaattccagtaagggggtgaaaagtgttctgatgatgggggaaatgcaggtaataatgagtagctattttattattaaaaacgtaaaacacatgtacagcagagtggtcaagaatctaaactctatcatcagaatgcctaggtgtgagtctcatgtctgcccattactttcagtgagactttgcataaggttatccatcagtgaaattaaaatgataatattaactatcttaaagggttttcacaaggattaacagagaaaatatgtatcgtactgagaatggtgctggagatatactaatccttcaataaatattacctataattaccaccat

SEQ ID NO: 295839 - DNA, 578 bp, Homo sapiens
ccccccacacacacaatatagaaatacctaatttgtacaattacgaatccaaaatattaaatttaaatttaaggttttagcacaatggcacataggaatgactatagtgccattattaaaaatccagtaagtgcatttatgcaccatataatgtagtatatgttgtaaattcaatagtacataatagaatcatagtctctaacctcggaggtcttacatctaatgttaatgacaaaccaagaataaattccagtaagggggtgaaaagtgttctgatgatgggggaaatgcaggtaataatgagtagctattttattattaaaaacgtaaaacacatgtacagcagagtggtcaagaatctaaactctatcatcagaatgcctaggtgtgagtctcatgtctgcccattactttcagtgagactttgcataaggttatccatcagtgaaattaaaatgataatattaactatcttaaagggttttcacaaggattaacagagaaaatatgtatsgtactgagaatggtgctggagatatactaatccttcaataaatattacctataattaccaccat

SEQ ID NO: 295840 - DNA, 560 bp, Homo sapiens
tccttattcttggaaaatgcaagctgaattatttaggagtaaagcatcctaacatctgcagcagactactgtttgttagakggtttggcacaaaggaagtgtctacagagacacggcacagatatatcaagatgtcaaagttaatgaatctcaatgagagataaacaggtgatcactgaactgttctttcaactttactgaggttgaaatttttacattctatttacttttattctgaatcttatatacacagaccacccatggaatttcccaggtatttttcttcagcctcaatttctcacttacagtaaaaataaatgtgttgtactctgtttttgtaagtcagctcaaaactttattggcagaaacagtggtccaaataagcaaagttcaaaacatttaataataattttcccctacataaaaaaggcaaatatttttcagttaaggataacaaagataagattccctttggagtttaaaatcctccaatctttcagctttgtccatgtcattatcctcagcaaacacacacaggaacagaaaaccaaacaccacat

SEQ ID NO: 295841 - DNA, 560 bp, Homo sapiens
tccttattcttggaaaatgcaagctgaattatttaggagtaaagcatcctaacatctgcagcagactactgtttgttagagggtttggcacaaaggaagtgtctacagagacacggcacagatatatcaagatgtcaaagttaatgaatctcaatgagagataaacaggtgatcactgaactgttctttcaactttactgaggttgaaatttttacattctatttacttttattctgaatcttatatacacagaccacccatggaatttcccaggtattttycttcagcctcaatttctcacttacagtaaaaataaatgtgttgtactctgtttttgtaagtcagctcaaaactttattggcagaaacagtggtccaaataagcaaagttcaaaacatttaataataattttcccctacataaaaaaggcaaatatttttcagttaaggataacaaagataagattccctttggagtttaaaatcctccaatctttcagctttgtccatgtcattatcctcagcaaacacacacaggaacagaaaaccaaacaccacat

SEQ ID NO: 295842 - DNA, 587 bp, Homo sapiens
acagagacacggcacagatatatcaagatgtcaaagttaatgaatctcaatgagagataaacaggtgatcactgaactgttctttcaactttactgaggttgaaatttttacattctatttacttttattctgaatcttatatacacagaccacccatggaatttcccaggtatttttcttcagcctcaatttctcacttacagtaaaaataaatgtgttgtactctgtttttgtaagtcagctcaaaactttattggcagaaacagtggtccaaataagcaaagttcaaaacatttaataataattttcccctacataaaaaaggcaaatatttttcagttaaggataacaaagataagattccctttggagtttaaaatcctccaatctttcagctttgtccatgtcattatcctcagcaaacacacacaggaacagaaaaccaaacaccacatgttctcacttacaagagggagctgaacaatgagaacacatggacacagggaacaatacacactggtgatatggacaggargcaggagggaagggtccctggtgagggttctactctcaagcctggacccat

SEQ ID NO: 295843 - DNA, 551 bp, Homo sapiens
agtacccacctgataggtttgctcatgagtgctaaattaatatttatcaaatgcctagaacaatctcagagcataaatrttatatgttagatgaataaataaaatgacctggctttgcaagaagcatctccgccagagtaacgtctctgtactgaattgtacattctgacagctgagacaatgacagggatcacttgagcgaaagtgatcaattacacccatgttataatagggataattataataggagcttcagtaaattgagaaatcaattgagatacaaacttcgacttcatgggagctaagaaaacataatcatttgaatctctactcctctgaggatggatagcaacatcctttcaaaaccctttcatgttcaaagtcacatcagacaggggaaattctttaatgtaatttctgttgcattttggctataaaaacatgtcgagaagttgttaagctgacaaattccaaggtatctcttaatgacaaaaagtgggtgaatagttataaaggctcaagagttaatgttattttagggttaagttaaa

SEQ ID NO: 295844 - DNA, 551 bp, Homo sapiens
agtacccacctgataggtttgctcatgagtgctaaattaatatttatcaaatgcctagaacaatctcagagcataaatattatatgttagatgaataaataaaatgacctggctttgcaagaagcatctccgccagagtaacgtctctgtactgaattgtacattctgacagctgagacaatgacagggatcacttgagcgaaagtgatcaattacacccatgttataatagggataattataataggagcttcagtaaattgagaaatcaaytgagatacaaacttcgacttcatgggagctaagaaaacataatcatttgaatctctactcctctgaggatggatagcaacatcctttcaaaaccctttcatgttcaaagtcacatcagacaggggaaattctttaatgtaatttctgttgcattttggctataaaaacatgtcgagaagttgttaagctgacaaattccaaggtatctcttaatgacaaaaagtgggtgaatagttataaaggctcaagagttaatgttattttagggttaagttaaa

SEQ ID NO: 295845 - DNA, 635 bp, Homo sapiens
ttttactgtaatccttagattccttggattgggtttccaattgctcctgaatctcagtgatctttgttcctatctgtattatgagttctatttctgtaatttccatcattttagcctgtttaatcactcttgctgsggaatagtatggtcatatgggaaaaagaagacactctggctttttgagttgccagagttcttgcactagttctttctcatctgttgttctattacttgtggcataatttgagtgcagtcagtaaacttcttttctgaatgttttcagaggaccagaactttgtgcagggtatttgtttgtagctgaattcttgtctttggtttcacagggatgtgtatcagtcaagtatttttggtgtttgcatttcgtctgtgatccagtagatggcgcttaagcatattgaccagtaggtaggctcttgctcagccatgtggctccagtgtatttcctcccaattgcagctgcgctaccctctcactgctctgaaaatgtggactcctctcccactggagtgctggctgcatatatcagcttgacactcctgggctgcacactgcagctctagggtgagctcaggctttatgttctcaccccagcttgaagacaacaggggaaggga

SEQ ID NO: 295846 - DNA, 595 bp, Homo sapiens
ttctttctcatctgttgttctattacttgtggcataatttgagtgcagtcagtaaacttcttttctgaatgttttcagaggaccagaactttgtgcagggtatttgtttgtagctgaattcttgtctttggtttcacagggatgtgtatcagtcaagtatttttggtgtttrcatttcgtctgtgatccagtagatggcgcttaagcatattgaccagtaggtaggctcttgctcagccatgtggctccagtgtatttcctcccaattgcagctgcgctaccctctcactgctctgaaaatgtggactcctctcccactggagtgctggctgcatatatcagcttgacactcctgggctgcacactgcagctctagggtgagctcaggctttatgttctcaccccagcttgaagacaacaggggaagggaccttggcagtgattgtggtagatgaccttttacttgtttcttggggttccaccccagagagatgcagaaccactattaatcagtacaatcgaccagggtggagtggctgtgctgtgggattaagccaaggggggtctcgcctggtgataaacaggtgggacaggg

SEQ ID NO: 295847 - DNA, 595 bp, Homo sapiens
ttctttctcatctgttgttctattacttgtggcataatttgagtgcagtcagtaaacttcttttctgaatgttttcagaggaccagaactttgtgcagggtatttgtttgtagctgaattcttgtctttggtttcacagggatgtgtatcagtcaagtatttttggtgtttgcatttcgtctgtgatccagtagatggcgcttaagcatattgaccagtaggtaggctcttgctcagccatgtggctccagtgtatttcctcccaattgcagctgygctaccctctcactgctctgaaaatgtggactcctctcccactggagtgctggctgcatatatcagcttgacactcctgggctgcacactgcagctctagggtgagctcaggctttatgttctcaccccagcttgaagacaacaggggaagggaccttggcagtgattgtggtagatgaccttttacttgtttcttggggttccaccccagagagatgcagaaccactattaatcagtacaatcgaccagggtggagtggctgtgctgtgggattaagccaaggggggtctcgcctggtgataaacaggtgggacaggg

SEQ ID NO: 295848 - DNA, 595 bp, Homo sapiens
ttctttctcatctgttgttctattacttgtggcataatttgagtgcagtcagtaaacttcttttctgaatgttttcagaggaccagaactttgtgcagggtatttgtttgtagctgaattcttgtctttggtttcacagggatgtgtatcagtcaagtatttttggtgtttgcatttcgtctgtgatccagtagatggcgcttaagcatattgaccagtaggtaggctcttgctcagccatgtggctccagtgtatttcctcccaattgcagctgcgctaccctctcactgctctgaaaatgtggactcctctcccactggagtgctggctgcatatatcagcttgacactcctgggctgcacactgcagctctagggtgagctcaggctttatgttctcaccccagcttgaagacaacaggggaagggaccttggcagtgattgtggtagatgaccttttacttgtttcttggggttccaccccagagagatgcagaaccactattaatcagtacaatcgaccagggtggagtggctgtgcygtgggattaagccaaggggggtctcgcctggtgataaacaggtgggacaggg

SEQ ID NO: 295849 - DNA, 484 bp, Homo sapiens
cgttaaaatgacacttaaattttaaaagattattctccaaacaaatttattttaatcaaaagattttattttctaacctataattctaataataaacaataagtaatatttggtcctgtaccrtgtgtgtgtatgtgtgtgtgtgttcaatatttaggattaatttagagacagaatatttaaacactctttctaagtgtcttgaaaaatggaccctgatacaaccccttggggggatattgtttatgtgggacctgatccaaggaagagcaaataaggaagtaggaaaagtgaggcagtgaaaggagaaaatataattatgggtgaattaacgcaaaggtcacttttgtgaccacctataaatttaattccactggagacccttgaaggaatagtgcagagcacatttcagacttgtttccttgaggatacattttttgggtaatatatccactaatgtctaccttttactgattaagcattg

SEQ ID NO: 295850 - DNA, 647 bp, Homo sapiens
tgttattgtttttctcttgtgcagtggtggcagaaacactatgttttttaaagttattaagcagatatttattttaaaaataaaatgtcagatattgtagtagttgaagacactgaaatattttgatattcgaagtgatggttgaaactaagtaatttcctaagtaacttaggaaaagtcaatccttaaattgacattgtcattatttaaattctgaaaatatttcttgataatttccccttttataaaaagtcaaaacaatagaagcaaggcggaatggaaatctatcctttctccctctctcatgcacctctatgatgttcttaggttaggagtcacttcatttttaattttaaaattattacaaagttaacacaarcatgcagttttaaaaatattaagtgtttcagaaaagtaaaataataaaatgtgatagtatccaattctaccaccgccaaccccacctctaacccacaagccaaatttataaattgtttattaactctactatttgaagtttgataattcatttaattaactttatatctacatttatttttcaatcctctcccaatattttcttagttatatacttttttcagctttttttggtctttctaattctaaaatttgtttaaatctccatt

SEQ ID NO: 295851 - DNA, 581 bp, Homo sapiens
actattcataattctggcaacaattttgattatttctgaaagctcaaactatttctaattatctcactcatatttgatggtcagcatgacaagtggtcataaaaagtactttctgaatcattcagtagtgttcagttgcacttgagaaatcctcctaatggcagtggcatacatgaaaaaggaggaagctggattagattttgacattgyaacttctctaaatccaacaggacagtcattcctggtctttctgtcaattctgaacaaatttgtttggcgccaaaatcagtattgcttttctaatcaagaagcgattggaacattctgtcttgcagagagacacatcattgacaatgaaaacactaacttagaagaaaatgaatcaactttaggaatgaaggaactcagttggatttgcctcaagccattaagcttttatgacagtcagtcactagattttagaacactaagccaccctaaatttatacatgtaagaaagagcattaaattattatattcaaatgatgtttgtttataaatggcatatagttagaattacttggcaatcttgccaaacacta

SEQ ID NO: 295852 - DNA, 594 bp, Homo sapiens
gccttcaacaccattgttatgctggttattacaggataagccaattaaatatgtgttagttctgtaaatatttttaaaaatacagttgaatttgctaaccaatgggtatatattagagatacttggtactatgccrtttttcttcttcattaatatgcactcaatttcactcctatcatccattgttctgctctatattaaaggaatctggaatcctgaacacttaaaaattgaattttctagaccctcctgccaaatgactttcctgtcaactgaattttagttagtgttagcagtgggagaatttattcacttatgtatttatatgtttattacttttattttaaaataattatatttcacagtaatttgcaaaaaatagcacagagaagcccagtgtagtctttactcatttttttccaattatctcactttacataattctggtacaatatcaaaaccagagatttgacgtttataaaatgtgtatatagctccatttcatgttatcacatatgtagatttatgcaacaatcacaggatgaaaataaaatacaatttcatcaccaccaagatcaccctcattttatctgt

SEQ ID NO: 295853 - DNA, 502 bp, Homo sapiens
ttgcaggcctcagaagcctttggaggttctgaygctggcagtttccagcagggtcagtgtcacatgtaccttgaattctggaaacaccgtcttccttcctctgttttttctagccatcttggatgggataaacatcttgaaattatatcttagttgaatatctccctttttctccttctacttttctaatacctttgtaacaagcatttaatattttttgtattaatttcttagcatgacttatctttccctgggggccctgatagtgcatcatcaaacagtactgatgttaaggagctaaccatatacagtactgtaaaagcatactgatggcagccatagtgttgctaatattaataaaatagttgtctttattgggaatatattttatgctaggcattttgtataatagctacctttcatatagcttacacacataagaggcaataaaaaagtgaagaagagcaatgttatgccagctttgaacatagcctttggtaac

SEQ ID NO: 295854 - DNA, 499 bp, Homo sapiens
cctattgaaaacacagtattgcacttattcgtcatgtctccttaggaaactctaggctgtgacagttttacagacttatctttgaccaccattacagttttgaagagtactggtcatgtattctgtagactrtccctttaactgtgatttgtctgatagctttttttcaagattacactaaaattaagtgtgtgtgtgtgtatatatacatgcatatatatatatatatatatatatatatatatatatatatggaagaagaacccagaggtaaagtgttttcatcacatcacatccagagactatactgtaaacatgacttatcactgttgatgttgatgaatcacatggctgaggtggtgcttatcaaacttctttacagtaaatacatgattttttcatactcccacactttaccctttggaagaaagtcattttgcctaggttacttaaggagtgagaagtgatgctctacttccttgagggtgggacatctaca

SEQ ID NO: 295855 - DNA, 584 bp, Homo sapiens
tgtccaatagtatttacaacattattatatgactaggatgactcttaggtaattacctagctctttgatctagaacattacatatatacacacacacacacacacatatatatgtatatatatgtgtatatacgtatatatgtgtatatatgtatgtatatgtgtatatatgtatatatgtgtatatatatgtatgtatatatgtagtgttctagatcaaatatcgaatacatatatatatgtatatatatgtagtgttctatagcgttctatgcacagttaaggaaactaactcatacatacatgaggtgcacasttcaggctcacattcattattatataatttagttgtctgaattattttctcccttctgtgtgaagccgtattaaccctgtagtttcccagtcaaaaaaggaaaagcaacattactctgtattgcaaactcagatgcttctttcatcactttcacaaaggggccaagtttttactcaactgacaaggttatttgtatttgaaaatataatatatcgaattaaaaaattccagtgacataggtttacttctgaaatatagttagttccag

SEQ ID NO: 295856 - DNA, 584 bp, Homo sapiens
tgtccaatagtatttacaacattattatatgactaggatgactcttaggtaattacctagctctttgatctagaacattacatatatacacacacacacacacacatatatatgtatatatatgtgtatatacgtatatatgtgtatatatgtatgtatatgtgtatatatgtatatatgtgtatatatatgtatgtatatatgtagtgttctagatcaaatatcgaatacatatatatatgtatatatatgtagtgttctatagcgttctatgcacagttaaggaaactaactcatacatacatgaggtgcacacttcaggctcacattcattattatataatttagttgtctgaattattttctcccttctgtgtgaagcmgtattaaccctgtagtttcccagtcaaaaaaggaaaagcaacattactctgtattgcaaactcagatgcttctttcatcactttcacaaaggggccaagtttttactcaactgacaaggttatttgtatttgaaaatataatatatcgaattaaaaaattccagtgacataggtttacttctgaaatatagttagttccag

SEQ ID NO: 295857 - DNA, 1089 bp, Homo sapiens
cctcctgctagctctgaggaatctggctttccccccagtgcagcacaccacctctaccaagggacagccaaagtgcctcattaaatgggtccrgcttcctgtgccacccaactgggtgagtcccaccaacaggggttctcagacatcctatagagaaacattcctactggtatcacattggtgccccctcaaggccagagatcccagaggaaggaacaggtacccctctttgctgttctctagcctacttgagtgacatctccaggcatgggtgcaaaccagatgaatagggcctgaagcaaacccccagcaaacttcagcagccctacagaaggacctgactattgaaagaaaaacaaatgaacaaataaataaacagaaagcaacaacaacagcatcaacaaaaaatttccccacaaaaacttcatccaagggtcagcagcctcaaagactgagagtagacaaactcacgaagatgggaaagaatcaatgtaaaaacgttgaaaacccaaaaggccagagtgcattttctcctccaaatgatwcctcctgctagctctgaggaatctggctttccccccagtgcagcacaccacctctaccaagggacagccaaagtgcctcattaaatgggtccagcttcctgtgccacccaactgggtgagtcccaccaacaggggttctcagacatcctatagagaaacattcctactggtatcacattggtgccccctcaaggccagagatcccagaggaaggaacaggtacccctctttgctgttctctagcctacttgagtgacatctccaggcatgggwgcaaaccagatgaatagggcctgaagcaaacccccagcaaacttcagcagccctacagaaggacctgactattgaaagaaaaacaaatgaacaaataaataaacagaaagcaacaacaacagcatcaacaaaaaatttccccacaaaaacttcatccaagggtcagcagcctcaaagactgagagtagacaaactcacgaagatgggaaagaatcaatgtaaaaacgttgaaaacccaaaaggccagagtgcattttctcctccaaatgat

SEQ ID NO: 295858 - DNA, 544 bp, Homo sapiens
cctcctgctagctctgaggaatctggctttccccccagtgcagcacaccacctctaccaagggacagccaaagtgcctcattaaatgggtccagcttcctgtgccacccaactgggtgagtcccaccaacaggggttctcagacatcctatagagaaacattcctactggtatcacattggtgccccctcaaggccagagatcccagaggaaggaacaggtacccctctttgctgttctctagcctacttgagtgacatctccaggcatgggtgcaaaccagatgaatagggcctgaagcaaacccccagcaaacttcagcagccctacagaaggacctgactattgaaagaaaaacaaaygaacaaataaataaacagaaagcaacaacaacagcatcaacaaaaaatttccccacaaaaacttcatccaagggtcagcagcctcaaagactgagagtagacaaactcacgaagatgggaaagaatcaatgtaaaaacgttgaaaacccaaaaggccagagtgcattttctcctccaaatgat

SEQ ID NO: 295859 - DNA, 599 bp, Homo sapiens
tttcattacacatgattaccttttcattgccattgcattgctttaggttctcagaacttataaccacttatcttaaatatactataatttcttaactggtaggcctaatctcatactcttcaagtttgtaactgtcttatacaacatatctagctgttttctactccttcataactatacttatctgcttatttcctattgtttattttctacattctgcattgtctacctgtgtctggcagtaaggctcttcaaaaatctgattttctttgactttttctagttctatctaacaatatttctttacttatcttcagcattgatgtgacattagattactcacactgggactagataccattgctattttctgtatattcctttgccttattgactctttaatggaataccttaaaaaaactacacagtctataaggcccaaattaaagattacttcttaaatacagccattcctgaamaatctcctgaaaatttttcccttattcaacctctttttgtagcattcgttatacactaggagaaaaactgtgtacctccttttacattccagacattatgatactctctgtggacacacc

SEQ ID NO: 295860 - DNA, 585 bp, Homo sapiens
aaatgatttcataatttcatcatgcagagtaatgtttgctgtaatattatgctatctatagaatagcatttgcctagcatttcttgaataaggcaatttttgtgtgttgtgcattttatttgtcagtatatttaatttacattttgtttggattttgtaactatgcttgtgataataaaataatttttaaatgatgtcttcagattttttttatcaaggaaatactgtccttagaaagactgtattgtgaggaatactgaatgtcttctctgaaatagttcatgtgggttggccattgtttatttcttctatttgaaattgttacctactctaataccttaaccttaatttatctttgtggcttcattttcaggtcaagattctgttacattaatatgtaayagttcaaatcagaatgtcccttttttcttctgacatttttattgttatgtctttattcttatacgagtttttactttttaattttaaaatttgttggcattagtttttttgcaagattcctttttgattttttaaaatatctctaaaatccatagtcatatcccttattccttattgatattg

SEQ ID NO: 295861 - DNA, 577 bp, Homo sapiens
tgtacaaaaaaaattaaacaggcacataagttacaaaacgatgactaagctattttatctactaagctacttaatgctattggcaaaatcaaagcattgaacacattgctagggaataaagatgactggtgatatttttgaattttttttctcttagctggtatggaacaataatgtgatgagtatgggtggagaagtataacattatgtcccatatkttctagtgtgggtatgtctgtaagcattgaaataaagactttttaaataaaacagctttaaaaacaatgtaaattatctaaactacactattaccattattgacaaataataaggaaaatggcattttacaattggttagaaccttgtttaccttctatcaacaaattctatttaagtgtagataatgttaagttttaattgtttctgtgttttacaatttatatctattgtaatggcactcaactattgagttgattaaaacttcattgcacttctaaaagcacactttgttgagactaattgtgtaactgtgcaagctctggaaggagctttttctcttccttttgcctaagaacta

SEQ ID NO: 295862 - DNA, 659 bp, Homo sapiens
cttttttcttctgacatttttattgttatgtctttattcttatacgagtttttactttttaattttaaaatttgttggcattagtttttttgcaagattcctttttgattttttaaaatatctctaaaatccatagtcatatcccttattccttattgatattgtctatttcatctccagtctttgtcttagtctctctctccctctctcttcattcctagaaactcatcaatttttccctgtctattaaaaaaaataacttttcttaagcatttctttttataaatttgttgcatttttccttttgtttattctcaattcttttgttgagttaaatttgatctcttttttctactattttgagatggattcctacataatctatttcatggctttcttgtttttaatacattcatttcaatctaacataactttagttgcaccccataatttgaatatattatatatttttgtactatttagtagaaaatattttctaattaccattatgactttttccttgagctacrgactatttagaagaaagcatttacattcttaaacatatggtagttcttaagttatatttagttatgcctttctatcttccattgttctgtaattagaataattatgaaagatttaaatctttgaactat

SEQ ID NO: 295863 - DNA, 959 bp, Homo sapiens
atctgtcgtgatagtatgatattatacgaatacagatttaaaactgtttttactttcttgattaaacagtttatcataatgaaatttccctctatctttactcttttatttaaattcaactgtatctgatataccactctatcaatttcctttggttaatgtcttagtttgttcaggaagctataattaaatatcttaagaccgggtagtttataaaaaaaacagaaatttatttcttacagttggagggtgaaaagtccaagattaaagtgccagcagctttggtgtctggtgaaggcttgccctctgcttcacagatagcatcttttgctgtactcttatgtgrtagaagaggggatggaacaagtttaagtctcttttataaggtcactaatcagcttcatgagagtggagctcttatgacttcaattcccaaagacaccacctcttaacaatatcacattgggaattaggtccctgtatatgaattttggaagcacaccaacattcagactatagcaggtagtatttgcwtatgcctttattagtaccagggaatcaagcccaggttgattgtcccaataactaagttggttaatttctttagccataaagaaaaacaaattttatattttcatatgtttcagtcacaaggaccactattgatcctcatgttgacaccatccattcacacaggcagtcaaactatcactagtcttctacttggctccaggtaaaggaattaacagctggtggcaaagctaattaggcccaattattacccacctgacctaatttgccatcagawgtctgagaagtcatctgaattaccaaatagagatgtagccactatatacacatgagtcccatggataatttatttctaatgaaactcatttggagaagagaaatgcactgattgtgatacaataatcaaaaggagggacatcatctgtgtc

SEQ ID NO: 295864 - DNA, 1167 bp, Homo sapiens
cacatttctgttaaagggaaaaagaaacaactcttcttacaccttgtcctttattctgcttgcgagctagctagctatagatccatatctggtagcaaaggagcagcttctaatctgctcacacaaagctgtctaattagttggtacaattgtagcaacaggtcagtcaggggcaggcaatggagggaaagcagtactatcccttgcagaatttgtgactttttataacaagcacttgacttgatcctctcaattttatcctttcaatttgatactttatacacttttttaaagggctggtgactctgtgacacattgaaaccaccatcaatcatatctaatttaggatgatttaaagttctgagagtagrtatcaatgaaaaatgagtggtaaagatgcatgagggcatttcaataacatagaggtgtgtaaggcaataactccaatcggacaaatagaaatttcacagagaagagtgtatgaagaattgacgttgttccttagccagtgagagccattcctgacaagtccagtaactcaggagaccagaaagtggacccacttatttgcatgaaggagatcacgagtccacttaccwtaggggaggaataaggttctwccccagagatgaggtgacaccagtgcccagaacagatgtgaaaagggtgacttctccttccctgtcgcccactgctgtggatgccactgtggctattcccatgaggtgctggcgtgggtgtgccagtggatggccattccagaatattagggtggctgcaacccaactgtcagtgtgcccaccaggcccagacttgcatagaaggcacagcatttccccctctctacacagagtggtagcattcctgcagcagagatcaggtgactggcaaagccatctgttttgcgctgaggtaagaagttaccctccaaggccatttggaggaagagtcacgagaaagttgttttctgtggccctcagctacaatgcagcctggagatagtgacagtgtctatctaagttagaaatcatgagccctggagcaggggtgtgatagagaagcggattacattcctgcctgcctgagacatgaagctagtgcagccccttccctctgaccccacccacagaaacctcatttcaccacaagctccccctgccacttcca

SEQ ID NO: 295865 - DNA, 568 bp, Homo sapiens
taggggaggaataaggttcttccccagagatgaggtgacaccagtgcccagaacagatgtgaaaagggtgacttctccttccctgtcgcccactgctgtggatgccactgtggctattcccatgaggtgctggcgtgggtgtgccagtggatggccattccagaatattagggtggctgcaacccaactgtcagtgtgcccaccaggcccagacttgcatagaaggcacagcatttccccctctctacacagagtggtagcattcctgcagcagagatcaggtgactggcaaagccatytgttttgcgctgaggtaagaagttaccctccaaggccatttggaggaagagtcacgagaaagttgttttctgtggccctcagctacaatgcagcctggagatagtgacagtgtctatctaagttagaaatcatgagccctggagcaggggtgtgatagagaagcggattacattcctgcctgcctgagacatgaagctagtgcagccccttccctctgaccccacccacagaaacctcatttcaccacaagctccccctgccacttcca

SEQ ID NO: 295866 - DNA, 568 bp, Homo sapiens
taggggaggaataaggttcttccccagagatgaggtgacaccagtgcccagaacagatgtgaaaagggtgacttctccttccctgtcgcccactgctgtggatgccactgtggctattcccatgaggtgctggcgtgggtgtgccagtggatggccattccagaatattagggtggctgcaacccaactgtcagtgtgcccaccaggcccagacttgcatagaaggcacagcatttccccctctctacacagagtggtagcattcctgcagcagagatcaggtgactggcaaagccatctgttttgcgctgaggtaagaagttaccctccaaggccatttggaggaagagtcacragaaagttgttttctgtggccctcagctacaatgcagcctggagatagtgacagtgtctatctaagttagaaatcatgagccctggagcaggggtgtgatagagaagcggattacattcctgcctgcctgagacatgaagctagtgcagccccttccctctgaccccacccacagaaacctcatttcaccacaagctccccctgccacttcca

SEQ ID NO: 295867 - DNA, 569 bp, Homo sapiens
aagtgaacccatctttgactttttaaaaatctttgttggtttaaagtttgttttgtcaaaaattaggatatcaacccctgcttttttctgttttccatttgcttggtagatttgtctgtattcctttattttgaacccatgggcatcactgcatgtgggatacatctcttgaagacaggataccattgggtcttgctgctttatccagcttgccactctgtgtcttttaattggggcatgtagcctgtttatattcaaggttagtagtgatgtgtgcaaatttgatcctgttatcatgttattagctggttaatatgcagacttttttgtgtggctgctttatattgtcaayggtctatgtacataattgtgtttttggattggctggtaagggtcttggccttgtctagttaatgctcatttcagtacctcttataaggcagatctaatgttaataaactccctcagtttgtctgaaaaggatcttatattctccttcactcattagtcttaactcacctgaatataaaattcttagttggaattattttctaagagttgagaatgct

SEQ ID NO: 295868 - DNA, 408 bp, Homo sapiens
acaataaaccaaatacttattgttttcaaaatatgacccccaaaaatctaaattttaaaagcatttaattgcatttyagtcaagaaatgtcttccagctttaagagaagaaatcagccacaaaacaaatttcctactcttaggttttaacacagccttaatttataaaagtccacaagccaagaaatacttaggtaatctctcaattcaaagtacttctagcttatgtaggggagactaaaatgtgggagacagtatcttgtcttaaggagtgaactacagggatgggaatacaccgcctaatccatttgcataaaaaattagtcatatatcacccatcaataacaaatcaggaatcaaactaaacaatgaacaaagaaactggtgtgcttaaacactgagctacaaa

SEQ ID NO: 295869 - DNA, 543 bp, Homo sapiens
cactaatgtgtagtagtacatggtcaagatttcactacctgagattttacatcacaggtgatgttttggtttctcttagcattactcagggcaacgtggcccagctttagagtttccctgaaatcccaaaatatcttgaatcttctccatatattctctttggatctcaaagattaccttctctcccacagagcacaattatctgaatgagcttggaccacattccaggtgtaaccaaagaaaatgcacatttacaamatgtgagatatactcccaacacacagactaagaaaacaacagacataacagtcttgtggctttgttcctagttccagggcatgtcggaaggtggggtagaggatcagaaataagcacaattctcctattttaattgctggcaagttgaaccaccacactgataactcaggattattacatattacaaacaaccaattttagcaggaatcattctttgtactgttatactgaggcttggcagctccctttaacatctcacctcagcattaaagaggaagcataagg

SEQ ID NO: 295870 - DNA, 1255 bp, Homo sapiens
ttatacagagaagctctttccttcctagaaagttctatttcgtaggaaaaaaacattgtctcatccagcccaaacatgaacatttaacatccatttctctccatgatctgagtcttcagacgtgttaagtcttctgagacctcccaaaatcactgttctacatcaaatatcagcttgaagaaccctactactttaaatatgtgagaccaaactgctttctagcaaaacacagttgaaagagaatgtatatataactcctaagtctcccttagcaccaactgctgtcaaaactaaaataaaatcgcacagaacagtttggatctcataataatcactaatgccttgtcatcactcttcttcaacgctcattacaaaaacagtaacaaaccatggaaagacrgggcttcaggttcttacaatagcgctcctctgacagcaactgcagttcattatcctctctccccttcaccaccccggcgcgttcccggtctttgcctactcagcagattcacgtaagcggggccgttttatgtggaatcgtacattctagcagtaaaattttcactcaccaggcaaattctcacccaccctctccaaggtgaactatgttttacattaatcwctcaccacggggaaatcagactgatttaaaaccttcagtgcaaacttgtaaattaaggcgaagacccagtgttccctgggacagttgcaaagtgagaagagctcagaaactgaagcacagaaacgttaggtaggagtctgagaggcgtggagaattttgcttgwgcaagattatttcagagcaaggtcgtgcggtgtgtgtagaaggtaggtggccgtgggttacctctctcagacctgcgtggtgttggcctctgggtggggataaaagtcacgaaaaagacctttggacccagagtctagttttttttctttggggccgaagaatacctaggcatggccctgtttcagtgtttacttcctctgtctaatgtatttccttagctcgcctttcatctttagtgggaaggattacttgagtggatattccggaagtagattcacaggagaatggaaaattctggatggtttgcttgctttaatttcaaggtgttgtctcttgtggatgttgggaagtattgtacttgaatatttgaagataaatatggagaaaagcagtggtgagaactaaaggaaaatgatccaaggggagatgagagaaagcaacaaaatacataagtagtacgtaaaacta

SEQ ID NO: 295871 - DNA, 599 bp, Homo sapiens
gccctacggtttacttctgttttgttttttcttttcgcccaagtcttcacaagtatggttcctttatctggaacacacatctctcttttatccactcctccacccaattttttcaactctaaacatacatcagtgttctgcctaactgcctcttccaagaagtcttctctgattagtcctcaaatctatgctgaggtactactcctacatgttcctgtaaaaccctgtatttccctgatagcactgacagacaaagggatggactgatgaagcagggatgggaggaaggaatagtatatgccaaggcacagtacttgaatgacaaaagcctgtatatggaattgagagatcttctataaagcaaggcaccaaggttggtagaaggacagtagtgatgggagatgagacttgaaaaacaagctgaggcccaggggataaagggcttgaayaccacactaagggaatcaaactctaaagtgtaggagatatggtgccctggaagtttttaactagagaagcaaaaggaatgtatgggaaacttccccatataaggaagtctctcctaattattatggaacagaagaggaggaatgattaaa

SEQ ID NO: 295872 - DNA, 599 bp, Homo sapiens
gccctacggtttacttctgttttgttttttcttttcgcccaagtcttcacaagtatggttcctttatctggaacacacatctctcttttatccactcctccacccaattttttcaactctaaacatacatcagtgttctgcctaactgcctcttccaagaagtcttctctgattagtcctcaaatctatgctgaggtactactcctacatgttcctgtaaaaccctgtatttccctgatagcactgacagacaaagggatggactgatgaagcagggatgggaggaaggaatagtatatgccaaggcacagtacttgaatgacaaaagcctgtatatggaattgagagatcttctataaagcaaggcaccaaggttggtagaaggacagtagtgatgggagatgagacttgaaaaacaagctgaggcccaggggataaagggcttgaacrccacactaagggaatcaaactctaaagtgtaggagatatggtgccctggaagtttttaactagagaagcaaaaggaatgtatgggaaacttccccatataaggaagtctctcctaattattatggaacagaagaggaggaatgattaaa

SEQ ID NO: 295873 - DNA, 1236 bp, Homo sapiens
ttgcacaatgtacatctttgaatatgactcattaaagatgagtaagatatttaatagggcagaagtattaaatgaaattttggagaygattaatttatatgtgtttttagtggccagaattaagtttcatgaactactaactgcaagagactgtgggaaatacaatttttcaatgtacctgagaggaaaatgcaatagggagttatcactgtcttttccatacactttcaatgaccttagttgaaacccaaaatttatttatgttgaaaatctgcagcatactgttggcagaagcaattgagcaacatgctaaaaaatttttgtaactgaattgtaaattttatttttgaattgaaattttatatttaataatagaggtaaaataattattgttttaagaatatttcagatctactgtaaatactgttttcattttatgatggtgatatttgttttcaacctcaaatttggcttttgcctcagatccatattaatttttaacattttttcattatttaaaatatctatttctcatatatttacaaatatatgtttatgtatgtgtgtgtatgtataaatatatatgggagtttgtatatgtgtctgtgtttatggttgctctttcctttattacaattggtgtaataattwatcgccactaacgctcaggcagctggcagtttttaaatgatctgttttactatatactttttgaaagcattagatagaactcggtattaaatattgttgtctagaaagcagagggcaagatttgtgagaaaataagcttttaaaccacttcatttttagttatacaatgtgggagactagagcaaatgagtaataaaaagcaaaacaattgagatgcttagcatgctaaattaagaatttatagtctgaatgatgtctctgttatctcattcaattttctattattgcacatcttaaacaattatgaacagagatgacawagcaatttttgcttataaatctacaagggagataaatatagcaacttctattgatagtaatgctaattggtctaatgttcccaaaacaaagaaaaactcatattggaagaaaggaacattttgagcaagtggaactggctacaaaagctaatgtgatatatttttcttttaaaacagatggaacatttactactttaaaatggtagtgacagcacatgaagttcatataaatacatattacaaataccctgagaaataagtgatg

SEQ ID NO: 295874 - DNA, 585 bp, Homo sapiens
atcgccactaacgctcaggcagctggcagtttttaaatgatctgttttactatatactttttgaaagcattagatagaactcggtattaaatattgttgtctagaaagcagagggcaagatttgtgagaaaataagcttttaaaccacttcatttttagttatacaatgtgggagactagagcaaatgagtaataaaaagcaaaacaattgagatgcttagcatgctaaattaagaatttatagtctgaatgatgtctctgttatctcattcaattttctattattgcacatcttaaacaattatgaacagagatgacatagcaatttttgcttataaatctacaagggagataaatatagcaacttctattgatagtaatgytaattggtctaatgttcccaaaacaaagaaaaactcatattggaagaaaggaacattttgagcaagtggaactggctacaaaagctaatgtgatatatttttcttttaaaacagatggaacatttactactttaaaatggtagtgacagcacatgaagttcatataaatacatattacaaataccctgagaaataagtgatg

SEQ ID NO: 295875 - DNA, 650 bp, Homo sapiens
ttgcacaatgtacatctttgaatatgactcattaaagatgagtaagatatttaatagggcagaagtattaaatgaaattttggagatgattaatttatatgtgtttttagtggccagaattaagtttcatgaactactaactgcaagagactgtgggaaatacaatttttcaatgtacctgagaggaaaatgcaatagggagttatcactgtcttttccatacactttcaatgaccttagttgaaacccaaaatttatttatgttgaaaatctgcagcatactgttggcagaagcaattgagcaacatgctaaaaaatttttgtaactgaattgtaaattttatttttgaattgaaattttatatttaataatagaggtaaaataattattgttttaagaatatttcagatctactstaaatactgttttcattttatgatggtgatatttgttttcaacctcaaatttggcttttgcctcagatccatattaatttttaacattttttcattatttaaaatatctatttctcatatatttacaaatatatgtttatgtatgtgtgtgtatgtataaatatatatgggagtttgtatatgtgtctgtgtttatggttgctctttcctttattacaattggtgtaataatt

SEQ ID NO: 295876 - DNA, 650 bp, Homo sapiens
ttgcacaatgtacatctttgaatatgactcattaaagatgagtaagatatttaatagggcagaagtattaaatgaaattttggagatgattaatttatatgtgtttttagtggccagaattaagtttcatgaactactaactgcaagagactgtgggaaatacaatttttcaatgtacctgagaggaaaatgcaatagggagttatcactgtcttttccatacactttcaatgaccttagttgaaacccaaaatttatttatgttgaaaatctgcagcatactgttggcagaagcaattgagcaacatgctaaaaaatttttgtaactgaattgtaaattttatttttgaattgaaattttatatttaataatagaggtaaaataattattgttttaagaatatttcagatctactgtaaatactgttttcattttatgatggtgatatttgttttcaacctcaaatttggcttttgcctcagatccatattaatttttaacattttttcattatttaaaatatctatttctcatatmtttacaaatatatgtttatgtatgtgtgtgtatgtataaatatatatgggagtttgtatatgtgtctgtgtttatggttgctctttcctttattacaattggtgtaataatt

SEQ ID NO: 295877 - DNA, 564 bp, Homo sapiens
aaacctgtgtagcatgttagtgtactgaatgctatagacaattttaaatcaayggtgagtatttgggtatctaaccacagaaaggatacagtaaaattactatacgaaagattttaaaacatagttcacccatatagggcatttatcatgaatggagtttgcaggacagaaagttgctcagggtaagtcagggagtggtgagtgaatgtgaagacctagggtattactgcacactactgtaggctttataaacactggaaataagttatattatactaaatttatttaaagtatgtttctctttcttcaataataaattcgccttagtatactgtaacttttcttttctacttcatcaacttttacattgtttttaactttttgactcttttgtaataacacaggtaaaaaacacattccatagctgtacaaaatatttttatgtacttattttacaagcttttttctatttttaaatttttgtataatttgactttttaagcttttttgttaaaaactaaaacacaaacacacacattagtctaagcctacacatggtcagga

SEQ ID NO: 295878 - DNA, 564 bp, Homo sapiens
aaacctgtgtagcatgttagtgtactgaatgctatagacaattttaaatcaacggtgagtatttgggtatctaaccacagaaaggatacagtaaaattactatacgaaagattttaaaacatagttcacccatatagggcatttatcatgaatggagtttgcaggacagaaagttgctcagggtaagtcagggagtggtgagtgaatgtgaagacctagggtattactgcacactactgtaggctttataaacactggaaataagttatattatactaaatttatttaaagtatgtttctctttcttcaataataaattcgccttagtatactgtaacttttcttttctacttcatcaacttttacattgtttttaactttttgactcttttgtaataacacaggtaaaaaacacattccatagctgtacaaaatatttttatgtacttattttacaagcttttttctatttttaaatttttgyataatttgactttttaagcttttttgttaaaaactaaaacacaaacacacacattagtctaagcctacacatggtcagga

SEQ ID NO: 295879 - DNA, 523 bp, Homo sapiens
tgcaacaacatggatggaactgttggacacacaaagataaatatcacattctccctaatatagggacctaaaaatataatgaattcacgaagatagagtagaaaaatagttaccagaggtaaagtgkattggggagtggtaataaagaaaagatagttaatgggtacaaaatatggttagaaagaaggaataagttctggtgttcacttatacagaaaggtaattatagttatcaataatttattatgtaattcaaaataactaaaagaatagaatgtgaatgctcctaataaaaagaaattataaatacttgaggtgatggacaccccaatttccctgatttgatcattacacatggcatgcttatatcaaaatatcaaatggaccccataaatatgtacaactagtatgtatccataataattaaaaattaaaaaatataattaagacgtgacagttctttgttaggctttacattttttgaacaaattatccatgtaggcatttctctttgatttttgtc

SEQ ID NO: 295880 - DNA, 523 bp, Homo sapiens
tgcaacaacatggatggaactgttggacacacaaagataaatatcacattctccctaatatagggacctaaaaatataatgaattcacgaagatagagtagaaaaatagttaccagaggtaaagtggattggggagtggtaataaagaaaagatrgttaatgggtacaaaatatggttagaaagaaggaataagttctggtgttcacttatacagaaaggtaattatagttatcaataatttattatgtaattcaaaataactaaaagaatagaatgtgaatgctcctaataaaaagaaattataaatacttgaggtgatggacaccccaatttccctgatttgatcattacacatggcatgcttatatcaaaatatcaaatggaccccataaatatgtacaactagtatgtatccataataattaaaaattaaaaaatataattaagacgtgacagttctttgttaggctttacattttttgaacaaattatccatgtaggcatttctctttgatttttgtc

SEQ ID NO: 295881 - DNA, 523 bp, Homo sapiens
tgcaacaacatggatggaactgttggacacacaaagataaatatcacattctccctaatatagggacctaaaaatataatgaattcacgaagatagagtagaaaaatagttaccagaggtaaagtggattggggagtggtaataaagaaaagatagttaatgggtacaaaatatggttagaaagaaggaataagttctggtgttcacttatacagaaaggtaattatagttatcaataatttattatgtaattcaaaataactaaaagaatagaatgtgaatgctcctaataaaaagaaattataaatacttgaggtgatggacaccccaatttccctgatttgatcattacacatggcatgcttatatcaaaatatcaaatggaccccataaatatgtacaactagtatgtatccataayaattaaaaattaaaaaatataattaagacgtgacagttctttgttaggctttacattttttgaacaaattatccatgtaggcatttctctttgatttttgtc

SEQ ID NO: 295882 - DNA, 1022 bp, Homo sapiens
ggtatatatgttactagcttataatgaagagatctaaagaggatcttcttttccaagattaaaatcagcatgtagtagctcctactttaatatgtggttctcataggatagtagtactcataatagcagcaatrggattagtactagcagtagtggcatcttggtgttcttgaatgcaaatttaacattttataatatatatttcatattaccatcccaaaatgtttcttataacttagaattctgaaaaactcaggaacttcctttccacagtagtttttgaagaattctattacataacacctttttatctggacaattagcaagtttaaaattcttgtatttcctgattgattataatagcaatataatgtaatacttacaaaacttgaacacttaataatttccagaatgctatcaaaatgaatagtatagaatgtaatattggawatcttcttttccaagattaaaatcagcatgtagtagctcctactttaatatgtggttctcataggatagtagtactcataatagcagcaataggattagtactagcagtagtggcatcttggtgttcttgaatgcaaatttaacattttataatatatatttcatattaccatcccaaaatgtttcttataacttagaattctgaaaaactcaggaacttcctttccacagtagtttttgaagaattctattacataacacctttttatctggacaattagcaagtttaaaattcttgtatttcctgattgattataatagcaatawaatgtaatacttacaaaacttgaacacttaataatttccagaatgctatcaaaatgaatagtatagaatgtaatattggaatgaagtacagattaatatgttttgacaaagataatgcatagactattgaggcaaatgatactgtcaacatatgttttttatttctttaatttcttagaagcaaatatggtaaatatttttctttgcttttaaaaatataacagtgcaataactattgacactta

SEQ ID NO: 295883 - DNA, 449 bp, Homo sapiens
agaatagaccctgtcattaattcaattttttaaggatttgcaggtaatttttacaaaagaatagtagagaatcaaagggaaagcagatgtgtcaacaagggaagattgtaaattaagggatgcagatgtgtcaacgagaggagatgctaagaaccttaagaaattacccttgtgacaggttttgtgtgtgtgtgtgtgtgattttgggctagtccaagtgagtaatcatttaaaacattcctatccctacacatgtatgcatacacrccttgtgtgaaaaataaagttgtatattcactcagcctggattataccactttcctataccttccttgaggccagagaagatggtgagtagagacagcaaacagcagctcatagcctaactgcaaactgaaggggaagaacactctatgcttcctgagtaaaaaattctaatggaaccatag

SEQ ID NO: 295884 - DNA, 449 bp, Homo sapiens
agaatagaccctgtcattaattcaattttttaaggatttgcaggtaatttttacaaaagaatagtagagaatcaaagggaaagcagatgtgtcaacaagggaagattgtaaattaagggatgcagatgtgtcaacgagaggagatgctaagaaccttaagaaattacccttgtgacaggttttgtgtgtgtgtgtgtgtgattttgggctagtccaagtgagtaatcatttaaaacattcctatccctacacatgtatgcatacacaccttgtgygaaaaataaagttgtatattcactcagcctggattataccactttcctataccttccttgaggccagagaagatggtgagtagagacagcaaacagcagctcatagcctaactgcaaactgaaggggaagaacactctatgcttcctgagtaaaaaattctaatggaaccatag

SEQ ID NO: 295885 - DNA, 561 bp, Homo sapiens
ctacaagtgactggataagcaaaatgcagaacaggctgagtatcccttacatgagaccagagtgtcatagattttttatattattggatttttgaatatcatatataaagatatatataggggaaggaacccaagtataaataagaaattcatttgtgtttcatatacactttatgcacatagcctgaaagtcattctatacaatatgtttaatatttttgtgcatgaaacaaagtttgtgctaagtacttatgtgtggaatttttcacttgtggcatcatgttagtgatcaaaaagtcagtttcaggtattggagcatttcaacttttgggttttcagattagggacactcaacatgcatatacctacaaataatattactcagccttataaaagaatgagatgctgacatatactacaacttgaatgaactttgaggatagcatactgaatgaaatrtcagtcacaaaaagacagatactatgtgatttcttacatgaagttctctcagtagtcaaaatcatagagacaaagtagaatggtggttgtgaggcacaaggg

SEQ ID NO: 295886 - DNA, 587 bp, Homo sapiens
atttacaatatgaaaagacttatggagatggatggtggtgatagttggacaacattatgaatgcacttaataccattgaactgtatacttaaaatgttgaagttatagatttcatattatgtgtattttaccacaataaaaatgtaatactcttatatttgaartgttcaatatggataactactttaattagcttgccaatatcactttagcagtagtagtgactcagagtgtggagtatagtgttttccatcactaaatatctttacttactcacgagctgaaaattccttgttaagtacatttcaactttctattttcaagcgtatgacattctatggttctactaatttaatcaccaagctggaccatgaaggtgatagagtcccagtaaagtctgtaatagatgttcaaacaattactgtgtatgtcccttaatgaggaactttttttattactccataattataggtaaagtcacaatgcttaaaacaacagttgatacagaaagtgtagataacttctggaaactccctgaagtactttacaaatagtactcaaagcttttctctctttcatcaccacat

SEQ ID NO: 295887 - DNA, 585 bp, Homo sapiens
aagtttaacgtacaaaagttaatttctttcctatatagtaggaataagtaagtacaatgtaaaattaaagacacattaccatttatataaacagcaaatatgtatgtgtatatatataatagttataatttttaaaaartgtacaagatctatatgagaaaaactaaaaaataatgaaagatatcatatcataactaaataaatggagagatatttcatatttatggataggaagacaatattgtcaagatgtcatttcttcctaactcatctatagattcaatgtagattcaatccaattctgggattcataatcccagaaagtaatttagtgggtattgacaaacatagtctaagtttacatgaactaagacatcatcaaagtagcaatgcaaatggcaagtaatcatataaacaatatgaaatatcgtatgccattagggaattgcaaattaaaataataaaaagataccacaacatgcctatttgaatggccaaaacccaaaactctgacaataccaaatactggcaggaatgcagaagaacagtaactctaattcattgctggtaggaatgcaaaaacat

SEQ ID NO: 295888 - DNA, 585 bp, Homo sapiens
aagtttaacgtacaaaagttaatttctttcctatatagtaggaataagtaagtacaatgtaaaattaaagacacattaccatttatataaacagcaaatatgtatgtgtatatatataatagttataatttttaaaaagtgtacaagatctatatgagaaaaactaaaaaataatgaaagatatcatatcataactaaataaatggagagatatttcatatttatggataggaagacaatattgtcaagatgtcatttcttcctaactcatctatagattcaatgtagattcaatccaattctgggattcataatcccagaaagtaatttagtgggtattgacaaacatagtctaagtttacatgaactaagacatcatcaaagtagyaatgcaaatggcaagtaatcatataaacaatatgaaatatcgtatgccattagggaattgcaaattaaaataataaaaagataccacaacatgcctatttgaatggccaaaacccaaaactctgacaataccaaatactggcaggaatgcagaagaacagtaactctaattcattgctggtaggaatgcaaaaacat

SEQ ID NO: 295889 - DNA, 572 bp, Homo sapiens
agttccaaaaggctcagcacagagagaaagaccttgttttgtggagagaaagtgaaggtaaaagacaagagtttatgcctggtaatccaggtaattcttacaaaactcatgcaaatccacaaaggcagtacctccacaagtctacaagagccacagcattactgggtttggggcccaagtcccttcaaatacctggaaagccttcccaagaaggatgggcacaaacaagcgcaggctgtgaagacctcaaaaaatgcctaactgttaattgctcaggcaacagtgaatatctacaagcatcaagatcayccaagaaaaaatgacctcaccaaatgaactaaataaggtgatatggtttggctgtgtccccacccaaatctcaccataattgtagttcccagaattctcacatgttgtgggaggaacccggtgggagttaactgaatcatgggggcaatttcccccatactgttcttgtggtagtgaataagtctcatgagatatgatggtttataaggggaaactcctttctcttgtctctcatcatctcttgtttgccaccatgtaagaca

SEQ ID NO: 295890 - DNA, 572 bp, Homo sapiens
agttccaaaaggctcagcacagagagaaagaccttgttttgtggagagaaagtgaaggtaaaagacaagagtttatgcctggtaatccaggtaattcttacaaaactcatgcaaatccacaaaggcagtacctccacaagtctacaagagccacagcattactgggtttggggcccaagtcccttcaaatacctggaaagccttcccaagaaggatgggcacaaacaagcgcaggctgtgaagacctcaaaaaatgcctaactgttaattgctcaggcaacagtgaatatctacaagcatcaagatcacccaagaaaaaatgacctcaccaaatgaactaaataaggtgatatggtttggctgtgtccccacccaaatctcaccataattgtagttcccagaattctcacatgttgtrggaggaacccggtgggagttaactgaatcatgggggcaatttcccccatactgttcttgtggtagtgaataagtctcatgagatatgatggtttataaggggaaactcctttctcttgtctctcatcatctcttgtttgccaccatgtaagaca

SEQ ID NO: 295891 - DNA, 590 bp, Homo sapiens
tggaatgacctatttaaagtgctgaaggaaaataacttttaccctagaatagtatatctggcaaraatatcctttaagcatcaaggagaaacaaagactttcccagacaaacaaaagctaagagatttcatcaacaccagacctgttctacaggaaatgataaagggaattcttcaatctgaggaagaaaaggatgttaatgaggaataaataatcatttgaaggtacaaactcacagtaaagcacacagaaaaatacagaatattataaaactggaactgtggtgtgtaaacaactattatcccaagtagaaagactaaacaaaaaaaaatcaaaaataataactacaaaaactttcaagacatcaacaatacaatgagacaaaagaaaaaaagttaaaaagagaatgaacaaagttaatatagaggttttattagttttcattttgcttgtttatgtaatcaacgttaagttgtcatcagtttaaaataatgggttacaggactttttacatgaggcagagcgagatggtgaaacagaaagctgcatcgatcatccctcctgcaaggacaagttaactatgtacgcag

SEQ ID NO: 295892 - DNA, 590 bp, Homo sapiens
tggaatgacctatttaaagtgctgaaggaaaataacttttaccctagaatagtatatctggcaaaaatatcctttaagcatcaaggagaaacaaagactttcccagacaaacaaaagctaagagatttcatcaacaccagacctgttctacaggaaatgataaagggaattcttcaatctgaggaagaaaaggatgttaatgaggaayaaataatcatttgaaggtacaaactcacagtaaagcacacagaaaaatacagaatattataaaactggaactgtggtgtgtaaacaactattatcccaagtagaaagactaaacaaaaaaaaatcaaaaataataactacaaaaactttcaagacatcaacaatacaatgagacaaaagaaaaaaagttaaaaagagaatgaacaaagttaatatagaggttttattagttttcattttgcttgtttatgtaatcaacgttaagttgtcatcagtttaaaataatgggttacaggactttttacatgaggcagagcgagatggtgaaacagaaagctgcatcgatcatccctcctgcaaggacaagttaactatgtacgcag

SEQ ID NO: 295893 - DNA, 457 bp, Homo sapiens
tccactcaaggaggagacttttaaaccagccctagccgggaggtaattgccagactcagagatctgaacttgagcttgtaaactttgccactgagggacagagcactctgtgcctccaagtaaatttgaaaggcaaagtctaggctataaggactacaacacttaggtgagtcctagtgctgaactaagcccagagaaagtggagtgggggcatacgtgacatactgagacaacagctggggcaacmaagggagtgctggtatcattcctcctctaaccccaggctgcacagcttgaggctccaaaagggaccgcttcctcctgcttcaggtaaaaagaggaaagagtatggaggactttgttttacatctaggacaccagctcagccatagcaggatagggcattagttagagttgtgaggctcccattccaggccctggcaccaagatgacattt

SEQ ID NO: 295894 - DNA, 1277 bp, Homo sapiens
attttcaaactcattctacaaggctaatattaccttcatatcaaaaccaaacaaagacacatcaaaaagagaaaactacacgccaatatctctgataaatattaatgyaaaaaaatactagcaaactgtattcaacaacactttaaaagatcatttgtcatgaccaagtgagatttattgctgggatgtaaggaaggttcaacatatgcaaatcaagcaatgtgatacattatataaagacagtgaaggacaaaaatacttttaaattatttattatttatttatttaattctattttttatttcaatattttttggggggacaggtgatgtttggctacatggataagttctttaatggtgatttctgagattttggtgcacccatcacccgaccagtgtacactgtaccaaatgtgaagtcttttattcctcacctcacttccacacttacacctagttcccaaagtccattgtgtcattcttatgcctttgcatcctcatagtttattaccacttatgactgagactatatgatgtttggttttccattcccaagttacttcacttagaataatgattttcaatgtcatctgggttgctgcaaatgccattaatttgttcctttttctatggctawattttcaaactcattctacaaggctaatattaccttcatatcaaaaccaaacaaagacacatcaaaaagagaaaactacacgccaatatctctgataaatattaatgtaaaaaaatactagcaaactgtattcaacaacactttaaaagatcatttgtcatgaccaagtgagatttattgctgggatgtaaggaaggttcaacatatgcaaatcaagcaatgtgatacattatataaagacagtgaaggacaaaaatacttttaaattatttattatttatttatttaattctattttttatttcaatattttttggggggacaggtgatgtttggctacatggataagttctttaatggtgatttctgagattttggtgcacccatcacccgaccagtgtacactgtaccaaatgtgaagtcttttattcctcacctcacttccacacttacacctagttcccaaagtccattgtgtcattcttatgcctttgcatcctcatagtttattaccacttatgactgagactatatgatgtttggttttccattcccaagttacttcacttagaataatgattttcaatgtcatctgggttgctgcaaatgccattawtttgttcctttttctatggcta

SEQ ID NO: 295895 - DNA, 569 bp, Homo sapiens
aaataagtaaaatgagaaatgaaaaaaaatacattgcaaatggcaccatggaaatattaagactcattaaaaacaattatgaacatctataccccacacacaaactgaaattggaacgcctagaggaaatgaaaaaaatcctggacacatacgacctaccaagattaaaccaagaaggaatggaaaacctgaacagggcaattataagaaacaagayggaatcagtaatataaagtgtcccaacaagaaaatagcccaggaactgatggtttccctgctgaattctaccaagcttttaaagaacaattaataccaattatttgaaaattgaaaaggagaaggtactcccacactcattgtaagaggtcagcatcacccttatcgtaaggtattagacaaggacacaacaaaatagaaaactataggcaaatattcctgataaacataaatgtagaaattctcaagaaaataccagcaaaccaaattcagtgatgcaaggatgggtcaacatacacaaattaataactgtgaaacatcaaaccaacagaaagaaggaccaaaaaatacaa

SEQ ID NO: 295896 - DNA, 567 bp, Homo sapiens
tattagcatttaaaagagcaatactaataattttgtttaaaattcagttacatagtttggcatagagcaattaatgaagcgggaagaatactaggagcaagtgttaaagaacataaagaaagaaactttcatgtcaatatattatttatttaattgtataccaaatcataaaaataaaaaagagagagagagagtgacagagagagagaagcaaacagagggcattttatttaatgtttctgttttagaaagtagccattagatctgttcataagagtagagatttggatccttcagataactcaaggagagaatgaaatcatttcaactgctctctaggagggtggagcattcattgtgtttcaaaagacaaaactctcttctgagtaggataaagagytcttttgttgttaagaactagagctcattttttcatttagaatcactttattgtggaaggctacatcttaggttttggatatgagactggctaaactgaacaaaggccctgtttttataaaacttagggaatactaatcacagaaataggaataaaattgcaattgt

SEQ ID NO: 295897 - DNA, 614 bp, Homo sapiens
tgtttctcttaagtatattataataattaaatgaggatattaatgtagaatgcttaacattgatggcagcagcaggccatgtgaagccactgctgccatcgtactagctgcagcagggaggcataagtggaggcagcaggagtggctgcagaagcagcagtggtggcagtgggtctcctgtgccccatgtttctgaggaagcctactgyaccacccctacccttgcatggttgggaaggatctgctcccaggcccagagcctctgccatggcctcaaccttgcttcctgctgcatcctgggggcctgcgtgcacttggccgaagatgcaggcaggacttgcaggactggtcccaggagtgtcaggtttgtttgtgaggggttggacagggccgccatgcaacctgcacctgtcccaccacacagagagccacggcaatggggccaggcctagttgcccacaggcaggggattagtgcagtcaggcatgaagaggtgggcagagaggggccctggggaagagctgggcccagggcagtgttgcactccacaaagccggcaggagctgggaggaggcaggacccctgccctccttggtggggctgcagctgtccaa

SEQ ID NO: 295898 - DNA, 614 bp, Homo sapiens
tgtttctcttaagtatattataataattaaatgaggatattaatgtagaatgcttaacattgatggcagcagcaggccatgtgaagccactgctgccatcgtactagctgcagcagggaggcataagtggaggcagcaggagtggctgcagaagcagcagtggtggcagtgggtctcctgtgccccatgtttctgaggaagcctactgcaccacccctacccttgcatggttgggaaggatctgctcccaggcccagagcctctgccatggcctcaaccttgcttcctgctgcatcctgggggcctgcgtgcacttggccgaagatgcaggcaggacttgcaggactggtcccaggagtgtcaggtttgtttgtgaggggttggacagggccgccatgcaacctgcacctgtcccaccacacagagagccacggcaatggggccaggcctagtygcccacaggcaggggattagtgcagtcaggcatgaagaggtgggcagagaggggccctggggaagagctgggcccagggcagtgttgcactccacaaagccggcaggagctgggaggaggcaggacccctgccctccttggtggggctgcagctgtccaa

SEQ ID NO: 295899 - DNA, 610 bp, Homo sapiens
gtttaaaacgaaattactataaggaatgaaacatttyagtactctttttcaaaactttctgagttgacagtagagagtaagctatgattccaaaccaaagaataggcagagatcttaaaaggtattaaaagagcaccaaagttgcttttcagcatgagttcctctcaaactcctggaatactgaactagtttgtacatactaaaagaaggacaaaatataaaacctagactctacccaatgtggaaagtataataagacatcttagttaagttggaagacaaaagcatctcattatagaggtaaaatagttttaaaaaaatccctaaacaaaaggtataggacagaaactcacttatttcaactatggcactaaagaatagaaggggtgaattccccctgagaattcatactacctcaaacgctgacatggatggaatcactgaattgccacagagcagttgaaatacttcaaataaattaatataaaataatttcagattggtagtaccactaatcactcttgagaaataaattaacctgtagaaacaatcaagccctagcttctaaaaatttgttcataaaaagtgtcaaggaatacaatcagtacaa

SEQ ID NO: 295900 - DNA, 1239 bp, Homo sapiens
gtttaaaacgaaattactataaggaatgaaacatttcagtactctttttcaaaactttctgagttgacagtagagagtaagctatgattccaaaccaaagaataggcagagatcttaaaaggtattaaaagagcaccaaagttgcttttcagcatgagttcstctcaaactcctggaatactgaactagtttgtacatactaaaagaaggacaaaatataaaacctagactctacccaatgtggaaagtataataagacatcttagttaagttggaagacaaaagcatctcattatagaggtaaaatagttttaaaaaaatccctaaacaaaaggtataggacagaaactcacttatttcaactatggcactaaagaatagaaggggtgaattccccctgagaattcatactacctcaaacgctgacatggatggaatcactgaattgccacagagcagttgaaatacttcaaataaattaatataaaataatttcagattggtagtaccactaatcactcttgagaaataaattaacctgtagaaacaatcaagccctagcttctaaaaatttgttcataaaaagtgtcaaggaatacaatcagtacaawaatacgttttaaaaaattaaaataaaaatatgaaagtataaacagaactaaaaataaggaaaagcaaataaaattttataataaaccaaaaggatatctagaaatgaaaawcagaattgttgaaatatttaaaatcaaggacaaaatttatagcttaatagacttagttgaagagaaaatcagttaactaaaatagatttctgaagaaattttccataaaaaaataaaagttataaaagacggtaggtataaaaaaacaaagatcaagaaataggtaatgagaatgtaaaattctactcagtgtttaaaaaaaagtagaaatgagattcttaatgaattaattaaagacattcacagattcataaagccctgtaatactagctagagaatagaaaaagtaattacacctgtatctacaatataaaaagacaacaaaaaactagaaaccaaacagaaataataattgaacaacaaacttctcaatagcaataatttagaaaaagtgatttttttaagttgataagctaaaacacgattaacccagaattgtattccataaaaactgtttttcaagggcaaaagtaaaataaagacattttcagacaataaaaatcccatttatcaataa

SEQ ID NO: 295901 - DNA, 578 bp, Homo sapiens
cacacacacaagcgtctggacgtctagaggaacacaccagcagaagagcacaccgacagacacaggcaggccatccacagcgsaatgtcacggatgccaaggggaattcagttggaggagagtccggatgctggggggcccgactccaggggaagatcacctcctcactccatcccccttctggcctccccatccacctcactgaaagctacctccgctcaataaaaccttgcacccatcctccaagcccacgtgtgatctgatttttctggtacaccacagcaagaacccgggatacagaaagccctctgtccttgggataaggcagagggtctaattgagctgattaacacaagctgcctgcagacagcaaaacagaaagagcacactgtaacacatgcccactggggcttctgaagctgcaaacactcaaccctagaggctgacacggggtcggagccccatgacctgctcctctgcatgctccccctaggggtttgagtagcagggcaccaaataagccagtcatttcacgtccctgtcacaagccctgtgagggggataagggaacttttccc

SEQ ID NO: 295902 - DNA, 578 bp, Homo sapiens
cacacacacaagcgtctggacgtctagaggaacacaccagcagaagagcacaccgacagacacaggcaggccatccacagcggaatgtcacggatgccaaggggaattcagttggaggagagtccggatgctggggggcccgactccaggggaagatcacctyctcactccatcccccttctggcctccccatccacctcactgaaagctacctccgctcaataaaaccttgcacccatcctccaagcccacgtgtgatctgatttttctggtacaccacagcaagaacccgggatacagaaagccctctgtccttgggataaggcagagggtctaattgagctgattaacacaagctgcctgcagacagcaaaacagaaagagcacactgtaacacatgcccactggggcttctgaagctgcaaacactcaaccctagaggctgacacggggtcggagccccatgacctgctcctctgcatgctccccctaggggtttgagtagcagggcaccaaataagccagtcatttcacgtccctgtcacaagccctgtgagggggataagggaacttttccc

SEQ ID NO: 295903 - DNA, 1093 bp, Homo sapiens
cacacacacaagcgtctggacgtctagaggaacacaccagcagaagagcacaccgacagacacaggcaggccatccacagcggaatgtcacggatgccaaggggaattcagttggaggagagtccggatgctggggggcccgactccaggggaagatcacctcctcactccatcccccttctggcctccccatccacctcactgaaagctacctccgctcaataaaaccttgcacccatcctccaagcccacgtgtgatctgatttttctggtacaccacagcaagaacccgggatacagaaagccctctgtccttgggataaggcagagggtctaattgagctgattaacacaagctgcctgcagacagcaaaacagaaagagcacactgtaacacatgcccactggggcttctgaagctgcaaacactcaaccctagaggctgacacggggtcggagccccatgacctgctcctctgcatgctccccctaggggtttgagtagcagggcaccaaataagccagtcayttcacgtccctgtcacaagccctgtgagggggataagggaacttttcccwatgttatatataatatgatatgtttatataaaattatatataattatttatataattattatatttatttttatattaataatacataatatataatttatatatatttctatattatatatgtaaaaatatatattttatatatactagagacagggtcttgctctgtcttccagctggagtgtgcagtggcaccatcacagctcactgcaatcttgactgcctgggcttaagtgatcctctcagctcagccactccagtagctgggactacaggagcacaccaacatgcctggctaagtttttaaaatttctgatagwgatgtggtttcattatgttacccaggctggtctcaaactcctgagctgaagcagtcctttcatctcggcctctcaaaggcctaggattacaggcctgagccactgcacccagtcacagcctactcttaagcaatagaaaatctcttcacttgtgggtggagattctatataaattatccagaattctgcatagg

SEQ ID NO: 295904 - DNA, 1151 bp, Homo sapiens
ctcatcatttatgtcataatttctccaacatttattatttgtcatgtgctacaatcttccatatctcttatatatttgttataaacaaagtttcagtgcctcaaaagaaatagcactcgaacataaaattttctttttaattctcagcaaggcaagttacttctatagaagggtgcacccttacagaaggagcaatggtgagtgcacacttggataagggaggggaaggagttcgtacccctgacacaagtggcccctgmtgctgtctcattcccctattggctagggttagactgcacaggctaaactaattctgattggctaatttaaagagagtgatggggtgagtggtttggtgggaaaaatggttttgacagagcaggtaatcagaatgagtcaggtggagtaggtaatcggaatgagtcagggtggagcaggcagtagaaaaaggttgctttatgaggaagttaagtttaaaagtagtaggcaaagaattggacatactgacatattgattatttgaaaagaaatttagaactcatatctaacaacccctcttcttgcactgccttacawctcatcatttatgtcataatttctccaacatttattatttgtcatgtgctacaatcttccatatctcttatatatttgttataaacaaagtttcagtgcctcaaaagaaatagcactcgaacataaaattttctttttaattctcagcaaggcaagttacttctatagaagggtgcacccttacagaaggagcaatggtgagtgcacacttggataagggaggggaaggagttcgtacccctgacacaagtggcccctgctgctgtctcattcccctattggctagggttagactgcacaggctaaactaattctgattggctaatttaaagagagtgatggggtgagtggtttggtgggaaaaatggttttgacagagcaggtaatcagaatgagtcaggtggagtaggtaatcggaatgagtcagggtggagcaggcagtagaaaaaggttgctttatgaggaagttaagtttaaaagtagwaggcaaagaattggacatactgacatattgattatttgaaaagaaatttagaactcatatctaacaacccctcttcttgcactgccttaca

SEQ ID NO: 295905 - DNA, 575 bp, Homo sapiens
ctcatcatttatgtcataatttctccaacatttattatttgtcatgtgctacaatcttccatatctcttatatatttgttataaacaaagtttcagtgcctcaaaagaaatagcactcgaacataaaattttctttttaattctcagcaaggcaagttacttctatagaagggtgcacccttacagaaggagcaatggtgagtgcacacttggataagggaggggaaggagttcgtacccctgacacaagtggcccctgctgctgtctcattcccctattggctagggttagactgcacaggctaaactaattctgattggctaatttaaagagagtgatggggtgagtggtttggtgggaaaaatggttttgacagagcaggtaatcagaatgagtcaggtggagtaggtaatcggaatgagtcagggtggagcaggcagtagaaaaaggttgctttatgaggaagttaagtttaaaagtagtaggcaaagaattggacatactgacatattgattatttgaaaagaaatttasaactcatatctaacaacccctcttcttgcactgccttaca

SEQ ID NO: 295906 - DNA, 607 bp, Homo sapiens
acacacagaattcccattttaaaacttgcttaagcctttaaaacaaatattttaaccttttaatgtaggtaaaaattcaaatttttatgcctctttaaaacccttttaccaaaagtatattttactttccttacacaccttgcacataaactgtttcttcaatagttttacattcaggaggactaattacttctaaatgatacacatttcttgcataaattcccttttataacttttttttcacgactttcacaatctttgacatgcctcaaacttctgacttgttgcaaacatccctttcyttaaacaaccagttaatttattttaggacaagaatttaccatataacattctttttatataaattcttcccctccttttttttttttttttttttttagttttctccaaagtgaacttccttcatgtctgtggattcaattgcctaaggccacaagattagaaaatagtataatacaagttacactgttaacttttagcaaactttacttttgttgaaaaccttgtaagtctgggatttcaattatcctttgctattaataagatcttgtttagtccaaattaacttagaattggtatagatggt

SEQ ID NO: 295907 - DNA, 1122 bp, Homo sapiens
ctggttctgtaagtactttaatgcttggctgagtgcaaacagctcacacatttgagcagaccaattattaggcaattttcctaactccgcttctacaagagttaccctatcaattactgaatacccattgtgtcttcttccctcaatcaccccggaggaaccatctatcatcctgtcctgaagggagttcctcctaggtctggtcagacctttgyacggtaattaattaagatttagatctcctgttaagaaatctgctgggttaagggaattatcagtggttaatgttaaatcatctttttctaacagaatagccccatactttaagatttttgagtaagctactcttttgctttttttttttttttttttttttgacttaggatagttctgaactggtgaggtgtgctcacaatgaggcttcctctagaagttatttttctactttcttctgctagcaaagcaattgcccctacagattgaatgcatatggggcatccgtgagtwattgttaatcaatgcatgaccatacatgtgtaatggtatttcattgtggttttactttgaaattacctaataaaatataattttttcatatgcttatttgccctgttgtatcttctttgatgaaatgtcawtttatatatttatccatttttaattgtcttttatttttcttatttgtcagttttgtaggttctttgtatattttggatacaagccccttatcagatatatgttttgcaaatattctttctcaggttttggcttgtttttttgataattttaattttggctttcacagagcagatgtttttaatattaataaaattcaacttgacaatttttcttccatagattgcgctattgctgtcatatttaaagactcatcacaaaatctaagatgacaggtttgtcactaagtttggaaaattcttggccattattacttcaaataatttttcagctctgttctctttttctccttccagcattttaattatgcatatgttatactttttgaaattaccccacagtcttagatattcttttgtatttttttttatcatctctttgcaattcacttacggaagtgtttttgacatatcttcaaactcactt

SEQ ID NO: 295908 - DNA, 990 bp, Homo sapiens
tcataattaaactcattttaatccctacaacagatttttttctacagattcaagcatgatataatggtgtataatgctcattccaatatcaaatatatgacagatggaattttggagacgatttgttttttagttgtaggtaagtgtacccatcaattggacmtagtgtgtctagtaaagacaatcatacaatatatatcaagagagaaagttcaatagaaaggattaataacgtgtttgttgaaaagcttaaagcacatgcatacgaactgaattatcacagagataacaactgaaggaaatagcagctaagaacaaagagaatatagtgagattatcagaccctagaaaagaccctacagagttggtgctcagactctgagtggggctttggcaagctggtgctataacactcacacgattaggctggttttaagaattwtaagaaaagctacacttatgtcaattatttcttaacagaaattttagtaagcacccattcacccaaaaataatcagaaaattgggtcttttggttaattgaacattcttgtaattgacatttgtcaaatatatcatacatggattaacagtgttcaaaaaactagaataaaattacatgcacttgacatcagaattataactttaaggctcttcctagctgtataattctgaacctcttcagaatatacaagtgctcagacattacttaaagtatgtcattgatttaaattaatcaacaaataattatatttgtataacatttaggagtaaaaggttaagctaataaaactgaattgttattgactcttggacacagcttgaaatttgattatatgaaatacatttgtgaagtaaaattaaaataaactagaaaatgttattggataaaawaattctgtctttctagttgttggttttcttggttaatgggtgggtacgtactctattaagctttaataaaatgattggtgtctaccttaataagata

SEQ ID NO: 295909 - DNA, 594 bp, Homo sapiens
ctaaacaataccttgcactcagtaaacatttgctcaattggacacaatttaacaaagctacatttccattgcttattaatataattgtatatctaaatatgtgggctttttccmggaaagccaaattttgctttccaaaaaacaatcttcctatactgttcagatttttatttgctctaaatctaaatttaattggtcctaatagaatcttatacattctttagagtagctttggatttaatgcagatgccatgcaatttttatgcaaagaagaattttctttaatattttgaatgttatacacctgtttttcatgtttacgtgaagaatgtaagaggaaaaactttatgccaatggctaatcatcaaaattttagaggttgtgtttcagtgttcatcaagactataattactttagaaacaatttcctatttcttttgcttttataaatcagcattaaaaattaaaactaaacattgagttgttaattttaaaaggaaagcaaaattttatttgtaaacaaattttgaatttatttaaaagtactaataaaatatttcatatgaaaccatagattacgtgttaaattgtgaat

SEQ ID NO: 295910 - DNA, 507 bp, Homo sapiens
atgcttcatatcacccccaagacacaggattatcacatgtcgtaatgaaaaattaaattacaggtgtacgtgtctgataggtgaggacaaaataacccaaacttggactgcmcatcttctgtaggccatctaagatctcaatgcagcaattcctcaaaagggtatttctcatgttcagtctggttatctatcccctttccttcaaacttacactcttcttttataattattgacaccgtagtctcacgggggatcctataagggctttgctttcccttcaatttctttctgaagcctcaaatcaatgagagctcacaatggctattaagcaagggatgggagatatgtaaactcattttgaaatcttttaaaacttcaggattttatactaaccaattcataaccataatgtgtctgtgattaatttgtagaaattttttttttcatacaaatgcttttgtccttctcacatatctctcagttgaaaggtctaaataagagtaggtg

SEQ ID NO: 295911 - DNA, 610 bp, Homo sapiens
agatagcttctagttatcccatagtatttatacccttgtataattatccctccttgaatgtgggccagacatagcaatttgcatctaacaaagaatatagcaaaagcaatgagatgtcatttgtgagattaggttaaccaaggtttctatttcactcaccctctctcactctcttgctcatggatctgttggaaagtcagttgccatgttgtgacatgtgtcatgtttggcaaagaactgagaggattcatcaattacatgacactgaacaactgagggcctcagtccaacagaccctgaraatctgaatcttgccaacaatcacaggagtgaacttgttaggagatcatctccaagtcaagctacaaatggacccttgcgtgagaggcacccaactaaactgcacccagtttcctgactctcagaaactctaaggtagtaaatacttcttgttgcaaatcacttattatgggataatttatttcacagtaacagctaacatgtgaaacataaaagaagaatacaaacaaataatgcaagaaatttcacaaatgtagacagatgtaatcctgctaaatataacagtgaagaagaataattgtatacaaag

SEQ ID NO: 295912 - DNA, 1221 bp, Homo sapiens
agatagcttctagttatcccatagtatttatacccttgtataattatccctccttgaatgtgggccagacatagcaatttgcatctaacaaagaatatagcaaaagcaatgagatgtcatttgtgagattaggttaaccaaggtttctatttcactcaccctctctcactctcttgctcatggatctgttggaaagtcagttgccatgttgtgacatgtgtcatgtttggcaaagaactgagaggattcatcaattacatgacactgaacaactgagggcctcagtccaacagaccctgagaatctgaatcttgccaacaatcamaggagtgaacttgttaggagatcatctccaagtcaagctacaaatggacccttgcgtgagaggcacccaactaaactgcacccagtttcctgactctcagaaactctaaggtagtaaatacttcttgttgcaaatcacttattatgggataatttatttcacagtaacagctaacatgtgaaacataaaagaagaatacaaacaaataatgcaagaaatttcacaaatgtagacagatgtaatcctgctaaatataacagtgaagaagaataattgtatacaaagwagatagcttctagttatcccatagtatttatacccttgtataattatccctccttgaatgtgggccagacatagcaatttgcatctaacaaagaatatagcaaaagcaatgagatgtcatttgtgagattaggttaaccaaggtttctatttcactcaccctctctcactctcttgctcatggatctgttggaaagtcagttgccatgttgtgacatgtgtcatgtttggcaaagaactgagaggattcatcaattacatgacactgaacaactgagggcctcagtccaacagaccctgagaatctgaatcttgccaacaatcacwggagtgaacttgttaggagatcatctccaagtcaagctacaaatggacccttgcgtgagaggcacccaactaaactgcacccagtttcctgactctcagaaactctaaggtagtaaatacttcttgttgcaaatcacttattatgggataatttatttcacagtaacagctaacatgtgaaacataaaagaagaatacaaacaaataatgcaagaaatttcacaaatgtagacagatgtaatcctgctaaatataacagtgaagaagaataattgtatacaaag

SEQ ID NO: 295913 - DNA, 610 bp, Homo sapiens
agatagcttctagttatcccatagtatttatacccttgtataattatccctccttgaatgtgggccagacatagcaatttgcatctaacaaagaatatagcaaaagcaatgagatgtcatttgtgagattaggttaaccaaggtttctatttcactcaccctctctcactctcttgctcatggatctgttggaaagtcagttgccatgttgtgacatgtgtcatgtttggcaaagaactgagaggattcatcaattacatgacactgaacaactgagggcctcagtccaacagaccctgagaatctgaatcttgccaacaatcacaggagtgaacttgttaggagatcatctccaagtcaagctacaaatggacccttgcgtgagaggcacccaactaaactgcacccagtttcctgactctcagaaactctaaggtagtaaatacttcytgttgcaaatcacttattatgggataatttatttcacagtaacagctaacatgtgaaacataaaagaagaatacaaacaaataatgcaagaaatttcacaaatgtagacagatgtaatcctgctaaatataacagtgaagaagaataattgtatacaaag

SEQ ID NO: 295914 - DNA, 571 bp, Homo sapiens
gtcattttattccaaaatattaatggtatagcaatgtctaaaattatttctctcattttcaggtgaaaaacaatattttgagctagactttcaaatatctatttaactgttttctttaaaattcttcatatgaatggcatgtattcaaatggctgttaaaatcccatgcaaagtcataagtacattataaaagaagtggcatataccaatgtgctcctgagtgatgcatgatagattaataagcatttgttyagtcaaatatatttgagatttatttaaattccattataatgctttgtaagtgtttaaataaacaatctcaaaaaaaagcaaaggtatatctacatctaggtttggacaagaggctttggtatctcttctgagaatataacaaaatgcatattgtttgtaagtgtcttactcagatctttacacatcttggccaattttgaatgttttgatttgattgtattcaattgatggatttatgatattaaaagagatgtgatgtattattttaacttcagaagtgacattttgtttttcactattttgtatatatatggtgaaa

SEQ ID NO: 295915 - DNA, 599 bp, Homo sapiens
tttcccccatgaaacaatgtactggttcaaggtcaggcagatcagcacagatgtaggggtccccaaatactctttaaaaacagcaatgtaaggagcagatactaagaaatyacaagatcaaaggctaagtggcagtagggatccagagaggtaaaggtaatcataagagctcttctaccctgagagcgtttgttaatatctagaacccaagctttgtttacatggccttgtagggcacgtgggcagaaacaaaagccattattcatctgagagagagtctacaagtagaaactttctctcaataactggtgcacaaagttctatatctacattttaggtgtgaaccagaaagaagcccatcgacaccaccttcacatcatgaaaactatccatacatttttattgtggctaagcataacaagggagaaagtccttcagagtactgagccacaggaaaagaagtacatattcgcagcccaagctaaaatgccgtgggtgatcagaaaaaaatatgcaagttaataatttagttaaaagtaatactaaactagtagtgcatccaggcaataaaaaatataaattagaaccaagtaaagaag

SEQ ID NO: 295916 - DNA, 599 bp, Homo sapiens
tttcccccatgaaacaatgtactggttcaaggtcaggcagatcagcacagatgtaggggtccccaaatactctttaaaaacagcaatgtaaggagcagatactaagaaattacaagatcaaaggctaagtggcagtagggatccagagaggtaaaggtaatcataagagctcttctaccctgagagmgtttgttaatatctagaacccaagctttgtttacatggccttgtagggcacgtgggcagaaacaaaagccattattcatctgagagagagtctacaagtagaaactttctctcaataactggtgcacaaagttctatatctacattttaggtgtgaaccagaaagaagcccatcgacaccaccttcacatcatgaaaactatccatacatttttattgtggctaagcataacaagggagaaagtccttcagagtactgagccacaggaaaagaagtacatattcgcagcccaagctaaaatgccgtgggtgatcagaaaaaaatatgcaagttaataatttagttaaaagtaatactaaactagtagtgcatccaggcaataaaaaatataaattagaaccaagtaaagaag

SEQ ID NO: 295917 - DNA, 608 bp, Homo sapiens
tctaaaaaatataaatttgtaatcaaaatggcaaataaacaattaaaattatagttgactccaatagtaatagatgaaaagtaaatttaaggcacaattattaataaaactatcacacaacaaaacagaaagtcaaatactttaaaaaaaaactttccaaatgataactttcatatagtgataggaggtatatatattgttagaatcacattgggaaagattttgatatcatctagagaatttaaaagtgcacaaatactttaacagagcaattttacatctaggtacataacctagagaaaattctkcacttatatcttccagaagacatatttagtcataactgtagcataatataatggtatgtcatataacagttcatataaataaatcaaagctacacacacacacacacacacacacacaagtcatacaacaaacataattttaagaaaaaaaaagtcacaaaagatcaaaaacagcctgaactaaaatatatcatttagaagttcgtatatcagtagtagaactattaaaaaaaaaaatcaacaatgccaacgcagtagattcattggcagaggaaggaagaggatgtgattaggcagaga

SEQ ID NO: 295918 - DNA, 540 bp, Homo sapiens
actgagcagtatccaaatctattaaatgatttktattatatctctcttaaaatattagtccatcattttatgcctatgacagttgattcaatcacctggtcaacgcaatcattttattttatgtctgctgtagcttttaagagtggaaaggttctggtattatttgtggaaaggcagtttggaggaataaatatcaaactgttgcttttacaggatcaatgttctttataattgctactggcattaacagtcatctctgaaactactagaaaaccggctgatggattggtatgcagaacaatcaaaagagccactggagataatgacattctttattgggaattgcctgaagaagatttcccttttagcaagacgactaccatatagggttagaaagtgtagaaagggttttcctttcctttttggcctaaggcaaaactataagctcaaatgggctttgtcctttgcaagatgtttgctttcttcagcaattcttagtttaatgggcataacaagaagaacaggattctattgcatgaa

SEQ ID NO: 295919 - DNA, 540 bp, Homo sapiens
actgagcagtatccaaatctattaaatgatttgtattatatctctcttaaaatattagtccatcattttatgcctatgacagttgattcaatcacctggtcaacrcaatcattttattttatgtctgctgtagcttttaagagtggaaaggttctggtattatttgtggaaaggcagtttggaggaataaatatcaaactgttgcttttacaggatcaatgttctttataattgctactggcattaacagtcatctctgaaactactagaaaaccggctgatggattggtatgcagaacaatcaaaagagccactggagataatgacattctttattgggaattgcctgaagaagatttcccttttagcaagacgactaccatatagggttagaaagtgtagaaagggttttcctttcctttttggcctaaggcaaaactataagctcaaatgggctttgtcctttgcaagatgtttgctttcttcagcaattcttagtttaatgggcataacaagaagaacaggattctattgcatgaa

SEQ ID NO: 295920 - DNA, 540 bp, Homo sapiens
actgagcagtatccaaatctattaaatgatttgtattatatctctcttaaaatattagtccatcattttatgcctatgacagttgattcaatcacctggtcaacgcaatcattttattttatgtctgctgtagcttttaagagtggaaaggttctggtattatttgtggaaaggcagtttggaggaataaatatcaaactgttgcttttacaggatcaatgttctttataattgctactggcattaacagtcatctctgaaactactagaaaaccggctgatggattggtatgcagaacaatcaaaagagccactggagataatgacattctttattgggaattgcctgaagaagatttcccttttagcaagacgactaccayatagggttagaaagtgtagaaagggttttcctttcctttttggcctaaggcaaaactataagctcaaatgggctttgtcctttgcaagatgtttgctttcttcagcaattcttagtttaatgggcataacaagaagaacaggattctattgcatgaa

SEQ ID NO: 295921 - DNA, 539 bp, Homo sapiens
ctacaccctctctgaaatgaatttgcataataactgttgtttatgggactgcatcttgatagggcagctggcttgttaagaaatactcaggaamccagcccagctctagaactcactcctgactgaaaaggcaatgttgagaatgctggtaagggaccactagaatccagcaacccagacccctttctttgtggtcaagaaaagaaggaaaacaggtgcaggactgctgcattggtgagcgtaacgaatccaataagcagaggtccatgggtggttacgcacctggaagggaataagcattaggaccatagaggacgctctaggactaatgctcattggaaatgtactaggggtgctggcatccctgtgtttttttttcagatgggaaacattccccctaagtcaaaaacacccctgagatgtattctggagaattcagctcagagtacatgtacctttttctctctcagacttgaagcatattaaaatagacctagataaattctcagataaccctgatggctatattgatgttttac

SEQ ID NO: 295922 - DNA, 539 bp, Homo sapiens
ctacaccctctctgaaatgaatttgcataataactgttgtttatgggactgcatcttgatagggcagctggcttgttaagaaatactcaggaacccagcccagctctagaactcactcctgactgaaaaggcaatgttgagaatgctggtaagggaccactagaatccagcaacccagacccctttctttgtggtcaagaaaagaaggaaaacaggtgcaggactgctgcattgrtgagcgtaacgaatccaataagcagaggtccatgggtggttacgcacctggaagggaataagcattaggaccatagaggacgctctaggactaatgctcattggaaatgtactaggggtgctggcatccctgtgtttttttttcagatgggaaacattccccctaagtcaaaaacacccctgagatgtattctggagaattcagctcagagtacatgtacctttttctctctcagacttgaagcatattaaaatagacctagataaattctcagataaccctgatggctatattgatgttttac

SEQ ID NO: 295923 - DNA, 569 bp, Homo sapiens
tttccctaccaaaggcggtacccccttagactggaggcccaacaaggactccaaaagattgttaaagacctaaaagcccaaggcttagtaaaaccatkcaatagcccctgcaatactccaattttaggagtacagaaacccaacggacagtggaagttagtacaagatctcaggattatcaatgaggccattgtccctctatacccagctgtacctaacccttatactctgctttcccaaataccagaggaagcagagtggtttacagtcctggaccttaaggatgcctttttctgtatccctgtacatcgtgagtctcaattcttgtttgcctttgaagatccttcaaacccaacatctcaactcacctggactgttttaccccaagggttcaggaatagccctcatctatttggccaggcattagcccaagacttgagccagttctcatacctgaatactcttgtccttcggtacctggatgatttacttttagctgcccatttagaaaccttgtgccatcaagccacccaagtgctcttaaatttcctcgccacctgtggctacaa

SEQ ID NO: 295924 - DNA, 569 bp, Homo sapiens
tttccctaccaaaggcggtacccccttagactggaggcccaacaaggactccaaaagattgttaaagacctaaaagcccaaggcttagtaaaaccattcaatagcccctgcaatactccaattttaggagtacagaaacccaacggacagtggaagttagtacaagatctcagrattatcaatgaggccattgtccctctatacccagctgtacctaacccttatactctgctttcccaaataccagaggaagcagagtggtttacagtcctggaccttaaggatgcctttttctgtatccctgtacatcgtgagtctcaattcttgtttgcctttgaagatccttcaaacccaacatctcaactcacctggactgttttaccccaagggttcaggaatagccctcatctatttggccaggcattagcccaagacttgagccagttctcatacctgaatactcttgtccttcggtacctggatgatttacttttagctgcccatttagaaaccttgtgccatcaagccacccaagtgctcttaaatttcctcgccacctgtggctacaa

SEQ ID NO: 295925 - DNA, 569 bp, Homo sapiens
tttccctaccaaaggcggtacccccttagactggaggcccaacaaggactccaaaagattgttaaagacctaaaagcccaaggcttagtaaaaccattcaatagcccctgcaatactccaattttaggagtacagaaacccaacggacagtggaagttagtacaagatctcaggattatcaatgaggccattgtccctctatacccagctgtacctaacccttatactctgctttcccaaatacyagaggaagcagagtggtttacagtcctggaccttaaggatgcctttttctgtatccctgtacatcgtgagtctcaattcttgtttgcctttgaagatccttcaaacccaacatctcaactcacctggactgttttaccccaagggttcaggaatagccctcatctatttggccaggcattagcccaagacttgagccagttctcatacctgaatactcttgtccttcggtacctggatgatttacttttagctgcccatttagaaaccttgtgccatcaagccacccaagtgctcttaaatttcctcgccacctgtggctacaa

SEQ ID NO: 295926 - DNA, 435 bp, Homo sapiens
acgctttccacttctattcaacatagtattagaagtcatcatcagagtaattaggcagaaaaagaaatgaaagtcattcaaataggaatggaaaaagtgaaattttatctgtttgctgatggtatgatcttatatataaaaaccataatgattgcacaaaaaaacctattagaattaataaatgaatatagtaaagtcrcagggtacaaaatcaacacacaaaaactagtaatgattttatatactgtttcttctgaaaaagaaagagaaaaatcctatttacaatagctacaaaaataaaatacttaaggataaatttaacaaaggagatggaagacttgcacactgaaaactatgaaatattaatgaaaaaatttgaaagagaaacaaataaatgaaaagatatcccatgttcatgaattggaagaattaata

SEQ ID NO: 295927 - DNA, 435 bp, Homo sapiens
acgctttccacttctattcaacatagtattagaagtcatcatcagagtaattaggcagaaaaagaaatgaaagtcattcaaataggaatggaaaaagtgaaattttatctgtttgctgatggtatgatcttatatataaaaaccataatgattgcacaaaaaaacctattagaattaataaatgaatatagtaaagtcgcagggtacaaaatcaacacacaaaaactagtaatgattttatatactgtttcttctgaaaaagaaagagaaaaatcctatttacaatagctacaaaaataaaatamttaaggataaatttaacaaaggagatggaagacttgcacactgaaaactatgaaatattaatgaaaaaatttgaaagagaaacaaataaatgaaaagatatcccatgttcatgaattggaagaattaata

SEQ ID NO: 295928 - DNA, 545 bp, Homo sapiens
cccaccttgtgtgataaccaaaaatgtctccagacgctgccagttgtcccctaggggggcagaatcaccccaagttgagaagcgagtgtgaggacagccctggggcttggcgagcacgcagtgtaaccaggggctagttttcatcatctccctttctcttagtgctgagacaaagctgaacactgttccttcgcacatcgcccccaaagacctcctgggtcagaggggactgaggggaccccacctgtgaggacatcatgggcagggaaaaggagagagactgaggtggcctgaatgtaaaccccagttcctctggaatactcttttccctaagaaaaataaatttgaatttggtattctacaaaaatrttacagctgtatttgcacgtggatacaaagtattcctttaagtccttggatcatgtccactccgtgacactgccacccagcgcagcgccttggtgtgggagctcggtcccctcttgggcaccacgggacacagggctgctgtgtgggtggagcaggaggtcaggatcagtgcagga

SEQ ID NO: 295929 - DNA, 538 bp, Homo sapiens
ggtcacccagggtcccggctccacccgggtgggcgctgcaggctctgagccgtggctcagtccgagggtcactcacccacctcaggggaactggacgagccccaggtgacaggaagctctgtgcacacctggtgcctggccaacctgtaacatttgaacatttcaatatccatttctatttttttaaaacaagcatcaccttctstcagccattaatatagaatcactatggagcgatgactacataacatttccacgacttttggaaagttcccatgagtttggaaagagccacccaaggaatctcctctcccgagtttgcagcccgcgccttctgccgggcgtttggcgcatttcttccagagaatacggatccgaattattccagaggagcctcggccgcagtctctccagccgccgccagagggaaacctgatcccatgcaggattcctaggggctcccagagaagccctaggctgtgctgctgcctgctggttctgggaatgggtgagccttgggagagcaaagagaatagaa

SEQ ID NO: 295930 - DNA, 552 bp, Homo sapiens
tccatgtaggtcatgggttctcctgcaggtaggcttctggaggtctgtggcaggagtggaccacttgatgcccatttaacttgccccttccccaggagctgcttggggccaggaactagtcctcgtgcttggcaaccccatgcaaggttcgcggtttccttcccattcagcccagaggctgtrtcctccctctgtccgctctcaatgccttcctcccaaagatctgctcagagtgtggcagtcttcttgatggtctggtctctccatagaataagctcttcctggctgcacctagtcagccatcttgactcttcccaccatttttcttatttctatttaaatatttatatgattcttgtaaatgagaaaaataaagcataaaattttaagaatgcatccccagaatctctggcatcctttgctgatctgtcaagcatttatcatccgtgaagtttttaagctaagtatattttcagccagtatcacctgctgaaaaaattgtacctcctttatttgtccttaaaaaaaaaaccacactgctactttcagacc

SEQ ID NO: 295931 - DNA, 547 bp, Homo sapiens
tatcttaaattccaactgaactgagcatcctggattgtatctgctcaatgtaggggcagaggtcccagcccccagcaccagcagctgaaggtgtattctcattcatttgatcaagcgttaggagccgtggtgtgtggcagggcagggagactggatctctgctcagcaggcccaggctgaggggcaggtgagatggaggcccagggaccctctgcaacctacagccccagctgttactcttgcatggtggagttccagccctgctgggcagatgtgtttctttccatttttctktgaggactgcagccctgggtttacttggggaaagaggcctccgtgcgggaccgggggtggggattctaaacaatggggagagtagagagcgccctctccccagcaggctgttcgaaggccccatgcaaggcgcttggaccctcccctctaaatgccagcgccttccaatgcagcagccgctggtggtcgctgtggaggacagggccgggcctaccgggaggccattgatcaatggggccgctcccgttccatc

SEQ ID NO: 295932 - DNA, 612 bp, Homo sapiens
atttctcctcccctgcactcaatctgtctgttttccctgtgaggctagagtgagctaatgggagaatctctcatcaytccaggctacagaaagtaccagctatcttcttgacaccctgatccttgtttatttctccccagttcagtgtacttatttatttgcaacatctgacatatttctaaaggtaataaagcagcagcaaaaaatatccttttaaaaaggaaggacttctcctgtccctgcagtgccaggtcataatctaacttggctttaatgaacaagatcaggggttagcaaactacagcccatgggccaaatccaatctgaacctgtttttaaataaagttttattgcaacacagccacatccacttatttaacatatcatctatggctattttgatgatatacagtggagttgaatacttgtgacatttccactagttatatgcagaacaagcagagtatgaatgtttcagagatatgcgtgtatagcgacaaaatgggactcaaaataattatactggccatatatccttcccacctactatgctgccccacattcctacaagaactggttaaagggataatcactccacaaatgtgcacagac

SEQ ID NO: 295933 - DNA, 546 bp, Homo sapiens
cagtcctttcactttctttttgatatggtctctgttgcctaggttggagtgcagtggtgcgatcatagattactgcagtcttgaactcctggctgggctcacrcggtcttcccacctcagcctccagagtgggactacaggtgtgtgccactatgcctggctaaattttcgggttttgtgtgtggggtggggaagattggggtattgctatgttgctcaggctgggtctcgaactcctgacctaaagcaatcctccagcctcagcctcctaaagtgctaggttacaagtatgagccaccacactcagccccactcaatttctaaacgagctcactgaaatagagcagtcacaaacaaacccagactgtgaacatgagaataaatacctaattcttcaatgtgtagacagggatgcacatctgcaaagaataagaatagcctaagaaagacagcctcaacaaatgaacaaaaaatcgtgccagtgactaatcctaaagacatgcaggtgaatgatctggtagacaaagaattcaaaatagctatttt

SEQ ID NO: 295934 - DNA, 560 bp, Homo sapiens
ctgtctaaaactatatacttttcaaagcagagtaatttttaaaatatggataattatgttcatttcaatcaataaatggggtacagtttagagactaatgaaggactgagattgtttgaggtgatttcatatttcagatgaagctaggtatasaaaagtgggagtgtatgcttaatgttaattttcctccccaaaattaatttatagagtaatgtttcttaaattgaagtgcacatgtatcagcctttttatttcagatgttttaaatatttgggccaaaggtaccaaatctctagaggaggggcctcaaaatatatgttgttgacaggatctaagcaaatcataagcagttatgtataaaaagaaaattcaggctacagcaaggactcaaaagcagggttcagggagtttttttaaaagaagtttggattttttccagctacctgaaaattttctttggtccttaaatcatgctctatgaagacctattctatttaattcagttttatactttatttactgaatcccatcagtcaggagaaaactcaaaatacaataga

SEQ ID NO: 295935 - DNA, 597 bp, Homo sapiens
tttaaaagaattccccttcattttactctgagcatacatagaaaatattgttttaattaaaatgcttcctttgctaactctgcattttcaaccctataaatattgaaacaactctactcatcttagcctagatttcaaaataacttatcagagcccatatctgtactatggtattaaattaaatctgtagcacatgtcaataatatgccagattacctcaatctctaaaaacagtgataaactatttcttcttgctaggatatagataatctaaatctcttggctacatttaactgatagattcatttttggcaaatgtgttgacattytgagatacagggagactaatcccaacatctgcactgtccctgaaatagcagaattactgctctgtgttgggggaaaatccataaacatggatttttaaggtttttttttttcctaggaaaaatggaaaatcgagggaagtagtaagaggtagacaagagctccttttccccttatacacaagtttcgattgctgcatctaaagataattttctcggaaaagtttgtagatcacaatagggaagtcagtttatcgtctactaaaagtgc

SEQ ID NO: 295936 - DNA, 584 bp, Homo sapiens
tgggcaacataatagtacctccctcataattttgttgtgaatattaaatgagatagtacctataaaattattagaatttgcctggagcttagtatcttcttaattatcatyagagggtagtttttctccaacagtgctagattttggaaattcttcaatgggctatgtaaatcctgaacaatacatacaaattcccattggcttaatacatgaaatctgaaagttgagcatattatcatttgtcatgtatcatgagaaacaccatccccaatgcagtctacagattatatgttttcactcttcccatagagatagagtggcttagcttattctcgagagatgaataccttctttcctattccttcacaggttagccttatggaggccaatagaaatgcttgagtttcccctgttgccaagttgacataaccagagactttgccaagactacatgtcagagacccttctgtccatgtatctgtaggaagtctctgacctaacacagcactccttttcatcaaaagagatatatctcactctatttgcaagccaaaaccaaggaaagattgtgaaggatgaaggag

SEQ ID NO: 295937 - DNA, 643 bp, Homo sapiens
aatcaaccattttttttccactttgcaactagtttaggcaagcttaaaaaggtttagctattatttttatattattatttagttattgtttcaaaatagagggaagacataggtgatttaatatcctttcgaattttgaaaataattttkggacgcagcgtatggtcaggtaagttataatttgatcatcttgtgagtaatggacaatgactgcacctattataaacatctgtgaatgtgaaaggggagttctgaaggactgaagcctagaggacttctttactttttgtaaggaatcactccagtttttctgttctttggtgaggatgatcaagtttgcctatcaaattatttttggaaaggagctccagaattttgtttgaggattgttggatcagtagcttatagttctatatgtgtatattttgaatcaaaactaaatgccagttaaaagagcctcctggaggaaagtgagttaagggcatactggatctccccgtgtttcttacaagtttatgactctacaattaccttaacattaaaagctataaaaaaaggtttttttttttttaactcaaagaaacacctgaaaattatattattaatgaaaggacacatgaattatatttcccattcatgtaaa

SEQ ID NO: 295938 - DNA, 454 bp, Homo sapiens
taatagtataagatacaactgaatttttgacccgttatttctgaggatgaactgcaagtggtattgtagattatatttagcttagatacccctttgtttctttctgctttacctgaaatgggagcacaatattcaaagactcaatcaaccattttttttccactttgcaactagtttaggcaagcttaaaaaggtttagctattatttttatattattatttagttattgtttcaaaatagagggaagacataggtgatttaatatcctttcgaattttgaaaataattttgggacgcagcgtatggtcaggyaagttataatttgatcatcttgtgagtaatggacaatgactgcacctattataaacatctgtgaatgtgaaaggggagttctgaaggactgaagcctagaggacttctttactttttgtaaggaatcactccagtttttct

SEQ ID NO: 295939 - DNA, 516 bp, Homo sapiens
gatagaaactctacccttattcccaactaccagcaatccagcaaacaaacaaaaaaacaacaactactggaaacacttacatgtttgagtcatttgctgtgacccaagataactgacttttgatcccattttgcaatgggataaattgcgggaaatggtacaagacagaaaagttaagaaaagaagcctgaacgattacgttagaaaagtcctgcacaattcatttgaatggtaacaaagccatgagcaaggcagagagtaattcttcccgataggtaaacatttctgtatcagaaaacatatttctatataaagttttatgtagcaatttattggtttttctttcccctcatttcctttagtagataactcaacccttcaaaaattctgaaaagttmgaaatcctggctttttgccagagcatcatggccacatcccacttttgtctctattcttatctaatgcatttcatattttaaggaaaatcccaagggaatctttgtgtggtttgtgtct

SEQ ID NO: 295940 - DNA, 570 bp, Homo sapiens
tggtaaagggagcagttgagagagtgataggaggtgactttgtgtccatatggatttgagaaagagaccttttgcagatgcagacgaaaggaaatgagaatggtatataggtgcttaggaagtagagactacaaaactgctgaataggcaaaccaaaatcagggaaaattttcaagcaaacttacagaaaatagcaaatgcagatttattaagtgaaatataataatgagtttgtaaggcataaagaatctgtagaagcccartgtttccaaatcttgccagactatgcaagacagacttctctctcctccctggctcagctcctaaacagagctattatctgcagagataattccagatgctctgaccccttccaaattcttatttgatgatcagtcatctggagtggaactcttactccccattgaggtttcagagtgatgcaccaaactttgctctcctaattaacactgtgggtcatccccatgcacccagtagttcttagagactggactgtcaggctctcatatctatgacattgcctctagggaggagaaggatgggtggacc

SEQ ID NO: 295941 - DNA, 604 bp, Homo sapiens
aaaatgtttactattccttttaagtatacagagtaccttttaacaaagacatttctgggaactttggtttgaattctttattgggtcaatgagataacaaggatgacattcattcagaaaagttagaagttgaagttaggaaaattagagaatttacctatgctttctgcagcagcaggcctctttaaaagatccaaattttgaaatatcattaggacagaatatttggtcgataaagtagtcaggccattaatattctttcacaattattcacttggtgattgtgttgctacaggtgacttgcttctttttagtgrtagtgttaatgattgtcatcatgccttgcaaatattaattacatccttgcaggcatcatataaagagacattaagatttcagctcccatgctttaaagtcttgcaattaaatttagaaaacaagacagctagtattctgataagtacctataaaaattcctaattgttgatgcaaaagaaatgacatataaaattaatacagaggtaggtatgagaagccatgaggtagacaagaggtattctttgaaggaagcctgtagtctagagaagtggctgcagggaattca

SEQ ID NO: 295942 - DNA, 519 bp, Homo sapiens
taattatctaatttccatttttctcttggcttctaaagtagatgtatcaattttagatacaatgtactgactttttatgttgtcatgagtagagcatgtaccaytaaaactgatgtgcggaggtaatatgcaccacatggtttcttactgtctacatgtctggctttaatcacagattcttcatgaaatgttgcaagcctggggtgagctagctgttagattcttctggggtacagcctgggctgtggattattggtgaaactgcattacgaggctactggggttaattatgtctgaaagttttcagtacaatccacatcagttgacactctgtgcatactacataaacagtctggagggagacctttattagcagagcaagaaagcagctagctgtctgtgttctataatgtcctttgttttttagagcttctgactcatgtagcccttctgttttatttaatgtattcttaatcaaatatgtgcttattaagccaaataatgaagagtcaagaggtt

SEQ ID NO: 295943 - DNA, 519 bp, Homo sapiens
taattatctaatttccatttttctcttggcttctaaagtagatgtatcaattttagatacaatgtactgactttttatgttgtcatgagtagagcatgtaccattaaaactgatgtgcggagrtaatatgcaccacatggtttcttactgtctacatgtctggctttaatcacagattcttcatgaaatgttgcaagcctggggtgagctagctgttagattcttctggggtacagcctgggctgtggattattggtgaaactgcattacgaggctactggggttaattatgtctgaaagttttcagtacaatccacatcagttgacactctgtgcatactacataaacagtctggagggagacctttattagcagagcaagaaagcagctagctgtctgtgttctataatgtcctttgttttttagagcttctgactcatgtagcccttctgttttatttaatgtattcttaatcaaatatgtgcttattaagccaaataatgaagagtcaagaggtt

SEQ ID NO: 295944 - DNA, 583 bp, Homo sapiens
tggggaacttcatatgctacttaatggaagtagaatttagtaaaaaccagttggagaaattttgacaatagatagcaatgttgaatatttcatgtcctttaaaattcacaaatttcagttctaagtatatgcttttgaaaaactcttgcatatgtattttaagagatgtatgcatgaatatttattgtaacaatgtttgtctaaaggtgaacacctggaatcaacctaaatgttcattcatcgaaaaatgagtaaattaattgaagtatagtcataatgkgaaatactctacagtagttctgcttttcatttcttttatattccagtttcatcatacttttcacaaagtactgtaaccattaagcaccaaaaatgatgtactaggtgatgagagaaaatcaattttgagtagcgaaggcttgagcagtaagaatgcaaagcactagaacaagaaaaacctgagtcaggcgtgatctcatagaactgggaaaaggggttgtcccaattcaatgtatgaataagaagagtcctgcaatggaactatgaagtgaggcttatattagtgtaggagaatcagaagaaa

SEQ ID NO: 295945 - DNA, 534 bp, Homo sapiens
acaatattcttatattgaataaaggcgtggagtctttctgccttgagaaacatagtcagaaaatagccctgggacaccgatattagaaaaggaacagacacaaactccattgcatttggctgccagtaaagagctcattttgtttacattattactctccaaagaagacaagatgaaattgtcattatccaaatgttgtctagtgttttccaactaagttcctgagctaaagtaagagattgccaaaaaccatgtttacaacactgaatgcattgtgtaataaagtgttaggtagatcagctaataaaattacttattttagacttagataagttgaatttaggtttaattcactacccaatggggacaaagtgagttgrttttctgataaactgaaacatacccaactttttgttgataacagagtgtaagagcctttagatattacccacgggaaccactccctttcagtgggaaaagcctgccattctcaactgaattgctaatggtcatctatttaattgattttgattc

SEQ ID NO: 295946 - DNA, 553 bp, Homo sapiens
tatgtcagcagctgagtaggagtcaggtggagttcccgaaatgcacagtggatattttgttcctaaaatgtaagagctaggcttgtaccctggccctggtaagggtcatgctacctctgtattggtgtccccttttagaggtatgaagggccaggcatgagttccctctgtggcagcttttgcattgtgtacaagcaactctttgactaaaccattgaaatctactgtcagagcacaagatttcartcaaagaattgcatcgaaagtccctcaaatcctcaccctgctaacggtgtaagtggcatggcgttatctttatcagtcccaatgttgtgcccagtgctgaatgatggtcacccatgcagtgcatccccaaatgtgctcctctttcatggactatgcttctaattaatttttggccctacttagtctgagatggaatcactgataatggcataactgattgattctataaatatttattagtttcttttactactgagttagtagtattaaaattagtagtagtagtattagtagtattagaatttca

SEQ ID NO: 295947 - DNA, 626 bp, Homo sapiens
ataatctctttgctaaacctagatactgattttttttttcatgaaatgaatgatggatagaataaaacatttttatttaaaaaaatttkatacatcattttaaattggatacatttctttaaaataatacacagcaataatatataaaacttaaggacatatatgtatattatatatatacacacacctatgtgttgtatgtatgtatatgttatgcatacatatgtttatacatgtaaacattacttttttattgctaatagtattgcatgcccattgttagaaatatgtagataaagaggtattaaaatagctactcataattctactacctagaagtacctgttgttctattttggtgaatttctttttatttttttccctgtatctatgattatataattacacattaaatggataatctgaggagacatcatactgtatacagtacattttatcctgggtttaggcttttctcatggatactttttcatatcattaaaatattcatatgtattagtttaagattcttatattctgacttctagttatatcttagtttacttaaccatttatgtatataatagataatatacatttattatatatatttagaagagatacat

SEQ ID NO: 295948 - DNA, 1696 bp, Homo sapiens
ataatctctttgctaaacctagatactgattttttttttcatgaaatgaatgatggatagaataaaacatttttatttaaaaaaatttgatacatcattttaaattggatacatttctttaaaataatacacagcaataatatataaaacttaagracatatatgtatattatatatatacacacacctatgtgttgtatgtatgtatatgttatgcatacatatgtttatacatgtaaacattacttttttattgctaatagtattgcatgcccattgttagaaatatgtagataaagaggtattaaaatagctactcataattctactacctagaagtacctgttgttctattttggtgaatttctttttatttttttccctgtatctatgattatataattacacattaaatggataatctgaggagacatcatactgtatacagtacattttatcctgggtttaggcttttctcatggatactttttcatatcattaaaatattcatatgtattagtttaagattcttatattctgacttctagttatatcttagtttacttaaccatttatgtatataatagataatatacatttattatatatatttagaagagatacatwctatgagaaatttgctcaaagtagaaagtgggagaggggcagagaatgtaaccaaagtatcctagaaaataaacacaactttaatttaatcttaaattatttaagctggacagatctatagtctctttttagctgcaaatgttaagcaaagtcwgctgtgttcataaatttcttgaacgagttttggaaggaaacattaaagaagagaaaccctggttcaccatgcaactagtgcagagcataaggaagaagagtcatagaaaatgaaatcagaattgtagtggacacataagattgagcatttagggtaagccagaatttagaatcagaggtgatgaggggaaacataagtcaccacttcccagaattctccccatgtagagctgccagataaaaattaaatatggatttctattaaatggcttccaattaaatatggacttcagataaataacagattctttttataaatatgtccaaaatattgcatgtaatataaatacacttaaaataaaaagccattcgttatatatcttaaattcaaatttaattgggaawtaatagtcttgtaaacagaaaatataaaacctagctgaagtattatattcttggttaaattctatttgttcagttttattttactgatttttttcctcaaggtatcttcaaatcaagtcttcccattttctcattctatattcattattttccagcagtatattgtttgttttggaatttgaagactatttttaaggtcaagatattttgcagactcccacatggggtcattatacctacattatgatgaaaagctagtgtggatgctttaaaataaattttatwattttgtcactaaaaatatccaaatatatttgaaaatagtgtatatacataatatatgctgatttaagttacagacaatctctaatgtgactctcgattgtaataactaaagttttttaggcacccaaggccacagatgggtggtccctatcaacatgaaaagaagggagctaacaagtaattgtatatactgcttattgccttgaatcagggaaactacaaggaa

SEQ ID NO: 295949 - DNA, 545 bp, Homo sapiens
ttctccttaactgtccaaagtggtagatgtgtgcraaatggaaaatttcatggccactttggcttagtagtggcaagtggtcactgggacaaagatgaggctactttctaaagttcttcactcccagcctctcataaatcttgattatcttgatttcttaccgttttcctgtcctattaactaaccaaatagtggagaaagaaagttcaactcaagagaaatgagcaaagttctaccttaatttaaagcaatgtataagaatgatgcaagagatggacattgataggaacatgaaaagaatgggggcatatagcctgaagtgccagtcctttgtctgagataataaggactctgaaagaagggaagaatttaaccaaaagtgggaaggtgaggagctgaacagcacagaacagaaagcatgacattaaagataggggtcaaatggccagaggaaaccttgaagataagaagacatcattcaaagaattgcaaagtggaaaaagaagtggaaatttctcagtatgggcctcataggttactgtttc

SEQ ID NO: 295950 - DNA, 571 bp, Homo sapiens
tataaataaaagatctgtgtaatactttaaattgtccaaacattttttcatttattatgataggtaaaggtgagtctgactcttaaaaagtgaggaaagtgaggcttggagatattctatgactctcccaagatcatacagctatttagtggcaggatgaggaatgggccttaatggtttttcaaatgtgcctgaggaaccccattattttttttgagagtccccctctgcgctctgtcatcacccaggctggagtgcagtgcctccttctcggctcactgcaactgccacctcctaggttcaagcaattcttctgccttagcctcccgagtagctgggactacaagtgcccaccaccacacctggctaattttttttttttttgtattttagtagagacagggtttcactctgttgcccaagctggtctccaactcctgagctcaggcaatccgcccacctcgtcctctcaaagtgctaggattacagkcgtgagccacagcgtccagccccaactcagttttaagaggacattctacagctttcgttagtatagtattttgtacttacg

SEQ ID NO: 295951 - DNA, 577 bp, Homo sapiens
agcagttataaaaagcacagctctccaaaaacattaatgaaatactgatgaaaatttggttttaaaatatgatgaaaaacatgcaagttcattaatatacaatgataaagataaaacaattctaccttattcatctacaaatttgtgattcaaatggtacatattttatgttatcttatttcagttttcttcccttttactttctagttggtcaaacatttgaatccatagaattgtcctatttgttagacctctgttgaagttattactgttattaatatttaccaattatattctgatattttaaatattcaataatatgaatgtttatatgagttactaaaatgggtatgcctaggtaaagtagcatattctataacatttgtttacagattgtctttcattttcaatatgtactttcccaatctgtatagtcaataaagtggaaagcrgtatattaaagctagacaggcaactctaatcatggcttgactcctgtatgaattggtacaaaggatgtgttttccataattagcttccatgtgctaaaaaataatttaacctaaataaatagaat

SEQ ID NO: 295952 - DNA, 1153 bp, Homo sapiens
aatcaaatacaatattatatctttttaaaatcctaacattagtaggggaaaatgttcaagtgagaatgattaagggagacaaagaaagggaaaagttcttctgtgatacagggatttatcttatgcttactcatgatttyctcccaacattcatgatcaatttccactgagcctttcctgggcttgtttatgcaagtatctttatttgtcagctgactaaacaatgtcaggcaccagctttcgctaggcattaccatatcaggtggtaactactctgcaatagtatcatttttttagagctagtgaaaagagcatttggctgatattgaaaaaaacatgagtttgaatttcagctggcttaaccaccagttgtgttaagctaggtaattcattcaaccattaggacatttattgtgtccaatccaaattactgacattctttaatatgacctctaaagacatttccattggtaagcttctaacgttgtgcacatgtgccctagaacttaaagtataataaaaaaaaaatttccctgtgggaagtaaccatattcccctawaggtcatttcttctcaccattaagaaaagatgcatgaatgcctcttggtgagtgatcattgttatgagtgattattgttatgttatgagccacatattcctacctgtaagcctagtttgaaaaccaaatttcatttataactgatgattagaaaaagactattcagatttatatgttcctgtcttgctgttatttatcactctttcatgatgaagttaaattttgagtctggaagtacttggaaaagattaaattaaatcaaatacaatattatatctttttaaaatcctaacattagtaggggaaaatgttcaagtgagaatgattaagggagacaaagaaagggaaaagttcttctgtgatacagggatttatcttatgcttactcatgattttctcccaacattcatgatcaatttccactgagcctttcctgggcttgtttatgcawgtatctttatttgtcagctgactaaacaatgtcaggcaccagctttcgctaggcattaccatatcaggtggtaactactctgcaatagtatcatttttttagagctagtgaaaagagcatttggctgatattgaaaaaaaca

SEQ ID NO: 295953 - DNA, 534 bp, Homo sapiens
cagctggcttaaccaccagttgtgttaagctaggtaattcattcaaccattaggacatttattgtgtccaatccaaattactgacattctttaatatgacctctaaagacatttccattggtaagcttctaacgttgtgcacatgtgccctagaacttaaagtataataaaaaaaaaatttccctgtgggaagtaaccatattcccctatgtagttgggataagaaggtggcttacatttctttttttaagtgacctgggagagcctttatgttggttttggatttcaagatttctttgtagacaatgcctgagactattccagaaacaaacttagaatattctatgaaagaatgagaagaagcagtattttaaaatggattcttactctggagtacagagatgatatggcaaaacaggaacggatacaaggcctaaggttgtggacataaggatagggcastatatcctcattcaaaataaaaaaatggggcataacaaagtttcaagacaagtaactgatgcttgcctggaa

SEQ ID NO: 295954 - DNA, 549 bp, Homo sapiens
gcttaccaaaactgtgactgaaacaagtgcacagtgcaggaaagaagcatgggtggaagtggtaaatacaataatggatgggccatacatggactaaattaagtgctagattctgacttaaagcctgacaccagatgcagcacagatagggttttgatatgagtctgtaagcaactgatttatgatggtctctgtgcagtcaaatctgtctgctaacgttcatctatatttgcatctgctcctcagtgctagcatcaccacctcagcttcacctcagatcatcaggcattagattstcataagaagcatgcaacccagtccctcacatatgcagttcacaatagtgttcgagctcctatgagaatctaatgctgctgctgatctgatgggaggcagagatcaggcagtaacgactgatgggcagtagctgtggagtggctgcaaatacagatggagcttcactcactcaccaccggccacttcctgctgtgcagcctggttcctaccaggccatggaccagtaccagtccatggcccagtggttggagg

SEQ ID NO: 295955 - DNA, 536 bp, Homo sapiens
gagggagagttaatttgatccagtgagcttggaaagacttcttggagcaattgggattcgaatagtcaagtacattattgatacttacagaattgctgagaagcaatgaacatttttagtgcttgataaacaactctcctgaaccgtacttcattggctttcaaatccttcaacacattttaaaaccatttctgactctttttctgccaacattactaccattgtaatactaccaayaatgcttagaatacttctaatattttatttttgagatatttcccttcatggtctttctatacaacaattctgctacttccatttgatatttttaagctctataatcaccagatatgtgatattgaagttataaatgtaaatgagaaatggttcattcctcaatgacctcataatgcagcatgcttaaaatataattgccatactgaacaataaatgctttatgtagtaagaaggggaagccagatattattagagacctactgtgtttcaagcttagaagcaagcaatatgctactgct

SEQ ID NO: 295956 - DNA, 585 bp, Homo sapiens
acattaaaggacagtttgagatttttgtgtttatcaaagaggaatgatagattagaaagtctgtgaaacattaggtggtgattaaagaattatggtgcttaaacctgggtagatgttaatggttcaataacatttttaagaaataagataattaagagagaagatttggcaaatgtgactgtatttacaaaagatccttgtagcttttggctacrtaacacaagcattcctttgttttattcattgtttgttccagatggatttactaaattgttcagagaaggggacccttattatttacctgtcttatagttgcatacagtaggaacataggaaaggaaccaatttagtaatgcatttggactcaaaagttaattctgcaattatactgggaaaaggaaggctaaaaaagacagaagctaggactgtaaatgattgtgggaccctgggtataaacttccatggataggatacaaagtcactgggatcaaacacatgcattggcagggcgtaagagttaagagagcatctgatttctaagatgaagactagtaatataaatagtcttctaatgttctaatctga

SEQ ID NO: 295957 - DNA, 433 bp, Homo sapiens
tgacttatgattccaggtgtgaaagaccaattcctaactataagttctgtggtcttaagttacgtgccctatattagtttcctaggatttccataacaaagtgtcacagactggatggattgaacaacagaaatttattacctcacagttttgagggctagaagtctgaaatcaaagtgttggcacagttggttcttcctgagggagaatctgtgccacacctctctcccagtttctggtggtttactggcaagctttggtgttcctgggcttgaagactcaccctaatctctgccttcatgttcacctggtgttcttgctacagactgaatgtttgtctccccaaaatttctatgttgaaaccgaatccccaatgccatggtagtaagaggtggaggrggccttcggaggtgattaggtgatgagaggagag

SEQ ID NO: 295958 - DNA, 645 bp, Homo sapiens
acttgttttgaagctaaaatacattacaagtttataatgatacatccaattcaaatacaagataatagttttttgcttaatctttttgatattatatctcctttttcccatcccaaaaactctagatttcataaacattagcataactcctttgttttattctatgccatgtacatgacgatcttagaaaaatactgtggtagattactgttatctattgccccagtttttcaccagtactcacatctacacaccttgctttgtaaacttgtagtgttttttcattcttattctggctctgcccagtggcttgccatggcccataggatttcagcaaccatgaaacaagaagaggatttaaaaaaacaaaacaaaacaaaacaaaaaaamcttgcctgtttctacttgctcttttccacttctacagttaccacaggaacatgcttgggctactttgctggagctacctggggccaaaagacattaaagatataaaaatacaaccatactggccctgctgtgtctcttagccaaataactctagattagctgatagccaactaactcctaggttgagcccaccaagatgagcagatctatgtagccaacctaaaactgactacatactcattagcaagaccagac

SEQ ID NO: 295959 - DNA, 548 bp, Homo sapiens
cctttatgaaaattttataacttgagggtgaggtggaggtgccccgcttggagctcaaaaaccaagaaaagccacattagaagagtaagagaaatagtttgattttaactacatcaggtctcccccgggtgcacagcaccacaccaaggagaatctcttgttttttctcctacaaaacagtggggaaatttgcaggaatacactacctgaagtcaggtagaaacaaagaaagggaacagggctcacagckaccagcatgtgtatcttgatggtggtaccacatctatgccaggggccttaccccattagaaagccaatccgaggccccactcatatgtggagccaagttggtgatcccatcttgccaaggagcacagtcagctgttctccatggttgaggctcccagctagcagtctagtccagctgtgcaacttaagttttccatgtgagatattctttgaggccttgcgtatcagcaaaactgctgatgccaggtagctttgaaggatccttcaaggagctgactcaccaaaaaatgcagtttcca

SEQ ID NO: 295960 - DNA, 513 bp, Homo sapiens
tttctcacttgtcttcggtctttcttatagttttcagttttcttttgcaatttttcattttggcatctttttatcttcatcattttaatcaacagttctgttaaagtctgtgtcatgtaattccaatatctgggcctctcaagtgtctaactcaaactttcgtttttagaaaaaaaaaattatgtcattcattctgcagatatttggtgaatacctagtgtggactttttaaagtgtttggagcacatactgtgaaaaaaacgttctacctttcygcagcctatattctggttactaaattactctcttaatagactataatggattggatttatcagcattttgtttagaatatttgcatcaaaattaaatatgaactgttcttgactaatatttgctttaatattgtctattacacttaacaaatcttttttctggtatgtatcttagtccattttgtattgctgtaaaggaatacctgaaactggataacataacaaaaaatggtttatt

SEQ ID NO: 295961 - DNA, 534 bp, Homo sapiens
cttctcccactctgggctgcatttttattttttctatcttttgataaagatgagttcttaattttagttgggtatggttaatataatttgkgtcctgtttaagaaatcttggcctcttcttaagtcatgaagaaaaacttcttatggcattttctaaaactttttgctttaattttcaagtatagatgtatacactaagataaattttgcttccacttaagatagtcataaatactcattataaataactagcaccatttattgaaattattcttcttctaccaaccttgtcacgaatcaagtgtccatatacatgtggatcaatttctgaactctctcttctgttctgttcatgcatttgaaaatccttacacctgtgtcacactaccttaattagaaatagttaatagttattatattgaatttgtaacctgtttctaaatcaatgcttttgtttgatttctccatgtccataattgttttactttatactgtaagaacactaaggaatattgaataaaattggagatagca

SEQ ID NO: 295962 - DNA, 634 bp, Homo sapiens
gttcctttatagttctggttatcaacttattactaattactacagttgagcctgtatttctttattaatatatgcatgttaaacaatgttttctcatcaatatcttttattttctttttcaactttcattcagaatcaagaggcctgtgcaggtttgttacaaaggtatattgcatgatgctgaggtttggggtatgactgaagtcatcactcaggtaggagcatagtacccaataggtagtttttcattccttgcccccagccttgtctcctctaatagtccccagtgtctatgttttccatctttatgttcatgtgtattcagtgtttagttcccccttgtgagaacatgtgatacttgtttttccatatctgcattagtttgcttaggataattgtctccagctgcatctatgttgctgcaaaagagatgattttgttttttctctttggctgcgtagtattccatggtgtatatctagtacattttctttatcyagtcaactactgatgggtatttaagttggttccatgtctttgctattgtgaatagtgggtcaataaacataagcattcatgtgtgtttatgatagaacaatttatattcctttgggtatatacctagtaatgggat

SEQ ID NO: 295963 - DNA, 555 bp, Homo sapiens
aacactataaataaaccaagatggaatctaaaaaatgtaaaatataaccaataagaaaatggtaatagattaatgaaaaactgagaaaacaaaacaaataaaatagcagcctaacatagcaatatttatcttaaatgtaaataatcaaagtacatgaatttaaatgcaaattgacagagtggaaagaacaagaaacatgatgctaaaatttgttatttatagaaaactcataaggtggttaacaacataggttgataaagaatagaaaaagatacaacatacaaacrttaatcaaatcaaagtaagagtggccccattgatatcacataaagacaactttagagcaaagaaaattagtggacaaaaagatcactatataatgataaaaacatcaatccaacaaaaattaagttatcctaaatatgtccccatcaaacaaaagaacactaaagtacacaaactaaaactgactgagctgaaaggagaaatatgcacatttttaattataaaataacaaagttgtaagtctgaccacctcactctcagcaactagta

SEQ ID NO: 295964 - DNA, 555 bp, Homo sapiens
aacactataaataaaccaagatggaatctaaaaaatgtaaaatataaccaataagaaaatggtaatagattaatgaaaaactgagaaaacaaaacaaataaaatagcagcctaacatagcaatatttatcttaaatgtaaataatcaaagtacatgaatttaaatgcaaattgacagagtggaaagaacaagaaacatgatgctaaaatttgttatttatagaaaactcataaggtggttaacaacataggttgataaagaatagaaaaagatacaacatacaaacgttaatcaaatcaaagtaagagtggccccattgatatcacataaagacaactttagagcaaagaaaattagtggacaaaaagatcactatataatgataaaaacatcaatccaacaaaaattaagttatcctaaatatgtccccatcaaacaaaagaacactaaagtacacaaactaaaactgactgagctgaaaggagaaatatgcacatttttaattataaaatamcaaagttgtaagtctgaccacctcactctcagcaactagta

SEQ ID NO: 295965 - DNA, 602 bp, Homo sapiens
ctgtggtaacttctgatctactttttctctataaatgtgacttttgtaagtatttcatgtcagtagcattatgataatatttgttcttttgtctgtcttattttacttaccatagtggcttcatgtttcgcctatatgtagaaagtgtcaraactttttctttcctgactgaataatatttcattgtattttgtttattttgcatgcattttatttattcattcatctgttcatgtacaacttttggttatcatgaataatgccttagtgaacattagcatattattatatgttcaagtccctattttcaattattttgggtatatacatatgagttaaattgttgtataaagcgtaacttttttttagctttttggtatactgccgaactacttttaatttattttttcttctgttgctcatgcatttcacatcatatctgagaatccatcaccaaatcaaaggtttaccttatgttttcttctaaacatcttattgttttagctcttatatttaggttattaatccattttgagttaatttttgtatgtggtttaaggtagtctatacatttattttttatgtggaaatttagttatttc

SEQ ID NO: 295966 - DNA, 424 bp, Homo sapiens
cttaattgttttctacttggaaggttggcaatgtcaattaccctctagtggtgttgactcaagcctttgtcaattagtcttgactgaataaatgcgagtctcactggctggttggggccatggtcacaactgtttacagcattctcctgggagtctgtaagcggtcyggatgctcagtcgaattggcaaaacagaatatctctgtgttagtgtacttaattcttccattgttgagtcagggtctgcaggcagaccccttcagaggagttacaattcaagataagatttgggtgggtatacaaccaaaccatgtcaccaggaaactgtcctcttttcttgcacttgtcatctgctgtcaaaaaaatatgtaaaataaattgaataaaaaagagaaaaaatagaatgggagaaagtaattggaaat

SEQ ID NO: 295967 - DNA, 1146 bp, Homo sapiens
agttagactaataatatatctatacaaatataactttagaaaagatttaacatagttaaaagtatgaccaataccacatggatttttataaatttttatcatttttggaaaatttatatcaataacatatccataaatgtaagaagatcaatgttatttatgattcgataatgccttccatacagttttccaaatgtcttactgaagatgccgaaggttcaaaacacttgatcaaaacaaaatcattggtcattttaaaataagttattcatttagctagagtgataatcaaaagacctcaaaagcaatacagaaagtttcaccagtataaaaaccttaacactgttactgcccagttttcacaaccaatcagaaaaaaaaataaagacaacacaggattatcttgataaaatgtaaaatctttayttttaggccagtaatcaaaaaggtaaagaaaaacctcctgtagtgtgattacttctttttgtataatgtttatttagataacttggaagccaaacctgataaaaagggtatgtgcatttaattacacacaagawtttttttgtgacaggatcttcagttatttactattctgctcaatgagcttcaaaatgcaccttcgtagattctacaaaaagagtgtttacaacctgctgagtgaaaataaatatttaaatctttgagctcaatccacatatcatgacactttttatagatagcttctttctagtgwttatcatgtgatatttggttttacagtaaaggcctccatgaactctgaaaagtcctttcatcaatcctacaactaccccagaatagaatgaatgggaatggtcagctttacactgagacattccattcccagggaagaccaggagacagaagacttcctcttatctcaactgcaaagaggcctccctctttcactactcctcctcagcacagacatttacaggtgtcaggctgggggatggtaagttctttcctttcccatgaggccatttctcaggctgtctcagtggggggaaaccttgggaaatacccaggctttcttgggcagaggtccctgcagttttctgcagtgccttttgtaactggttaatcgagaatggagaatggtgatgattttaccaagcatacttc

SEQ ID NO: 295968 - DNA, 557 bp, Homo sapiens
aaagatagcttctttctagtttttaatgcaagatattctgtgtttcagcattggcattaacaacctctgaaatatccctttgtagattttatgaaaaatgtgtctccaacctgctgaatcataagaacaacttaactctgtgagataaatccaaacatcacaaagccatttctcagatagcttctttctcgtttttattgtggggttttcactttttcaatataggcctcaatgggctctgaagtttcccttagtggattccacaaaaatgcaacctgctgaatcaaaaggaggtttaactctgtgagctgaattcaaattgcaaagtggttccacaaaagccttccttctagttttttatcaccagatattcattttttaccttggccccaatgggttccagaatgtcattttgcagatttcacaaaaaragtgtttctaacctgctgaatcaaacgaaaggtttaatgtgttaaatgaatccacacattgcaaagtggtttcacagatagcttctttctagttttcatcataaaatattcaatttttcaccattg

SEQ ID NO: 295969 - DNA, 603 bp, Homo sapiens
gcccatgagacctgtagggaaaaaccaaatatcctgtgataaaaagaagaaacaagcaatctgtgaagatgctttgcaattgttggattaatctcactgacttaaaactttgtcttggttcaactggttggaaacactctttgtaaaatttacaaaaagatatttcacagtccattgaggcctgtcgtgaaaaacccaatattttgtaataaaaactagaatcaagatatctgcgaaaacacttcacaatatgtggattcatctcacagagttaaaccttgcttttgattcagcttgtaggagaaattctttttgtagaacatacaaagggatatttcagatcccattgaggcctattgggaaaggccgaatattctgcaataaaaactggaaacaagctacctgtgaaaatgrtttgtgatgtgtaggttcatcacacagagttaaacctttgttttcattcagccgattagaaacacgttttttgtagaatctatgaagggacatttctgagcccattgaggcctgtagtgaaaaagtgaatatcctgcattattaactagaaacaaggtatgtgtgaaaatgctttgcaatgtctggatt

SEQ ID NO: 295970 - DNA, 582 bp, Homo sapiens
atgcatataattacccattttggattcccaacatccatccagtccaataacgggccctcctttagcagccaaattacccaagacttctctacatccttgggaataaaatgggttctccacacaccctacaggcttcaatcttcaggtaatgttgaaaaagtcaactctgtctttaaagccaaactcaccaagctggctctagaaacccrccaatcatggacaggaaatcttcctttcacccttatgagactctgtgcaacacaaaatgcaccctctatttatagtccctttgaaatcatgtatggccaaacttttgtcttagggcctccacccttaccaaactctgaaccagtcagtaattacctccctgtcttaatccagacatggtctttcattcatgaagcagcaaatgaggccatgcctctccctatagtcatctctttgtcctctatacataactgtcttgcaggcacagacatgtttatctgccaacccgaccctcatgaaaagctacaaccaaagtgggcaggcccctacactttgatactctgcatgcccaatgcagtgagagtccaaggactc

SEQ ID NO: 295971 - DNA, 488 bp, Homo sapiens
aattgtgttatctggtactttttagaatccacaatcttaaagaaagaaagaaaaacaagttccaatgaattaataatggcttgagactcaatgcgctgcagcaattttcactgcagtggttgtttcttttatagtcatacttgattagtattagaaatttggaggaattgcaatatgcgtgattttcaaagccctttacagaatttcatttttctctctcggagagagtcaatgaaaaggtaataagaaaagctctatgggactttyttataggagtgtcagaagccagtaagctaactacatgaaagaacccagattgtgcagacagggtttggagcagaaacacttcagagactttatctagtattttgacttttatatgtccttggagaagaaagcatgctagctacaaaaccaaataaggaggagaaaggagcaaaccgtatgcttaagaataattacagtttcaatttttgtatgaactaaat

SEQ ID NO: 295972 - DNA, 600 bp, Homo sapiens
cattgtagtgtaaccacgcgatggaaactgatgtagcaatgaaaaaggataaactacacaaaaatgcaacagcttggatgttttttgaaaaccagaatcataaaaattagatacagaatagtatttactgtatgaatcatcaaaattagacacaaaatagtatttactatatgattctgtttatataaayattaagaaaaggcaacagtgctttatggtaatagaaagaagtatgatgtttgcatttgatttggttatgactggctggggaggcacaaaagtggtctctggggtgatgagaatgttccatatattaatctgtgttatggttatatcaaaatatacataggttttgattaatgaaggtttgcactatagaattacgcacttcactgcctttgtgtaataaagcaacagaacggtaagcacaagtttgaaaatagtacttatcctggggtaccctggggtaaagtttgaggagagattggggatgagagcctaacggacttaaagtgtattgacaatgttatatttctgattgtatacgtagtacatgttttacacatataaatattttatatatacaaaaataagtggagg

SEQ ID NO: 295973 - DNA, 604 bp, Homo sapiens
catttccaaattaataacttagtagagaaatttctttctattttctgggcctgggtggggacttctacccattaggaattttgttgtatcttttcagtcaatatgtagtatatagcttctaggaaatatgtcaaaccacacccacaacaggagaataggtcctgtatgattgtttcayctgagtgaatatgctgttgcttgttcatagtcaattgaattaaggataaacattataacaggaggagaaaactcacaggttttttcagccagaaagagtaaccttccttatagacttgtgtaatatactacaattttaatatggcctctgaaacaatggatattaacgaaagagggcatattctcctattgtccttacattcttcctaaaagacagcaaacctggccttgacctcacagctgtatggaccaacattcttatcttgtccataatgtagttcaaagattatatgcactaatgttataaaagtctggtgagtcaggtggtgtactctattttccatatcaagattaaaagttttaaaaacctaaacattgttaaaaaatcatctgaacattattttaaaaggttttgcctattcacaat

SEQ ID NO: 295974 - DNA, 604 bp, Homo sapiens
catttccaaattaataacttagtagagaaatttctttctattttctgggcctgggtggggacttctacccattaggaattttgttgtatcttttcagtcaatatgtagtatatagcttctaggaaatatgtcaaaccacacccacaacaggagaataggtcctgtatgattgtttcacctgagtgaatatgctgttgcttgttcatagtcaattgaattaaggataaacattataacaggaggagaaaactcacaggttttttcagccagaaagagtaaccttccttatagacttgtgtaatatactacaattttaatatggcctctgaaacaatggatattaacgaaagagggcatattctcctattgtccttacattcttcctaaaagacagcaaacctggccttgacctcacagctgtatggaccaacattcttatcttgtccataatgtagttcaaagattatatgcactaatgttataaaaktctggtgagtcaggtggtgtactctattttccatatcaagattaaaagttttaaaaacctaaacattgttaaaaaatcatctgaacattattttaaaaggttttgcctattcacaat

SEQ ID NO: 295975 - DNA, 390 bp, Homo sapiens
acatgtacgtgtatgtgtgtgtgggcgcatgtgttatcatatattttgagttgaattgtgcgtgtccaaaatcmtatattgaagccttcacatccagtgcctcagaatgtgactgtatttgggatagatgtaattaaggtaaaaagggtaagatgggcccaatccagtagattggtgcctttataagaaaaggaaatttggacattagacatacacatgcacagaggaaagactatgtaaagacagagagaaagctatctacaatctatggagggcagtctaaaaaaataaaaaataaaaaccaaagcaaaacaaatcacaaaactctgctaacactgtgatctcagactccttgcctccagaactcttagaaaataaatctctgttatt

SEQ ID NO: 295976 - DNA, 1144 bp, Homo sapiens
tggtcttgaactcctgagctcaggtaatctgctcatctcagactcccaaagtgctgggatgacaggcgtgagccaccaagccyggctgtttttgaatttttattatctacctgtagattggactggatcctcaaacttttcttgttcccttcaatatctggcttccactagtgacaagaacagttctgttcttgaagccctataatctggagcccgacaagtcaacatcattttctaggggcaactttgtgccttgagagttcactgaaatgacaaatgccacaaccagagaccttcatactgcaaacaggatgagaagttgacaacttcaagttgtggacagcttttcccaagacataagaataagattcatcatcatgagactcttacccctcttaattattttcctttcctatgtttccctcttttgcttggaagtataatactgtcattaaagtctcacaattagtagcttctgtgggtaacttgagggagtgttgaatctctcatgccaaacccaaatctttacattatgtaagagatcctttagtccacccatgagctcactttagcaacattcctaacataactgctcaaattgcactactgctcccttttatgggatcagwtactcaaatcccacagtctgacctgctaaatctgtgtatacaaaaagctgatcgtccatacatgaagatttcacatcctgtgtataatatattttcagttacctttggatgaaaaaaatcggcatataagtaagtccagtccattcaaacgcatgttgttcaagggttaactgcatatttaacgtgcaaaagtactgtatatacatatacaggttttwaaaaatctttacgcatgtccagtaggtattcttttgcaactcatagagaacgtagaaaaaatatttttgttttatgggagaggcctttgtattgtatttattgcatcatttcatccctccatatgccaaatttcattagtacacttcagttatttgcaattttatttttgcctcctccaggccataaaaatttatagacagtggaaatattataatcttttcctacccttttctagcctcctgactgtattcatgttctcctgtctgaggagctcatgattaagtgaacctgttgat

SEQ ID NO: 295977 - DNA, 1069 bp, Homo sapiens
tactcaaatcccacagtctgacctgctaaatctgtgtatacaaaaagctgatcgtccatacatgaagatttcacatcctgtgtataatatattttcagttacctttggatgaaaaaaatcggcatataagtaagtccagtccattcaaacgcatgttgttcaagggttaactgcatatttaacgtgcaaaagtactgtatatacatatacaggttttaaaaaatctttacgcatgtccagtaggtattcttttgcaactcatagagaacgtagaaaaaatatttttgttttatgggagaggcctttgtattgtatttattgcatcatttcatccctccatatgccaaatttcattagtacacttcagttatttgcaattttatttttgcctcctccagrccataaaaatttatagacagtggaaatattataatcttttcctacccttttctagcctcctgactgtattcatgttctcctgtctgaggagctcatgattaagtgaacctgttgatwttttattgagtgtgattttccaggtaaaattggtwataataggcattttaaaaattacacttctgtgcactttttaatgtttactaattatctctggtcagataagcatttagaaaaaataagatggcatcacaaatttctcgccagtgtcattttaattaatgcctttttattatagtttaaataaatatattacaccagtgagattgtaaaacttgtgtttcatgtataaaactgtttaagagggaaggtggagccaagagggtcgaataggaacagctccagtctagagctcccagagtgagcgacgcagaagatgagtgatttctgcatttccaactgagctttgaagagagtagtggttctcccagcatgcagcagctggagatctgagaacggacagactgcctcctcaagtaggtccctgactcccgagtagcctaactgggaggcaccccccagcaggggcagactgacacctcacacggctgggtactcctctgagacaaaacttccaaaggaaagatcaggcagcaacatttgctgctcacca

SEQ ID NO: 295978 - DNA, 474 bp, Homo sapiens
cttgtaattactaaagtagttaaattatttgatccatgtgtaatatgatatgagatttcatatcatccacttactctctatctagaatgcactttatgagcacacgtcctcttttargcaggcgtcagaatattaacttcgccttagatattctttttcttaaggtcagaagtgatctgataaagaaaacttcaggaaaaatatgtcttccttgctctccatgtaggagttactgacttctctttctctgaagaattcagactaacacagatgtaaagcctgaattttcagccaggctttgtgaatagaccttctggaagggctagagtgaatggctcaagagcttctttccaggtttagtaggctaagaggctgtgtcatttaattgtaggagggaataaagggaaaaagtagaaaagaaaggtaataaaaaagatgaaaagataaacttgaaagggagaaattaatattaat

SEQ ID NO: 295979 - DNA, 474 bp, Homo sapiens
cttgtaattactaaagtagttaaattatttgatccatgtgtaatatgatatgagatttcatatcatccacttactctctatctagaatgcactttatgagcacacgtcctcttttaggcaggcgtcagaatattaacttcgccttagatattctttttcttaaggtcagaagtgatctgataaagaaaacttcaggaaaaatatgtcttccttgctctccatgtargagttactgacttctctttctctgaagaattcagactaacacagatgtaaagcctgaattttcagccaggctttgtgaatagaccttctggaagggctagagtgaatggctcaagagcttctttccaggtttagtaggctaagaggctgtgtcatttaattgtaggagggaataaagggaaaaagtagaaaagaaaggtaataaaaaagatgaaaagataaacttgaaagggagaaattaatattaat

SEQ ID NO: 295980 - DNA, 513 bp, Homo sapiens
cacagatgtaaagcctgaattttcagccaggctttgtgaatagaccttctggaagggctasagtgaatggctcaagagcttctttccaggtttagtaggctaagaggctgtgtcatttaattgtaggagggaataaagggaaaaagtagaaaagaaaggtaataaaaaagatgaaaagataaacttgaaagggagaaattaatattaatagtgttactctgtaggccatagacagcagctctaaaattattagttgtaataggttataaactggaaaatagagtaaacacttaatgaattttaaaagtgatctcatgctccaattagagaaattgacatcagtcttgcataatacaatttgataatgtagttaatcatgagccaaaccttttgaagactaatcaatttaagctacgatcttcatttccaaagataaaagatgacagaatagaaggttaccatacttacgaagattccttggtgaaaattgtaaatacactttattaataaatg

SEQ ID NO: 295981 - DNA, 513 bp, Homo sapiens
cacagatgtaaagcctgaattttcagccaggctttgtgaatagaccttctggaagggctagagtgaatggctcaagagcttctttccaggtttagtaggctaagaggctgtgtcatttaattgtaggagggaataaagggaaaaagtagaaaagaaaggtaataaaaaagatgaaaagataaacttgaaagggagaaattaatattaatagtgttactctgtaggccatagacagcagctctaaaattattagttgtaataggttataaactggaaaatagagtaaacacttaatraattttaaaagtgatctcatgctccaattagagaaattgacatcagtcttgcataatacaatttgataatgtagttaatcatgagccaaaccttttgaagactaatcaatttaagctacgatcttcatttccaaagataaaagatgacagaatagaaggttaccatacttacgaagattccttggtgaaaattgtaaatacactttattaataaatg

SEQ ID NO: 295982 - DNA, 588 bp, Homo sapiens
gaaaatagagtaaacacttaatgaattttaaaagtgatctcatgctccaattagagaaattgacatcagtcttgcataatacaatttgataatgtagttaatcatgagccaaaccttttgaagactaatcaatttaagctacgatcttcatttccaaagataaaagatgacagaatagaaggttaccatacttacraagattccttggtgaaaattgtaaatacactttattaataaatgaaaaagttattttctgaaatactgtagaaatcattcaaatccaaattcaacaactgaagctgacagagagaaatgcacaattaatctcatacttgagatacattgtcttacatgtcactgaaccttgacattccagcatcaatgtttgctccatgttctttctatagtaaaggtgtgcatcctcatctgcttgtacacagacatgcctataatattgacaactttttaattacaaatacctaagtataactaatatgatgttgagaatcgatgtcaaaataaaattacaatacatgtagttgctaatcttatccattccttagattattgtgtataattattttggtt

SEQ ID NO: 295983 - DNA, 1106 bp, Homo sapiens
cttcttctgtagataatgttggctgtcaaggttgtaattctataccttctgtcaattattctttgcctcctgtgctcctaggtcaattgtcagaaaagggttgtgatgatcaatcctgccatcaaggagaagctgaaatatccatygatacaaagtgttaggtcaaggacacacaggatagataagactttaaaggaatgctcatccatcattcataaagctggtaaagcactaggaaagtcaaagcaatgaaatgtcagagcgcgttgctaaggaatgcaaacctaactcatggatgtcaattggcttcagccaggaaattcccagtacacatctacttgaagcaagatactctttcaggcctctggcaagtgaaaatattaatcactataaatttaggctctctgggctctactcattctttaatttaatatgaaggccatcaaactaagtaaatagttgtggtaaattcggacaagtatwtatctgagttttacctgagcaagaaacaccccactctcttgtttcaaccactgttattgaagttttattcacacatagtaaaaattcttgccttattaataggtaatgcatctgaaaatctcaattatttacacaattagatgcatatgcttcatagtaggtcactggtactgcttgttcctggcatggtccacattaaacatcctacagcatgattccactcttttttcctgtcatattatttacccaatagccatttgataattaataaattttccagatatattaatataaaagggaatggtaggaattgctactatagatcaagaatgcaatcattctggaaattttaaaagtatattaaatgtttataagaatawatacgtgaatatgtactgtaagatgtgttactctaaaaccaaatgccagattgttctcaatggagaaatcttaagagcactcctttaaggtcagaaataaaataaaaatgaccaccagcattataatcatttaacttttctttgaggataccaaacaataaagttagtaaagataaataaattagaggtataaaattgagaatgaagatgtgctagtactttcccttatagatgatatgacag

SEQ ID NO: 295984 - DNA, 623 bp, Homo sapiens
tatctgagttttacctgagcaagaaacaccccactctcttgtttcaaccactgttattgaagttttattcacacatagtaaaaattcttgccttattaataggtaatgcatctgaaaatctcaattatttacacaattagatgcatatgcttcatagtaggtcactggtactgcttgttcctggcatggtccacattaaacatcctacagcatgattccactcttttttcctgtcatattatttacccaatagccatttgataattaataaattttccagatatattaatataaaagggaatggtaggaattgctactatagatcaagaatgcaatcattctggaaattttaaaagtatattaaatgtttataagaatatatacgtgaatatgtactgtaagatgtgttactctaaaaccaaatgccagatygttctcaatggagaaatcttaagagcactcctttaaggtcagaaataaaataaaaatgaccaccagcattataatcatttaacttttctttgaggataccaaacaataaagttagtaaagataaataaattagaggtataaaattgagaatgaagatgtgctagtactttcccttatagatgatatgacag

SEQ ID NO: 295985 - DNA, 543 bp, Homo sapiens
agtgttacttaataatggttaccaaatgctaaccatctctaatccacataggatgttaatatacctagaattaaattaattgaaatctttttaattttcttaattatattttttattgtttgactctcaatagatatttaaaccattttctgctacaattttatttgttttgtcttctattgaattcattatatcttctatccctcaatctatcayaattttcttaaatttacctcagagaaaaattatgcttttttttttacaagtatgcaataattataccatagaattctgctgacactgaaacagaagtggcctagggattatttaaaagcattgctataatcttttcgtacatcaattggtttactacatcttagactgaagccttaaaagggagtctcttatattaattataatctgtatgatacagttgaataatttaagaaaaaaatcccatagtgatgcaatctttcaacaaagggcaatattttagccaggtaaaatccaccgtaaatatatctcttatgcaaaaatcaatta

SEQ ID NO: 295986 - DNA, 543 bp, Homo sapiens
agtgttacttaataatggttaccaaatgctaaccatctctaatccacataggatgttaatatacctagaattaaattaattgaaatctttttaattttcttaattatattttttattgtttgactctcaatagatatttaaaccattttctgctacaattttatttgttttgtcttctattgaattcattatatcttctatccctcaatctatcacaattttcttaaatttacctcagaraaaaattatgcttttttttttacaagtatgcaataattataccatagaattctgctgacactgaaacagaagtggcctagggattatttaaaagcattgctataatcttttcgtacatcaattggtttactacatcttagactgaagccttaaaagggagtctcttatattaattataatctgtatgatacagttgaataatttaagaaaaaaatcccatagtgatgcaatctttcaacaaagggcaatattttagccaggtaaaatccaccgtaaatatatctcttatgcaaaaatcaatta

SEQ ID NO: 295987 - DNA, 616 bp, Homo sapiens
gctggatatgagaatttttgtttctgtggttatactctgtgaaccacaggcctcaaattcctctcctggagctggtttaccagagaatttttcttaatatcttctccttgttcaggcttagactttcccactgtgatgaaattcagaaattacatctcttgtagcttgccagcactatttcatgtttacctttactggacacttgttagcctgctgaagtggaatataggagtcatagcacaaaactccattaggaccctttatctcctattcccaacaattctacagattcctttttccctcatagtgggaatagggcaggaattcactctgtcaaccagggtggagtgcagtggtgtgatctcagctyactggaacctctacttcccaggctcaagcaatcctcttgcctcagcctcccaagtagggaggcactacaggcatgccaccatgcctggctaatatttgggtttgtttgtttgtttgtttgtagggcaggctttcaccatgttgcccaggctggtctcaaactcctaggctcaagagatccacccaatgccttggcctcccacagtgctgggattacaggtagcatgagcaacacacaaggccccag

SEQ ID NO: 295988 - DNA, 616 bp, Homo sapiens
gctggatatgagaatttttgtttctgtggttatactctgtgaaccacaggcctcaaattcctctcctggagctggtttaccagagaatttttcttaatatcttctccttgttcaggcttagactttcccactgtgatgaaattcagaaattacatctcttgtagcttgccagcactatttcatgtttacctttactggacacttgttagcctgctgaagtggaatataggagtcatagcacaaaactccattaggaccctttatctcctattcccaacaattctacagattcctttttccctcatagtgggaatagggcaggaattcactctgtcaaccagggtggagtgcagtggtgtgatctcagctcactggaacctctacttcccaggctcaagcaatcctcttgcctcagcctcccaagtaggraggcactacaggcatgccaccatgcctggctaatatttgggtttgtttgtttgtttgtttgtagggcaggctttcaccatgttgcccaggctggtctcaaactcctaggctcaagagatccacccaatgccttggcctcccacagtgctgggattacaggtagcatgagcaacacacaaggccccag

SEQ ID NO: 295989 - DNA, 383 bp, Homo sapiens
cctgggcatgctcattcacttacagctcataaatcatggggcagatttaacaagaagcaaactactcccattaaatgccctattcacaccatgttatatcgccatcacgctattgactttcactctactcttctggtgactgccagggatttgtaataatactttccctagattaagtaaacaatttgatacctcactctctagtttttattcatatcttctacaactaattatattaagagaatcaaaactagttctcaaaattactcaggtagcaataggaacattgtcrgtgatggttttgaaatttgctctctactgataatgtggatccataatcttgtatgagtaagatcactgtggtagatgcaaagtagccacaa

SEQ ID NO: 295990 - DNA, 1153 bp, Homo sapiens
cactatgatttttatagaatagtgaatagaaatttaagaaattttatttgctatgtcacagatctttagagcttatttattttgcatacctgaaactttgtacacttttactattatattcccatttcccttttccctcagcccctggcaaacaccattctaccctctgcttctgtgagttcaacattataagattccatattaagtgagatcatacagtatttgtctttctgtgtctggcttattttacttagcataaagtcctccaggttcattcgtgttgtygcaaatggcaggattttcctcagtttttaaggctgaataatattcagttgtatgtgaatgtatttataaatgtggtatgtgcacacacatatacataccacgttttctttgttcatttatctgctagtggacatttagattatttccatatcttgactattataataatgctgcagtgaacataggattgcagatctactgtacagtatactgcctacagctaaaaatactgatcatacaattgaaatttgctaagaaaattgatwacaaaactacagtaatcaagacatacaagtaatcaactgtggtaagggcataataatagagacatagattaatggaataaaattgagagaccagwtataaacgcttagatttgtggtcacttgatttttaacaagggggcaagacaattcagtgggtaagattagtctttaatggaaatggattagtcttctaaaaatccatatgctaatgaatgaagtttgtcttctacgacacaacaaaattaacttaaaatgcattataaacctaaatgttagagctagaactataaaacttttagaaaaaattttttgacttagggttagacatgttttttctaagatgtgacactaaaagcacaaaggacaaaaaaatagaatgaacttcatgaagtgtttaaaaatttggtgctgcaaaagttactattgaaaaagttaaggatagtacacaggatgggagaaaatatttacaaatcatatatctgataagggacttgtatttaaaatatattttaaaactcttacaactcagtgatataaaaaaatttaaatagaaaaaggagatttgaacaagtatttctccaaagaagatatgcaaatggcca

SEQ ID NO: 295991 - DNA, 602 bp, Homo sapiens
acaaaactacagtaatcaagacatacaagtaatcaactgtggtaagggcataataatagagacatagattaatggaataaaattgagagaccagatataaacgcttagatttgtggtcacttgatttttaacaagggggcaagacaattcagtgggtaagattagtcttyaatggaaatggattagtcttctaaaaatccatatgctaatgaatgaagtttgtcttctacgacacaacaaaattaacttaaaatgcattataaacctaaatgttagagctagaactataaaacttttagaaaaaattttttgacttagggttagacatgttttttctaagatgtgacactaaaagcacaaaggacaaaaaaatagaatgaacttcatgaagtgtttaaaaatttggtgctgcaaaagttactattgaaaaagttaaggatagtacacaggatgggagaaaatatttacaaatcatatatctgataagggacttgtatttaaaatatattttaaaactcttacaactcagtgatataaaaaaatttaaatagaaaaaggagatttgaacaagtatttctccaaagaagatatgcaaatggcca

SEQ ID NO: 295992 - DNA, 602 bp, Homo sapiens
acaaaactacagtaatcaagacatacaagtaatcaactgtggtaagggcataataatagagacatagattaatggaataaaattgagagaccagatataaacgcttagatttgtggtcacttgatttttaacaagggggcaagacaattcagtgggtaagattagtctttaatggaaatggattagtcttctaaaaatccatatgctaatgaatgaagtttgtcttctacgacacaacaaaattaacttaaartgcattataaacctaaatgttagagctagaactataaaacttttagaaaaaattttttgacttagggttagacatgttttttctaagatgtgacactaaaagcacaaaggacaaaaaaatagaatgaacttcatgaagtgtttaaaaatttggtgctgcaaaagttactattgaaaaagttaaggatagtacacaggatgggagaaaatatttacaaatcatatatctgataagggacttgtatttaaaatatattttaaaactcttacaactcagtgatataaaaaaatttaaatagaaaaaggagatttgaacaagtatttctccaaagaagatatgcaaatggcca

SEQ ID NO: 295993 - DNA, 1196 bp, Homo sapiens
cataagcatacaggtaagagacacagataatttattttctgtaaattctatatgttgtgttgatatcttagctgacgggatagccttggaatcagaattataaattattatgataggctgtttaaagaaggaaatgttaagttcctatagttatctgtttcaaggttttaacaataattcttgcgggtttatgataggtttcatataatgggcttatagtatagacccttcctgacttggcatgtacttttctacagggttcttgtgcaaatacagctgatcaatatcacagcatgttaatctggcaaagagataatgggaatttttacttctttcctggacaagttttattttattttattctacttcattccttatttttaaatgaaaaatataataagcaaaacaatgacactccccatgactaacagaaccacacaataaattctgttttgtgactttcctcatccagttctcctgattgcacgcataaaaacaaaaataaaaaaycctcaaaattctggtcttagaaaaggttacatttctccaaaatttacaaattatttatagaaaacacaaaagaaagaacataataataaacttgaaagttwactgtatttatcatcttttgttccttttagttacgtatgaatctcatcaatttgaattttaaggcataatatataatttaaaagagcaaaacactttwtgttttattacagaatgtatatgaatatatattaatttgatactaattacgttgaattttgttgtaaacaatttcaacatttgggatcaaaatagaaatttttcctacaacatttaaataaatttaccatttttctagaaacattgttctcaccatatggaaaactttaatgaagttaacagttgcaagaaaactttttctagcaattttggaatttatccttcacttttcaaattaaacacttctagaaatctataatgaaataaaactccacaaaggtaatttattgaggaacaatactcacaaaaatttgtccttggcttttcatgtctaggtaattttgtcattatttatgcctgtattttaaaattaaaactgatgttgctgttaatttgcacaattaataattattgagttaacatcaataataagtaaaatgcttactatccaatgttgattcaattggataactcacaagtgctgataa

SEQ ID NO: 295994 - DNA, 572 bp, Homo sapiens
tcaacatacttattgaaaaaacattattgaagagtccacaagattttgattataaaaaattactagttcaataatcagaaggtagtgagcatccaatgtaacacataccatatagtaattgttacacagagtacacgtttgatgaacaaaataccaataagataactgtgttgaatcaaaaatcagttattactatagcgttcaactctaggaatcaaagaacatgaaacactcatatcaaattatagcaacttcactgttaatagaaacctaatgacttttaaacatttgtattagtttcctttcgctgctataacaacttaacactcacttggaagcttaaaacaacacacattcaatatattacagttctggagatcctaagtctraaatgggttcagtggatgaaaatcaaaaagttgatgaggttaagatactgctggaggcttgagagaagaatcaattctcttgctttctgtggcctctagaggccatgatcattctttggcttatgatttctttcctcaaagccagtagaaaacatcttcagatttttctctaattctgacttt

SEQ ID NO: 295995 - DNA, 586 bp, Homo sapiens
gactgactgggaactgaggctcgctgccactgacccccatcaggcaagactatagcaccatatatcactagcccaagaaaatatcaaaattcaaagtatggtttctattgaacatgtatctcttttgcaccatcgtaaagttgaaaaatcttaaatcaagccatcataagttgaagacgatctgtctaagaaagggatctaagggactgaaaattaaataaggcagagagaaagtaactaaaaaagaagcaaggaagaaagaagtaaggaaggaagcraaaagaatgatttattttttgtatcaatgaaattattattaactgtcaattgcaggaaaaatctctggacactcactgataccatatgtatcagggagataagaactaaataagaaaacacagctaggcaaacttattaaatgttacagaattcagacttgtctttcatcaagtcattaatttaggaatttattgattgattgatcaatcaattaaaatacacattcattgaatgctacaatgtgactctaatgacaatggttttgtggggaaaacaaatgaataatacatgatcccttggtttatag

SEQ ID NO: 295996 - DNA, 581 bp, Homo sapiens
ctttttaattattttggaaccacaatactctattacaatgatttagagaagggtgaatgaactcaaactttgtactttcataaaagatttataacctcctggcagctgtgattgtatcccttgaaacactgaaaaggaaacaaagtcccatatattgcccaattgaccatacagtttggacaatctgtctgctatctattcccatcagccctctgtcctcttacagaatttcttcataatgtacaaaaattatttcatacttatgtatgtatatatatatgtaatttcaagtatcattrtttcatatatatgtaatttctagcaggaaagaagatgcctctggatcagagaacagaccatttattactgacagattgccttagcatccgtttcccatgcttcagttttcatgggttaatgcaataaatgatgttcactctcgcatgcagtagcattgcctcacagcagatgaaccctaaagtaagacttggaacatatatggagcagctggtgtatcattctattctgcatgggtgcatgcgagagacaaaggtgggagagagagagaaacaaaatgagag

SEQ ID NO: 295997 - DNA, 645 bp, Homo sapiens
gataattgatgataaaaacaacaaatttttcactgccctgctaatataacataacccttcttatgccaatgayggggtttactgacattaaaatagtgtattcttctttagtggtttctagcattgcttatgtgtttggttcttctctatgtaattatttttaaaattacaataagaagtcaacttgaggacaaaattcttctattacatattcaaattacttgctttcattagagattaaatttttatagtcatcctttgttaaacatctcaaagacagagctcttttccaccttgttcattatcgtaggacagtactgatacagcaccaggaatgaggtcactgctcaaaaaatatctgttgaattaggtgtgaggcttggacagagttttctgaaaactcattgtgactagaacaaaaacaaagcacaggcatccagggaagggctgggcccacaaatcaggttgtagtgcagaggttctgaattaaccatctcctctgcatcaagcctaaatcctctgggcctcactgtgctatgactaatttaaacaggcttttggcctgcttcctgcaggtgcaacttgacagtttaatttcagtcactcgttatacctcttacctacttccctgggtatgtatgcctc

SEQ ID NO: 295998 - DNA, 535 bp, Homo sapiens
cttgttcattatcgtaggacagtactgatacagcaccaggaatgaggtcactgctcaaaaaatatctgttgaattaggtgtgaggcttggacagagttttctgaaaactcattgtgactagaacaaaaacaaagcacaggcatccagggaagggctgggcccacaaatcaggttgtagtgcagaggttctgaattaaccatctcctctgcatcaagcctaaatcctctgggcctcactgtgctatgactaatttaaacaggcttttggcctgcttcctgcaggtgcaacttgacagtttaatttcagtcactcgttatacctcttacctacttccctgggtatgtatgcctctgttgctctgtcrggcatctgctagaatctgtttggtattcaggcttgtccaaccagaatggctggataggttctacacagacacctctgatctgaaattacacctagtatttaatttagagaggtatatctgtgtgatgatacagaaagtccagttgcactagaagaataatttattactta

SEQ ID NO: 295999 - DNA, 550 bp, Homo sapiens
gctgagtgagagttgctcagaaagaagcatgcagagtgttatgatgtatgtctagagagatgcatggaaaccagatcatgcagtggcttctgggccatgttaagggttttgttctttattctaaaagcaacaagaagtccattatgaattttaagctgatgtcttggggcattcgacatatgagaatggtatttcaaaaagcttactcctgctgcaatgcaaactactytggggaaagtttagaatggcagatgtggacaccaattcatagtgaatgtatttgattcatatttagaaagcaaattgacaaaacaaggtgaaagactggatatgggaagtgagggagaaggagatatcaatgttgatgactggaattttactttatggaattagatggatactaatccaatgactcaaatatggaatataggatgaaatctattgttaagtaggtaattgtatgaaaggaagagtctggagctcaggggagaggattggactagagatagatttgtgtgggagtgttaggtgtacagacagtgattgagtc

SEQ ID NO: 296000 - DNA, 562 bp, Homo sapiens
tcccagccttaacctggggaagctcacctgtcaaagcctgcttactaaaaactttgctgaattgttggctgacattacaaaatgtctaaaatgtcatcatgtgtagcaaacaaatccctgcatttccacatgttgttcctggggcaagtaggcaacatactgaataaatgcatgttcatcaagaagttcagttgtctatgaggaagatgtgatgtgggaggaagtgactatatcattgttacaggagggraaggctgggggaggaataagggcgggaagcaactgtctgttggatgtctcttatgtgccagcaaggttgactccctgtcccacaccctgctctgtggtgggtccagcgctctgtggtgagaacaaacaagaaaggaaggagagatggccaagcagcaggctgcctgcatgcattatacttctacacaaccagaagaggaaagagcatctacatattcctagccctggttcatttctgggatttcctttcaagcagagaggcaacttcagggaccaggcaacttggctatattactacacagtttgcagttta

SEQ ID NO: 296001 - DNA, 562 bp, Homo sapiens
tcccagccttaacctggggaagctcacctgtcaaagcctgcttactaaaaactttgctgaattgttggctgacattacaaaatgtctaaaatgtcatcatgtgtagcaaacaaatccctgcatttccacatgttgttcctggggcaagtaggcaacatactgaataaatgcatgttcatcaagaagttcagttgtctatgaggaagatgtgatgtgggaggaagtgactatatcattgttacaggagggaaaggctgggggaggaataagggcgggaagcaactgtctgttggatgtctcttatgtgccagcaaggttgactccctgtcccacaccctgctctgtggtgggtccagcgctctgtggtgagaacaaacaagaaaggaaggagagatggccaagcagcaggctgcctgcatgcattatacttctacacaaccagaagaggaaagagcatctacrtattcctagccctggttcatttctgggatttcctttcaagcagagaggcaacttcagggaccaggcaacttggctatattactacacagtttgcagttta

SEQ ID NO: 296002 - DNA, 624 bp, Homo sapiens
tttctggttctcttccctggctgccctataagagttgggtaatatacaatcctggctggtgatagagatttggttgaggtgacacttgaatttctcacaagactgagtcaatggaatctgtaaagtaacaaactcaatcaatatgctgattcagctagttgaaatcatggttgtgtacacacttttaaatacagataaaacaagtgatagggttaggcttggtatccccacccacccatatctcatctgaattataatccccataatccccatgtgtcagggagataccaaaggttaaggtaattaaataatggggatggtttccctcatgctgttctcatgatagtgagttctcatgagatctgatggttttataaggagctcttctccctatgcttgkcacttctccttcctgctgccttgtgaagaaagcatcttgcttccccttctccctccaccatgattgtaagttttctgaggcctccccagccatgctgaactgtgagtctattaaacctctttcctttataaattacccagtctcaggcagttcgttttagcagtatgaaaacagattaatatagtaaatttgtatcacagggagtgggatgctgctctaatgat

SEQ ID NO: 296003 - DNA, 568 bp, Homo sapiens
tataggggttgagtttcattcttctgcatayggctattcagttttcccagcaccatttattgaaaagactatccttttccccagtgtgcattcttagcacctttgttgaaaatgagctcactgtagatgtttagatttatctgtgggttctccaatctgttccaccagtctgtgtgtctgttatgccagtaccatgccactttggttactacagctctgtggtataatttgaagtcaggtaatatgattcctccagttttgttttttgctcaggacagctttggctgtttggggtcttttgcggttgcatataaaatttaggatagtttatatctatttctgtgaagaacatcattggtattttgatagggattgcattgaatctagattgctttgggtagtgtggatactttaacaatattaatttttgaatccatgaacatggaatatctttccatctttctgtgtcatcttcaattccttgtgtcagtgttttataatttttattgtagagatctttcactacttttgttcattcctaggatttttcttgtagctactgtaaatg

SEQ ID NO: 296004 - DNA, 529 bp, Homo sapiens
tcatggatctgtacaagtttcagatttctacatgattcaatcttgtatgtgtctaggaatgtttccatttcttctggatttttcaatttactggcatgtattagctcatagtagccattaatgatcctttgaatttctgcagtattagttgtaatgtcttcttttactctctgattttatttatttggatctcctctcttktattcttcatctggttaaaagtttgtcaatttgtttaacttttgaaagaatcaactttctgtttcattgactttttatattgttttctttgttacaatttcatttatttctgctcttatccttattatttctttttttctacttattttgggtttggtttgctcttgcttctctagttgttttaatccattttcattttattttgtataaggcaagataggtattaccaaagaaacataagacaccgctggaatagagggacagaaatactggacagtaagcatggcatcaaacatgggcattggctttgtgtataagacaggaaatc

SEQ ID NO: 296005 - DNA, 532 bp, Homo sapiens
acaccgctggaatagagggacagaaatactggacagtaagcatggcatcaaacatgggcattggctttgtgtataagacaggaaatcagttacaaactggagggataagatggagagtttttctttagmacacagtacatgaatttttatcaaggacatcttataaaaaataatgatgattttctgctagagtgttgatctagtttctattttttttttaatttccttaaaatcacaattattcctggaatctaagtgaaaaacaagtgtcaatgtggagtcaagtgactccatttggagatgagggaaaatgcaatgtctcgggggatgtgcaggcctggcatcattcaatcatttccattgctggtacttaatttagaaaactatggtcattataattactcccaaatataaaagtgatctgtacatatcacaaaagactgccagaaacatttcctatactagtctctggtgttattgattttattaaatttgctaaacttaaaatagacatttttaattggctcacaaa

SEQ ID NO: 296006 - DNA, 532 bp, Homo sapiens
acaccgctggaatagagggacagaaatactggacagtaagcatggcatcaaacatgggcattggctttgtgtataagacaggaaatcagttacaaactggagggataagatggagagtttttctttagcacacagtacatgaatttttatcaaggacatcttataaaaaataatgatgattttctgctagagtgttgatctagtttctattttttttttaatttccttaaaatcacaattattcctggaatctaagtgaaaaacaagtgtcaatgtggagtcaagtgactccatttggagatgagggaaaatgcaatgtctcgggggatgtgcaggcctggcatcattcaatcatttccattgctggtacttaatttagaaaactayggtcattataattactcccaaatataaaagtgatctgtacatatcacaaaagactgccagaaacatttcctatactagtctctggtgttattgattttattaaatttgctaaacttaaaatagacatttttaattggctcacaaa

SEQ ID NO: 296007 - DNA, 559 bp, Homo sapiens
ttgaaattactgatggactggatatgaaatatgaggaaaagaaaaaataattattcatatattactattaccttttacttcagcagttgaattcatggtggagtaatttattgagaagagagaacctagagagaaaacatattttgagggtatatttaattgtgacgatatagttgagattaaatggacaaattaaaatatggctttggagcccagaagatttaaatttggatggcatttaaagtcaaactggatgagatttcctaggagaagaatatagggctagaagaaacctcaggaacaaccrtggggcatttcaaaatttagaaatgagattgagaaggaagagacaacaaagaaaatggagaaagagtagtaagcggcagaagattccccacagagtggagtctctaggaaggtaagagaggaatttccaggagaaagggtgtgataaacaaggacagctgaatctgagtggaatgaagacaggcatatgttcatggatttggaaacaaaagcatgaaaaatacctgactgtagtcgaagagtgaatgagaaa

SEQ ID NO: 296008 - DNA, 593 bp, Homo sapiens
atttaaaaatagaattaaaaagaaaactaaaagcatatgaatgacgagataaaagagtatgagaaaaaatgtttgaattgtggtgctttctgatggctctacttctcaattcagccaaagaaaaaaagyagtttgagtttgtggtaaatgttgcaggcagaatagcagggtgcgtgtgcagctacacacatctggcccacaggtgtccaagtggaatttgccatcactccaagaaacagtcagctattgtctttttaaattgagagtggtgtgaggactagtggaattcagtgttacatgtcaagcgtacaacatattcatttaggtcagagttgcttgacatccttttgagttaattttactcaattgaaaatgtttcatgaaaatgagacaaaaaccaacttcttgctcttccttcagaatcacatcttcagaggaagtaaatgaaaagaagtctgtttctagtttccattgcttaaaatcttacttaagagtaacagagagtttgagtgctttgttggtttgaaggatgtaacaagtttatcaggaagattgttgtcttctggctctatgaatcccactgcttgtatatg

SEQ ID NO: 296009 - DNA, 602 bp, Homo sapiens
ggattattttgaagctttgagatttaatgactgccctgctaggttttggatttgcatagggcctgtagctcctttgttttggctgctttctcccttttggaaaaggactatttaaccaatgcctatattgcaattgcatcttggacataactaacttttttatttttacaggcttatagacataaggaatttgcatttcctcagatgagactttggactgtggacttttgagttaatgccagaatgaggtaagactttgggggactgttgggaagacatgattatattttgaaatgtgagaaagacaggagatttgggagggacaaggggcagaatgatatagtttgatttgtgttcccacccaaatctcatgttgaattataatccccagtgttgggggagggatattgcaggaggtaatttgatcatgggggcagatttctcctttgctgttctcatgatagtgagttagttctcatgagatctggttgtttaatagtgtgtagcacctcccccttcatctctctctccttcctactatagccacrtaatagcgtgtagcaccttcctactatagccatgtttaatagtgtgtagcacct

SEQ ID NO: 296010 - DNA, 614 bp, Homo sapiens
aacatacatatgccatgtgaatatttactaaaaaaagctgtagggactacattaatgtcagacaatgtaaccattaaagtgaaaagaattattagattaaaggagattactatataatgttgaaagattcaattcactaagagaaggtaaaatgtttaaacttgtatgcatctaattatatarcaccaattatatatataaaatcaaaatttggaaaaagcctcagagaaattgtaaaacctaaacacacttctctcaataattaatagataatttagataaacaattggtaaagatgtatgtttgaaaaatccaactgacaacttcaatttaatgtacttgagtaattcattattccagtagctgggaaaaacacatttttaagtttacacggacagtttgcataatttaatgttacaccaggacataaataaattttattgtcatagagaccacatatctgaatactgggctagtattactgtagaaactgaccgtaaaagattacattttaaaaagacacaattaaattttagagcacactaagtcagtcgttggtcaaataagaaattataatggaaacaggaataaatgagaagtgatcaattacaaaa

SEQ ID NO: 296011 - DNA, 580 bp, Homo sapiens
tacttgtgcttattcagctatacacattcacatatgactgcacttaatgatgatgccagtttgctgagtttcttccagaaaagatggtttgccaaattactgttgttaaacagactttacaatcaaacactcagttctgcctctgcatattagagtctccaagcccagctttrgtactaacctcattagaaactaccatactaaaggtctttcatatctctgttcatcacacacttctagggataaagaaagtgttccaagctgacttcttatgttcaaaggatatgatgctttaatgtcctaggcagcattttcttgtctcatgggaaagtttttcttcctttcttcttccagattcttttccttctcctcctattccaccccttcctccttcttttccctctcctccacgttcccctccttcacctctcctcttccttcttcttcttttacaacttttaagaaatattttcacctgtgtttggtacagtgggggcacaccagtgcatggttaacacttctcaacacagccctggagagatcctgcagaatgcaagtcaaatcctatcattcctttgcc

SEQ ID NO: 296012 - DNA, 394 bp, Homo sapiens
atgtctacagtaggaatgcagaaaactatccaaaaggagataaaaacctaaaaagaaaatagtagtgtttcataagggtacataaacaactttatatactccaaaagttctgaatccattacctagaaaacaacatttaaacatcaaaaacattcctagtgctgttccagaatctttgcaaaaaacttctaattaatgaactctggcaaagaagtcaggaaagtatgaaatttctttgtgaataaatattcatcaaaagtgttggttacttgatggaataagttaatgtaacgggaacatttatttatgtggaacagtttgatactgaagtaattattcatttccycagcacgtcaggcaataaggattcttctttaggtgataatagtgtaaa

SEQ ID NO: 296013 - DNA, 522 bp, Homo sapiens
gtgtatgtgttgtttctgttgaattatcttggaaatcaaagattagagttcattttaaattggaaagtaaagatgaatattttaaatatgtgatgaaaagctagtaaaaatattggaaaatgattaggaagaaatatgtcttaacttacaaaatatatatttttttcatttacaggtacaagggattgctccttgctaggtayatttttccctctctactctttgccacagtcagcgctatgctaaccatcttttttgctttagatgtgtagacgcgattatgttatactatttacaatatcctacataaaaaaggaggtgaaaaattaaaaaaaagaaaaaggtttcaacctttttttttcttctcagtagtattgaaaaacatgaatgcacaatcttctttgtgtccttatcaacagcataatgcggaacacacattaggatttcaaaagatgtagctgaacttgccacagtggtctgtgatcttttctgtcacctggcccaggcagagaaacttcttgc

SEQ ID NO: 296014 - DNA, 530 bp, Homo sapiens
cgattcctcattgagtactgttctttgacactccaatgacgctagmtatataagcacttaaatgccggagatttgtcagtttttaaatcatagaaggcactacatgatttactggtttaataaattcttctttgccaagtaattattcatgttcatttgataaatttaaatgtagttaaatatatatatttaattaaattgaatgtatatatatttgaatatgtgtacatatattcaaagaacttttttctctaacaagtgaataaaatcatttattcagagaaaattttactctaaccagttgctctagagtctgccttttaaaaaaattacaaaatattattctgagcattaaaactcaagatattttattcctgagtgttgggttcaggccatttgtgatagtaaaagttcccttatctacataactaaatgagtaagccatttgaaattaaaaatttacaggtatctttcctggaattaagatagtaagaaatgtttttctttgtccccatgtttttaaagtttat

SEQ ID NO: 296015 - DNA, 569 bp, Homo sapiens
aggcactacatgatttactggtttaataaattcttctttgccaagtaattattcatgttcattygataaatttaaatgtagttaaatatatatatttaattaaattgaatgtatatatatttgaatatgtgtacatatattcaaagaacttttttctctaacaagtgaataaaatcatttattcagagaaaattttactctaaccagttgctctagagtctgccttttaaaaaaattacaaaatattattctgagcattaaaactcaagatattttattcctgagtgttgggttcaggccatttgtgatagtaaaagttcccttatctacataactaaatgagtaagccatttgaaattaaaaatttacaggtatctttcctggaattaagatagtaagaaatgtttttctttgtccccatgtttttaaagtttatttctctttttaaaaaatgtattagtaatactatttttgattgacaattcataattgtatacatttaaggggtacaatgtaatgctttgatatatgtatacaatgtagaatggttaaatcaagttaactagcat

SEQ ID NO: 296016 - DNA, 585 bp, Homo sapiens
gcaattgtggttcacagtcataagctattaaaatatcatatcatcatctaggtggcacttttaggtacttgcatgttcaaattgttttatattacaaaaattcagaaactattaatttttaaaagctataaaaactatcaatataaagcatttatctatcaatgcattttctcagtttgaaactacttagctgtagtcattatttctagttaacataacastagatttcagatgctgtggatgtagaaactagaaagaccatggttgcctctgcttcacttcttgccttcactttccacactaaggtagcagcacaaggaggcccagcaatgctacaccctgattacaaacatcctggagctcttctggggagaatatatgttctggaagatccatttgaagtcatgctatttttcttttgaagtacagacttctgtatgacaaataacaaagacaaataaagttttaacactgcaatagaagcagcaaagtgttctaaatatatcttctggcctgttattcttttttaccaaaatggttatgatggaataaaagtctttgcggtagtgtggtcttaaatcaccc

SEQ ID NO: 296017 - DNA, 416 bp, Homo sapiens
tcttttttaccaaaatggttatgatggaataaaagtctttgcgrtagtgtggtcttaaatcacccacactcttcctgtctcatcgtccttgggctatggccataacactttcatgcctttactagaaaaatattttcctttcctaattctgtcccttaggcatcatttccaaagcttcacatttgcagaaatgattccttctaaaaaagaaatctaattaaaccatttataatattcccctcacccctaaacagcagaataacaaattaactctgtggtctaccatacagttgatagatgggaaataaagatgtagagtcatttattttagctgcaaacttgggaatgaaacactggttgggctacaggctaagagtgttcagagatgatagtttataggatgtggggagacccag

SEQ ID NO: 296018 - DNA, 598 bp, Homo sapiens
cagcaagccaacatggcacatgtatacatatgtaacaaacctgcacrttgtgcacatgtaccctagaacttaaagtataataaaaaatatatataaagaaatccagaataatcttggggaaatgtaatatctattaggtagggccagagactattcctaccatttatttgacctcctactatattttaggtactaactatactagatgcttttatgtacgtgccaatttattctcagaactatccatagaagttaatattatttactctattttccaggcaagaaaggggaacttgcggtaagtatttgactaaattcacctgactaataaatgttgaagatagaatttaaattcctactctacctgattaaaaactattttcttaactacagcagaatattgatatttctttttaagatatgaggcagggagaaagttggattagatctgataagaaaatggtggatttgttttctcattctgaagatgcagattaattatcttatgaaaatccagtgaatattctgctctctcacattttgacactcggctctacctccatagaccatcttcaaaggagcttggtaatcctactaa

SEQ ID NO: 296019 - DNA, 965 bp, Homo sapiens
ttaataaggcacttacaagacaaactgtttcaacatcattaccaaaaacaaagagtaaacatagaggacaaggcttcattatgtacttatttacaccttaggattgtgtatgtgcacacacacscacatgtgtttccttccaaagagaagatactagagaagggaatgttctaactctgaaaatagtacatttaagtgtgtgaagtttcagagattgttagcatcacagactttgtggtttctcacctttaagaggtagcactactagctactaccctggcatccccagctttgacctaggcatacacagttatcattattggtatgaaaaggaatttggtctctgagtgacttcacttgcaggaagacatggtgacaaatgctgtgtgactcaccatgttccataggttattttacttctgaatgggtwggcagtgtgagatggactcaactgctattggtggccctaaggatgcgggaagggggttatgagctcagggatgcagcttgccacaggaagctggaaaaggaaaggaaatgggtttccccctatagctttcagaaaggaatagatccctgctgacaccttggttgtagctcattgatacctgtgtcagacttctaacctacagaactataaaaagtaaatawgtgttattttaatccactaaatttgtgataatttgttatgtcagcaatagaaacctaatacagtggctagcattgtttgagtacttactatgtaccagacataatgcttagtcatttacttgccttatttatttcttacaaccctattttacatatgaggaaattgagatttagagaggttgggtaacttgcccaagactacacagaaagaagtggtagagtaacaatttatatccataatgtctgtttcagagtctgactcttaactactctgctacctagactttcaactctatgcaaaagagttatatgta

SEQ ID NO: 296020 - DNA, 621 bp, Homo sapiens
tcctggagacttaatgcctattgaattgaattctctctgaaaataattaaaaaacaaacagtacaatattgttttgtcctaggtttgycctcattcagagtagatttgaaaacatgtattttttcattaagtgaaagagtaatggaaaactgtcaggtactaaaagatcaatgacccattgcaagaaaagataggtctagaaatttggaaggttgttttctcacagaaaacaattagaaatagtgaattaaaatgtttaaaaaatcttcttaaatatatataaataaaagtggaatctatagacttaattaggacaccaaatctgcttcattttgagcattttttatgaagatggacaacctaagctttggcttggatgagcttgtaagagcatgtggggttctgaaaacagaattcaaagtctcagacttgcctatcccaatttaatatctcacataaagctgggaccccaagtgctatatcctcaaggttggggagaagcagaagtaacactacttcccaactccctgggcattacaaggaaaagttgctatggcattgggaagaggaggaggtagaaaacaaagctcctctaagaagctgaaactacaagtccaaggt

SEQ ID NO: 296021 - DNA, 569 bp, Homo sapiens
atgaacatggcctagggttttctttttattggtattcacttcagtaacttgaatccacagatataagcagtatacaaccagaaagttacaagcaaacacaaattatacatgcaaatttctgttcacaaaggtcacatgtgcagttacatgaattagaaacatgcatctaggattatgagatgtctgttcatgtgttaagtgttacagcaaaaagaaaaatacacatatggttaagttaatgaatagtttttgttttatcagaatggcarcggacagaagtaccttttagagactgacttcctaagctacttaagacgacttgtaccttgggtttttatttaaacaaactgaagcccaatgtaaacagcaaaacaaaacttaagctaacccaatcaagaactggcagctatcctttaactagggactttctaccagatcatactgaaataatgtaaatatttatctgtagccaatcaaataactacttttcttccatgttcagcctataaaagccccttgctccactgctaacacagagctccctaaacctcttttggttttgagtgctg

SEQ ID NO: 296022 - DNA, 569 bp, Homo sapiens
atgaacatggcctagggttttctttttattggtattcacttcagtaacttgaatccacagatataagcagtatacaaccagaaagttacaagcaaacacaaattatacatgcaaatttctgttcacaaaggtcacatgtgcagttacatgaattagaaacatgcatctaggattatgagatgtctgttcatgtgttaagtgttacagcaaaaagaaaaatacacatatggttaagttaatgaatagtttttgttttatcagaatggcagcggacagaagtaccttttagagactgacttcctaagctacttaagacgacttgtaccttgggtttttatttaaacaaactgaagcccaatgtaaacagcaaaacaaaacttaagctaacccaatcaagaactggcagctatcctttaactagggactttmtaccagatcatactgaaataatgtaaatatttatctgtagccaatcaaataactacttttcttccatgttcagcctataaaagccccttgctccactgctaacacagagctccctaaacctcttttggttttgagtgctg

SEQ ID NO: 296023 - DNA, 523 bp, Homo sapiens
acttaagtctccagattttctcctcagatttctctgtgatttgcacatgtctgttgtctcagtcttaagtcttactcttcttatgcccccacactgacctcagacttattctaaaaaccaggactgatcacagtaattcataatttaaaacaatttatggtttcccataatgaagtttaaatttcttcacatagcccacaaagtcttctgatgatctggcttttgstacctgtgcagcctcccttcctatgcatgccccagcttgtcctctgtgatcaaggtctccatctctttcatctctagtacagcaccctgcttgttaataaggtcatgaaaaatatgtggctatatctactactgcacttgtggtattgaagatagacattacttggatgatattcactcatctgaatattatctttcctttacatcacaacctccaagcactttgtgtagattatcaaagcctcacaaaatcctatgaaggtgcatagacatccaacaaataactacttaaatgagt

SEQ ID NO: 296024 - DNA, 523 bp, Homo sapiens
acttaagtctccagattttctcctcagatttctctgtgatttgcacatgtctgttgtctcagtcttaagtcttactcttcttatgcccccacactgacctcagacttattctaaaaaccaggactgatcacagtaattcataatttaaaacaatttatggtttcccataatgaagtttaaatttcttcacatagcccacaaagtcttctgatgatctggcttttggtacctgtgcagcctcccttcctatgcatgccccagcttgtcctctgtgatcaaggtctccatctctttcatctctagtacagcaccctgcttgttaataaggtcatgaaaaatatgtggctatatctactactgcacttgtggtattgaagatagacattrcttggatgatattcactcatctgaatattatctttcctttacatcacaacctccaagcactttgtgtagattatcaaagcctcacaaaatcctatgaaggtgcatagacatccaacaaataactacttaaatgagt

SEQ ID NO: 296025 - DNA, 589 bp, Homo sapiens
atactaacagctcaattgtgccatgcccatagacaaaagttagtcttctctgttttattcgtttgtccatttattcaacaagtaaatggaagtgctatttatttattgagcatctccacaaaagcagtcactttcatagacattttcttttttaattcgcatatcaccctgagagatatttgtattgatgttttattgtaaactagggctttaagctcagggatttataaatgtcctcaaggcttaaagctaggagacgattatacaacattttttctcccagatgtactctccatatttctctgccttgtcctctcccctgaggatctgaattctacagatcccrtcacccagattctttttccctctggtttctggttgagttcagccaatggaatgcaccagcagatcagagggtgggaagagaaactgtgtgggatatttattccctctgctctctccctgcctagtaatgcttctggtcattgttgtgcttctcaacaattacaggtcctgtttggggtccctttcccaggagcccaagttctctcagggttctggtagtaccattcacttcctctcatctcct

SEQ ID NO: 296026 - DNA, 560 bp, Homo sapiens
atgtaggctttcattttaatcattcaacaccactgtattgaagtgcatacagacaggaaaaaataattcactgtcacttcaaakaaatatgattttactgcaagaagagaaatacggctgacacattaagagtagttattatgaaaaaacaatattgatcaaattgcagtttgcacataattcagccaacttcctacttgcatcataaaatttgcattcttcaaaattgcagctatatgaaatgatgaagtcttttcattattcattttgccactgtctcagaattaaaagtcttgttgctgacaaaaagccaattaatcatatttatggtgacaaccatgactattataaaacagacattcttagaaagcatgcccttttctttacatcaaaacctgttgaacatgctcttccatcccctgaggctttgaagatagattattgttccttctgggaaggaataatgagttagtataaatctaatagtagccattgttgatggtagaattagaccaaagtcagaattttaaattttatttgttttgccaatcactcttcct

SEQ ID NO: 296027 - DNA, 586 bp, Homo sapiens
ggcaaaggagccaaatcacaatagctaatttgtgccacaggtcccttgggcacgaacctctagccagacttctgtcactgttgggataatcattttcagactctcccatttggggcagacagtgccctgaccatttgctagaggcaaggcaaacctgggcttaagatatcacctatagccaagaaaaaggcaatagtagtgaagatttgctaagaaaatatatccaataaaaaycaagacaagttgaatagaggaagctggaataaataaccaatccttcaatgcaaagacatagacatatacccacaagaaacaacactgaacagggaaatgtgacctctgcaaaaggacaaaggaaaaatccagtgaccgaccctaacaagacagtcatttgtgagctctctgaccaaaaattcaaaagagcagtttcaaggaaattcagtgatctctaaaataatacagaaaagcaattcagaaaattgctggagaaatttaacaaagagaatttgttaaatttttaaagttaactttaaaaactcaaacaaattttggaactgagaaatacgtttgctgagctgaacaacta

SEQ ID NO: 296028 - DNA, 616 bp, Homo sapiens
agatgagaggaagttgagaagcgtatagctcttcccaaaggaaatatatacaaaatatcccaaaggatatgcagcagactcatccttttaataatttccaagtaaatagtcaaaaaccctgcttaggaaaaactcagaaaatattgcttccactggcttcagatggcctgctgaattcctatgactctgtagacttccactaaatccaaaattgaggaaatttaagggacactgcattaayagtataatcaccccatgctttctgatacatgccaaggttcttcttagctgaaagtaatttgacctggctatttgctaaatggttcaagtctgaatgctggaagatttaactaactgccttgtgagaactacctaaagctgatgccatgtgggtaggcttgtcctgtaagaattgttgaaccagcctgcttactgctgaaacctcctttgcaaaaattataaatgaggaaattatggcagtgaaagagatcagacctaatccactccatcctgcttctaacctttaagccatctttgttcattcctagctgtaggctgaactagccttgggaaggaattcagttcatggtttgactctgaaacaaaattgataata

SEQ ID NO: 296029 - DNA, 1241 bp, Homo sapiens
gcattagttaaaatcaggcctagctgtataaataacagaaaattmcaaaataatattaaatatatttctctttcatgtaaatgaagtccagaggtacaaaggttaaggactgatatggcagctctgccccactaagtcctctgggtcttaacttcctaccagctcatttttctgctatttctgtgtagtggtccttgttttcatggtctcaggtggcagcttctgtttcaggaagcaggatggaggaaggactgaaaaggaacaaaggccaaaggcacaatgtctctttatatatatgtaacttaaattgtaaaatataatgttcacatagaaatataatgtttacacagaaactgtaccacaatgtatagttataaaaattattttaaggaaatgtccatggagcctcccctcaagtgaagaaacagagcattggaatttcagaagcccgcttttcctttctaatcacaactctccctagaggaagtctccctctagacctagagattactataattctgactttatggtaatcattgccttgcttttctttaaagtgtttcacccaagtatgcatttctaaatgacatagtttgcctatttttgaatcttggtgtttgwgcattagttaaaatcaggcctagctgtataaataacagaaaattacaaaataatattaaatatatttctctttcatgtaaatgaagtccagaggtacaaaggttaaggactgatatggcagctctgccccactaagtcctctgggtcttaacttcctaccagctcatttttctgctatttctgtgtagtggtccttgttttcatggtctcaggtggcagcttctgtttcaggaagcaggatggaggaaggactgwaaaggaacaaaggccaaaggcacaatgtctctttatatatatgtaacttaaattgtaaaatataatgttcacatagaaatataatgtttacacagaaactgtaccacaatgtatagttataaaaattattttaaggaaatgtccatggagcctcccctcaagtgaagaaacagagcattggaatttcagaagcccgcttttcctttctaatcacaactctccctagaggaagtctccctctagacctagagattactataattctgactttatggtaatcattgccttgcttttctttaaagtgtttcacccaagtatgcatttctaaatgacatagtttgcctatttttgaatcttggtgtttg

SEQ ID NO: 296030 - DNA, 573 bp, Homo sapiens
cttgctctggaatgtgctcattgcccgagttgatgtggacagtggggtgtggtgcaggcaggagggtcctgggacagctgcattcaggcacttctcacttgtgcgacaggcattcggacatcacaagcctctctggaggaccatttcatcctaggctgaatgctcastgctgtatccccaagaccaggcagggagccagcccaggaagggagccaggcccacgtggggctcagcagtgcccctgagaggagtgtacctggtgtggggtttccacattacggcacctgatgggagctgcagaattgagtcagggtgggaactctggagtctggagcggggagcaggagttctccagccttaggggagctgatcttgatgcagattctttcttgggtaaacagatatttgtagggttagtctcattggactctcatatgagctgagtcagatactcagtcagcagaagcacttgagtcaagtctctgtgggtgattacttgagaggaagcaggaagggtcagttacgatattatagaagggaaggaggatcctgggcgctgcttattcgctccgg

SEQ ID NO: 296031 - DNA, 539 bp, Homo sapiens
tgaagctgacttatattcttccggagcttccattgtattagcaagtgtgcatttgtatagttttaagcgcttttgcataaatggtcttatttggtccttatcctatgataaaatgaacaagatgatactcaaggagaaaacatttagaacagttgtgattgtattcatggtcttcaccctagcagagtatagaagctagaagagctggagtgcatttctgtagtcagcaagaactgtgtgatgggttcatcatcttgctagggagcctgggggctaatatgtgcccttctgagacagattgcaggtttcccccagtagcaggtttcagtgggtgcatggctgccacacagcctgaagtcccagcatccttcaccctgcaaggctcatgactgagtgctggccaccacatgtgagcagatgcaacacaggcaccttcctggatgtgtcytgctgcctctgtttccccttcacagaggttagtggatgtggtgcactctctttcaccctatggatgagagcagtgtccagaggtggcagag

SEQ ID NO: 296032 - DNA, 509 bp, Homo sapiens
gtaaagaagcccacactgagaaagattttaatcaaattgccaaaagtcagtggtagagaattttgaaagaagaaagagaaaagcaacttgtcatataacaagggagctcccataagattatcagcagatttgtcagcagaaacattacagtacaaaagggagtggggtgatacagttcaagtgttgttaaaaataaaaatacacccagccagccaagaatactgtagctggcaaaaccatctttcaaaaatgaacaaataaagaccttcccagataaccaaagccaaagaagttcaycaccactagatctaccttgtaagaaatgctaaagagattctttgaagctgaagtgaaaggatgctaaatagcaatataaaagtatatgaaaaaactctctggtaaagggaaatatgtggacaaaaacagaatcctataatatagtaatggtggtgagcaaacaactttaaattctggtatagaattagacaaaagcataaaaataactaaaa

SEQ ID NO: 296033 - DNA, 510 bp, Homo sapiens
caattgcgttcttacacaccagcaaggaacaatccaaaagtgaaattaagaaagcaattccagttacaattacatcaaaataataaaatacttaggaatatgcttaaaatgtttaaatgatctgaataactggaaaactactccactgtcatgaatcagaagacataacattattaasatggcaatactccccaaactgatctacacattcaatgaaacccctatcacaataccagctgattctttgtaaaaactgatgagctgactctaagatgcatacaaaataacaggggattcaagccaaaataatcttgaaaaagaagatcaaagtaagagaactcacacttgccatttcaaacttaccacaaagcaacagtaataaaacagtgtggtactagcacatcaatgcaatcagtggcattaatcaatgacagatgaatggaaaagaactaagcgtccagaaataaacccatacatataaggtcaattgattttcaagaagagtgccaa

SEQ ID NO: 296034 - DNA, 510 bp, Homo sapiens
caattgcgttcttacacaccagcaaggaacaatccaaaagtgaaattaagaaagcaattccagttacaattacatcaaaataataaaatacttaggaatatgcttaaaatgtttaaatgatctgaataactggaaaactactccactgtcatgaatcagaagacataacattattaagatggcaatactccccaaactgatctacacattcaatgaaacccctatcacaataccagctgattctttgtaaaaaytgatgagctgactctaagatgcatacaaaataacaggggattcaagccaaaataatcttgaaaaagaagatcaaagtaagagaactcacacttgccatttcaaacttaccacaaagcaacagtaataaaacagtgtggtactagcacatcaatgcaatcagtggcattaatcaatgacagatgaatggaaaagaactaagcgtccagaaataaacccatacatataaggtcaattgattttcaagaagagtgccaa

SEQ ID NO: 296035 - DNA, 510 bp, Homo sapiens
caattgcgttcttacacaccagcaaggaacaatccaaaagtgaaattaagaaagcaattccagttacaattacatcaaaataataaaatacttaggaatatgcttaaaatgtttaaatgatctgaataactggaaaactactccactgtcatgaatcagaagacataacattattaagatggcaatactccccaaactgatctacacattcaatgaaacccctatcacaataccagctgattctttgtaaaaactgatgagctgactctaagatgcatacaaaataacaggggattcaagccaaaataatcttgaaaaagaagatcaaagtaagagaactcacacttgccatttcaaacttaccacaaagcaacagtaataaaacagtgtggtactagcacatcaatgsaatcagtggcattaatcaatgacagatgaatggaaaagaactaagcgtccagaaataaacccatacatataaggtcaattgattttcaagaagagtgccaa

SEQ ID NO: 296036 - DNA, 577 bp, Homo sapiens
tcttctgttgagctgttcctccgctgtatcctttcaagtgaccagcaatcctgaaaaatgagctttctggagttctgtaaactattggacatgacagagagtcatgggaaacccccactttagagtcagctgagtagaagcaagggtagcmtggatacctatgacatcaactctaccatcttaactaccttcaagtatagagttcaattgcgttaactacatgcaaactgttgtacaacagatctctaaaactttttcatctcgtaaaactctatatacagactgaaaaacccccctctcccccaccctcagcccctcgtgaccaccattctgctttctctaagagtttgctgtaaccctcaaagggttgggttgctcactgcttgtaaaaagaacccaaaataataatgaggtgtgactaaaagagagtgaaaaaatctactcttcaatttgtggagggaacgtactttttaaagacagggtttggaatgcagaagaggcagtggggcgaggcattgtcaagtggtatgtgacccaccctgatggctcatcttgaattattgttccacctggtgaa

SEQ ID NO: 296037 - DNA, 577 bp, Homo sapiens
tcttctgttgagctgttcctccgctgtatcctttcaagtgaccagcaatcctgaaaaatgagctttctggagttctgtaaactattggacatgacagagagtcatgggaaacccccactttagagtcagctgagtagaagcaagggtagcatggatacctatgacatcaactctaccatcttaactaccttcaagtatagagttcaattgcgttaactacatgcaaactgttgtacaacagatctctaaaactttttcatctygtaaaactctatatacagactgaaaaacccccctctcccccaccctcagcccctcgtgaccaccattctgctttctctaagagtttgctgtaaccctcaaagggttgggttgctcactgcttgtaaaaagaacccaaaataataatgaggtgtgactaaaagagagtgaaaaaatctactcttcaatttgtggagggaacgtactttttaaagacagggtttggaatgcagaagaggcagtggggcgaggcattgtcaagtggtatgtgacccaccctgatggctcatcttgaattattgttccacctggtgaa

SEQ ID NO: 296038 - DNA, 562 bp, Homo sapiens
aggagtaagtcattatttatcaataacactgaatgtaaatggacgaaactctccaatcagtttgagtacaattgctattagtatttctttaaatgttaggtggaattcagcagtgaagccattgggtcctgggcttttctctgctggaagtctttttattctggctttgatcttattgttattggtctgttcaggttttggatttcttcatggttcaaacttcacaggttgtatgtatttcttctagattttccaatttattggcatatagttgcacaatatgcctttattgtgcctttagtgagtagcctttagtgagcctttgaatttctgcagtatttgttgtagccatgcccagcttatttttgtatttttagtagagacagggtttcgctaggttggccaggctggtcttgaactactggcctccagtgatctgcccayctcagcctatcaaagtgctagaattacagatgtgagccaccatgcccagactctagttctttaaaatgcaccactgggttgtcagtatgatactagctatgaatctgttgcatatggc

SEQ ID NO: 296039 - DNA, 409 bp, Homo sapiens
tattaaatgggcacttatacaatcctagaagatacagaaaaaaaaggaaggaaattacatagacttcaacaatattcctggatcaaccacaaatgcttaattcttgactggtgtaggaaatgatgaagtaattattctttacacgaagaaaatctcaaaccttgctaaactgacttatagtcagaacatgtctttttcagtcacataatgattaatttaaattcttgctttagaaaatactttattccttaaatttcagcacaattttgataaactttgtctcacagaactgcttcacaactactgaacatcytaaaatgcaaaactcaatgcccatgttcagtcgacctaaagttatctaaaactgtctctaatagcatacagctgattttatgattttcaagaacat

SEQ ID NO: 296040 - DNA, 409 bp, Homo sapiens
tattaaatgggcacttatacaatcctagaagatacagaaaaaaaaggaaggaaattacatagacttcaacaatattcctggatcaaccacaaatgcttaattcttgactggtgtaggaaatgatgaagtaattattctttacacgaagaaaatctcaaaccttgctaaactgacttatagtcagaacatgtctttttcagtcacataatgattaatttaaattcttgctttagaaaatactttattccttaaatttcagcacaattttgataaactttgtctcacagaactgcttcacaactactgaacatcctaaaatgcaaaactcaatgcccatgttcagtcgacctaaagttatctaaaactrtctctaatagcatacagctgattttatgattttcaagaacat

SEQ ID NO: 296041 - DNA, 590 bp, Homo sapiens
ctaattgctcagcagggctccctcctagaagtttagacaacaaacttatgcacatgtggactgcaccatcagtgccctggttatgttggagtaaaagtrtagagaatttttaggaaaacaggcagaagtgtaggtatttttgctattctttgcttcacctatccacggaggtggataaagacacctgggaaggggaaaatgtgggctagcaaatagagaagaggctgctactaggctgggaagtgcctccctcatttacgactagccagagacactgaacttggctgtccaggcaagcttgggttctgggatataccgaaataaaccttggcctttatacagacttattcctcaagccaagttgtttcaccaacttggttctgaagatccagaccccagttggcatgaatccatcccccttagaccccagctggcatgaatccatccccctttccatcttgccatcttcagccctcccggtggagcggaggttctcacctaaatagagaagctaaatttctaccttctgattttaccttttccatgtgtgcatcaggcactttctccaaaagataagaatcatttgtgtt

SEQ ID NO: 296042 - DNA, 586 bp, Homo sapiens
tgcatgaaaatgtcgattctcaatagctgagattcccagacataaggggagtttgcaactaggtgctcactagaaagttgaaggtaatacraaagaacaggaaaagcttcttttagtgttgcaaatgtgcaaatagcatttgtctgctgtggggattcaggaaaaggaaacctgcccacttcaatggatacttccttcttatgcaaaaatcctaagccctggaggaaggcaactaattcttttgccaccagataatatgcaaagagccactgcttctatggaagagcagaaacaaaattgcctctccggtagggaaaacgctctggctctccagacattgcaaaaaacccagtgaaactgaagagctgaagataaatacatattttcattggctgaaaggccaagaaactctcttgggtaaagaatcatacaacaataacaaactgtgatctactaccactgaggcaggaataggagactcccctgcccaaaatcaaccagaaataatacaaggtactgtttggcttccccggagaggaagggcagcagtgctggagctagatcttggcaaaaacgaacaaacaac

SEQ ID NO: 296043 - DNA, 586 bp, Homo sapiens
tgcatgaaaatgtcgattctcaatagctgagattcccagacataaggggagtttgcaactaggtgctcactagaaagttgaaggtaatacaaaagaacaggaaaagcttcttttagtgttgcaaatgtgcaaatagcatttgtctgctgtggggattcaggaaaaggaaacctgcccacttcaatggatacttccttcttatgcaaaaatcctaagccctggaggaaggcaactaattcttttgccaccagataatatgcaaagagccactgcttctatggaagagcagaaacaaaattgcctctccggtagggaaaacgctctggctctcmagacattgcaaaaaacccagtgaaactgaagagctgaagataaatacatattttcattggctgaaaggccaagaaactctcttgggtaaagaatcatacaacaataacaaactgtgatctactaccactgaggcaggaataggagactcccctgcccaaaatcaaccagaaataatacaaggtactgtttggcttccccggagaggaagggcagcagtgctggagctagatcttggcaaaaacgaacaaacaac

SEQ ID NO: 296044 - DNA, 574 bp, Homo sapiens
tgaaccacagtgccccattagagcactcaaatgatcgaggaagaactttttccactaggcagccataaagaaatgtgtgcagaaattgttctcttctgtgcctttttaattttagtcaaatcttgttctatagttgatgcagtaataaaatatttctggctgacctgggtatctcccttagctgacaaaactctcatgtaaccaaaaacctctgttgttgtctcctcagagtagtccctatttcctgtagcagacatataaattcttcatccctacactagagctctgaaggagactcagaaactgagcatatattcatttttaatagtagaatagtaataatgatgatgatgatgatgatgatgatgatgatgatgatgatgatgtatgtgacaattccccaatactcccatgacccctattccaattggaatccttcctgcttaggaaggatcaaattcttgtgtattgtggcctcctccagagatctgccagttttcagctcatatggaaagaacactaatgatcatcatgcacattggttctgttacmtactaaaaaagtaatgccttat

SEQ ID NO: 296045 - DNA, 608 bp, Homo sapiens
tgtttattactgccagtgctaaacatcttcccaaggctctactccacttgcataaatactttgtacttgtatgatcatttatattagtaatcactttcaattttatccaacaaatacacaaactttctctagaaggtgtartactacaacagactctacaagaatggaatcacaatatattaaaaatagtaaagaattagcacttaagaaatcaatgttgtgttttgccaatgttgtgtttggatgtcaagaaattaattaagcaaccatacattaaagtcattagaatgcagaagtaagctgaactttttcctctgacatatgcatggtgcagatatcatgaggtttcattttagaaagctgatatgtaagaggcaaagagattccttgtcaaggactggtattcatatacacctgcaagaggtaaacacatacccttacttcaaccttatttcattttcagaactactatcaaaagaatagagccacatatttgtgaattatttagagttatcatcagatctcctggaactacatgccaataacataacatcaaaacttcctgagttatacagccaacgaacacattatctaaattaaattgttag

SEQ ID NO: 296046 - DNA, 590 bp, Homo sapiens
agtagccggctgagaaagttgctggaagttgtgcaactgctgcttaactttgaactgcgggattgttgtggctgctgcacctctggagacctgcccagcttcagcctcgaagaaggcgtttggaagcaggaaaagaaaaaaaaaaaagaaagagagagagaggaarggaggaggactctattgtgttctgtagttatttgcagacttaaagaactgccaaccccacaagcatggtaataccaatggaacgggagtttcactcgatctggaaatcccccctcccccgctttccacacccaaccacacaaggtgtactgaacacacataaaaggattaaaagtaaatatcccccaactcctggtcagctccagtctgtgaaaagtcatctgatcatggcaagcatgagggattgctgagaactctctttgccaactcattcgaccccagatcccctgccagggtgtcaggactttaaaatatattagggagagggaagctggaaaccggatcaaggtggactcacagaccacttagaattgttaagtccctgagttcacggtcttaagagtttcttccaggcccctgctcca

SEQ ID NO: 296047 - DNA, 590 bp, Homo sapiens
agtagccggctgagaaagttgctggaagttgtgcaactgctgcttaactttgaactgcgggattgttgtggctgctgcacctctggagacctgcccagcttcagcctcgaagaaggcgtttggaagcaggaaaagaaaaaaaaaaaagaaagagagagagaggaagggaggaggactctattgtgttctgtagttatttgcagacttaaagaactgccaaccccacaagcatggtaataccaatggaacgggagtttcactcgatctggaaatcccccctcccccgctttccacacccaaccacacaaggtgtactgaacacacataaaaggattaaaagtaaatatcccccaactcctggtcagctccagtctgtgaaaagtcatctgatcatggcaagcatgagggattgctgagaactctctttgccaactcattcgaccccagatcccctgccagggtgtcaggactttaaaatatattagggagagsgaagctggaaaccggatcaaggtggactcacagaccacttagaattgttaagtccctgagttcacggtcttaagagtttcttccaggcccctgctcca

SEQ ID NO: 296048 - DNA, 343 bp, Homo sapiens
aaagaacagcagagctgaaattcttctgattacacagatacttgactgtgagccaatttgtcgccacttacacggtaacctgtgaggaaataacatactagagagcttgttataatcaatcagtttatctgatttactcaaaatcccattctcaatcaagcaaataataataaaatagaacttcttttgtatggaaaagagagagaagaactcagaaataattagagctggccagagggtaggaccataatttgagtgagaatcttyggacaacaggttgtggcaaaagggcattgtgcaaaacaaagccatttacaacaaaaagtaggaaagcccccaaaag

SEQ ID NO: 296049 - DNA, 1088 bp, Homo sapiens
atatcaggtacttacatattgtggaccctgcatatgtttatagcagaatggttgagaacttggactcttgagctatactacatgtgtttgaagcacagttccaccacaaactgcttattcaaactctgggcctccgtgtctctatttgtaaagcaggatataattgaatcccatagagatgctgtaagaaaacaatgactccataaataccagctattattaatgtggagataaagtactgtattaccacaaccaggtgccagaaaacattcttattatttaccagcctttctgctgacttcattctcacaaaacaattcctgattataaccacttgtgtgcaatgaaagaatgtcttggcctgaacgtgtraaagcaaacactgtagtaaagatcttagtatatttttaaaaattgctacattttacttttattttttaaatcaacagataaawtggttcctattaagatttcttgcttctcttcattttgctttagttttcatgatttaaaactgtttctgttcaagtggttaatcagaatgtttgtttgttaggttagtcactgaggcaaaaactgtctatgtggaaattacaagggaaaattatgaaatttattcactatcatagttcactactaaactatagtaattatagtttaacaatttgcagttttaatatgtaatgatagagtgtttcattgaaattatttaataggaaaattctgagcctcttattgttacaatagggattttgttatttaaagcaatggtaactagagcaaatttattagtttttcattcctggaatgagacawgaatatttgaacatactcttttattgatatgaacataatttaatatggatgtataatttgtatatcatttcctcatgtaataaatatgtcttttgtttaaaattgcaaaaaggttttctagagagaatataatggaaatagtgacaattattcaaatctaaagtattttgaattcaattatctacattttcagaatgaatgtatagtaaaggggctcaattctctaatctcatataaaacaatgataaattctctcagaagatttaagcagt

SEQ ID NO: 296050 - DNA, 309 bp, Homo sapiens
gtgccaatctactctctctgtatgtatgttacaggaatcacacacactcacactaaaggccacaggtagaattcctctcgagctgcactgtagaatttggtggttagggytacatgcagaagtgtggctagtctaaattgagatgagttgtgtggacccaaaaaatctgagacaggtctcagttaatttagaaagtttattttgccaaggttgaagttgcgcgcccgtgacacagcctcaggaagtcctgaggacatgtgcccaaggtggtcagggcacagcttgtgtttatacattttagggagacag

SEQ ID NO: 296051 - DNA, 520 bp, Homo sapiens
ttgaattggcagaaagagcagaggacgcttgttaaaagcaggaaatccaaatattcatttactttgttttcaagttagtgatgtaaaccctctttgtccctcttgaatttcaggaaaatctgcrcagaggctttcaaggaaaataaagggtaagagtctagttcagctctctctggtgtgaagtggggttataaagccccagattgttaagtagtgagtggcaatttgtcagaagcagaaaagtccaaatcagaagcctgtacgcacaatgagagcctccagaaaaatgcagaattcttagggagacaattgaaatcattaagaagccatggaatgggcttgtgtgtcttgcaagtggggcagccttacaaaaggggtcacccagatgtcattttctggacagtagaggctctatcaatgaacacagcgtagtttccagcactttcttatgaaaatttgcaaacagtcatcaaagttgagataatgttataataagcacccatatactcactacctagtt

SEQ ID NO: 296052 - DNA, 1078 bp, Homo sapiens
aatgaacacagcgtagtttccagcactttcttatgaaaatttgcaaacagtcatcaaagttgagataatgttataataagcacccatatactcactacctagttctatcgttaacattttactctctctctccctctctctctctmtatatatatatttaattggccaagtgtggtgagtcatgcctgtaataccagcactttgggaggtggaggcaaggggatcacttgagccaaggagtttgaaaccaaccctggaaacatagaaagccctcatttatacaaaaaataagaaaaataggcatggtggcatgtgcctgtagttccagctacttgggaggctgaggtgggaggactttttgagcccaggagttcgaggctgcagtaggccatgattgtgccactgcactccatcctgggcaacagagtgagaccctatctcaaaaaaaaaaaaaaaaaaattacacatctatttctttatcaaatcccccatttattcataattcctcttatttttgatacattttgaagtaaattccatacatcawgactctctttttttaatctcataatttactatttattatttttaaatgtttctagagatatacagtaattaaacatatttgtgggatacacatgatattttgatacaagaatatacaatgtgtaagctgtatattcaatatacaatcagtgatcaaatcaggatatttattaggatatacatcaacttgaacatttatcatttctttgtgttgggagtattttaaatcttctttactagctwtcatgaaatataaaatattgttaactagtcattccactgtgttatcaaacactagaacttattccccctatctgcactatatctttgaacctataatcttattgatgatctttttatgtgatgaatcacttttctattgcaactttcaagactctgtgtttggcttttgacagtttgattatattgtgtctcagtgtggatctttttgagttcatcctacttggagttactgagtttcttgaatatttttacttatgtcttttatcaaatttgtaaagactttggccat

SEQ ID NO: 296053 - DNA, 563 bp, Homo sapiens
aggtaaggatgctgttcctgcacagtcatgaacggctgctgttcctcttgaaaaccacaacctctttctctagtagcatgaagtgagtgctgtttgggaatctcttttaacttagagagctctcaggcacagtattggcctgggcagatttctgtggttgctgctcagcaaagaatagacaggtctsacacttgtggagcaagcattgtatgatggctgcctcccaagcactttatccaggtccactcatcaaacaccacaacccaaaagattggggctatgaatataccctcactgtaataaaaacaagagaataagggagtttcagcaatttaccagctgacatgctgctagtggggagtaggactggaccataatcttaccatcactgcagttttgtccttccatgatctctaattgaacggttcatttgttctgtcatttcaactgtactataagcttctagaggtcaggaatgttttcatggtgctcattccagggctgcgggaaaccccagtgctaaagccaagccccacagctgactgctgagcctgtcctgtgta

SEQ ID NO: 296054 - DNA, 510 bp, Homo sapiens
ctgttcctgcacagtcatgaacggctgctgttcctcttgaaaaccacaacctctttctctagtagcatgaagtgagtgctgtttgggaatctcttttaacttagagagctctcaggcacagtattggcctgggcagatttctgtggttgctgctcagcaaagaatagacaggtctcacacttgtggagcaagcattgtatgatggctgcctcccaagcactttatccaggtccactcatcaaacaccacaacccaaaagaytggggctatgaatataccctcactgtaataaaaacaagagaataagggagtttcagcaatttaccagctgacatgctgctagtggggagtaggactggaccataatcttaccatcactgcagttttgtccttccatgatctctaattgaacggttcatttgttctgtcatttcaactgtactataagcttctagaggtcaggaatgttttcatggtgctcattccagggctgcgggaaaccccagtgct

SEQ ID NO: 296055 - DNA, 544 bp, Homo sapiens
gaatacgccacttcaaaatatgctactttggcatgaggattattgtgagctaaaggcagttgagaatcaacacacctaagaaaggttctctgccttccccttttctgcctaaaagcagagcctaaatttccctttgtgcaagtgacctaaaatacccccaaccccrgtccccacaccaggatggggagagcgactcttatcaccacagacagagaactagagctaggtttacataactgaaccttactaaaataactcttatcttccattagttttcccccacatatttcctagttctcttcccataatttattgagcctagaagcccaaaccctccttcctttttctagtcacttctccacaatttctaaccctttcttaaaattttatagtagccctcaagtctaacattctttgggtttttacttcttttctgtgaagcctctctgcacataacaatattacaaatattgtatgtcttttattaatcttttgtcagttaatttacagtctacaggtttgaacctaagatggcagagaaaaa

SEQ ID NO: 296056 - DNA, 544 bp, Homo sapiens
gaatacgccacttcaaaatatgctactttggcatgaggattattgtgagctaaaggcagttgagaatcaacacacctaagaaaggttctctgccttccccttttctgcctaaaagcagagcctaaatttccctttgtgcaagtgacctaaaatacccccaaccccggtccccacaccaggatggggagagcgactcttatcaccacagacagagaactagagctargtttacataactgaaccttactaaaataactcttatcttccattagttttcccccacatatttcctagttctcttcccataatttattgagcctagaagcccaaaccctccttcctttttctagtcacttctccacaatttctaaccctttcttaaaattttatagtagccctcaagtctaacattctttgggtttttacttcttttctgtgaagcctctctgcacataacaatattacaaatattgtatgtcttttattaatcttttgtcagttaatttacagtctacaggtttgaacctaagatggcagagaaaaa

SEQ ID NO: 296057 - DNA, 571 bp, Homo sapiens
aggagagagaggccatacaattattggtaaaattgtaattaaatgcatatttataagttcagtcttgattagtggcctagggaattgggaaactgggaaaacagaaggggacaatcagtgtattatttagagtaatgttagttggttagttggactaatacatcaaccccaaaatacacattagattaagacaagcttgtttcctgctcatattgcagttcttagtagttcaggtcatttggggagtttggctccatgcagccattcaggaaagaacctggagcctcatcacacatgagaagtgtttatagaccagcccagtaattggtacctatcactttcagtcacattccattggctaaaactcagtcatgttgccccatctaattgtaaaggagactgggagatactgtctagctgagtatacaaaaggcagaatagaacatgaagtctggggtgatgccagcagtctcggtcctagtccatcattctgctagctccccaaatatccaytcatatccttttgtccacctctgctcacattctactggctaaacacagtcatgtgact

SEQ ID NO: 296058 - DNA, 587 bp, Homo sapiens
tgacttcagaaaggtccattcaaacactgttttcccagagcattgatttttcacttccaagtccctgaacatccagtgatgccattgggcgtgacctctcactcaatgtggttccatacctctggcccctctccttgcaggtatagtgaacaaacctgggaggacccccctttccactgcccttgagktcactcccctgtggtgctgtagagctgcagctgctggctttcaaagatgccagcagaaccatatgaaaatgaagtcaaggttttttcttcttcttcttcttcttcttcttgttcttcttgttcttcttcttcttcttcttttcttcttcttcttcttcttcttcttcttcttcttcttcttcttcttcttcttcttttcttcttcttcttcttcttctttcttcttctttcttcttcttctttcttcttctttcttcttctttcttcttcttctttcttcttctttcttcttcttcttcttctttcccctggtcactgggaacttcctgttgggccacaggtgtgagttgtggtaaaggtatcagtgcaagagaaggaggtgcacagaagttgaagcca

SEQ ID NO: 296059 - DNA, 645 bp, Homo sapiens
gtagaaagactgaaaaatgatcaaacataataactataacaacttttcaagatacagacattaaaaaaagatataaagagaaacaacaaaaacttaaaaagtgggaggacgacacaaatgtagaatttttattggttttctctttatttatgcaattggtttaaaataatgaattgaagatattatttgccaacctcatggtaacctcaaattgaaaaacacacaacaggtacacaaaaagtaaaaagcaagaaattaaaataccaccagagaaaatcactttcactaaaaggaagacaagaaggaaggaaagaagaaagaggagactgcaaaagaatcagaaaacaacaaaatggcaggagtaagtccttacttatcaatagtaacactgaatgtaaatggcctgaactctccagtcaaaagacacagagtggctgaatggataacaaaacaagacccaatgatctattgcctacaagaaacayacttcaccaataaagagacacatagactgaaaataaggagatagaaaaagacattccatgctaatggaacccacctcccaactaaaagcaggggtagctacacttgtatcagataaaatagacttccagccaaaaacctataaaaaaaagacaaagtagg

SEQ ID NO: 296060 - DNA, 1195 bp, Homo sapiens
aacaattaatgagatcaaaactgtaataaagtttcccagcaaagaaaagtccaggattcaatggctttactgctgaattttaccaaacatttaaagaagaactaataccaatcttactcaaaccattctgaaaaataaaggaggagggaatacttccaacctcattctacaagccgtcctgataccaaaaccagacaaagacacatcaaaaaagaaaactaygggccaatatctttgatgaatattgattttaaaaaatcctcaataaaatactagtaaattgaattcaacgacacattaaaaaaccattcatcacaaccaagtgggatttatccctgggatgcaacgatggttcaacatatgcaaatcaatcaatgtgatacattaacaaaatgaaggacaaaaaacatataatcatttcaaccgatgctgaaaaagcatttgaaaaaattcaacatcatttcatgataaaaaccttcaaaatagtgggaataaaaggaacataattcaacacaataaaagccatatatgacagacccatagctagtttcatactgaatggagaaaaattgaaaacttttcctctaagatctggaawaacaattaatgagatcaaaactgtaataaagtttcccagcaaagaaaagtccaggattcaatggctttactgctgaattttaccaaacatttaaagaagaactaataccaatcttactcaaaccattctgaaaaataaaggaggagggaatacttccaacctcattctacaagccgtcctgataccaaaaccagacaaagacacatcaaaaaagaaaactatgggccaatatctttgatgaatattgattttaaaaaatcctcaataaaatactagtaaattgaattcaacgacacattaaaaaaccattcatcacaaccaagtgggatttatccctgggatgcaacgatggttcaacatatgcaaatcaatcaatgtgatacattaacaaaatgaaggacaaaaaacatataatcatttcaaccgatgctgaaaaagcatttgawaaaattcaacatcatttcatgataaaaaccttcaaaatagtgggaataaaaggaacataattcaacacaataaaagccatatatgacagacccatagctagtttcatactgaatggagaaaaattgaaaacttttcctctaagatctggaa

SEQ ID NO: 296061 - DNA, 611 bp, Homo sapiens
aaattctcacaacctccggcaactcaaaaacactaggggtgggcccggtaatctggtttacaaaactgtgacagccaccctccaaactgactccataatgattcgtgcctgctattcatgcctttgtatagtttcctcccataacaatggtgctgacttgtgtataacaaagataatgtagcagatgtgttagcttatgacatcataaaaacattgggccttcctccttgctctttctcagatcccccgttctctggaagccagctgccatgttgtgaggatgcccaagcagtgctatggagagasgttcatgcagtaaggtctcttgtgctcagctatgcaagtgagtcatcttggaaacacattatccagcctgaatccagacagtttcattgtaaccttatgagacactgtgagccagaatcatccaaccaatcttctcccagattactgacccatggaaattgtgtgagagaataaatgcttattaatctttttagtatctaacttttgctttgcagcaatggtttactagcatacaaaccttttgtttgactctgacacatgctaaattttgaaaaacattgagctaaaacattcattcattcacc

SEQ ID NO: 296062 - DNA, 565 bp, Homo sapiens
acattccttttgtggctctatggcaggttaaaggtggacacagattctstgaccctccacccagagagaggcagattctgtgtctccccctattaaataaggacaggctcaatgactgcttggactagtagaatatggctgtggtgatactatgccagttaccaggcccaggtctagcattttccactttctgcctctcaggacattcactctgggggaagccagacaccagtgaagacatatccctaagcttagcccagcatgcatcgaggaagcccaagctaggaaagtccacgtggaatgagagatacccagccagccccaagctgttccagccgtcccagccatcccagccatcccagcccaggcaccaaatgtgaagcgcgaagaagtcattctggatgtcccgtctgttgcacttcccgatgactccatctccagccaacatctgactgcaaccccatggaagaccggataggagagccggtctagcccagtcagtcaacggtgagtgataatgatagattgttgttctaaaccacgaagttattttttatttgttttg

SEQ ID NO: 296063 - DNA, 622 bp, Homo sapiens
tcaaattcttctgagagaaatgacattttccaaaaggcacaatttattacgagttgtcagatraaactatgaaatgtaaacgctgccacagaggaacattacactgcagcttaaggttaatgcagctaacttcttattttgttcaagggcaaagagaagttaattctaggtcttaccactttaacgatgtccctcttaagccttgtggttgacaagctttattgcccattttcttgactggagagtgtttttctttcttttttttttttttttcacattttgattgatgtgtctgctattaattgccagctggccaagttttctgtgggtctgagacacactcacgtcctttttttgtgtcaaagagttgtctggactaatgctaagtctaagtatttattttaatgttgaaataataaagaagatttagcatgtgagctgtggtgagatactcgtgtatcttaatggccttcagcagtcattttctttcgagaatcattttttctaaaattagctcccgtcacatatccaagaaaacatccagtctgcagcaaagaggaagatacctccctcagctggaattcttttatctcttaacacccttattggcactttttacaaa

SEQ ID NO: 296064 - DNA, 397 bp, Homo sapiens
cgttggactttgcatatatatattccataacttttggggggcccattttgattcacttactgttttttcaaattacttccagttttgattggtacccagaggaaaaatcagtttttcaagtgatgcagctgcagtaaaagaagctgggttcatcaacttacaaactggcagagccaactaarggcaaagtacccaaacagcttggctgctgtctgaagcccgcagtgagcccaagtggagaatgagagcctctgcattccatcaggaattaccttccctttgagaaaacatttcttagtttgtaactaggctctgtggagactcagcatctgactatatcaccaggtgctgtagacgctgttggctgtcaaaccaattcctatgtgctcaaaccctt

SEQ ID NO: 296065 - DNA, 397 bp, Homo sapiens
cgttggactttgcatatatatattccataacttttggggggcccattttgattcacttactgttttttcaaattacttccagttttgattggtacccagaggaaaaatcagtttttcaagtgatgcagctgcagtaaaagaagctgggttcatcaacttacaaactggcagagccaactaagggcaaagtacccaaacagcttggctgctgtctgaagcccgcagtgagcccaagtggagaatgagagcctctgcattccatcargaattaccttccctttgagaaaacatttcttagtttgtaactaggctctgtggagactcagcatctgactatatcaccaggtgctgtagacgctgttggctgtcaaaccaattcctatgtgctcaaaccctt

SEQ ID NO: 296066 - DNA, 538 bp, Homo sapiens
atgcatatgcatatctatatatcttattccattatttttatagtgtccccaaattttgtcttttcatcaacttactstgaaattttgaaacaaattatagtgtacattttgaacatcagctttaataaagtttctaagtgccccatttaagttaatttctgacttattaaaacttccctaatgaatatttttaaaatacacatgcttaataagacatattttctgcttttataggaacgttttgagagagttgatttttctctgtaacttatattagcagtaattttatgaacttagtacatgtgcttgatatattgtcagtgttattgaacaggctggttgatagtttgtcatcaatgtggtgctgtatttctagaaatattaagaacttaaccaattcaattttgcacttggaaaaaaaatgagttccagaggcaaaattccatgtcctacataagaatatccaggccttcaggaatcctaatcccttcacagaaatggtgacagctatgtttttatcccagccccatgtccacag

SEQ ID NO: 296067 - DNA, 480 bp, Homo sapiens
tcaaattcataaattcataaagaattacaaggaacccagaataaccaaaacaatcttgaaaatgaaaaagttgaaaacaatttcaaaactaactacctgttacagtgataaaaagagtatggtactggtataaagatagacatatagaccaatgaaatagaattgagactacagaaataaacccataaacctayggctaattgatttttaataaggatgccaagacaatttaatggggaagactgtctcttcaacaagtagagctgtataactgcatatccataaaatatattaatgatctacctgtaagtgataaaaaccaaaaagcccttaggagaaaacatagtagtgaattttcataacctgagatttggcaatgaattcttaaatgtagcaccaaaagcaagtgcaacaaaaaatagataagttggacttcatcaaaattaaaaacttttgtttaccaaggtacattagcaaaca

SEQ ID NO: 296068 - DNA, 555 bp, Homo sapiens
aagccaattctcaaattcataaattcataaagaattacaaggaacccagaataaccaaaacaatcttgaaaatgaaaaagttgaaaacaatttcaaaactaactacctgttacagtgataaaaagagtatggtactggtataaagatagacatatagaccaatgaaatagaattgagactacagaaataaacccataaacctacggctaattgatttttaataaggatgccaagacaatttaatggggaagactgtctcttcaacaagtagagctgtataactgcatatccayaaaatatattaatgatctacctgtaagtgataaaaaccaaaaagcccttaggagaaaacatagtagtgaattttcataacctgagatttggcaatgaattcttaaatgtagcaccaaaagcaagtgcaacaaaaaatagataagttggacttcatcaaaattaaaaacttttgtttaccaaggtacattagcaaacaagttaaaagacaatctacagaatgggagaaaatatttgtaaacatctgctaagggtctatctagt

SEQ ID NO: 296069 - DNA, 539 bp, Homo sapiens
gctctccttccaacttttgagaaatttctttctaaatgttattaagtacacaatgcgaagatatcagtgttagagaaacacggatttattatgccccttacaaaatttgaaatttacccttgcttggtcccagccacctcccacccctcccattgaattgataggggaacagttgcaattcaaaatacttggcatctacctagtccacaggtgaaatacatttaaaggggatgaartatgacctgggcagtcctaaggctttgcaggagttggtgatctggtccagctccagcattggtcctagccctggtgaaagcagggtcccagcagttgtgactattatcttcactttgccacctgcaggttcctgattatcccacagtacccagggcctactggttggttgggagaattgttctgtgtatggaaatgacatcagaggcatgctgcccactgcggaggacttctatctggacggaactgttctgtgccatcctggcttctgctgccctctgtggtcttgtctagggaagaagtcc

SEQ ID NO: 296070 - DNA, 540 bp, Homo sapiens
tagcccttccaactgaaggaagaacattctttttcctatgtggcttatctctgggaaaattttatcttccaaattacatggcttgtgagaaaccaacaaaaatgtttaagatttaaactttctcttagtttattataaataggatacatatggaaaacatacttatgtgtgtacatatatgtgaatgtgaatgtttgtgtaaatgttctttatgacaayagcagacatcatgctcaacatgcaagaacctctactcccttggtccctttggtgaaatgcagaatgcatttgactgttgagactaacttttgagattgtcttctcaggcaggtccttcggggaacctggccccaggctgatgactggaatcctacatattggttagctgttctctgtgatgacagagatgaaccacttgagatgttttaggtcagccagaagttcaccaaatactataggttattcaatcttttttctggaaagcaggtgactatttggaattgccctgaattatagtgtcttttaatcactatagacata

SEQ ID NO: 296071 - DNA, 447 bp, Homo sapiens
acaagccagtacattttactctaaatcttgaagatgtattttaaaatattccagtttattaaaaataatgctggacatataatatttatatgaaaaaaaacacactttaaaaatgaaatttgtgtccaggcatggtgacttgcacttttaatctcagcttctcaggaggttaaggcaggaggatctcttgagcctagaggagttcaagattgcagtgagctatgattgttccagtgcatttcagcctggggacagaacgagacctcatctatttacaaaaaaagaaatctactaamtgagtttaattttatttggcatttaacttgtagcctctgaattgtgaatttggaaaaaatttaatattgcaagtggacattgatataggactcttagcccaaggaatctctgttgtttctagatgatatatttctatcccaattataatat

SEQ ID NO: 296072 - DNA, 541 bp, Homo sapiens
acctttcttctgcttgatcaattcagctattgatacttggtatgcttcatgaagttctcgtgctgtgtttttcacctccatcgggtcatttatgttcttctctaaactggttattctagtaagcaattcctctaaccctttatcaaagttcttagcttccttgcattgggttagaacatgctcctttagcttggaggagtttgaattaacccccttctgaagcctacttctgtcaattcatcaaactcattctccatccagtttttttcccttgctggtgaggagttatgatccttgggaggagaagatacattctggttttaggaattttcagcctttttgcgctagtttttcctcatcttcatggatttatctacctttgttctttgcrgttggtgacctttggatggagtttttctgtggtcaccctttttgttgatgtagatgctattgctttctgtttgttagttttccttctaacagtcaggcccctctgctgcaagtctgctggagtttgctgggggtccactccagaccctgt

SEQ ID NO: 296073 - DNA, 520 bp, Homo sapiens
ttagggcagtaaggaaaaagggccaggatgggctgagatgagaagataaacagattacttgtttaatatggatattaaagcagaattcctcaggctttgtgattcttggtgtcatctcagagacacacaatttttagatggtgtttttcttcccctttgctgtgctattttcctgtgtcatcctagttagttttatgttcatagtctgatgatttagccacaattagggtctcactsttctactcttcttttaatttttatcactgacatttcaagagcagattcaggtttccggcatttggcgggggtgcctcctaagtgtgttagactgtaaaactgctgaaggcagcaaaagttttgtgcagtcaatcaaagcagggagggtataactatgttactgttttcacttttctctttttctagttccatgcaacacaaaataaactttcagacatacttctaagtttccatatccattgtatatggttgagttttagccaaaaccatttgtgagggaagg

SEQ ID NO: 296074 - DNA, 520 bp, Homo sapiens
ttagggcagtaaggaaaaagggccaggatgggctgagatgagaagataaacagattacttgtttaatatggatattaaagcagaattcctcaggctttgtgattcttggtgtcatctcagagacacacaatttttagatggtgtttttcttcccctttgctgtgctattttcctgtgtcatcctagttagttttatgttcatagtctgatgatttagccacaattagggtctcactcttctactcttcttttaatttttatcactgacatttcaagagcagattcaggtttccggcatttggcgggggtgcctcctaagtgtgttagactgtaaaactgctgaagscagcaaaagttttgtgcagtcaatcaaagcagggagggtataactatgttactgttttcacttttctctttttctagttccatgcaacacaaaataaactttcagacatacttctaagtttccatatccattgtatatggttgagttttagccaaaaccatttgtgagggaagg

SEQ ID NO: 296075 - DNA, 444 bp, Homo sapiens
gactaggtccacatgggggcagtacagaaggcaatgcgttgtcagagtctagatgtgttttggagttagggttatctgggtttgctggtggttgggattggatgtggttgtaagtggaaaaaggaatcaagaaaaacaccagagttttagacctgggcaactgagtgactggccatgctatttacgggatggggaagactaaggaaggaaagaagaataacaaatatttgtttggacattaagtttgagattctcagaacacatttaagtggcratatcacatagtttattgattatgtggatctgcagtccaggggagaaaccaagggtatagatatcaacatcagtatatagagaacacagcacaattataactatgcatatgtgtagcagatgtgtattttccatccacttccaaaagtattcaaaaaatggaactttaac

SEQ ID NO: 296076 - DNA, 507 bp, Homo sapiens
attctgaaatgcaattttgtttgggggataggagaaagagaaggtagaaggaaggtactgggtgttttcatttgtttgtactaaaacatgccctggtcaatgaaacctaaaatgattcatgctagatgtgcaacttgtaaagaattaagaggtraggtagatggatcccccttaaattttgagaaaatcagtgatgcatagagctcatgccacccaacgtggcaacgcacatgaatactaagttcaacctcttgtagtggatggtcagggacattggtgataacaaagatattcatgagacaactggggaaatttgaatgctgactggatatttgatattaagtaatgatctattattttaggataaaggtattgtggttactgatatatgctgaagtatttatgagagaaatgatataatacctgggatttccctcaaaatagtcaagcttcagatggggggaatggaagtgtgtagataaaaccagactgcgtatgtgctgataa

SEQ ID NO: 296077 - DNA, 536 bp, Homo sapiens
gtggggttagattaggtagtggttctcagtcctagccgcacaacagaatcatctggggaacttttgaaagtactgatgcctgcacacagatcaactgaattagaatctctagggggtaaggccagggtatgtacagcccagtaaccaaactttcaaatacagtcatcccccagtatccatgggcgatcagttccaggatccctgtggataccaaaatccacaatgctcaagtcccttacagaaaatggcctggtattggcatagaagctacacayatcctcccatatgattcaaatcatctctagattacttataactaatacaacgtcagcgctataaaactagttgtttagggaataatgacaaggaaaacaagtctgtattgtacatgctcagtacagatgcaaccatccactcttttcaattttccaccccaggctggccgaatccatggatgcagaacccacaaatacagaggactacttccttgtacacactaacacaagtaacagatgagaagggggaaaatggcatca

SEQ ID NO: 296078 - DNA, 600 bp, Homo sapiens
ccaccatttttcttcttccatgtcagaacacaacaacaaattagactaagaactaaagtaaagcctgtctcatctatgtgcttttaaaagaaatgggtatttcagataagttaattttccagatasctgaaggttaagttcccttctgttactttatcattggccaacaacaattcaactactgctactgttttcaagatgattgtaaacaactgcaaacacaggcactagactgcatgccagcaatcatcagaagatgatcctctgggtaatcagaaccagcatgcttaatttcttttagattgccattgtaacagaaacacaacatttaagcattttctagagaatgcaggataaatccgtagctttcgtgcttgagaaatgcaattgtaagcaaaaaacattttgagaaatgtggtctattaattaatcactgctctttcataaatatcactttataaaatatattcaagacattattcaacatgtgttgtatattaagtatttccactacacagacttattccccatggatctgtgctgagggaggaaaaatttaaatgaaaagcaaaagtttgtagttctcaaattgcacctaaa

SEQ ID NO: 296079 - DNA, 600 bp, Homo sapiens
ccaccatttttcttcttccatgtcagaacacaacaacaaattagactaagaactaaagtaaagcctgtctcatctatgtgcttttaaaagaaatgggtatttcagataagttaattttccagatagctgaaggttaagttcccttctgttactttatcattggccaacaacaattcaactactgctactgttttcaagatgattgtaaacaactgcmaacacaggcactagactgcatgccagcaatcatcagaagatgatcctctgggtaatcagaaccagcatgcttaatttcttttagattgccattgtaacagaaacacaacatttaagcattttctagagaatgcaggataaatccgtagctttcgtgcttgagaaatgcaattgtaagcaaaaaacattttgagaaatgtggtctattaattaatcactgctctttcataaatatcactttataaaatatattcaagacattattcaacatgtgttgtatattaagtatttccactacacagacttattccccatggatctgtgctgagggaggaaaaatttaaatgaaaagcaaaagtttgtagttctcaaattgcacctaaa

SEQ ID NO: 296080 - DNA, 1163 bp, Homo sapiens
ccaccatttttcttcttccatgtcagaacacaacaacaaattagactaagaactaaagtaaagcctgtctcatctatgtgcttttaaaagaaatgggtatttcagataagttaattttccagatagctgaaggttaagttcccttctgttactttatcattggccaacaacaattcaactactgctactgttttcaagatgattgtaaacaactgcaaacacaggcactagactgcatgccagcaatcatcagaagatgatcctctgggtaatcagaaccagcatgcttaatttcttttagattgccattgtaacagaaacacaacatttaagcattttctagagaatgcaggataaatccgtagctttcgtgcttgagaaatgcaattgtaagcaaaaaacattttgagaaatgtggtctattaattaatcactgctctttcataaatatcactttataaaatatattcaagacattattcaacakgtgttgtatattaagtatttccactacacagacttattccccatggatctgtgctgagggaggaaaaatttaaatgaaaagcaaaagtttgtagttctcaaattgcacctaaawggtaagggtttgtctttcccatcaacaggacttccttagccaccaccactatctgagggattccagagtatttgatccactaatttggaattccacgtaatattgcatgtgacctaggaactgattttatagcttatgttaaaggaagtgcaacaatgagcacataaccatgggatccactggtacattctgaaccatgcagaagctgccwgcctggtatgacaatggaatgacctttttaaagtgcaaaagatgtacaagcttggagatgctccctgggcaactggagtggcattctccaggactcagcatgtgccctaaatccatagccattatatggtgctgtgtttgcaaaagatagaatacatggttatggaaatgaaagggaggaaggagccccaattataatcatctccagtgacctacttagagaattcgtgttttccatcctccaactctaggctctgtatacctagaggtcccagttcccaggagggcaacatctccaccaaaggtgacagcaagagtcgaactttaaactacaaatagcctgtcacgctag

SEQ ID NO: 296081 - DNA, 562 bp, Homo sapiens
ggtaagggtttgtctttcccatcaacaggacttccttagccaccaccactatctgagggattccagagtatttgatccactaatttggaattccacgtaatattgcatgtgacctaggaactgattttatagcttatgttaaaggaagtgcaacaatgagcacataaccatgggatccactggtacattctgaaccatgcagaagctgcctgcctggtatgacaatggaatgacctttttaaagtgcaaaagatgtacaagcttggagatgctccctgggcaactggagtggcattctccaggactcagcatgtgccctaaatccatagccattatatggtgctgtgtttgcaraagatagaatacatggttatggaaatgaaagggaggaaggagccccaattataatcatctccagtgacctacttagagaattcgtgttttccatcctccaactctaggctctgtatacctagaggtcccagttcccaggagggcaacatctccaccaaaggtgacagcaagagtcgaactttaaactacaaatagcctgtcacgctag

SEQ ID NO: 296082 - DNA, 623 bp, Homo sapiens
tgaaaagcagtgtgttaattatcctttcaaaaggctggaagacgtataatagataggtagtagagtggttaaacttgagctttgataggctgggttcatgctacttcctagctatataacctcaggtaagttctaaaatctctttaagcttttttttcttttctgtgaaatggtgataatgagtgtatctatctcagggttatgagatttaagtgagacaatgcatggaaaatgccaagcacagagcctggcatgtatcatctcattcaacatgctggccattattttgcgtgcatgcacaatatgatgacttaggacaccttggttgctctatgcaattgttgaactgcgtgcagaacagtcttttctccttttaattttctggcctgtaattgctccacactggcttcagcacttgttgggtgtcctttcttaacaaattagtgatgattggacaaccaatagaaaaggtgagtgatggcttaagatatttaattataaaataaagacttggtaccttagaattgaagtgatccttggaggttatgtagctcaatagtcctygaaacatcttctgtatattacttcaaggtaaaacaagagacaaacaataacaacaaaaa

SEQ ID NO: 296083 - DNA, 513 bp, Homo sapiens
tggctttagcattgcttttgagttttttatttatgctatatatacatatagcatatatatgtatatatgtatatagcatatatatgtatatatatacatatgctatatatacatatagcataaataagcttgagtgtgtgtatgtgtatatataaataatatatattatataacaacacagtagattatgaagggaggaagaaagggagggaggaagggaggaaaagagagaagaagaagggcagctatgatgctgaaactcaagttgaaaccaaagcacggacttagtgttcactccataactttctgtacccagtcaastctgatagaatgtgaccccacctgttaatgggaagagctattactgtttggtttatgcttgccgcaacaacaaatgaatctcacatgtacatagacacatgtgcagtctcacacaagcacacttacagacaacaggtcataattccccttcagcattaattccaagaattgctacactgttaaattctgtct

SEQ ID NO: 296084 - DNA, 1195 bp, Homo sapiens
gcatttttgcccagtgcttggcacatagtgagcattttgtgaatggtaattatgttagctatcaaattatgctgggctgcttataattccctaacaaatgttatctaactgtttcttctgtttcagatgttctcagcctctccctcttgcccttttttgtttcaataatttctgtaccttcttcaaaacccaacacagacatcatcttcttggggaagatttccttgtactctctcttcttccttccccacctgtttcccagttattcggtccttcttctgtattacctacttaccatctatacatatctctggtgtggtataatcatgttgtgtcacagtctgcttacatttcttttcccctacgagctccttcagggcagggactatgctcgatatctaatatatagaacgccctcaagaagtatttgttcaatgtaattgaattcaaactgagtatggtgaaaatatagagaaataagtatttaaatctactcaaggagacaaagaaaaatcttcaagaagtgggtarcatcttagctcatcttcaggtataagtaggatttagwttcccctcttcttgtttttctttggaacgaatgttccaaggcgggcatgtgaaagttaagawccttagcttagcaaaagagacctttcagtattagctcctgtctacctctttagcttcaatctcaatcacttacattatacttcagctatgccaagttccttgcaattcactgaatgtgccagtctctgtcatgcctctatggctttctacttgccatttctatcacccagcatggcctttgttgagtctcccatggcaccctgtgcactaatttctcatagcactgggctacaggaacacaaagaggacaaccagctggctgggggaatgttttaagacttctctgtgggcaagacaaggagttcactatgacttgagtgtgaaaaaaagtttcacagaaacagagaaggaagtgggaagtggcaggaaatgggtgggctaacacttaccttgttgtctgctctctccgttaggattatattgacggcaagtgggaaaacaaattgcagtggcttatgtacagtagtttatttctctctcaaatgcaaattagcccaggcaggaagtccagggttaatagggtggttctattccaacaaagctcctggctcctttcagttcataa

SEQ ID NO: 296085 - DNA, 481 bp, Homo sapiens
ctttttctctggacttcttaagtttcatacttaattcaattattttaatctttctgtttatttatataaacagtattcagaaccataaattttccactgagctttgcttttattgtaccatgtagagtccgatactattttccacatggggaccaattctctctgatttcctccttgacccaagaattatttaagagtttctaaatttctagatgacaggttagttttgtttctagttttagttttattgcattttgatcagagaatgttgcctgtaatatcatcttttgatctatcactagctgagagaggcctagtaagttcccttctactgataarttttttgtaatttctggaggctttgcttcctgaatttcgaaatggatatttagtccacagaaagtcatgagagttcttcattgtggagtgtagcttctatcactttggtgtgctttttttgacttgtttacagctttttgag

SEQ ID NO: 296086 - DNA, 481 bp, Homo sapiens
ctttttctctggacttcttaagtttcatacttaattcaattattttaatctttctgtttatttatataaacagtattcagaaccataaattttccactgagctttgcttttattgtaccatgtagagtccgatactattttccacatggggaccaattctctctgatttcctccttgacccaagaattatttaagagtttctaaatttctagatgacaggttagttttgtttctagttttagttttattgcattttgatcagagaatgttgcctgtaatatcatcttttgatctatcactagctgagagaggcctagtaagttcccttctactgataagttttttgtaatttctggaggctttgcttcctgaatttcraaatggatatttagtccacagaaagtcatgagagttcttcattgtggagtgtagcttctatcactttggtgtgctttttttgacttgtttacagctttttgag

SEQ ID NO: 296087 - DNA, 481 bp, Homo sapiens
ctttttctctggacttcttaagtttcatacttaattcaattattttaatctttctgtttatttatataaacagtattcagaaccataaattttccactgagctttgcttttattgtaccatgtagagtccgatactattttccacatggggaccaattctctctgatttcctccttgacccaagaattatttaagagtttctaaatttctagatgacaggttagttttgtttctagttttagttttattgcattttgatcagagaatgttgcctgtaatatcatcttttgatctatcactagctgagagaggcctagtaagttcccttctactgataagttttttgtaatttctggaggctttgcttcctgaatttcgaaayggatatttagtccacagaaagtcatgagagttcttcattgtggagtgtagcttctatcactttggtgtgctttttttgacttgtttacagctttttgag

SEQ ID NO: 296088 - DNA, 481 bp, Homo sapiens
ctttttctctggacttcttaagtttcatacttaattcaattattttaatctttctgtttatttatataaacagtattcagaaccataaattttccactgagctttgcttttattgtaccatgtagagtccgatactattttccacatggggaccaattctctctgatttcctccttgacccaagaattatttaagagtttctaaatttctagatgacaggttagttttgtttctagttttagttttattgcattttgatcagagaatgttgcctgtaatatcatcttttgatctatcactagctgagagaggcctagtaagttcccttctactgataagttttttgtaatttctggaggctttgcttcctgaatttcgaaatggatatttagtccacagaaagtcaygagagttcttcattgtggagtgtagcttctatcactttggtgtgctttttttgacttgtttacagctttttgag

SEQ ID NO: 296089 - DNA, 995 bp, Homo sapiens
tcttgcatctggccaatatgttttggattattttttcttatagtttgccacagagttcacctatcacagtaaaatctttccatgggtcctatagaagattgctgccatgagccttagtaaaaggcctttttaactccaacaaattacaatctttagttctatcttatctctaacattatttgtctattctcaaaaaacagtcaattggagactrgcaaaaatgaatttccctccccaaaataacacgaattacaacaatgataataataatggctaatacttttcaagcacttactatgtgaagtttctgtgtatttgatatatattatctcagttaatcctcactataattttaggtaaatactataattgttgttattataattattattatcataatcctaatttatagattaggaaactgagacaagttgcataagaaaagtaaggttatgaaagttttaagtggtggaacagataggatctcaggtctaactccaaaaactacatatacccttatccattatgctgattctccctaaggccatgcagattacatgcgttccattgattaataattgtatgctctatcatggattctatatcataattgtatagaagcatacattactggtctagttcccatagtacacttcaagcatcagcatactgttactgawattgcttctctgaagattctatttccatgttcaaataaataattacgctctctctttctctctctctctctctctctctctctctcacacacacacacacacacacacacacacacacwcactcaccaggaagaacagactttgaagacttcaaagttgagtgattatgatctttggaaataaagtcactgcctctgggagaaagttgttgacaactcttggtcaatgtggcttttcctcaaaatgtctggtttctgatttctcattaacactgccacatagtccttctcattggtctctttgtttgggccagta

SEQ ID NO: 296090 - DNA, 1076 bp, Homo sapiens
tttaagagaattatgagtcttggctctggggaagtgctttgagatgagaaaggctatgctcccatctcaaccaagcactttgttagataaacagtagagaagacacttaggggcagaaaggacacgagcctgggygtgtccaacatttagtgtgacctacagcgagtcaggcattgaggtatctttgtatgcatgaccctggtttcttccatgcagcaaaaacctgcttcttctccttgagttctctgacaccgactgcctgttctgttatttacttgctgtgtaattttagggaagctcctttatttccatccaagtttttagtttccttatcaataatatgggatattgataaacacctcatcatttttatttattttgataaggattaaatgaaacatattaaataaagcaactagtatggtgactggcacaagatacacacttcatatatgatagctgccagcaatctgctagtggcgacaggagcagcaatagtggtggtggtggtagaagaaacagtactggtggtaacagtagtatgatwatcaggacagaagtgagggctcaaagaaaatacctaattcccagagaaaatgtggaattgtaagaagtttcctagctcaagagaagtgaccaagatcaagttcaaacatccctgtgcgcaccttgtatgaccctgggtaaaaccgctgggccaatttcctcawatataaaaggaaaacctgccctaacaatcttacaggggtatcatgagaaccaattgcaatgacacatatataaaaattgtgattgcaatatggaccagataagacacctttgaccttgaacaggactgattttatctatttcccccaccttcccccatcctcgcctcatcagttgtgagactaagtgcattttttattgtatttttattagttatatgcaaatatcttatttcctctttttaatttgcttacactacagacaggcagtatttttgatgactagactgttagcatattgtatttacaatgaaatccctattgataatgtttccattgatttctttccccacatccatcgtgattgct

SEQ ID NO: 296091 - DNA, 582 bp, Homo sapiens
caagaacccagagaagagatgtraagaaacaggacagggtggaacatgagcttagctaacttaacaatatagcaaaggggaaattttcattgcagaaacaaaaatcaaagtttaagaagcccaatggtaaatagacactacagaaaatatagggtagattatataacctaaaaatgaaacatgaacaaaaataaagtaattaaataccacaagtaaacttagaagaatagaatttcaaaagataaaagctgacagtgagttagaaaacaggaaaacagaaaaacaaattaatgcacaaaaaagttagtgatttgaaagaaatcaatataacagattaactacaaatgtgtttccaattctacttagctgttttgaagaatggtaaaaaaaaaaacatcttgcaagttagagtatgaagttaaacattaactttcaaattattttttaagcaaactccagacaaattctgtattataaaacaatgaaccagtgtcattttaaatattttttcaaaaatcccaaacaaaatatttataaacaaaaactgatagaaaacaaaatgcatagtgaccaagtggagtt

SEQ ID NO: 296092 - DNA, 582 bp, Homo sapiens
caagaacccagagaagagatgtaaaraaacaggacagggtggaacatgagcttagctaacttaacaatatagcaaaggggaaattttcattgcagaaacaaaaatcaaagtttaagaagcccaatggtaaatagacactacagaaaatatagggtagattatataacctaaaaatgaaacatgaacaaaaataaagtaattaaataccacaagtaaacttagaagaatagaatttcaaaagataaaagctgacagtgagttagaaaacaggaaaacagaaaaacaaattaatgcacaaaaaagttagtgatttgaaagaaatcaatataacagattaactacaaatgtgtttccaattctacttagctgttttgaagaatggtaaaaaaaaaaacatcttgcaagttagagtatgaagttaaacattaactttcaaattattttttaagcaaactccagacaaattctgtattataaaacaatgaaccagtgtcattttaaatattttttcaaaaatcccaaacaaaatatttataaacaaaaactgatagaaaacaaaatgcatagtgaccaagtggagtt

SEQ ID NO: 296093 - DNA, 565 bp, Homo sapiens
gaaacgagaaacactgaggatcagagagaatctgatttccagcactgccatattttattatttaaaatgtccattttttccatgcaaaattatgcgacatggaaaaacaagtaagtatggccgacactcagggataaatgcagtcaacagaaactgtccctggagaagcccagatcttggactttacagacatagaatttaggtcagtattttaaaaatgttcaaagaacaacaacaaaaaatttaaatagctaaaggaaaatataaaaattatgtctcatgaaatagagaatatcaagaaatatagaaatgattttaaaaataaaaattctgatgttgaaaaatatagtagctgaaattaaaagtttactagaggtagtcaaaagaaagtttgagcaagaagaattcttgaacttgaagataagtctgttaagattatctaggttgtgatttacatgaaaaataattcaagaggttarttattaagctaaacagggaggcaccagagaaaggcgaagcccaatgcaaggaaatccaaaaaacgatacaagaagtgaagggaaaa

SEQ ID NO: 296094 - DNA, 587 bp, Homo sapiens
agatttaatgagactgcacagatctcaaataaggaaggggagcgctgctgctgttgctgctggggcactttattgaggaggatcagagaaaactcgcttgctttaaaaaaaaaaaaaaaaaaaaaaagcccttaaaggcaaaggatatttttgggggaataggaggaggtccctgattcggtgtttcaggtcccctctggagcattttaacaatctaattcaatgtgagcttttgggtgtcaacattagcaaacaggcctccaaacctcaggaccatcgaagaccaagaggattgtggaaggtaattagggacattttgagttaagccacctcccatccccyttcccaagaccactaaaggcaaaaagagatgctctgtagctgtctttccacgcgatgaatcaccttcgtaactacattttccaaatcagtaattaaatctcttatttggccaaataggactgcatatttgcagacaatggggaagaaatcttgaaatctagaaaattcggcatatgtattgcatataggtttaggagagagcattatctgggcatcgacagactttggttcaagtgttggccctg

SEQ ID NO: 296095 - DNA, 564 bp, Homo sapiens
tataccctcccaaaaccaagatagcaacgaaagtgacctctggttgtcctcactgctgcactcccaccagctccacgacagtttacaaatgccatggcaacatcaggaagttaccctatatggtctaaaaaggrgaggcatgaataatccaccccttgtttagcatataatcaagaaataactataaaaataggcaaccagcagccctcggggctgctctgtctatggagtagccattcttttgttcctttactttcttaataaacttgctttcactttactctatggactcgccctgaattctttcttgcacgaggtccaagaaccctctgtggtgatctggattgggacccctttcttgtaacatttgtgctttagtggaagtaaactcacccaccattgttagagtagaaactgttattctgccttcttcaacctcgctttctcaaactctcgggcttttctttgcccagcccttctagcttttcttttcagcctctttttggtaggtttgcatcatatttcctgtttcaatctctgtcctcatttgcatggccttttctt

SEQ ID NO: 296096 - DNA, 568 bp, Homo sapiens
tgtggtgcagagcagtgttgtatgtccgacaatccccagggtctgcccttcctccccctcccctgagtcccccgtgaccccccctcccaaacagggctgtgaaggaatgtaggtggaatccgctgaggctggggctctaccagggataacagaattcacagcctgagagcaggccagccagagtagcttagaaagacaaagggtttgcaatgtaggaaaaatactaagcaccttattctggattctgtatctgaccccaaaacttcaaaatgttttattgttttcccttgagttttcagctcttcctacattatctgcttcctccttttaatttgctgagctctgtttctctactcagtgaggaagacaggtgggctggggaggccgggagaggggagagaactaaagaagcmggaaggagcaactcaacaactcgaccttcttcagctgcatgaaaataattccagatttgaaaagggctttggcgagattcattgttggggcggggtgggggagctgtgactttgccaaaccatcttttgtcattcacttccctcatacctaggtt

SEQ ID NO: 296097 - DNA, 568 bp, Homo sapiens
tgtggtgcagagcagtgttgtatgtccgacaatccccagggtctgcccttcctccccctcccctgagtcccccgtgaccccccctcccaaacagggctgtgaaggaatgtaggtggaatccgctgaggctggggctctaccagggataacagaattcacagcctgagagcaggccagccagagtagcttagaaagacaaagggtttgcaatgtaggaaaaatactaagcaccttattctggattctgtatctgaccccaaaacttcaaaatgttttattgttttcccttgagttttcagctcttcctacattatctgcttcctccttttaatttgctgagctctgtttctctactcagtgaggaagacaggtgggctggggaggccgggagaggggagagaactaaagaagccggaaggagcaactcaacaactcgaccttcttcagctgcatgaaaataattccagatttgaaaarggctttggcgagattcattgttggggcggggtgggggagctgtgactttgccaaaccatcttttgtcattcacttccctcatacctaggtt

SEQ ID NO: 296098 - DNA, 547 bp, Homo sapiens
aggatttagatggggctgtgggaagtggtgctaaggaagcaaactagcgtatttgcataatttctatcctcacttgaaatcccatagttaatttaaaaacttatcttttaagtatttaccattcaaatctatcacctctagaaggaataatgtatatcatagtgctttgtaccttataaagtcctggtgaatggttagtggttcccgcttttgttttgggacytacggcttgtgcttgttcttttcatgctccagaaaacaagcctcagaaatttgatgactggggtagaattgctgaagaaattaacagaaaaggatggaactaaaattcaggtcttacaactttccacgcattgagtttcacgtgagatcttctcaccaatctgtaccttactttcacttgttgaatccccttcacagtatataggatttcaggtagaaatatgattggcagaatagttccatttgcaggtcctatttatcacactagaatctacccctctggagacctattttaaaatcattttggatgtgatttgaaagaatg

SEQ ID NO: 296099 - DNA, 547 bp, Homo sapiens
aggatttagatggggctgtgggaagtggtgctaaggaagcaaactagcgtatttgcataatttctatcctcacttgaaatcccatagttaatttaaaaacttatcttttaagtatttaccattcaaatctatcacctctagaaggaataatgtatatcatagtgctttgtaccttataaagtcctggtgaatggttagtggttcccgcttttgttttgggacctacggcttgtgcttgttcttttcatgctccagaaaacaagcytcagaaatttgatgactggggtagaattgctgaagaaattaacagaaaaggatggaactaaaattcaggtcttacaactttccacgcattgagtttcacgtgagatcttctcaccaatctgtaccttactttcacttgttgaatccccttcacagtatataggatttcaggtagaaatatgattggcagaatagttccatttgcaggtcctatttatcacactagaatctacccctctggagacctattttaaaatcattttggatgtgatttgaaagaatg

SEQ ID NO: 296100 - DNA, 1170 bp, Homo sapiens
  misc_feature (1)...(1170): n = A,T,C or G
aggatttagatggggctgtgggaagtggtgctaaggaagcaaactagcgtatttgcataatttctatcctcacttgaaatcccatagttaatttaaaaacttatcttttaagtatttaccattcaaatctatcacctctagaaggaataatgtatatcatagtgctttgtaccttataaagtcctggtgaatggttagtggttcccgcttttgttttgggacctacggcttgtgcttgttcttttcatgctccagaaaacaagcctcagaaatttgatgactggggtagaattgctgaagaaattaacagaaaaggatggaactaaaattcaggtcttacaactttccacgcattgagtttcacgtgagatcttctcaccaatctgtaccttactttcacttgttgaatccccttcacagtatataggatttcaggtagaaatatgattggcagaatagttccatttgcaggtcctatttatcacactagaatctacccctctggagacytattttaaaatcattttggatgtgatttgaaagaatgwnnntaatactttgacattatgaaaagtgttttcccacaagatagctccaaaactaccagatgttattttccaggaggcaataaaatactcagcaaggttgatttttgttttaatttaagattttctttttttacaaaggggaaacagtttattttcgtcttatgtttataaaaatattacctactctttgtaaaatatccaagccatacaaaaagatataatgaagaaaaaatcacctgatatctcactatgcagwgagaacctctaggtatgtaggtgttcctctctccatcctatcctccccccttcctattatctatctatttatctaccatatttgtctaaaaaaagtcaatatatacacatgcatggggaaaaaacctaatgttagataatgacataaaacaaaaagcaaagttcccttctctgttcttttccattcctaaaccagttttccagaggttaaatgtttgttttctcacaattatttacacagatgactccaaataacatgattttactgacattttcttggtttatcaactttggatatcatttgttggctcccagctacagagagtaaagatttagttcactcatttacttcctatttctttttcct

SEQ ID NO: 296101 - DNA, 588 bp, Homo sapiens
ttattcttttgcagaggatatgattttatatttggaaaaacctaaaggctccaccaaaaaactattagaactgataaataaattcataaagttgcaggatacaaaatcaacatagaaaaaccaacagcatttctattatgtatgtcaacagtgaacaatctgaaaaagaaatcaagaaagtgatcccatttaaaataactacaataaaataaaatacctaagaataaacttaaccacagaaatgaaagatttctacaatggcaactataaaactttgatgcaagaaattagagaagatgctgaaaacatagaaagatattccatgttcatggattkgaataatcaatattatattgttaaaatgttcatactacctaaaccaatctacagattcactgcataccctatcaaaataccaaggacattcttcacagaaatagaaaacaatcctaaaatttatacggacccataaagacccagaataaccaaagccattctgagcaaaaagagcaaaactcacatgactgagctcaaattatactacagaattacagtaaccaaaacagcatggtactggcataaaaatag

SEQ ID NO: 296102 - DNA, 580 bp, Homo sapiens
ttatctctcatgcattgagccaatatttcccctgctcaaaatcatcccaaggccaggtaccagtcaactagagaccatctctatagcccagagcccaccagaattattcaaactggccagtcttaagctatttactctgccatacgttgccttttccatggaaaccccaaataaaggctttgggctagatttttctcttgctcctgtcttctgcctcctgaccacactggtgcttcccctatggccctgtgtggcatgacgtgccccctcctttcagaaaattagtaataaaaatcttccaatggctttagcctttttgtgccaggacttagtcacctccttaaattaaaatcccttgggtacaaatgagacagtatgcattacccagtttcaccaatccagcagttagcaactcatggccaatattgtttcatttaaatacccacattcttttctacccctcccctgcaatatttagaagctaattctgagtctcatatrattttgtctgtaaatattccggtgcgtgtgtctgtttatatatgaatgtatgtagctacgcatattttttcttcaaata

SEQ ID NO: 296103 - DNA, 624 bp, Homo sapiens
acccctcccctgcaatatttagaagctaattctgagtctcatataattttgtctgtaaatattccggtgcgtgtgtctgtttatatatgaatgtatgtagytacgcatattttttcttcaaatattatctcaatatccttatctcagcaaataatttttaaatatcagaaatattcatacaaatattttcaattgtctcataaatgtaattaaaaatttttttttttaaattaggtccaggctgggcatgatggttcctgcctataatcccagcactttgaaaggccaaggtgaggcaggaggattgcgtgaacccagaaattaaaggctacaaaaccacctttacaaaattatgactgagacagtgaaagagatctaacttaactgactccatcttgcttctaacctccaagctgtccttgttcattcctgggtataggctgaactaactttgggagaaatttactttgtagtttaaaacaaagacagtcctttcccaaagcggacctcatacttgcctggggattagattgcctttgtaggactaacattagccacaagattagaaattatggtttaggagtcaagcagctggaagctacaagatcctgaccctccttaaac

SEQ ID NO: 296104 - DNA, 1219 bp, Homo sapiens
acccctcccctgcaatatttagaagctaattctgagtctcatataattttgtctgtaaatattccggtgcgtgtgtctgtttatatatgaatgtatgtagctacgcatattttttcttcaaatattatctcaatatccttatctcagcaaataatttttaaatatcagaaatattcatacaaatattttcaattgtctcataaatgtaattaaaaatttttttttttaaattaggtccaggctgggcatgatggttcctgcctataatcccagcactttgaaaggccaaggtgaggcaggaggattgcgtgarcccagaaattaaaggctacaaaaccacctttacaaaattatgactgagacagtgaaagagatctaacttaactgactccatcttgcttctaacctccaagctgtccttgttcattcctgggtataggctgaactaactttgggagaaatttactttgtagtttaaaacaaagacagtcctttcccaaagcggacctcatacttgcctggggattagattgcctttgtaggactaacattagccacaagattagaaattatggtttaggagtcaagcagctggaagctacaagatcctgaccctccttaaacwtttgctgttgttggtaaccatttgcatggtttatgattcctttctttctttttctgttttttaaaaaatagactttattttttagaaagactgttcttttttagagaagttttatgtttatagtaaaaatgagcagtaggcacagtgatttcccatatcctccctgtcccacatttgcatagcctcccccactatcaaaatcctgcaccagaatggcaaatttgttttaatcaataaaactactttgacacattttcacccaaagtctawagtttacattatggtgcactcttggtacattctatgggtttttgacgaagaatgacatgcactcatcattttactcaggacaggaatgccatacagaatagtttcactgccctaaaagttatctgtgctctacctatttatccctctccatctgccaactcctggtaaccactgactcgtttattatctttacagtgttgctttttccagagttttatatagttgaaatcatacagtatgtagccttttcaggttggcttctttcacttagtaaattgcacttaagtttcctccatgtctttccatggcttgatagtgcattgc

SEQ ID NO: 296105 - DNA, 1221 bp, Homo sapiens
tttgctgttgttggtaaccatttgcatggtttatgattcctttctttctttttctgttttttaaaaaatagactttattttttagaaagactgttcttttttagagaagttttatgtttatagtaaaaatgagcagtaggcacagtgatttcccatatcctccctgtcccacatttgcatagcctcccccactatcaaaatcctgcaccagaatggcaaatttgttttaatcaataaaactactttgacacattttcacccaaagtctaaagtttacattatggtgcactcttggtacattctatgggtttttgacgaagaatgacatgcactcatcattttactcaggacaggaatgccatacagaatagtttcactgccctaaaagttatctgtgctctacctatttatccctctccatctgccaactcctggtaaccmctgactcgtttattatctttacagtgttgctttttccagagttttatatagttgaaatcatacagtatgtagccttttcaggttggcttctttcacttagtaaattgcacttaagtttcctccatgtctttccatggcttgatagtgcattgcwgtatgacttggggtaaaatattctcttacatttaagagccatatatatttattttccctatgagctctgttcatatatctagctcatttttatgtcatttttttctttatttttaaaagtttatatatatgtttgagatattaaccctttatctgtgacatatgttgcaaatttttatcccagtttgtcatttgcctttatttttacwtgttttaatagtcacatttatattattatctaatcaaatttattattttaattgcttctagagtcaaagttttcaccactttcaggctatagaaaaattcaattgtgtttccttttagcacttatataaccataatagtttaatgggtcataagccaaaacttttaaaataaaatacaatacaataatatagaatagaaaataatagcatgcattgcacataataaagtaagtattaaaagagcttgaaagttttcactcccatactaacaataagaaaaaggaactgaacaaactgaaaatcagctcctcttagattcatcagagaattgatgtgaaaaggtaaattgcttcccccaaaaactaaagggacagacaggtgaatacagagaatcacagtttaccaggagcagaaactc

SEQ ID NO: 296106 - DNA, 497 bp, Homo sapiens
cacagtttaagtaacctttctagtatgcaaatacgactatgtcacttgtattcctastgattcaatcctaagttctttggcagggcatccaaggtccccatgactggggtctttctccctctttgctctgatgtcccgtcacttagccttcaaactctgtacattaataatactggtctgcttgcaatcatgtacatacatgatgttctttcaagcctcagtgcttctgtgtgtcttattgtgtctgcctggattgtatttcccacttttcttcttctggctaattcttactggacttcccaggcttcactgcccttctctgagttcccacagcatcttgtacttatctttattctgtcatttaccaagtaagatatatgttatatgctaaagtgtctatttcctctacttggcagtaaactagggtccatatgttactcatccatgtgccccagcatcaaacacagtgtcttgcacatagatagttttaatatctt

SEQ ID NO: 296107 - DNA, 571 bp, Homo sapiens
ttccacaaaatctattttagactcgatgaagtttagggtttctagttttgggctatactgagctatgaatgatgctgctatgaaccttctacaaatattctagtctacccatgcacccattttttcaggtatatacctatgaactttggcagttaataccaaactgctctctaaagtgggcattcaagattacactcttcycaggagtatataagagttattgttgctgtatatccttgctgacactttttaattcatggcaatctgatggaagtatatgttgcatacacttttttattgtaaattagtgttatataaaatactaatatggtgatatatggttgattagttccaaaagatgaccacaacaattcttcttacctcagtctccttctgcaatgtgaatctgtagcttcttcattaaaaagtagagtctacttctcttccccctaaatatgggctggccccatgacttgctttgacttctaggtctgggtcttcagaagcctagcagcttctaagtttattttcatggaatccagctgccctatagataagttcaggctagact

SEQ ID NO: 296108 - DNA, 571 bp, Homo sapiens
ttccacaaaatctattttagactcgatgaagtttagggtttctagttttgggctatactgagctatgaatgatgctgctatgaaccttctacaaatattctagtctacccatgcacccattttttcaggtatatacctatgaactttggcagttaataccaaactgctctctaaagtgggcattcaagattacactcttctcaggagtatataagagttattgttgctgtatatccttgctgacactttttaattcatggcaatctgatggaagtatatgttgcatacacttttttattgtaaattagtgttatataaaatamtaatatggtgatatatggttgattagttccaaaagatgaccacaacaattcttcttacctcagtctccttctgcaatgtgaatctgtagcttcttcattaaaaagtagagtctacttctcttccccctaaatatgggctggccccatgacttgctttgacttctaggtctgggtcttcagaagcctagcagcttctaagtttattttcatggaatccagctgccctatagataagttcaggctagact

SEQ ID NO: 296109 - DNA, 507 bp, Homo sapiens
aaaggttgttaataaaataaattatgaggctgagcatggtggctcacacctgtaataccagcaccttgggaggccaaggtggtggatggatcacttgaggccaggagtttgagatcagcctggccaacatgacgaaaccctgtctctactaaaaatacaaaaaaaaaaaaaaaattagccggccatggtggtgcacatctgtaatttcagctactcaggagggtgaggcatgagaatcacttgaacctggaaggcagaggttgcagtgaaccaagattgcaccattgtactccagcctaggtgccagaatgagactgtctcaaaaaaataaaaataaataaataaataaattatgatgcattcatgagatagaacactatacagacaaaactacattgaaaggattttaatgacattggaaactgctgaagaaaaatatcaggtggtaatgaatctatctatctttctaycttcatttcattcctgacttgtttaaaaaattgtaca

SEQ ID NO: 296110 - DNA, 552 bp, Homo sapiens
taaacttattgttttgaaatttttaattaacatttgtggccataatttatatatttctgttgtactgaagcagattgttttgcatttttgttagcaaacttcggcagtggtcattttagaaacaatcttgtacatacttttgattaaaacacttgattttgttagtgaaaaaagaattctaatttatagccaagaatttttggccactattttttttcttggatatagataacatttattattttacattttaaaaaatttatattactttaggaggttgatgagtcaagtaaatggtactttgaacaccctgttgtctttgttttgtggcagtgaagaaatgaaaatttctgtaaaaagaaagagaggaaagaaggaargaagggtgggagctggaaggagaaagggagggagaaaagaaggaagaaaaacaaggaaaaacagaaggaaagaaaatggaagcaaccattgccccaaggacaaactattcctgcccaccctctcaaaactaatcccctcaaatagcccaagacgtttcatatgtttttatcc

SEQ ID NO: 296111 - DNA, 475 bp, Homo sapiens
aataatattagaaggacttctgaaatataacaaatggcccatgtttgctcaaatagtctttcgttagtatcaccgagagacaaaattctatgctagatagatcatctgaygtattttgtatgtataaaaaatttgcatagcttttattataaaaatcacacacgtatgtaataaaaagataagctgaaaagatcataattaaagtctctggtggaacagccacttagagataatcactaataccaacttacaatagaggtatgttctgataaagccatcataagtcaaaaatatcataaatcaaaaatgcaactaatatcccaataaacccattgtaaagtcaaaaaatcataagttgaatcattgtaagtcagtggccatctgtatttgtagagatacatcaagagtgagatagatcattgcatttatttagcacaaactatgaccagaccttgtgttatgaatactagctcat

SEQ ID NO: 296112 - DNA, 1593 bp, Homo sapiens
aataatattagaaggacttctgaaatataacaaatggcccatgtttgctcaaatagtctttcgttagtatcaccgagagacaaaattctatgctagatagatcatctgatktattttgtatgtataaaaaatttgcatagcttttattataaaaatcacacacgtatgtaataaaaagataagctgaaaagatcataattaaagtctctggtggaacagccacttagagataatcactaataccaacttacaatagaggtatgttctgataaagccatcataagtcaaaaatatcataaatcaaaaatgcaactaatatcccaataaacccattgtaaagtcaaaaaatcataagttgaatcattgtaagtcagtggccatctgtatttgtagagatacatcaagagtgagatagatcattgcatttatttagcacaaactatgaccagaccttgtgttatgaatactagctcatwaataatattagaaggacttctgaaatataacaaatggcccatgtttgctcaaatagtctttcgttagtatcaccgagagacaaaattctatgctagatagatcatctgatgtattttgtatgtataaaaaatttgcatagcttttattataaaaatcacacacgtatgtaataaaaagataagctgaaaagatcataattaaagtctctggtggaacagccacttagagataatcactaataccaacttacwatagaggtatgttctgataaagccatcataagtcaaaaatatcataaatcaaaaatgcaactaatatcccaataaacccattgtaaagtcaaaaaatcataagttgaatcattgtaagtcagtggccatctgtatttgtagagatacatcaagagtgagatagatcattgcatttatttagcacaaactatgaccagaccttgtgttatgaatactagctcatwtttggggtgattgaagaaaacaaacagagaccagtgaatgagccatgttctctgctgaagagactgaagtggagaactcacagactaaaggatttaaaaatatatacataaaaaatattaatatataagaaagaggcaggaggacaaacatcactaacwtcaaaactgtaattaaaaatgagccccttctaaggcatgcacggaggtcattatgatcaatgtccgaccccctatgccttctctctacatgatccctcgacattccaaattattaccctgttcttagagacagattcaataatgtctactgaagacgctctaatttataaactcttacagaagttataaattataatcatttcagaaaacattttaaaagcaagaattaaactgaacatttcatagtaagtggtttaattagataattgtagatgaaaactgtcttctgcataggactttcaataataggtggcactaacagcatagtgtcattttgactggcatagaaaaaaagggcacagtagctgtaaaacagaaatgaaggctacgttttttctctaagagccaaaagaagtctgacaatttcattcaaggagattcaaactagtcaagccactaatccactatgatttttgtaaggt

SEQ ID NO: 296113 - DNA, 641 bp, Homo sapiens
tttggggtgattgaagaaaacaaacagagaccagtgaatgagccatgttctctgctgaagagactgaagtggagaactcacagactaaaggatttaaaaatatatacataaaaaatattaatatataagaaagaggcaggaggacaaacatcactaacttcaaaactgtaattaaaaatgagccccttctaaggcatgcacggaggtcattatgatcaatgtccgaccccctatgccttctctctacatgatccctcgacattccaaattattaccctgttcttaragacagattcaataatgtctactgaagacgctctaatttataaactcttacagaagttataaattataatcatttcagaaaacattttaaaagcaagaattaaactgaacatttcatagtaagtggtttaattagataattgtagatgaaaactgtcttctgcataggactttcaataataggtggcactaacagcatagtgtcattttgactggcatagaaaaaaagggcacagtagctgtaaaacagaaatgaaggctacgttttttctctaagagccaaaagaagtctgacaatttcattcaaggagattcaaactagtcaagccactaatccactatgatttttgtaaggt

SEQ ID NO: 296114 - DNA, 617 bp, Homo sapiens
ggaggaacttagtttataatttaaaacaaagataataacaggtctttcccaaggcaaatttccttcttgcctggggactagactgcctttgtaggaagccacaagattagaaattatggtttaggggtcatgcagctggaggctacaagattctgaccctccctaaactgctcctaaaatcagagcttgagatatattgcagaccctgcacttgatggatcagctggcaccacccagatcaataaattggctcatctgatcttgtaccccaccccacccaggaattgacccaggacaagacagcttcgactccctaggatttcttctctgacttgaccaatcagcactcctgtctcactggcttcctgccacccaccaagtcgtccttgaaaactctcatccccgaactgtgagctttctaggtccctargaaaccatttctgccttgctttacaggggtccttggggcaggctgcccgatgtactgggaaaaggccacagggagaaggaaacctccagctgaactttgtaacaattccaactgaatgagaagactcctggccagaactcaggggaaggcatgaatctggtgtgcagactccacaggcagggaagca

SEQ ID NO: 296115 - DNA, 453 bp, Homo sapiens
  misc_feature (1)...(453): n = A,T,C or G
accaatcactgcagctcagctctcaggaagccacatccctaggaaaaggagaagagtactacatcaacggaacaccctatgagacaaaagaatctaaacaacagccttgaccctagaccctccttcagacagagcctacccaaatgagaaggaagcagaaaaccaactctggtaatatgacaaaacaaggttcattaacaccytaaaaaaaatcacattagctcaccagcaatggatacaaaccaagaagaaatccctgatttacctgaaaaagaatttggaagggtggttattaagctaatcaaggaggcaccaaagaaaggcaaagtccaatttaagaaagtaaaaaaatgatacaagaaatgaggggagaaatctacaatgaaatacatagtataaataaanaacaatcaaaacttcaggaatcaaaggacgcacttatagaaatgcaaa

SEQ ID NO: 296116 - DNA, 505 bp, Homo sapiens
taaataacccaatccaacaaagaatattcatatatacatatatatatatatatatttgtttatatataggtttgtgtgtgtgactgccagctttcccctactttccttccctacttacacacacacaaacctagaacccaaaagcaaatgcaataaaaacaaagataaatagttgggacttaattaaactaaagagcttttgcacagcaaaaggaatagtcagcagagtaaacagacaayccacagagtgggagaaaactttcacaatatatacatctgaaaaaggactaatatccagaatctacaacaaactcaaacacatgatcaaggaaaaaacaaacaaacccatcaaaaagtgggccaatgacatgaataaacaattctcaaaagaagataaacaaatggccaacaaacatgaaaaaatgctcaacatcactaatgatcagggagatgcaaaaccacaatgtgacaccatcttactcctgcaagaatggccatcataaaa

SEQ ID NO: 296117 - DNA, 577 bp, Homo sapiens
cttgaaacatatgatatcattacagggccacaccacaatgaatggggagyatactgggacgataacacctgtgcaggaaagtctgcttttcttagtttttaaatttttgcacgtcaacttatttcacaatttggagaaaacaagttactgcttctccattggttctcaggacaattgaatgtggtaatttgcatttctgaaaatatgtcagtttggacatatacttcaaactgaacaaacttcacattttaaaaatcactagctattattcaagttccaactgccaaatagcttgaatattaagaactggttttaaaaagccaaacccacaaagtactccaggaattgtaaatcagtcttcaattgtcaaccaccaagacacttcaatttagaaaagaatcaagagactttcccgttattcaagtctaaatgtcttaactcactttcagactgaggataaaacaccctaaagaaatgaaaaatgtaacaacactcactctttttttcctttggaaagctttttatacattctttaaaagtcaggtattataaaactgagttactagtcattactgat

SEQ ID NO: 296118 - DNA, 577 bp, Homo sapiens
cttgaaacatatgatatcattacagggccacaccacaatgaatggggagtatactgggacgataacacctgtgcaggaaagtctgcttttcttagtttttaaatttttgcacgtcaacttatttcacaatttggagaaaacaagttactgcttctccattggttctcaggacaattgaatgtggtaatttgcatttctgaaaatatgtcagtttggacatatacttcaaactgaacaaacttcacattttaaaaatcactagctattattcaagttccaactgccaaatagcttgaatattaagaactggttttaaaaagccaaacccacaaagtactccaggaattgtaaatcagtcttcaattgtcaaccaccaagacacttcaatttagaaaagaatcaagagactttcccgttattcaagtctaaatgtcttaactcactttcagactgaggataaaacaccctaaagaaatgaaaaatgtaacaacactyactctttttttcctttggaaagctttttatacattctttaaaagtcaggtattataaaactgagttactagtcattactgat

SEQ ID NO: 296119 - DNA, 537 bp, Homo sapiens
ttatattgctgaggaaaaataactgtctgctcaactaaactaaatgaacattcaagagtaagggtaattttttttttaattcagatgtacaaagactgagaaaagttatatttacagatccttactgaaacattacaaaaatataatttataatctgtcatgggattagaggaaaaacaaacaaagtttaaaaatataattcagttacatagcaggaaagagtgcagtaaaagaaccaataatgaacaaacaaaagaccaaaaagtacaatgatagatttaggtttaaatgtatgtgtgtggactaaaataaactaaaaaataacacagatgatgggatgggagaaaacattttaagatccttgttttatttcaagagaagaatagaattattgatttacctcaaaacttattagkctatgtatatatttttattaagagtaactcctaaaagaatggaaatagaatgtctaactcacaaacgtacaaaaagatactttctaaaagtgacgtaaagatggaaataaactcaaccatt

SEQ ID NO: 296120 - DNA, 556 bp, Homo sapiens
gtatttttaaaggattttaaaaaatccttttaagtatcagccataaactgctctcaaaacaggatctggtaaatatggctttgctaaatagtccaggatacagaatttgtaaatattcacctttaagatacacttctcatttgcccgaagtgcctgtgcagttcccttgcctatctctttaaggactagtcataagaagagaagttatagttggtaaaaacaaaaatccagaaaaaatcatctgaagagatcaaatgttgatgcaacgttaatatactacatgtgatctttatttcaccagaaacactggacacatggggatacatttgcacctcatctccaccattacatgccacagtgttgttgaaatctgcatcttgtcctaagcaaaagcatagaaaaggcaaagtgtgcctttggtgccttctatccattcagaatcccattgctcttgctrcaaaaataaaccaataaacaaataaaaacctcttcttctctaccctcatattaacaactaccatttattggttgtttaaccaggccatggacactgtgc

SEQ ID NO: 296121 - DNA, 571 bp, Homo sapiens
ttctggaaaaaaagttcccagtaaaaaattctgttctcagaatttatcttcctaaaaaaattggtacataataatttagattggcaatgggttgagatgtgataagaggaagttggggttgctaagagtgcagtagggagttatgagattgagtagcattttgtattaataaggagggatataacagcaaatgcctacttctttcctgattctgtgttgtggttaccgtgattaaaaggcaagtttagagtcaacttgagattcagggttgcaataaactggtcaaactcaactattatttaaaattgcacttggacacttagaaatagcaatttggtgccttctggggatttttctttcccccttttgctttcaagtgttagaaaataatgtgaaattttctggccaatcataaactaatggaatatgtacagtaagaagtcaaccacyagttaatctcctagggcagacatcccagaactggtgggtatatttccttagaattaaagtaccagttgaaaacctcataaaggggggtaaaaggtccattaatcttaataaaaccccaaaa

SEQ ID NO: 296122 - DNA, 493 bp, Homo sapiens
cagaagttttcaattttaataaagtaaaatttatcaatgttttttcatggaccatggttttggtgtcatagctaaaaaactcattgctatatccagctcatctaggttttctcctatgttatcttttaggagttttatacttttacatttttcaaaaggctakgatcaattctgagttaattttaggcaaaggtataagacccttgtctagattaaattttgatgtccagttgtttcagcaccatttgttgaaaagactctcttgtctccattgtattgccattgctcctttgtcaaagaacagttcattatgtgtgtctgtgagttctctactctgttccattaaagtatttattcttttgccaataccacactgtcttgatactgtagctttataggaagttttaaagttggtagtgtctgtactgtgttcttaatactttgttgcctattctgagtctttttgcctttccgtatgaactttagaatctgt

SEQ ID NO: 296123 - DNA, 619 bp, Homo sapiens
tatactgggttgtgatgtaagatttatttcattctgtaggtgatagtcaaaaaagttcaagaaatgctgagatagataacttctaggtcctcttcagctgtgatattccttgggccttttgtgtaagtgatactgtggcagagactgcaaacaaattgtccaccaaaattaatgatccccttccatattatgaagctatgacttccatattatgaagctatgacttcataatatggctcagagccagagactctaattcctagttcctcttgcaggtagatgggaccatgtgatgggtccttgccagtggagtgtaagcagaagtgatacgcatcacttccaggcagaagtggttaaggagcaagtgagtcttctcgctctcttcttctcttgctattgcctccatgcagacgaacttactgaccttgggaactctgtgttggaratggtgaagccagaagatggaactagcctggtgcttcagacgctgcttggagaacagcctctgcccttcaggaacacctattttggtgttcatatgagcaagaagtaaacttctcttgtatttgtgccattatacatattggagggtctgcttgtcatgacagtgagtgatttg

SEQ ID NO: 296124 - DNA, 544 bp, Homo sapiens
gtcagctctccctcccagatcttcgatgtccttttgcagtgtttcagataccatgacagaaagcacatcaaggaaacatggtttaccacaaagtccttgtttttaaatgtttcctatttgttatccattttcacacactttgaacatggtgtcttctttgttctggagcttgtttacttagattttagcctggaaatgccctttgctgtgaatgctaacaactccgagattcatggcagctgtcagtacctacatcctgggtccaaagaaagtgccctggactggggacccaagaagaggtggctctccatgcacttgagatgcctgtcygccccctcaccctcacctccttcccttggcacccaggcacgctggcctcctttctgcccctgaaacacaatgactctgctaccacttccaggcctttgaacttgccattcctctactacaataatcttctccagatctccacaggacagctgtccctccttattcaggccttatctcctccccaagacacacacatgcatgcgcacgcgtgcgt

SEQ ID NO: 296125 - DNA, 517 bp, Homo sapiens
agcacacgcacaaaaggtcgggtcaaggagagcgcacaagactggaggaacagaactgagctccaarcacctgcaatgagagtgtctggaaagtcaaaagcccaaggtgagtttagcaaaaatgctaatcacaatagaaaaggttgtttttgtttgtttgttttttgctttggttggttttgttttcaaaattatttatttgtagcaatcttgtgaaacttttattatttgcctgatatcaatctcaaatgagcattaaaaatagtttgtacattcaggagttgttcttggcatccataagacaataatattttcactggataaggcatgtgactcgtccgcaactgggtaatcctctaccacaaaccccaggatggaaggagagacagaaggggcatggggtggaaaagagctagaaaagcctgtaagagaagaaatgagggggcaggggtagaggggaaggggagagttctcctcctgcatttgagaacagtttggttggattttggggaaccct

SEQ ID NO: 296126 - DNA, 585 bp, Homo sapiens
gctgagggagggacctagcagggaggtatttgaatcatgggggccggtctttcccatgctattctcgtgatagttaataagtctcatgagatctgatgggtttatcaggggcttccacttttgctttttcctcattttcttttgctgccaccatgtaagaagtgccttttgcctccccccatgattctgaggccttcccagccatgtggaactgtaagtccaattaaacctctttttcttcccagtctcaggtatgactttatcagcagcatgaaaatggactaatacatgcactatgaatcataggtcacaattaacccagtttcatacacctgaggtccratttacaaaataaaatgattgtcatgatatattatttaaaaataggagaagtttggcatacaaaagacactcctttaaaaatagtagaagttaaatttctgggtgaaattattggaagaaatttttatttacttttcaaagttttcttggataagcatgtagtatattcatatgcagagaagggcaggaaggttttttttttttttttttttaaaagtacaccccatgacccttcatttaggc

SEQ ID NO: 296127 - DNA, 585 bp, Homo sapiens
gctgagggagggacctagcagggaggtatttgaatcatgggggccggtctttcccatgctattctcgtgatagttaataagtctcatgagatctgatgggtttatcaggggcttccacttttgctttttcctcattttcttttgctgccaccatgtaagaagtgccttttgcctccccccatgattctgaggccttcccagccatgtggaactgtaagtccaattaaacctctttttcttcccagtctcaggtatgactttatcagcagcatgaaaatggactaatacatgcactatgaatcataggtcacaattaacccagtttcatacacctgaggtccgatttacaaaataaaatgattktcatgatatattatttaaaaataggagaagtttggcatacaaaagacactcctttaaaaatagtagaagttaaatttctgggtgaaattattggaagaaatttttatttacttttcaaagttttcttggataagcatgtagtatattcatatgcagagaagggcaggaaggttttttttttttttttttttaaaagtacaccccatgacccttcatttaggc

SEQ ID NO: 296128 - DNA, 585 bp, Homo sapiens
gctgagggagggacctagcagggaggtatttgaatcatgggggccggtctttcccatgctattctcgtgatagttaataagtctcatgagatctgatgggtttatcaggggcttccacttttgctttttcctcattttcttttgctgccaccatgtaagaagtgccttttgcctccccccatgattctgaggccttcccagccatgtggaactgtaagtccaattaaacctctttttcttcccagtctcaggtatgactttatcagcagcatgaaaatggactaatacatgcactatgaatcataggtcacaattaacccagtttcatacacctgaggtccgatttacaaaataaaatgattgtcatgatatattatttaaaaataggagaagtttggcatacaaaagacactcctttaaaaatagtagaagttaaatttctgggtgaaattattggaagaaatttttatttacttttcaaagttttcttggataagcatgtagtatattcatatgcagagaagggcaggaaggtttkttttttttttttttttaaaagtacaccccatgacccttcatttaggc

SEQ ID NO: 296129 - DNA, 544 bp, Homo sapiens
gccttctcaatagtgggctcattgccacactggctgggaagaagcactgtccagtcctcgccattcaactcagacattggcccccagccaatgtccgtccagtgagaccagggactgccagccactggtcaggaagctgtttatcaagctggggaagtctggagcacacacggctcactctaaggtccatttattctcccagcacttacaatcctctctcaaaagacacaatgctttcctaaaaataattaatcatggcagcaaaagtgaaaaacaagctccgtctccttccttccacagacataaagaacttcaaggctgtcttgatcaaaaaatgggaggtgcaggctgagagcagggacgacctggaaggggggatgagagctctcctgtagagttattcaggttcagtgcatttcctacaacataaaggaacrtgcctcctgtcaagcgaagacactgtgtctaaagactgtaaaacaataatatattgggcaactccatgccccacggacaaagagcattgtgaccatgacagacctga

SEQ ID NO: 296130 - DNA, 517 bp, Homo sapiens
gcattgtgaccatgacagacctgaatttccacctggctctactgttgcctctgtctggtcttggactagtcctataacctctctgcacccctataaaatgacagtaataatattaacaccagacagggttggatgaggattgaacacatagcacattaactggtatataatatgccctcaatattttgtagttgttatacttatcatatgcttttctaagggtaaatcttgacagaataaggcctaccagccagggggagatcaggttacaagcatagggtgttgggatgagtgatcactgcctttcatgtctaccccttaaagagtaccttggaaggaaactatccagccaccaccatctcgggtcatacctgtaataggacagtgacatgagccmtggactgggaaatgggaaaatcatgtcatctcaaatgctcttcattttattgaggacttactatgtgccagacgcactactagaagccaaagtcgtaatgaggtaactttgggtaaatta

SEQ ID NO: 296131 - DNA, 517 bp, Homo sapiens
gcattgtgaccatgacagacctgaatttccacctggctctactgttgcctctgtctggtcttggactagtcctataacctctctgcacccctataaaatgacagtaataatattaacaccagacagggttggatgaggattgaacacatagcacattaactggtatataatatgccctcaatattttgtagttgttatacttatcatatgcttttctaagggtaaatcttgacagaataaggcctaccagccagggggagatcaggttacaagcatagggtgttgggatgagtgatcactgcctttcatgtctaccccttaaagagtaccttggaaggaaactatccagccaccaccatctcgggtcatacctgtaataggacagtgacatgagccatggactgggaaatgggaaaatcatgtcatctcaaatgctcttcattttattgaggacttactatgtgccagacgcactactagaagccaaagtmgtaatgaggtaactttgggtaaatta

SEQ ID NO: 296132 - DNA, 510 bp, Homo sapiens
tgaaacaataacaacaacaacttcatggcaaaaaaagaaaaagaaaaaaagaaaaatgccatgggcaagcacaaaagataaataacaaaccrggaaaaaacactgcagtttataacacagacaaaagatatgcggaaggagcttcatgtataaggatctcctagaaatcaacaagagaataaaactcagtagataaatgtgcgaaggacagaaacatatttcacagaaaaggaaatgcaaatcgtccttaaacaagtaaaacaataacaataaaaatgacaactacattgggatgcattcgctacctttcaaattggcagcattgcagtagtgtgctggagctgactcttgacagttgaccatgaataattaccagatttttaggagctggttttatgagtaggttgttaaatgcagattgttgctaagatttaattatataaatttataactaaataaatcatacaaatacaaaggaaataaaaactcttaaattccttattattttac

SEQ ID NO: 296133 - DNA, 482 bp, Homo sapiens
tctccttctagccctgccacaactaatctactttctgtctctacagatttgcctgttctggatgtttcagataaacggagtcatacaatatgtggccttttgtgtctggcttttttttactcagcacattttcaaagcttaccccaattgtcccatttatcagtatttcatttctttgtcttgccaaaggatagttcttggtatgaatatgccgcattttatttattcgttcatcagtttgtagacacttgggttgtttccactttgggctatcatgaaaaatgctgcaatgaacattcgtgtacaagttttgtttttgcggrggcatgtgtttttatttcacttgagtatatacctaggagtggaattgctgggtcatatggaaactctacatttaacttttcaaggaattgctagactgttttccaaagtagctatgccattttaaaatgacatcagcaatgtctctatatcctcaccaa

SEQ ID NO: 296134 - DNA, 591 bp, Homo sapiens
ctttcaaatctatgaaatagagatgacatgttattgtgagatttaaatgagttaactggtgtttccttcccttgctctctccttggatattgtacgatgccctccctgatccagagctcagtagctgctgtgcaggcctgcactccacctttcctgtctccttcagtgagcattcagggactcagtgcactgagttgaggagggttccagcatttcccacaacttgattctcttgacaytgaaccaaagaaaatcacaaaaccctatatttccttaggagggagattccttgacccctgtccactggggtttgctcattgagtccgtatctcctggggtgtaacggtcaccgcgtggccctcctctgactcccccagggtcagactgccactgctgtcccaggcagctgagggtcagcaagctctgggtcacattcaccggtcctgtcctcaatggcctgtcccaagttctggagagagactaatgtccaagcctagctagcgccactgctacacatgctgtctcccacagtagccaaaaactggaaataaacaagggcacaacaacaggagaatgaataaagaaattata

SEQ ID NO: 296135 - DNA, 591 bp, Homo sapiens
ctttcaaatctatgaaatagagatgacatgttattgtgagatttaaatgagttaactggtgtttccttcccttgctctctccttggatattgtacgatgccctccctgatccagagctcagtagctgctgtgcaggcctgcactccacctttcctgtctccttcagtgagcattcagggactcagtgcactgagttgaggagggttccagcatttcccacaacttgattctcttgacattgaaccaaagaaaatcacaaaaccctatatttccttaggagggagattccttgacccctgtccactggggtttgctcattgagtccgtatctcctggggtgtaacggtcaccgcgtggccctcctctgactcccccagggtcagactgccactgctgtcccaggcagctgagggtcagcaagctctgggtcacattcaccggtcctgtcctyaatggcctgtcccaagttctggagagagactaatgtccaagcctagctagcgccactgctacacatgctgtctcccacagtagccaaaaactggaaataaacaagggcacaacaacaggagaatgaataaagaaattata

SEQ ID NO: 296136 - DNA, 561 bp, Homo sapiens
attcagtggcttaaacatgaaggaaatgttcaccttacattattaacatgaaaaaatgtttgttatcattttattaaggaaatcaggatctcccaagtgctggctcagaaaaatattgacacaagaatttccctttgttgcactggcccatrtttataatcttcagactgatctcttactttcttacaaccgccccctcacctccttaatctggtggcactgggcctgtttaacaagaaaccaagaacaaggaataaaggttttgcatggtctcattctcttctccaggctccatggccagcccagtcccattctccagactcagggtctacatccttcccactcaataaaactaaagcggcaccaacagctgatacattcagcagccagggacaaaaccacttctagctgtgaattccatccagtcacacacagggtgcagctgcagcccacatctgcaaactctgcattccgaaaccctttgtatatatacttcctagggactcagacagtgggccccaggggcaagaggacttgtccttcccaaggtcacagggttca

SEQ ID NO: 296137 - DNA, 561 bp, Homo sapiens
attcagtggcttaaacatgaaggaaatgttcaccttacattattaacatgaaaaaatgtttgttatcattttattaaggaaatcaggatctcccaagtgctggctcagaaaaatattgacacaagaatttccctttgttgcactggcccatgtttataatcttcagactgatctcttactttcttacaaccgccccctcacctccttaatctggtggcactgggcctgtttaacaagaaaccaagaacaaggaataaaggttttgcatggtctcattctcttctccaggctccatggccagcccagtcccattctccagactcagggtctacatccttcccactcaataaaactaaagcggcaccaacagctgatacattcagcagccagggacaaaaccacttctagctgtgaattccatccagtcacacacagggtgcagctgcagcccacatctgcaaactctgcattcygaaaccctttgtatatatacttcctagggactcagacagtgggccccaggggcaagaggacttgtccttcccaaggtcacagggttca

SEQ ID NO: 296138 - DNA, 587 bp, Homo sapiens
actgaatgcccaatcctttctaaagtctccctgtcctacctgataagattyggagaacccctcagccctccctgaacaggactgccccactcctgtgggcctctgcagacatataggcccgaggcaggacggctgtcttctgggcaccaacctctctctcatctaccctccataacccatgctggacacttagcctcatgctgcatttcatcattctgcatatggcatctctcctttatgggattgtacacctaagggcagctaccaagtcccacacataattatccttccggggttccagcccaatgctaacaaagggtaggttctgcaaaaatagattttgaaagacacaactaaatgtatctgaaaaaataaaagactcgggtcataagctagaaaaagtaatgcaaactcattcatttcatagaattctgggaagagttcatacatgttatttttctttaaaagccactctagtgtggaattgtgttcaccttccctgaaggctggggaggagctggctgggaagatatatactgtgacgtctatggaagagatgcttcaggtctaggagtgaccgctccctt

SEQ ID NO: 296139 - DNA, 538 bp, Homo sapiens
gcctcatgctgcatttcatcattctgcatatggcatctctcctttatgggattgtacacctaagggcagctaccaagtcccacacataattatccttccggggttccagcccaatgctaacaaagggtaggttctgcaaaaatagattttgaaagacacaactaaatgtatctgaaaaaataaaagactcrggtcataagctagaaaaagtaatgcaaactcattcatttcatagaattctgggaagagttcatacatgttatttttctttaaaagccactctagtgtggaattgtgttcaccttccctgaaggctggggaggagctggctgggaagatatatactgtgacgtctatggaagagatgcttcaggtctaggagtgaccgctcccttgcctgtgcccctaacctacacctctcatctaaagggtgtctgcggcaatacatctgtgaggttccagaaccccgacacatgctatgagctcagcagtgacttgaggggggcaggcagcagactggctttctctaatgggggtg

SEQ ID NO: 296140 - DNA, 538 bp, Homo sapiens
gcctcatgctgcatttcatcattctgcatatggcatctctcctttatgggattgtacacctaagggcagctaccaagtcccacacataattatccttccggggttccagcccaatgctaacaaagggtaggttctgcaaaaatagattttgaaagacacaactaaatgtatctgaaaaaataaaagactcgggtcataagctagaaaaagtaatgcaaactcattcatttcatagaattctgggaagagttcatacatgttatttttctttaaaagccactctagtgtggaattgtgttcaccttccctgaaggctggggaggagctggctgggaagatatatactgtgacgtctatggaagagatgcttcaggtctaggagtgaccgctcccttgcctgtgcccctaacctacacctctcatctaaagggtgtctgcggcaatacatctgtgaggttccagaaccccgacacatgctatgagytcagcagtgacttgaggggggcaggcagcagactggctttctctaatgggggtg

SEQ ID NO: 296141 - DNA, 599 bp, Homo sapiens
aggctcttttcaaactgatgtattatccttcttagtgcctcaaactagattgtgcatgaacatgttataaaaaggtagtacaaatcaattttggtgcaaaaaatttgaaatccagcatagttttttcataatatgcatttcctatgaactttytgaagagccctcagacagcctctcacacagctactccacatccttgaggatcagagatcaaggcatcagcagggttggtggcttctaagggctgtgagggagaaaccgtttatacctctctcctggcttctggtgggttgctcaccatcttcagcattccatgtcttggagctgcatcactctgatctctgctttcatctccagatgacgttctccctggatgtatacagctctgtgtccagattttccctctatataaggacatcggtcatattgaattaggacccaccctaaagacctccttttcccctgattacctctataaataccctctctccaaataatgtcacattctgaggtactaggggttaagatttcaacatatggatttgacaagtatgtaattcaacccatagcaccctatgtccaaactgcactagccctgg

SEQ ID NO: 296142 - DNA, 599 bp, Homo sapiens
aggctcttttcaaactgatgtattatccttcttagtgcctcaaactagattgtgcatgaacatgttataaaaaggtagtacaaatcaattttggtgcaaaaaatttgaaatccagcatagttttttcataatatgcatttcctatgaactttctgaagagccctcagacagcctctcacacagctactccacatccttgaggatcagagatcaaggcatcagcagggttggtggcttctaagggctgtgagggagaaaccgtttatacctctctcctgrcttctggtgggttgctcaccatcttcagcattccatgtcttggagctgcatcactctgatctctgctttcatctccagatgacgttctccctggatgtatacagctctgtgtccagattttccctctatataaggacatcggtcatattgaattaggacccaccctaaagacctccttttcccctgattacctctataaataccctctctccaaataatgtcacattctgaggtactaggggttaagatttcaacatatggatttgacaagtatgtaattcaacccatagcaccctatgtccaaactgcactagccctgg

SEQ ID NO: 296143 - DNA, 599 bp, Homo sapiens
aggctcttttcaaactgatgtattatccttcttagtgcctcaaactagattgtgcatgaacatgttataaaaaggtagtacaaatcaattttggtgcaaaaaatttgaaatccagcatagttttttcataatatgcatttcctatgaactttctgaagagccctcagacagcctctcacacagctactccacatccttgaggatcagagatcaaggcatcagcagggttggtggcttctaagggctgtgagggagaaaccgtttatacctctctcctggcttctggtgggttgctcaccatcttcagcattccatgtcttggagctgcatcactctgatctctgctttcatctccagatgacgttctccctggatgtatacagctctgtgtccagattttccctctatataaggacatcggtcatattgaattaggacccaccctaaagacctccttttcccctrattacctctataaataccctctctccaaataatgtcacattctgaggtactaggggttaagatttcaacatatggatttgacaagtatgtaattcaacccatagcaccctatgtccaaactgcactagccctgg

SEQ ID NO: 296144 - DNA, 460 bp, Homo sapiens
tcaggtgaccaaaccttcctaacccagtgtgagagcagccataatcgatgatggaacacaggagacagagccgcttctcctgctccaggaaggaggaggctgccaggtaacgctgggagactgcgctggagctactccgcagacaaagtgccggagttcgaaaggggcacaggctaaggacactccgggcggaaagagcagccaagctgcggaacaagasgtcccaagcatgtttctgagaaccttgattttgcaccttgtttcagacactttcttgtcactgagctggtgtaggtgggaagtgaaagtgtaaaatacggtggtttccgaaatagggtgtttatacacctaaaaagttttgaaaactccttgataggctattttttaaaaattaagtaaaataatctaacaaagtttcttaacttctcaacatttcaacgaaaccccaagagtatgtaag

SEQ ID NO: 296145 - DNA, 460 bp, Homo sapiens
tcaggtgaccaaaccttcctaacccagtgtgagagcagccataatcgatgatggaacacaggagacagagccgcttctcctgctccaggaaggaggaggctgccaggtaacgctgggagactgcgctggagctactccgcagacaaagtgccggagttcgaaaggggcacaggctaaggacactccgggcggaaagagcagccaagctgcggaacaagaggtcccaagcrtgtttctgagaaccttgattttgcaccttgtttcagacactttcttgtcactgagctggtgtaggtgggaagtgaaagtgtaaaatacggtggtttccgaaatagggtgtttatacacctaaaaagttttgaaaactccttgataggctattttttaaaaattaagtaaaataatctaacaaagtttcttaacttctcaacatttcaacgaaaccccaagagtatgtaag

SEQ ID NO: 296146 - DNA, 258 bp, Homo sapiens
atacacctaaaaagttttgaaaactccttgataggctattttttaaaaattaagtaaaataatctaacaaagtttcttaacttctcaacatttcaacgaaacccyaagagtatgtaaggtgggttcatttttactaatatattttggaattttctgccacgtaagggacctaaatgtagaaaaaaaaaaaaaaaacctaaaatttaatgtgcattatattaaaaggaaaaaaaaatctctctttatcctcctttctct

SEQ ID NO: 296147 - DNA, 583 bp, Homo sapiens
tccattgtttgcagcctaacggagccctggctgctcctgtctggagatggggcacgtggacgaggccttggagaggccagcatctctcacctcctttcyagcccacagctccaggcacgcagactcttcctgtgactatatagaagtcatctatcttcctaaagccataaccagacagaccttctgtcaaaaggcaggagagttgggaacgggctctttgaggccacagatggacactgtcattgacccctccaggatcctgtttcctgacatacacccttgattcaggtcatctggttattgtgagctgggtcataaatcttaaggagctccctttctttgcaaacaactatacgccaagaatactccttatttataaaacaatatgtatgctggttctatggaaggttttcagtcctcagggtgctaaaattcttgtgcccttctgcctctttaaccatagcacacatgctcaagagaactagagttgccaagaaatcatttctatagatgggctccaacaaacccaggttatggaggatggcctatttccaacaagcttcatttaaggttctcctacatt

SEQ ID NO: 296148 - DNA, 583 bp, Homo sapiens
tccattgtttgcagcctaacggagccctggctgctcctgtctggagatggggcacgtggacgaggccttggagaggccagcatctctcacctcctttctagcccacagctccaggcacgcagactcttcctgtgactatayagaagtcatctatcttcctaaagccataaccagacagaccttctgtcaaaaggcaggagagttgggaacgggctctttgaggccacagatggacactgtcattgacccctccaggatcctgtttcctgacatacacccttgattcaggtcatctggttattgtgagctgggtcataaatcttaaggagctccctttctttgcaaacaactatacgccaagaatactccttatttataaaacaatatgtatgctggttctatggaaggttttcagtcctcagggtgctaaaattcttgtgcccttctgcctctttaaccatagcacacatgctcaagagaactagagttgccaagaaatcatttctatagatgggctccaacaaacccaggttatggaggatggcctatttccaacaagcttcatttaaggttctcctacatt

SEQ ID NO: 296149 - DNA, 583 bp, Homo sapiens
tccattgtttgcagcctaacggagccctggctgctcctgtctggagatggggcacgtggacgaggccttggagaggccagcatctctcacctcctttctagcccacagctccaggcacgcagactcttcctgtgactatatagaagtcatctatcttcctaaagccataaccagacagaccttctgtcaaaaggcaggagagttgggaacgggctctttgaggccacagatggacactgtcattgacccctccaggatcctgtttcctgacatacacccttgattcaggtcatctggttattgtgagctgggtcataaatcttaaggagctccctttctttgcaaacaactatacsccaagaatactccttatttataaaacaatatgtatgctggttctatggaaggttttcagtcctcagggtgctaaaattcttgtgcccttctgcctctttaaccatagcacacatgctcaagagaactagagttgccaagaaatcatttctatagatgggctccaacaaacccaggttatggaggatggcctatttccaacaagcttcatttaaggttctcctacatt

SEQ ID NO: 296150 - DNA, 583 bp, Homo sapiens
tccattgtttgcagcctaacggagccctggctgctcctgtctggagatggggcacgtggacgaggccttggagaggccagcatctctcacctcctttctagcccacagctccaggcacgcagactcttcctgtgactatatagaagtcatctatcttcctaaagccataaccagacagaccttctgtcaaaaggcaggagagttgggaacgggctctttgaggccacagatggacactgtcattgacccctccaggatcctgtttcctgacatacacccttgattcaggtcatctggttattgtgagctgggtcataaatcttaaggagctccctttctttgcaaacaactatacgccaagaatactccttatttataaaacaatatgtatgctggttctatggaaggttttcagtcctcagggtgctaaaattcttgtgcccttctgcctctttaaccatagcacacatgctcaagagaactagagttgccaagaaatcatttctatasatgggctccaacaaacccaggttatggaggatggcctatttccaacaagcttcatttaaggttctcctacatt

SEQ ID NO: 296151 - DNA, 412 bp, Homo sapiens
gcagtaacccaatgacccggaagttaccacctttttcctagaaatgcctgcatcaactgccttttaacttgcatgtaattaaaagtgggtacaaatatgactgctgaactgyccctgagctgctactctgggcacactgcctgtggggtagccctgctccacagggagcagtacagctgctgctgcctcaataaaagttgctgtctaacaccaccacttgtgcttgaattctctcctgggcaaagccaagaatcctcctgggctaagccccagtttggggtcttgcctgtcctgcatcagttgcaaatggtaagctgataagaaatgaaaatgtaaggaaaactcctacataccacccagggagaagcccactcccaggcagcatcaagcccagaaggaagcaaatggggtt

SEQ ID NO: 296152 - DNA, 505 bp, Homo sapiens
gtgcagctaatttagtctttatgctccaggatccagcacagagccagattcactgttcagaaaatgaatgaggaaatgaactgaagagtgaatgtgcaaatagagttcttctctcaactcttctacacttcctttgaactcttttttttttttttttttttttttttttttgagatggagtcttgctctgtcacccaggctggagtgcagtggcacaatctcggctcactgcaagctccgcctcctgggttcacgtcattctcctgcctcagcctcccgaatagctgggactacaggcaccagcaccatgcccacctaatttcttgtatttttggtggagacggggtttctgaactcttatttatttattcacttgkctatttccttttcctctctcttcccagctcctgcttcttcgtcacaggtacaccagggcatccagcacattgatttgtccccactcgccttagcctgtctcctgccacagttgtctcattttggtgaa

SEQ ID NO: 296153 - DNA, 487 bp, Homo sapiens
tgctctctcttcagccagcagttggcctggatctttgctggtagacacagggaatgttctccttgatgagtggttcccaccctggcagcctcagatcccaccatgttggcagggatgctgaaatccacctgcctatcagcctttgtaaataacaaaaatcacaagtggctctagcatttatgtattctatgatattgggactcttgtgatataaataatacaaatgcttttacatgcataattcaatttatactatgttttatctttaattaccggataataaaaacataactactctcaggaagtgtgrgggatggtgactcaggctaaggtgagcctcacagcctggaggctggctttagtgctggctgggagagctgcaaggagatggcatatgctgccgatgaaggtgttctccaggaattttcagttagaagttttgatcattgttcatttggcctcaggatgaacatcatggtactgcttt

SEQ ID NO: 296154 - DNA, 605 bp, Homo sapiens
ggcagtgataggcctggatgaccctcagtggcccttctagcacaaaaatttctcaagtcagaagaacaaaaccctgtacttctactctccctgggacagtggcaccaaatatrccataagtgttcatctttccggtggagttcatacgtgtagtgttgtgtttactttactgactgtaaacagaacaggtgcctgtcattcactcacccattccttccgtctggatacagggcagcagaaatcagcagaatgcttttattcacagagctgaatgcctacaccagaaaacaaacattaagcaaatagtggcagaaataatttttttttttttagacgaagtctcactctgtcacccaggctggagtgcagtgggacgatcttggctaactgcagcctccacctcccagactcaagtgatccttccaccttggcctcccaggtagctgagattacaggcacgcaccactatacccaactgatttttgtatttttcgtagagatggggtttcaccatgttgtccaggctggtctggaactcctgacctcaagaaatccacctgcctcggcctcccaaagtgctgggttacaggcatgagccaccgcac

SEQ ID NO: 296155 - DNA, 569 bp, Homo sapiens
tggctttgtggtcagaacagcatgggctcaaatccagcttggtcttgccttggcctgcgtagcccgggcagctcttctgcctcccccaacccagggaagtggggttgatgttctgaatctgcagggctcttggagaagttacagggtgcctgacacatgggagccaggctctgcccacagtcacccagccagcatgttgcagagccaggattttaaattagatccagccagttccagaatcattactttttccgttccgtatgcataccaggctgcctctttctagattatcctccaaaaagccctggggaggcggcagcagcatgagcrgcagacaggcggccaagaagtgaggccccagacagggatctgagcgtgatctttgcccttgggacgcaaggcatccatccaagaggtcacagaaatcagcagctttcaccgggaagccccaagtcctgggattggggtgctgaagggggatccaaaaaaaacagtcattgatttggaaggagatgctgttctccatctcagccagctgttaaagggacatggattgaactcccaggcag

SEQ ID NO: 296156 - DNA, 569 bp, Homo sapiens
tggctttgtggtcagaacagcatgggctcaaatccagcttggtcttgccttggcctgcgtagcccgggcagctcttctgcctcccccaacccagggaagtggggttgatgttctgaatctgcagggctcttggagaagttacagggtgcctgacacatgggagccaggctctgcccacagtcacccagccagcatgttgcagagccaggattttaaattagatccagccagttccagaatcattactttttccgttccgtatgcataccaggctgcctctttctagattatcctccaaaaagccctggggaggcggcagcagcatgagcggcagacaggcggccaagaagtgaggccccagmcagggatctgagcgtgatctttgcccttgggacgcaaggcatccatccaagaggtcacagaaatcagcagctttcaccgggaagccccaagtcctgggattggggtgctgaagggggatccaaaaaaaacagtcattgatttggaaggagatgctgttctccatctcagccagctgttaaagggacatggattgaactcccaggcag

SEQ ID NO: 296157 - DNA, 595 bp, Homo sapiens
ctgcagaggctcaggctaatgtgtgtgtttgtgtcttagttctgaataaaaaagtgtaaaatgttaaaaaaaattacaacagaaaaaatgcttattgaataagaatatacagaaagaaaatatttttgtatagctgtacaacgtgtttgtgttttaagctgttattagaaaagagcaaaamaaatttaaaaatgaaaagatctataaagtaaaaatgttacagtaagctaatgttaatttattattaaagaaaaaatgttgaaataaatttagtgtagcctgagcgtacagtgtttctaaagcctacagcagtgtagagcaatgtcctaaaccttcacattctctcaccactcactcaccgactcacccagagaaacttccagtcctgcaagctccattcatgggaagtgccctatacaggtgtgccatttttaatctttcatactgtgtttttcctgtgtctttttaaggtttagatacacaaattattgccattgtgttacaattgcctgcagtattcagtagagtaacatgctgtacaggtttgtagcctaggaacaattggctacaccatacagcctaggtgtgtagtagg

SEQ ID NO: 296158 - DNA, 555 bp, Homo sapiens
gtgtatgcaacaacagagctgcaaaataggcaaaacaaaaaccaacggaactgaaaggagaaatagactaatccacaattactgctggagatttcaatacctccctctcaacaattgatagaataaccagacagaatattggcaagggtatagaagaatggaacaataccgtcaaccaacaggatctaatcaacatttatagaacaatccacccaacaacagcagaatatacattcttgacagttgcctacagagcttataccaagacagactctattctgagccaaacacacttcaacaaattcaagataattgaaatcatacagtgtattctccagccacaatggaataaaattagacatcaataagaaaaatctcaaaacacttggaaactaaataacacatttctaaattatccatagktcaaagatgaagtctcaagagttttttaaaaaatacattcaactgaatgataatgaaaatacaacatatcaaaagtcgtgagacacagctaaagctgtactgagggggatatttatagcattaaatgcatac

SEQ ID NO: 296159 - DNA, 576 bp, Homo sapiens
ggaggtgaagtaaggcgatttctatggaaaatatatttttcttctttactcctcatgctgartgcataagaatttattatttcccctgaatgttcaaagtggtgtgtgtgtgtgtgtaaaagaaccaggagcaaacaatcttaataggaatgtgcgatcttgtgtttatctttagcacacttaattagctacaacccgggactgttgccatttgaacaagttgttaagaaaatctgccatgttttgctcttttttaaaaggaatgactttaataaccatagcaacacttactcagttttgtgatccactccaagattatgggagcaagaacagatactcctgaaagcaaccctcacctcctcccccgccccctgccctcagcaagtcctggcctgtgtgaactgaagggtttggaagctctggtttctaggagtgcccagaagctagaaagactagggtgtactagttattgaggggcagttgtcagtggcagtgtgggggcaccccagttgttattcgaggcactgcattgcttttttgtctcctctgtaagcatcctgcctcagtgtcagggct

SEQ ID NO: 296160 - DNA, 593 bp, Homo sapiens
tatgagatgaatgaatcatagtgactacttataacattgaggctgctttaaaggatttattcacccattcaacaacattgtattgatatttatattataaatatatattcataataaatatacatttattgaaaatatctatgtctcatataggacagtcatacttgttatattcattatatttatttgtacatgtttacatattcattaaaatatattacatccaaaacattgatatcgatgtgtctatgaagatatgtaatttgcttgggggaaactagggagattccaaaaatcactcagcattacacagtgacatttgaggacaaatttgatgatgccgttggtatgcaatgtcaacttcattccttgcctctgtgctttgtcattatttcaaagcactgtcttctaggtcacagtgtgactccatgcgcaccagaaaagatgtctggtcttagtctagcatgaaagacgtggcatatgtggtgcagctgtcaccaacatmctgagtcagaaccagaacatcagagactgagttaagacacacgcagcaaagcacaatttctcccactgggaattgatgtcagatactg

SEQ ID NO: 296161 - DNA, 535 bp, Homo sapiens
agggctaggaggaacctgagtacagtttccagctgaatttgaactgccagcagttattgagacagatagagctgtccagttactctgaaaacatttaaagtctgtctttattatcatccaaataaaagtctaaatttcacatccacgtggtctgtgagcatctgagagcacccatattttcctcaaactcactttaaccaaagctcctggggaagacgcatgacccagaatactggcccacacattgtcttgaacatggtgattggaactggaaaaccttcttcaaagccaggattactagccaactgtagcaagcgcacaggaatgtcaccatggggyatgcagacggtgtcgcccaggaaagaatcgtgcccacgtaggggctacaagatgctatttggctccactgttcatgccaacattgaaaacacctatgaaaaacccaggttttgcataactgtaatgcattctaagcctctctgcctgataatcatttacctgtatggcttgcttcttttaactctaagttaggaat

SEQ ID NO: 296162 - DNA, 434 bp, Homo sapiens
ttcaaggacccactggaaacagcccgcacttcctgtagaactagagaatttctctccttctttaatcttagtggactccagagaaagtggatagaaataggcatgatataaaatatcacatcaaatccactcacctcttgcattcctctgtgaaggtggttgccaacaaggggaagttagaaaccaggcctggagccacaytgctggccaggaatcccagctaagtcccttattagctatgcaacttgagcaaggagttctccagctcgtgacctccattttcttatctgtaaaatgggaatgaaaataacatgaccgtgggccacacagggacgtcataagaagaaatgagtgaatacatatgtagcccttagaacagcaatagacatgcaataagcaatcaaaacgttagctattcttaatagctcaaagga

SEQ ID NO: 296163 - DNA, 434 bp, Homo sapiens
ttcaaggacccactggaaacagcccgcacttcctgtagaactagagaatttctctccttctttaatcttagtggactccagagaaagtggatagaaataggcatgatataaaatatcacatcaaatccactcacctcttgcattcctctgtgaaggtggttgccaacaaggggaagttagaaaccaggcctggagccacactgctggccaggaatcccagctaagtcccttattagctatgcaacttgagcaaggagttctccagctcgtgacctccattttcttatctgtaaaatgggaatgaaaataacatgaccgtgggccacacagggacgtyataagaagaaatgagtgaatacatatgtagcccttagaacagcaatagacatgcaataagcaatcaaaacgttagctattcttaatagctcaaagga

SEQ ID NO: 296164 - DNA, 563 bp, Homo sapiens
aaactctgccgatgcctcagaagccaaagataactaaattgtgtttcttttagttcttgcataggggcaagcccacttcacatttcatgatacaccaactcctagagagctcctttggggccctatttaatttacttaacttttgttggcaatggaaagtgggcctgccacatttgatgactagagcaggtccatcccagtcacctgccttcccaaaagtgcattggagagtggaacagaaaccacaacccactgtctcggacaggcgtcagcattgtaaaatacactctggcacccagccctggcagaatagtggtctacagaggcaaaacttcagrtttttactatacccaaggcataatgaactttatcgagggtaaatattgcccagccttctttcatgtaggaaccaagaaaactagacccaacagttttgcctttccttccttctctgtacatgttcttcctagttgtactggattttgctaatatcataagcacagctgtgatacagccaggtctttatgcatggattttactctttgagcagcttgaagacaatt

SEQ ID NO: 296165 - DNA, 461 bp, Homo sapiens
ggagtcaggagcatgacatgttctacacaactacagtcttcatcataatcccaaaggcagccataaccatgggtaattgggataatatttagaaaatatttgcatgccaaaactgacatttttagaggccatggagaaacaggtttccaatgtcaagttttgttgaaagaggacacacattattctagattctgaaagttcccttcatcttcaaagagctaggccttgccagtgtgactgtggagyttgctataagcctgaataaagagaagacagaggacatcaagttagggaaaccccacccaacaggaaggagacactcttctggccaagaggcaagttggggagggagggatgcagagagaagagaagatgagagaagttaaggctgagctagtatctgagaatacctcacatgtgccccacagcctgcctcttcctctgctacactgtggccagaa

SEQ ID NO: 296166 - DNA, 461 bp, Homo sapiens
gtgaggcctggtgggaggtgcttggatcatagaggtggtttctagtggtttggcaccatccccctagttctgtatttaaagtgtgtagtaccatccccttctctctctctcctactggccatatgcagatattcctgcttccccttcrccttccaccataattgtgtttcctgaggccttcccagccatgtttcctgtacagcctgcagaactgtgagtcatttaacctcttttctttataaattacccattctcagggagttctttatagcaatgcaagaatggactaatacacgcagctaaagtttttcttaagcacttaaattgttgactataaaatgataaatttaactatgtcaaaataaagaacatttgttcaccaagagatacctttaaaaagtaaaaagacaaagtaaaaactgggacaagagattcataatatcaaccacaaaggtttagta

SEQ ID NO: 296167 - DNA, 536 bp, Homo sapiens
ccttctctctctctcctactggccatatgcagatattcctgcttccccttcgccttccaccataattgtgtttcctgaggccttcccarccatgtttcctgtacagcctgcagaactgtgagtcatttaacctcttttctttataaattacccattctcagggagttctttatagcaatgcaagaatggactaatacacgcagctaaagtttttcttaagcacttaaattgttgactataaaatgataaatttaactatgtcaaaataaagaacatttgttcaccaagagatacctttaaaaagtaaaaagacaaagtaaaaactgggacaagagattcataatatcaaccacaaaggtttagtaccaagaatatatgtagaactgctacaaatcaattttgttaacaaagcacaaataaccagtataataatgaggaaaaaaagcaccaatggcatttcacagaagaggaaacatatatgcccaataaacttatgaaaagattcaaaaagaaaagtgaaaaaaattatgaatacc

SEQ ID NO: 296168 - DNA, 536 bp, Homo sapiens
ccttctctctctctcctactggccatatgcagatattcctgcttccccttcgccttccaccataattgtgtttcctgaggccttcccagccatgtttcctgtacagcctgcagaactgtgagtcatttaacctcttttctttataaattacccattctcagggagttctttatagcaatgcaagaatggactaatacacgcagctaaagtttttcttaagcacttaaattgttgactataaaatgataaatttaactatgtcaaaataaagaacatttgttcaccaagagatacctttaaaaagtaaaaagacaaagtaaaaactgggacaagakattcataatatcaaccacaaaggtttagtaccaagaatatatgtagaactgctacaaatcaattttgttaacaaagcacaaataaccagtataataatgaggaaaaaaagcaccaatggcatttcacagaagaggaaacatatatgcccaataaacttatgaaaagattcaaaaagaaaagtgaaaaaaattatgaatacc

SEQ ID NO: 296169 - DNA, 631 bp, Homo sapiens
ctgtacagcctgcagaactgtgagtcatttaacctcttttctttataaattacccattctcagggagttctttatagcaatgcaagaatggactaatacacgcagctaaagtttttcttaagcacttaaattgttgactataaaatgataaatttaactatgtcaaaataaagaacatttgttcaccaagagatacctttaaaaagtaaaaagacaaagtaaaaactgggacaagagattcataatatcaaccacaaaggtttagtaccaagaatatatgtagaactgctacaaatcaattttgttaacaaagcacaaataaccagtataataatgrggaaaaaaagcaccaatggcatttcacagaagaggaaacatatatgcccaataaacttatgaaaagattcaaaaagaaaagtgaaaaaaattatgaatacctagtatatgatagcacaaaagggtgactatagtcaaaataatttaactgtacatttaaaaatacctaaaagagtataattggattgtttataacacaaaagataaatgcttgaggggatggataccccatttcccatgatgtgattattatgcattgtgtgcctatatcaaaacatctcatgtaccccataaa

SEQ ID NO: 296170 - DNA, 491 bp, Homo sapiens
ataaccagtataataatgaggaaaaaaagcaccaatggcatttcacagaagaggaaacatatatgcccaataaacttatgaaaagattcaaaaagaaaagtgaaaaaaattatgaatacctagtatatgatagcacaaaagggtgactatagtcaaaataatttaactgtacatttaaaaatacctaaaagagtataattggattgtttataacacaaaasataaatgcttgaggggatggataccccatttcccatgatgtgattattatgcattgtgtgcctatatcaaaacatctcatgtaccccataaatatatgtacctattatgtacccacaaaaactaaaaataaaaaaatttgttaaagaaaaaaagtgaaaattaaaatcacaatgaaataacatgttatactcattcaattagcaaaaagtagaaagcctaacacaattaagtgctggagaggatgaagcctgtggcattgtagattagca

SEQ ID NO: 296171 - DNA, 491 bp, Homo sapiens
ataaccagtataataatgaggaaaaaaagcaccaatggcatttcacagaagaggaaacatatatgcccaataaacttatgaaaagattcaaaaagaaaagtgaaaaaaattatgaatacctagtatatgatagcacaaaagggtgactatagtcaaaataatttaactgtacatttaaaaatacctaaaagagtataattggattgtttataacacaaaagataaatgcttgaggggatggataccccatttcccatgatgtgattattatgcattgtgtgcctatatcaaaacatctcatgtaccccataaatatatgtacctattatgtacccacaaaaactaaaaataaaaaaatttgttaaagaaaaaaagtgaaaattaaaatcacaatgaaataacatgttatactcattcaattagcaaaaagtaraaagcctaacacaattaagtgctggagaggatgaagcctgtggcattgtagattagca

SEQ ID NO: 296172 - DNA, 591 bp, Homo sapiens
cctggtgtttttaaatcttcaagatattttatctcacctaactttctttctaaatttactgattgtgggtgtattttttttaacaataccactggaatcacctcttaatgacaattagcctatcctgcagtagaatacactatttgttttaaagatcataacacagcaaaagttgaaatgactttgcaataattatcaaaagcacaggagtctagaagcagtgattcacacccaygagacaatggatggtgacattcctgtctacctgcttaccccctgaagtgggagacagttcacgctctgcacctcacccccaagaacagcttgaaattatgtattttttgttgtttttcaactaagaaaatgttgcattatttcaagtttcaaatcagattatacaaaatcatgtataatattctctcactggttaggtaggagctgcactcctttctctagtgttgccaagatttccatcactggaatgtgaagcccttcacctctcagaatgccagagagaaggagtccctcctgtggtcctgcagtgtcaccccaaaagctgcccaggttgccagatgtgtctgagagaagtga

SEQ ID NO: 296173 - DNA, 591 bp, Homo sapiens
cctggtgtttttaaatcttcaagatattttatctcacctaactttctttctaaatttactgattgtgggtgtattttttttaacaataccactggaatcacctcttaatgacaattagcctatcctgcagtagaatacactatttgttttaaagatcataacacagcaaaagttgaaatgactttgcaataattatcaaaagcacaggagtctagaagcagtgattcacacccatgagacaatggatggtgacattcctgtctacctgcttaccccctgaagtgggagacagttcacgctcygcacctcacccccaagaacagcttgaaattatgtattttttgttgtttttcaactaagaaaatgttgcattatttcaagtttcaaatcagattatacaaaatcatgtataatattctctcactggttaggtaggagctgcactcctttctctagtgttgccaagatttccatcactggaatgtgaagcccttcacctctcagaatgccagagagaaggagtccctcctgtggtcctgcagtgtcaccccaaaagctgcccaggttgccagatgtgtctgagagaagtga

SEQ ID NO: 296174 - DNA, 591 bp, Homo sapiens
cctggtgtttttaaatcttcaagatattttatctcacctaactttctttctaaatttactgattgtgggtgtattttttttaacaataccactggaatcacctcttaatgacaattagcctatcctgcagtagaatacactatttgttttaaagatcataacacagcaaaagttgaaatgactttgcaataattatcaaaagcacaggagtctagaagcagtgattcacacccatgagacaatggatggtgacattcctgtctacctgcttaccccctgaagtgggagacagttcacgctctgcacctcrcccccaagaacagcttgaaattatgtattttttgttgtttttcaactaagaaaatgttgcattatttcaagtttcaaatcagattatacaaaatcatgtataatattctctcactggttaggtaggagctgcactcctttctctagtgttgccaagatttccatcactggaatgtgaagcccttcacctctcagaatgccagagagaaggagtccctcctgtggtcctgcagtgtcaccccaaaagctgcccaggttgccagatgtgtctgagagaagtga

SEQ ID NO: 296175 - DNA, 499 bp, Homo sapiens
gaagaattattttgtgcccagctgaaaatcaggggcttgattatcagggaagggggagaacacatgtggggttaggcaatcagcagtcactgccgtggccatgactgragcatgtcgaatgttctgaggcctccagggggtgcatggcagtctctcagtagtgtgcaacttggcctttctcgacccagaagcctataaacagataataaagcaataaattagctgccacacacagctcggtaccctacagtagaacaggggcaggataatagcaacagcaccaccattctaagaggagcagacgggaggcacacaggggcccccgcctagcaataaaccttctgagcatgcagtgggaggcctttccccctggtgttctggtttatccctggggaacctctctactcactgtcctctggggcccctagcttgtgctcagagagaccctctggtctctcactctggatagctgtgtatgatatgggattagggacatgcc

SEQ ID NO: 296176 - DNA, 499 bp, Homo sapiens
gaagaattattttgtgcccagctgaaaatcaggggcttgattatcagggaagggggagaacacatgtggggttaggcaatcagcagtcactgccgtggccatgactgaagcatgtcgaatgttctgaggcctccagggggtgcatggcagtctctcagtagtgtgcaacttggcctttctcgacccagaagcctataaacagataataaagcaataaattagctgccacacacagctcggtaccctacagtagaacaggggcaggataatagcaacagcaccaccattcyaagaggagcagacgggaggcacacaggggcccccgcctagcaataaaccttctgagcatgcagtgggaggcctttccccctggtgttctggtttatccctggggaacctctctactcactgtcctctggggcccctagcttgtgctcagagagaccctctggtctctcactctggatagctgtgtatgatatgggattagggacatgcc

SEQ ID NO: 296177 - DNA, 499 bp, Homo sapiens
gaagaattattttgtgcccagctgaaaatcaggggcttgattatcagggaagggggagaacacatgtggggttaggcaatcagcagtcactgccgtggccatgactgaagcatgtcgaatgttctgaggcctccagggggtgcatggcagtctctcagtagtgtgcaacttggcctttctcgacccagaagcctataaacagataataaagcaataaattagctgccacacacagctcggtaccctacagtagaacaggggcaggataatagcaacagcaccaccattctaagaggagcagacrggaggcacacaggggcccccgcctagcaataaaccttctgagcatgcagtgggaggcctttccccctggtgttctggtttatccctggggaacctctctactcactgtcctctggggcccctagcttgtgctcagagagaccctctggtctctcactctggatagctgtgtatgatatgggattagggacatgcc

SEQ ID NO: 296178 - DNA, 499 bp, Homo sapiens
gaagaattattttgtgcccagctgaaaatcaggggcttgattatcagggaagggggagaacacatgtggggttaggcaatcagcagtcactgccgtggccatgactgaagcatgtcgaatgttctgaggcctccagggggtgcatggcagtctctcagtagtgtgcaacttggcctttctcgacccagaagcctataaacagataataaagcaataaattagctgccacacacagctcggtaccctacagtagaacaggggcaggataatagcaacagcaccaccattctaagaggagcagacgggaggcacacaggggccccygcctagcaataaaccttctgagcatgcagtgggaggcctttccccctggtgttctggtttatccctggggaacctctctactcactgtcctctggggcccctagcttgtgctcagagagaccctctggtctctcactctggatagctgtgtatgatatgggattagggacatgcc

SEQ ID NO: 296179 - DNA, 614 bp, Homo sapiens
aatgctttggggctgcaccctcggcctgtgcttcctatgccaggctacttttacatgaaagagaaaaagaagtcctgacttaatgcattgctgtatttttccagaaatgtgcagccagacctaatgataggtggtttagggtgrgaagcagagtaagatgacagaactttaggaccacatgaagggaaggagagggtcccccaggaaagggtgcagtttgttagacagaacaatagcatatccgctacaaagagctgccatttgctgggcgctaagggcctggccctctgtgaacctcaccatctgcatcatctcacttcatcctcaccagggtgggggcacgaggactctctcatgaccagggctattctcaatttacaaatgaggaaacaaaggctcaggaagggctctttctcaaggccactgagttgggagctacgttccactctgggtctgtttgtctcagggacaaaccttgaagccacacaagggccccgagaagctgtgcagatgtgaaacccagagtggcccgatcagatctatgactttgtgtcatcacaaaagtgaaagaagcagttcacagaaggagtggagtgtgcaggtcagaggcagga

SEQ ID NO: 296180 - DNA, 614 bp, Homo sapiens
aatgctttggggctgcaccctcggcctgtgcttcctatgccaggctacttttacatgaaagagaaaaagaagtcctgacttaatgcattgctgtatttttccagaaatgtgcagccagacctaatgataggtggtttagggtgagaagcagagtaagatgacagaactttaggaccacatgaagggaaggagagggtcccccaggaaagggtgcagtttgttagacagaacaatagcatatccgytacaaagagctgccatttgctgggcgctaagggcctggccctctgtgaacctcaccatctgcatcatctcacttcatcctcaccagggtgggggcacgaggactctctcatgaccagggctattctcaatttacaaatgaggaaacaaaggctcaggaagggctctttctcaaggccactgagttgggagctacgttccactctgggtctgtttgtctcagggacaaaccttgaagccacacaagggccccgagaagctgtgcagatgtgaaacccagagtggcccgatcagatctatgactttgtgtcatcacaaaagtgaaagaagcagttcacagaaggagtggagtgtgcaggtcagaggcagga

SEQ ID NO: 296181 - DNA, 614 bp, Homo sapiens
aatgctttggggctgcaccctcggcctgtgcttcctatgccaggctacttttacatgaaagagaaaaagaagtcctgacttaatgcattgctgtatttttccagaaatgtgcagccagacctaatgataggtggtttagggtgagaagcagagtaagatgacagaactttaggaccacatgaagggaaggagagggtcccccaggaaagggtgcagtttgttagacagaacaatagcatatccgctacaaagagctgccatttgctgggcgctaagggcctggccctctgtgaacctcaccatctgcatcatctcacttcatcctcaccagggtgggggcaygaggactctctcatgaccagggctattctcaatttacaaatgaggaaacaaaggctcaggaagggctctttctcaaggccactgagttgggagctacgttccactctgggtctgtttgtctcagggacaaaccttgaagccacacaagggccccgagaagctgtgcagatgtgaaacccagagtggcccgatcagatctatgactttgtgtcatcacaaaagtgaaagaagcagttcacagaaggagtggagtgtgcaggtcagaggcagga

SEQ ID NO: 296182 - DNA, 614 bp, Homo sapiens
aatgctttggggctgcaccctcggcctgtgcttcctatgccaggctacttttacatgaaagagaaaaagaagtcctgacttaatgcattgctgtatttttccagaaatgtgcagccagacctaatgataggtggtttagggtgagaagcagagtaagatgacagaactttaggaccacatgaagggaaggagagggtcccccaggaaagggtgcagtttgttagacagaacaatagcatatccgctacaaagagctgccatttgctgggcgctaagggcctggccctctgtgaacctcaccatctgcatcatctcacttcatcctcaccagggtgggggcacgaggactctctcatgaccagggctattctcaatttacaaatgaggaaacaaaggctcaggaagggctctttctcaaggccactgagttgggagctacgttccactctgggtctgtttgtctcagggacaaaccttgaagccacacaagggccccgagaarctgtgcagatgtgaaacccagagtggcccgatcagatctatgactttgtgtcatcacaaaagtgaaagaagcagttcacagaaggagtggagtgtgcaggtcagaggcagga

SEQ ID NO: 296183 - DNA, 559 bp, Homo sapiens
agcacccatctaattccatgctgacctgccttctccatttgtaggataactgcaatactcagaagccggctggtggatcccaggcctctatcattcaattgccatcactgtacttggtggggcctcaaaggatgctccagatcccattttcctgcttccctttttgaaagcaytgtctatgggtgctgcacccactccctgcagccaagctcctgtgcctcactcatggaggctgccggggccatctccctggtcaccatggcctccatgtggccaggtcagtgcatcctgctctgctcctgtctgacttgacctctcagcagtgctggcaggtggacctctcctgccttcttggtacgctcactccttggcttctgagcagtgattttcttggttttcttccaacctcaccctcactggctgagggtgctgggttccattctcatctttctccacatattctctctctatctctcatccaggccaggtctttaattccatctgtagaacattaactcttgaatctgcctctaatattgacttttcccaagaattctaa

SEQ ID NO: 296184 - DNA, 559 bp, Homo sapiens
agcacccatctaattccatgctgacctgccttctccatttgtaggataactgcaatactcagaagccggctggtggatcccaggcctctatcattcaattgccatcactgtacttggtggggcctcaaaggatgctccagatcccattttcctgcttccctttttgaaagcattgtctatgggtgctgcacccactccctgcagccaagctcctgtgcctcactcatggaggctgccggggccatctccctggtcaccatggcctccatgtggccaggtcagtgcatcctgctctgctcctgtctgacttgacctctcagcagtgctggcaggtggacctctcctgccttcttgrtacgctcactccttggcttctgagcagtgattttcttggttttcttccaacctcaccctcactggctgagggtgctgggttccattctcatctttctccacatattctctctctatctctcatccaggccaggtctttaattccatctgtagaacattaactcttgaatctgcctctaatattgacttttcccaagaattctaa

SEQ ID NO: 296185 - DNA, 501 bp, Homo sapiens
ctcagcatcattagtcattagggacatgcaaattaaagctatgaggagacaccatgactcacatgttagagcagctaaactaaaaatactgacaataccagcaggggaaaggatgaggatcaactggtctctcatgcatacattgctggcggaaatgcaaaatggattgtatggtcactttggagaaagtytgacagtttcttataagggtaagcatacagttaccatatcacccagcagtaaattaactatttactttagacaaaagaaaaacttacatccatacaaaaacatgtacacaaatgtttacagcagttgtgtttgtcacagccaatgtggaaaacaaaacaaatttccctcaacaggtgaatggatgaacaacctatggtatatccatacaatggaatagttctcagacatcaaaataaataaaatcccacaacatcaccaaaggagactttagtttcatctgtaatgttttaaggttttaagtagacagac

SEQ ID NO: 296186 - DNA, 622 bp, Homo sapiens
attgttccatgtataaaaggtttctttgctgccatttcattgctgtcaaatcaggaatgaaaaataatattatacacaagaatagggagccagtgacttgataagccatagtatttactcaagaaaataaggtctatttgtgtatgtatactgacagctctcagtactttctgccaggagggctgatgcctttaacatgggtagaaacccatggcttttagcttcaaggtggtttaaaagggaagtgagacggaattttgaacacagcaggaagtttgttatgggaagccttggggtctttccagtgctggttctcattttgggaactcacttatttatcaccattattgtccatgtctatagcttcagctcagcaataagggtgaagtgcaaaggaattggactgtaagtcagtaaactaggcttagatttctactatacctcttctgacctacagataaatgctgtcccttgttctttaagaaagacaaacccagaatgttcatttcagcccaagaagatttgcaaacaacagctggtatygaagcaatttccttgaaccattcactctcgaccaggttttctcattccagctttgctaatgatttgttcttgtttttca

SEQ ID NO: 296187 - DNA, 611 bp, Homo sapiens
ggtttttcaaagcatgggttgcagtttgttggtggttgaattcagtgggtaacaactaacataattttctaaaggaaagtagatagaatcgaatagaaaatgccacagtatacttcacaaatttagggaaatactgttttgtgaaatttttattttagttatgtatgcatgtaggaacggtgtggagatataaaatttattttttattatgaatagcagtcaaacttttgaatgccaataatmtaaagcatacagttttaggtaactatgggcagatgaaacaaattaccactagagggagagttggaccagcgctgagtatggtaactgggaaaatgagaagcatgagctggatccttccaagaacagaaggggttagaaaaaaagacataaggaaaagaaaagtttaatctactcctacactctctaagattacatatctgctacagtagcacatcacagggaactgaaggagaaaatcttgaaaatgaaaatgcacagtgtgtaaataacagaggggttggaactgggtagatcatctgtgtcactagctaactagagtcagaagtctgtgctgcagaaagctatatatgcaggaataagtcagagag

SEQ ID NO: 296188 - DNA, 632 bp, Homo sapiens
tttttttttttcttttatcttgtcttggctactcagaatgaaaatgtttcctatgtgttgagaaatgtcccttggtgtagttcatagtgagaggcaggatcacagctcccactacagaagcaaaggaagcagatattctcaatttcccagctgtctggaggctatagccctgagatatgattgaggcatgccaatgggatgccccagccagggggtgacacggarattattagataattcataatggctgtgagctggggccccacagtggtgataataagagcacaatggttgtggtttgctttaagctttataatcaaatggctctaactacatgatctcacttgtatttttagctgccaaactttcctggttccttcttgttttccagacctggctccccagcatcccaatgagtctttgacatgatgaagaactttcatattttgcttattttgattttagagtcttatctagttatatttgagatacactaaactatatatatttaaagtatacaaactgataagccttgacatatgtatgcatgcatgaaatcataaaaataatataataaacatatctatcaacattaaaagtttcctcccccatccccacctcccactttcaac

SEQ ID NO: 296189 - DNA, 632 bp, Homo sapiens
tttttttttttcttttatcttgtcttggctactcagaatgaaaatgtttcctatgtgttgagaaatgtcccttggtgtagttcatagtgagaggcaggatcacagctcccactacagaagcaaaggaagcagatattctcaatttcccagctgtctggaggctatagccctgagatatgattgaggcatgccaatgggatgccccagccagggggtgacacggaaattattagataattcataatggctgtgagctggggccccacagtggtgataataagagcacaatggttgtggtttgctttaagcttyataatcaaatggctctaactacatgatctcacttgtatttttagctgccaaactttcctggttccttcttgttttccagacctggctccccagcatcccaatgagtctttgacatgatgaagaactttcatattttgcttattttgattttagagtcttatctagttatatttgagatacactaaactatatatatttaaagtatacaaactgataagccttgacatatgtatgcatgcatgaaatcataaaaataatataataaacatatctatcaacattaaaagtttcctcccccatccccacctcccactttcaac

SEQ ID NO: 296190 - DNA, 1172 bp, Homo sapiens
catctgctaactgaacagcccttgggccctgaataaacagtagtgataaccaggtactacatccagggccttgggtgagcctctgagacttgctggcttcaggtgagactcagcacataatcagctgcagcagctacatgacaagactccttctgcttgagaaaagcagagggaaaagtaaaagrgacttcgtcttgcaccatatgtacaagcttggccacaaagcagtagcacaccaagcagattcttgggatccctgattccagaacttggctcttggattgcatttcttgacccccctgggccagaggggagtgcactgctctgaagacagattcctaggccagacagaattcaccacaagttgacttaagagcccttgggccttaagagaatatcaggtagaacactcctatgggccagtggtggtggtggccatggggtaaggctcctctgtttttggaaatgggaggaaatggtgagaaggacagcatcttctggtttaagtgccagctcaggcacagtacagtaaaacactaggtagacttctaaggtttctaactctagtccctggttactggaaagcwggcttgggtgcctcctaaagcagatacggcttagattacaacatccaactccttttgaataactggaaacctttcctaagaagaacaggtaaaaataagcccagacttccaaggctataataaatacctatctcttcaatgcttggacacagaagaacatctacaggtatcaagacaatccaggaaactttacagtggaaacattacatgccaacagagagtggcatggcatatttaaagtgttgaaggaaaaaaaaaacaggaaaacttttatcctagaatagtatatccgtttaaaatattcttcaaawatgaaggagaaatatttaaccagttaacaaaagctgagggatttcatcaacactagaccttttctgcaagaaatgttagagggagtattttaatcagaaagagaaggatgttgatgagcaataagtaatcacctgaaggtgcaaaacccactgataatagtaagcacacagaaaaacacagagtattataataccataactgtggtgtgtaaactactcttattctttgtagaaagattaaatgatgaaccaattaaaaataatagctacaaca

SEQ ID NO: 296191 - DNA, 495 bp, Homo sapiens
atgacccaacagctacacaaatcacctcccatctaatgccagtggctaaacttggtcataaggccatggagcttcaagcttgattaccattgaagagagggataatggatttgaaagagacmcaagcagtcttacattggtagtattcatcagggttccattcttaattggtgtatatttttttcttaacttacacattctcaaatagtgatttcatctcttttcctggttttcattacctatttttatttccagttgtggatctttgtttcatccctttccctagccctctggacttctacaggcatcttaacttgtctttctatccctagaatctggaacactgattatcaatggagagcaattttgtcctctggggacacctggcaatgtctagagagctttttgaatgtcacaactgaggcagagcaggggaaattgtgctagctattggcatctagtgggtagagacccaggttgttgctaaacaaaata

SEQ ID NO: 296192 - DNA, 718 bp, Homo sapiens
tcagtaatgctgctgttgagaaaccctgacataaagcaatgccagttttctagtaaaatgtagtacattttgagaggatgaatgatttagtaaaatstgtataaaaggtaatcttcacacagaagtagtaaacctgaggctatcatatgttgtcactcctgatccacaagtcaacaataataatgatcatgagttattgagctttatatacctcatcccattttaaatgaacaacaatcctgtgggatattataacattttatgggtgagtaaactaaggctcagaaaatttgataacttgcctaatatcacagagctagaatacataccccagatttttctggctgttatagcaccccttagcctctgggattcatcttattttcacttcacactcaactctttaaccttgaatgcttgaacagttcaaatataaatttgatctcttattcttcctatgctggtgcctaccccaggcaagggcaagttcctacctcaacatttgtgtttctctccttgaggaagctgcagtatcattctagcctaaattttttagaagagggaaaattaagaaaagtattacttacagatctgactctagtaaagctttgaacgggataggaattcctgaagacacaggtaacccctccccagctcagtcccattaggaaaccaaaacagcctgctcttcctgcttctaaaaattttcccttcttta

SEQ ID NO: 296193 - DNA, 620 bp, Homo sapiens
gggatgacataatgtgctgagttgctaattataagcaaaagtcactcagagaaggcataagacttcactaaagtacataatagcttaccattaaaacaacaagaagtaacaaagcatatgcttatgacttacaaaaactgctaattaaacaaaatatacacatgccagcagcctactaaatgtggtatgccaccatttggattcttggcacctataacacccttccacccccatcagacaacataatctgagctctgaagaccgtrtattccatctgtttcttccatcccagcagtaccagcttttccttgagtaaaacccaaaaatgctcaccaaaaagagaagtggaagatcttttcaggagatcccagccactctctggatctcagtatgaagtgagaacagctggtagaagactcttgccgcttcaagctgacaactccccacaccattgggtgccaaataagctgtcctctgatagagaaaaagcagtaactggatgcatttcaaaatcgacacagcctatttattctcccccagatagaaaagcatctgataaaagtttggatgtaccctccaaacctcatgttgagatgccatcccgtgttgaaggtcgggcc

SEQ ID NO: 296194 - DNA, 580 bp, Homo sapiens
tggcttcaaggttttggctgaagctaccgaaagaatggatcagtgagatgggagaggctgatattggagcaatgttttttatggggtaggagaaaggcggaaatcaggtgttgagttttgaacttgagtttgatgtatctattaaaacattcacattaagactcccagaaggatgatttggaggttagggtgcagtgagagaataaagaagaaaagggaagggaagaagaggttcagcaattaagaattgcaatgtctgacatcgaggctaaaaaaaagagcaaggagtagccccaaaggagaacaaaagggtggccaatgaggtaaaaatgrtatcaagagattgcggtgtcctagaaaccaaaagggcatctagaacacattaggaggccaacaaaaaatacttaatgtaaaagcattaagctctctgagtcttagattcctcacctgtaaagggagggtatacatacttacttcaggattacatgagatgaagcgtatgtaggatgaaaagtggtccccaagctatcatgttccaattcctacaacctgtaattgtgaccgtatttggagaaaaaga

SEQ ID NO: 296195 - DNA, 597 bp, Homo sapiens
ctgccattctccctccaaaaaatgccccctgtcagaagaaattagctaagactggtcatcatctgtattcttacatcagttagatgtgtgtcttcaaagatgggaaatgatasggacaggaagcagggaaattctgggcagaagagggcagatccctggtgagggccccaccctcaagcctggaaccatggcccaaagtgagaacttgaattcctgttttcctgctcgaatgttgcattttccaaaaccacccatggcccaccccccacatcctgtgcccataaaaactccaggctcaggtggcagagagaggggaagcagctggatatcagagactagagttggatgtcagagagaagcagcttgacttcagaggggcagcttgatggcatagcttcaaagaggggtctggctggggacagccagtcttcaggggacaattaccttcccactctgtccccctttcagctccctctctggctgagatccactttcgtcagcaataaaatcccctgtatttaccatcttcaattcattcatgtgacctgatttttcctgggttgcagataagagctcagagccacaagtgtgaatgca

SEQ ID NO: 296196 - DNA, 632 bp, Homo sapiens
ttaatgcctccccaagtggggcaattcctttgtaagcctccaataacatttaggaagtttcaaatatatagatgatattttatgttactggccatcttccagaagctatttgctgctttctaaccttataatctagattttaaacttgctgtggagagatactcaccctcttgtttamattcttggcaggcaatgtgaataacagcctttctgctaacttcagactggaaagaaaaggagctgagaaattaccagatgcaccaaggatcttccacggcctgatgtgttctgtagatgtaagaaaacctccttataacttagcctcttctgcttcacaggaaagctctagtttattttaaacaaacttacatcgtatggtctctatgccaggcactattctaaatgcttgacaaacaggaacccacttaattcccatgaaatcctaaaaacagaggtgccatttgccaccatatttaacagatgaagaaactgagggtcagagaaggcctaagtaatttacctaggatcaagcggctactatgtattgaagtgaaaatcaaacacaagcacaagttttgctctagggtcatttagttatcacaactgtctttctgagatctctctagttttct

SEQ ID NO: 296197 - DNA, 385 bp, Homo sapiens
ctaaatcacgagccatgtttagagccaccacgtatgaaacaacatgggcatttccaaacacacattgacactagctagagcagcagcagaaatataaactgccctaagatctgaaacttaggaaaagagatggagtttgcaggccaagactggattctccctcacaygaaaagatcttctcctcagaagaacaacagcatgcctccaaggcatagtatattcacaaatctaaaatgaaagcctaatgtctgtctgtgtatgttttaaggttaaagagtaaagaaggtaatcagatgaccatttaacttctcaattatagtaattgagcagatgagtattaactagggcccagataaatcaagatgataggtgaatcaggataagc

SEQ ID NO: 296198 - DNA, 551 bp, Homo sapiens
attcaggttagttttttcttcctaattttgcattctgattggcttttattccctgaattataaatgactattctatgatgattctggtaaatactcaatttcaccacacaatctttgacttcatactaacaaacagttgacttcaaatggacaatttcaatgaagsctgacttcatatttagctcctttaagcttccttaggcatcagctctctacaattctcacattgagaatatgtgtattttgttagctcaaaccttgttagacatgttaaatgtttagaaatataaatttaacctaccccttgaggtaggtcttgagaggtttgtgagcctaaaaagacatggaggaaccacttattgccacaagcacattgttctaaattatttggaatcagttaattcttccccatctcctacccatgcctgacaccaaagaggagcctctaaatttacagggaatacaaggaagtctactgttctctgctcctctctgggttattagggcacatgggagccctcagttgttttctgctgagcaagagcaaagtc

SEQ ID NO: 296199 - DNA, 551 bp, Homo sapiens
attcaggttagttttttcttcctaattttgcattctgattggcttttattccctgaattataaatgactattctatgatgattctggtaaatactcaatttcaccacacaatctttgacttcatactaacaaacagttgacttcaaatggacaatttcaatgaagcctgacttcatatttagctcctttaagcttccttaggcatcagctctctacaattctcacatkgagaatatgtgtattttgttagctcaaaccttgttagacatgttaaatgtttagaaatataaatttaacctaccccttgaggtaggtcttgagaggtttgtgagcctaaaaagacatggaggaaccacttattgccacaagcacattgttctaaattatttggaatcagttaattcttccccatctcctacccatgcctgacaccaaagaggagcctctaaatttacagggaatacaaggaagtctactgttctctgctcctctctgggttattagggcacatgggagccctcagttgttttctgctgagcaagagcaaagtc

SEQ ID NO: 296200 - DNA, 573 bp, Homo sapiens
gtcacattttgaacaatacgtttatactgcattttcacttggcgtttgcattggttaaaaccaaatcaaactggaggccttacatgtggttaatagggaatcattagttgttgcttmtcccactttattccacaatttcagcttctttcaaatcttacctctcaccctcagttattttgtagttcttcaaatgtgcctcatgctggcttttgttctagaagaaagtggttttaggtactctgaacaatttttctgagagagttaaaaagcagttgtggcaaacggacactaaggtggcccctctgatcctcacttgctttactttcacctttgtgtcatcccctcacctttagtgtgggcagaatctgtgacttgcttctaaccaaccgaatatggcaaaagttgcttctgtgaacgtggtacctaagattgtatcatatgtttgctaggagacactttccctctttggctttgatgaagttggggagggcagtgaagcaaggaactgagggcagtcgccaggcaacagtcagtgaggaagtgagggcagcctctagttggcagccagcgaga

SEQ ID NO: 296201 - DNA, 1103 bp, Homo sapiens
ggcagaaatattgatcatccagaccctgtgcttgaagctcgacctttgaagaacgccagagagatgaagacattttttttgcaataataacaacaagcatttactgaaggtgtgttatatagcaggcactctactaaaaatatgatcttattgaggaatgtccatctcttacctaataaaagacagagctagtgtgcaagcatcaatctgacagattgcaaagcttgtgcttttaaacaacatgctgtaytgtctcttgtaaaacagcatttatataagaaagggccaagccagcattaaacccaaatacacacacacacacacacacacacacacacacacacacagacaccacagactcacctactcactggataaatacatgacagatagatcatcctaacctatgctttaggcttcactgaatccttgccaactattaacccttccagttgggcttcaattttggaaattcatattaaaatattagttataaaggtgggcccttctagaagcatttgctattcaacatctgataaaacctactggtagggccataggcctaatggttgactgtcagggagggctwtatgcaaaacaagggatgatcaggaatgtaaatatattgatgtttaaatctcactaatattagtcctatttacaaggtacccttatgttggcatttcagatactacatcattcagttcaattcatttaacaaatattccttgaggaggacctactacagtccaggaaatgagctaaatataaaacagtgaaaaaaaatgatcagggttactaccctaawggggctttcattctagtaggagagattgacaaaaaccaggttagcgtataaataaacaagtatcaagtattaggagaaataagcaaatttttttctacagataacctcagaggctcattcctaataacctggcaaggatttatctaagagtagtgtctccctctttagtggcagaggctgctcccaaactgttgaaaattcccatggggcaaggaacttctgggcagctatagtttcccatcacctgacaaagaacccacacctcagttcagaatgcctggtgcctcataaatag

SEQ ID NO: 296202 - DNA, 987 bp, Homo sapiens
ccatttaggaactgaggctcttgacactgggacgttgacaaggttttcgcagagtccctcggcctgtcttttttgcctgcttattccacctccaggctttacttytctctaagattttaatgttatttccctgttcctctatctttctgtcccttaaaatccaattgcaggaagagctctgagaggcctattccctgaagaattaatagctgctaataacttactgtaccatccttctcaagtgaactcataaattattcttccacagttgaatttatcatcttgggggaaaaaggaacatttccttttctcttaattattaaaatatctatatgatattgatgactttttgtctcttttcagggccctgatgtatattttcttaaagcataattaataattatgtagcgctgtactgtctaatactatagctactagtcatgtgtgtctgttgagcaactgaatgtggctagtctgaattgatttgggtggtaagtaaaaawgccattttactatgcccatttagtcctcttgaaattcttatcaaaacttaagctaaaatatcccaaaccaaaatctccacttctcataatcgaaattgtcctgcaggtgtacgtatcactgttacttagattgtaacagggctttatatcccatcagatttttgcacttaggtcatgtctcatttctgagattcaatttcttcatatgtaaatttagattactaacatccgtatgactctagctttctttgatccatattataaaaattttttwaaaaatacaccgatgaaatgagttgcaaatattgagcatcactaacattgtgatggtggtttggatacacattctctcctatctgcatagcattttcacctcctaactggtctccccatttctggcacctctctctgcattttaatttgtattcatgtcgcttctctaccaaggtgagcacagaaaatttatcctgggttttggtttcag

SEQ ID NO: 296203 - DNA, 387 bp, Homo sapiens
attattattcgctcttactatgtgatcatatgagctaggcaccatacttaatgatatccatgcactattttatttaatttccaccacaaccctgtgaaataggtctatttgatttgcgagcccatatctgtaatcactatgccttcctctggcccactgtgtaggctggcatgaggcctggtttgcatgagaatgggtatcagaaggcccagtggaacatcatgagtagagtaaagagagcagcgcaaccttaaagcattcctactctctcagataatttatgacctaggaatcttactgggaagcccaacccagcactcccytccaccccgcatacctgggttccttgccctggctgagtcacctagctgcaagtatttctgagtg

SEQ ID NO: 296204 - DNA, 586 bp, Homo sapiens
aagagtagataatggagaaatcatcagtaaagtttgaaggggagagtaatgataaattcatattcataactgatcattttgaataggtagggacatagagtcaggtaatagaagataaacacccatgtcttctgctcccaccatacattcaagtttatctggaatttgaggactgctggacaaaattgagtgaagttcattctcctgtgtacaattggtattatggagattcaaaacgrtctaccaagaggaagagagaaagggccaagcccttgacgattaaagtaccagtttccaattctgatggccagctattaagatagcctccaggcacacctccggcattcatggttgggcaaaatcatctgaaaacacagtacactgtggagtatcagctgtttactttcaagatggtattgccaccagggcagtgcttgctgcctatgctgaggcaacatgagagagtaccgtactgcatactgctagcccagtaaaagaccagtattcaaaatctgatataagccttctagggaatgcatatcactttcccaccatgatacggtagaaaaattataagtagaactat

SEQ ID NO: 296205 - DNA, 408 bp, Homo sapiens
gttgaatggttgaataaggggaaagggtaataacagactagatggtggcccatttagtagggctattttgagataaagaacttctgaaaacacaagggaagatgaagagctgtcaggaatgtggtcttcctccccaagggcagacctagatattccccaaggtcatctcccacccaccccctactcttcattttactctstcccttttcttccaccccaggtgaagaaacccagaaggaactgccctctccacggatcagctgtcccaaaggctccaaggcctatggctccccctgctatgccttgtttttgtcaccaaaatcctggatggatgcagatgtgagtggttagatgtggggttggaggtgataggggaaagtccatgcaggtctcagggggaggagggtc

SEQ ID NO: 296206 - DNA, 1152 bp, Homo sapiens
acacagagttgtttacatttctgcttacctggagcaaaagcctctagagctacaagctgttaggaacatttaaatggtgattttgaaaaattgctggatgttgagtgcagcttggcattaagagtgagaaactcacggaagttgcactcctatgaaagccctcacgccttcatggattttaccttcaggaatcccaacaggttctcttcgtggagagtcaaaaataattctctcatggctttgtcaggaagagtagaaaagaaaccatttctaaatcagcccagagcattctcaataacaaagacctacttccaggtaaaaagaccttatgagcttcgtatcatgcctaagcatgagtgcatttacgtccactccagccacatctagccttctcatcttacctaacagaaagagacctaagaaacatttttgaragtcatggccatggggcatagactcacaaaaatactgagatttaatcataaaattatatgatacttccccttgctcagacactaccacatcaatagggatccagtttaatgacaatagatcacaattgaggagctgcaaggtacactacttaaggaagaattattaggaaatgacaaaggcaataggagagacaaaaacaaggacacaagagaaatwaatttattactcaaatcagcctcccttaaaattcagaggctagggtttttcaaggataattcgttgtgaatgttaattggtttggtcagggatgaaaccataggaggtcaaaggtgtctccttgtactgagtcacttcctgggtgggatcacaagaccagttgaatgagtctcttggtatgggttaccaattcaggtggcaccaaccggctggtccatcagaatgcagggtctgaaaaataccttaaacaccaatcttaggttttactatagtgatgatatgtattggagcaattgggaggttatgaaccttgtgacctctggctaactgactccggagccataaatctaaacttgtggcaaatwtgtcagttttaaaaaggcattttcagtctctaagcaagatgggggttagtttcaggaagggattgttatcattttggttttaaactataaactaaattactcccatagttagtttggcccttgcccaggaataaac

SEQ ID NO: 296207 - DNA, 493 bp, Homo sapiens
gtggaattaaactggaaatcaaaaacaggaacacagatgggagattccaaaatatttggagttaaaacaacacatttctaaataacacatggaaaaatagaagtcacagagaaattttaaaaaaatagtttgaactaaatgaaaatgaaaatacaacttattaaaatttgtggtatatgaygaaagcagtgtttagaagaaaatatataatattagatgaatatattagaaaagaaaaaatgatctaaaataagtaatccaaacgtactctttaggaaactggagaaataaaggctatttaattgtaaagcaagcggaagaagaaacataataatagaatagaaatcaatgaatttaaaaagagaaaaacaatgggaaaaataataaaataaaaaactgatttaaaaggtcaataaaatgtaggcatctttaggcagactaaccatgaataaaataaggtggtgcaatttagtaatgtcagaaatgaaaaaga

SEQ ID NO: 296208 - DNA, 493 bp, Homo sapiens
gtggaattaaactggaaatcaaaaacaggaacacagatgggagattccaaaatatttggagttaaaacaacacatttctaaataacacatggaaaaatagaagtcacagagaaattttaaaaaaatagtttgaactaaatgaaaatgaaaatacaacttattaaaatttgtggtatatgatgaaagcagtgtttagaagaaaatatataatattagatgaatatattagaaaagaaaaaatgatctaamataagtaatccaaacgtactctttaggaaactggagaaataaaggctatttaattgtaaagcaagcggaagaagaaacataataatagaatagaaatcaatgaatttaaaaagagaaaaacaatgggaaaaataataaaataaaaaactgatttaaaaggtcaataaaatgtaggcatctttaggcagactaaccatgaataaaataaggtggtgcaatttagtaatgtcagaaatgaaaaaga

SEQ ID NO: 296209 - DNA, 493 bp, Homo sapiens
gtggaattaaactggaaatcaaaaacaggaacacagatgggagattccaaaatatttggagttaaaacaacacatttctaaataacacatggaaaaatagaagtcacagagaaattttaaaaaaatagtttgaactaaatgaaaatgaaaatacaacttattaaaatttgtggtatatgatgaaagcagtgtttagaagaaaatatataatattagatgaatatattagaaaagaaaaaatgatctaaaataagtaatccaaacgtactctttaggaaactggagaaataaaggctatttaattgtaaagcaagcrgaagaagaaacataataatagaatagaaatcaatgaatttaaaaagagaaaaacaatgggaaaaataataaaataaaaaactgatttaaaaggtcaataaaatgtaggcatctttaggcagactaaccatgaataaaataaggtggtgcaatttagtaatgtcagaaatgaaaaaga

SEQ ID NO: 296210 - DNA, 493 bp, Homo sapiens
gtggaattaaactggaaatcaaaaacaggaacacagatgggagattccaaaatatttggagttaaaacaacacatttctaaataacacatggaaaaatagaagtcacagagaaattttaaaaaaatagtttgaactaaatgaaaatgaaaatacaacttattaaaatttgtggtatatgatgaaagcagtgtttagaagaaaatatataatattagatgaatatattagaaaagaaaaaatgatctaaaataagtaatccaaacgtactctttaggaaactggagaaataaaggctatttaattgtaaagcaagcggaaraagaaacataataatagaatagaaatcaatgaatttaaaaagagaaaaacaatgggaaaaataataaaataaaaaactgatttaaaaggtcaataaaatgtaggcatctttaggcagactaaccatgaataaaataaggtggtgcaatttagtaatgtcagaaatgaaaaaga

SEQ ID NO: 296211 - DNA, 658 bp, Homo sapiens
tagcagcatatagtagcatgattaaggtaagcatccgtatgtacccaccatgctggaattattttctgtgttgttatgaagatgagctccacttttccaaaactccagccatggtgccaacaataatacaaaatatatgattaatagtaakggtaggctcctctgtttcagagatgcaggaaaaaattccagagtcactacacgtgagataatcaccaaggaacaccgtatcatgacagatgaattttatcgcttgtagcttaatgtcaggaaagtcgttgctggtatggatggccagtgtattgcagtgaatggccgcatacacaagtggtaagaaggaacatgtcatcagcaatgctactaaagataaacaagaaaatgttagagaataattttcattagtaatgaccactttctcttttaaagtttccatgttaaggtatattcctcccaacccgcatccttcagaaaataatttacttaaaaaaagaaaaaaaaattgttaattttacattatcagggatttagtaaatatatgcatgcaaaacctatattacacatgggaaaaacaaataataagtaaatacatacatacccatgtttgtaaatgtacatacacatccccccaataaaaaaaataactggaacacatgcaatt

SEQ ID NO: 296212 - DNA, 562 bp, Homo sapiens
catacattgctggtgggaatataaaatggtacagccatttttggaaaacacgcagggagttcctcagttaaacatggagtcactacttgacccagcaagtccactcctaggtatatacccaagagaaacgaagacatcagtcttctcaaaaacttgcacactaatatttacagcagcaggtggaaacaacctaagtgtccatcaactgagagtgaataaacaaaatgtggtatatccaaacaatgaaatatcattcagtgataaaagaagttctaatacatgctacaaagtggatcttgaaagcataatgttaaataaaagaagccagtaacaaataaccatgtattgtgtgatcccatttrtgcaaaatgtccagaacaggcaaatctaaaaggaaactaggtaagtgaatgcctaaggctcagggtaaggggatggaaggactaggggatgattgttaaaaggaacggagttcctttttggtgtgacgaaagttttctaaagttgattgtggtgatgactgcacaactgcttgaatagactaaaaaccattgatttgtat

SEQ ID NO: 296213 - DNA, 562 bp, Homo sapiens
catacattgctggtgggaatataaaatggtacagccatttttggaaaacacgcagggagttcctcagttaaacatggagtcactacttgacccagcaagtccactcctaggtatatacccaagagaaacgaagacatcagtcttctcaaaaacttgcacactaatatttacagcagcaggtggaaacaacctaagtgtccatcaactgagagtgaataaacaaaatgtggtatatccaaacaatgaaatatcattcagtgataaaagaagttctaatacatgctacaaagtggatcttgaaagcataatgttaaataaaagaagccagtaacaaataaccatgtattgtgtgatcccatttgtgcaaaatgtccagaacaggcaaatctaaaaggaaactaggtaagtgaatgcctaaggctcagggtaaggggatggaaggactaggggatgattgttaaaaggaacggagttcctttttggtgtgacraaagttttctaaagttgattgtggtgatgactgcacaactgcttgaatagactaaaaaccattgatttgtat

SEQ ID NO: 296214 - DNA, 562 bp, Homo sapiens
catacattgctggtgggaatataaaatggtacagccatttttggaaaacacgcagggagttcctcagttaaacatggagtcactacttgacccagcaagtccactcctaggtatatacccaagagaaacgaagacatcagtcttctcaaaaacttgcacactaatatttacagcagcaggtggaaacaacctaagtgtccatcaactgagagtgaataaacaaaatgtggtatatccaaacaatgaaatatcattcagtgataaaagaagttctaatacatgctacaaagtggatcttgaaagcataatgttaaataaaagaagccagtaacaaataaccatgtattgtgtgatcccatttgtgcaaaatgtccagaacaggcaaatctaaaaggaaactaggtaagtgaatgcctaaggctcagggtaaggggatggaaggactaggggatgattgttaaaaggaacggagttcctttttggtgtgacgaaagttttctaaagttgattgtggtgatgactgcacaactgcttgaatakactaaaaaccattgatttgtat

SEQ ID NO: 296215 - DNA, 1039 bp, Homo sapiens
gtttgctagaactgccataacaaaaaactacagattgagcgacttaacaggaatttattttcttgcagttgtgaaggctagaagtgtaagaccaaggtgctggcagggttggtttcttttgagtctctctccttggcttgcagaaggctgtattctcccagtttcttcacaaggtcttcccttgtgcttgtctgtgtcctaayctcctcttcttataaggacatcagtcatattggattaggtcacccaatgacctcattttgctttcattacctctttaaaggccctatctccaaatgccatcacattctgtggtactggggattggagcttcaacataagaatctgggggttgggggcatgattcagtccattcactttctgactccagaactgtgttctccgtttagccaaccaataataatggagcttactaggtgtcaaagattgcactcagcacttctgcaaatgttttctcatgtaattttcaaagcagtccagagaggtttgcattataatwgtttgctagaactgccataacaaaaaactacagattgagcgacttaacaggaatttattttcttgcagttgtgaaggctagaagtgtaagaccaaggtgctggcagggttggtttcttttgagtctctctccttggcttgcagaaggctgtattctcccagtttcttcacaaggtcttcccttgtgcttgtctgtgtcctaacctcctcttcttwtaaggacatcagtcatattggattaggtcacccaatgacctcattttgctttcattacctctttaaaggccctatctccaaatgccatcacattctgtggtactggggattggagcttcaacataagaatctgggggttgggggcatgattcagtccattcactttctgactccagaactgtgttctccgtttagccaaccaataataatggagcttactaggtgtcaaagattgcactcagcacttctgcaaatgttttctcatgtaattttcaaagcagtccagagaggtttgcattataat

SEQ ID NO: 296216 - DNA, 610 bp, Homo sapiens
atacacattcttttacacagctcgtggatcattctcaaggatagaccatatgctaggtcataaaacatgtcttaaaacattcaaaaaactaaaattatatcaagcatcttctctgaccacaatggaataaaactagaaattaacaacaagaggaattttggaaatgattttaatacatrgaaagtaaacaatatgctcctgagtgggtcaataaaggaattaagaaggaaattgaaaaatttattgaagcaaatgataatgaaaacacagtgtaccaaaatccatgggataaaacaaaagcactactaagagggaagtttatagttattagtatctacattaaaaaagagaaaaaaacttcaagtgaacaatttaatgatgcctcttaaataactagaaaagcaagagcaaaccaaatgtaaattagaagaagaaaagaaatacaaagaatagagcagaaataaatgaaattgaaatgaaagaaatgatacaaaagatcaatgaaacaaaaagttcattgtttgaaaagttaagcaaaagtgaaaaatctttacccagactaagaataaaagacacaagattcaaataaagaaaatcagaaatgaaaaag

SEQ ID NO: 296217 - DNA, 610 bp, Homo sapiens
atacacattcttttacacagctcgtggatcattctcaaggatagaccatatgctaggtcataaaacatgtcttaaaacattcaaaaaactaaaattatatcaagcatcttctctgaccacaatggaataaaactagaaattaacaacaagaggaattttggaaatgattttaatacatagaaagtaaacaatatgctcctgagtgggtcaataaaggaattaagaaggaaattgaaaaatttattgaagcaaatgataatgraaacacagtgtaccaaaatccatgggataaaacaaaagcactactaagagggaagtttatagttattagtatctacattaaaaaagagaaaaaaacttcaagtgaacaatttaatgatgcctcttaaataactagaaaagcaagagcaaaccaaatgtaaattagaagaagaaaagaaatacaaagaatagagcagaaataaatgaaattgaaatgaaagaaatgatacaaaagatcaatgaaacaaaaagttcattgtttgaaaagttaagcaaaagtgaaaaatctttacccagactaagaataaaagacacaagattcaaataaagaaaatcagaaatgaaaaag

SEQ ID NO: 296218 - DNA, 610 bp, Homo sapiens
atacacattcttttacacagctcgtggatcattctcaaggatagaccatatgctaggtcataaaacatgtcttaaaacattcaaaaaactaaaattatatcaagcatcttctctgaccacaatggaataaaactagaaattaacaacaagaggaattttggaaatgattttaatacatagaaagtaaacaatatgctcctgagtgggtcaataaaggaattaagaaggaaattgaaaaatttattgaagcaaatgataatgaaaacacagtgtaccaaaatccatgggataaaacaaaagcactactaagagggaagtttatagttattagtayctacattaaaaaagagaaaaaaacttcaagtgaacaatttaatgatgcctcttaaataactagaaaagcaagagcaaaccaaatgtaaattagaagaagaaaagaaatacaaagaatagagcagaaataaatgaaattgaaatgaaagaaatgatacaaaagatcaatgaaacaaaaagttcattgtttgaaaagttaagcaaaagtgaaaaatctttacccagactaagaataaaagacacaagattcaaataaagaaaatcagaaatgaaaaag

SEQ ID NO: 296219 - DNA, 471 bp, Homo sapiens
tctaatgaatattgatgcaaaaatcttcaacaaaatactagcaaatgaaattcaacaatacattagaaagatctttcagtatgaccaagtgggatttatccctgagattcaggatagtccaacatatgcaaatcaatcaatgtgatacattatatcaacaaaatgaagatgaaaaccatataatcatttcaattgatgctgaaaagcatttgataaaattcaacatcgcttcatgaaaaaaaccctcaaaaaatggagatagaaggaayatacctcaacataataaaagccatattcaacagacccacacctagtattacactgaatggggaaaaactgaaagcttttcctctaagatcaggaatgaaacaaagattcccactgttaccactattattcagcgtaatactagaagtcatagctagagcaatcagacaaaaaaaaaaaaaaaaaaaaaaaaaaaaaaaaaaa

SEQ ID NO: 296220 - DNA, 569 bp, Homo sapiens
cagattatattctttactcgctgattttattctttgaaaagctgctacctcccgcacagagcaggcactggactcgacttaaagattctgaggggcaggctctcagagacacttgtttatcctgatcctcagtcatccctgcctcccctaatgcctaaatgtcaggctcctggcccccactgcagagcctgagagatgacagtgggacacagggaacaacattctaactcgccagtcccttcctaatccgtgaagccttttctacaacctttggcccacacttagggaaggctgaatagagtaggaggaagatcaccggctgagctcattctggtgccatcctttcctggttattgacgctgtgaagttaacctctttaagccgtggtctttycatctgtcacacgggggtggtaacaggcacactataggtttccttgaggactgagtgagatgtgatattaggttccttctgcagaacctggcatacagagtgcactcaataaatgatagctcccatcatgccttcaaatcttagcattcgtgtgccatgggcatgcatcatgcaca

SEQ ID NO: 296221 - DNA, 569 bp, Homo sapiens
cagattatattctttactcgctgattttattctttgaaaagctgctacctcccgcacagagcaggcactggactcgacttaaagattctgaggggcaggctctcagagacacttgtttatcctgatcctcagtcatccctgcctcccctaatgcctaaatgtcaggctcctggcccccactgcagagcctgagagatgacagtgggacacagggaacaacattctaactcgccagtcccttcctaatccgtgaagccttttctacaacctttggcccacacttagggaaggctgaatagagtaggaggaagatcaccggctgagctcattctggtgccatcctttcctggttattgacgctgtgaagttaacctctttaagccgtggtctttccatctgtcacacgggggtggtaacaggcacactataggtttccttgaggactgagtgagatgtgatattaggttccttctgcagaacctggcatacagagkgcactcaataaatgatagctcccatcatgccttcaaatcttagcattcgtgtgccatgggcatgcatcatgcaca

SEQ ID NO: 296222 - DNA, 566 bp, Homo sapiens
aggattacctacctacaatgtgaagagaaagtcaagaaaagggaaactttcmaggtagaaaataagatagttaaatagtctctgactgatctttgtcctcaaagatgtgacagcaatagtcctagacagaatcattttgccaagtcctaactttccctttgtttcagtcaatgcatgaactaagaatgcgaagaacagaatcctcctgggaaaataaaggactttgatattatttgcattgcaacaaccaaattggttctaatagattagacacaactttggaaacccaagttcaaatttctcttctctcactacagataccttaactctctgaactatggttttctcactcatcaatcaaaaagtatttaataatatctaccttgcaaggttgatataagggcttataaaggtaacgtataaaaagcaccttgaagaatgcctagcacatagtctgtgctcaagatataatagttctattttttactaaccttatttttgtgactaaaaatattgtcagtaatattataatcaattatgttattgtcagtaatattgtcacttac

SEQ ID NO: 296223 - DNA, 539 bp, Homo sapiens
tgactttggtgaacaaatcccaatgtgtttattatgtctattgtattcagatttctttcctccacctccctttttccagcaatgaatatcttgaggaagagacaatctatttaccttttcattcccaaatgataccaatgataattgcctagactacagaaagaaaagtcttatagtatattacatttcttataattaaaaaattgttaatgctataacatctttaaatctgttttcataaaaattgtttttaccaaaatagtacttaattacattctaacctcygtgtctttttataagattcctttaaagtaatatttaaaataccaaaagtaccttttgcaacatggtggtcatttgaaataccaattcttcatgtctcttttcattacttacctaaaaggataaaaaagagaaaatattagaagtttgaaatcatttcaatttatcattaagaacagtttccatatttcaaatcaaaataagcttataggaggcactgatggagttcttcattttaaaaagccactattataaat

SEQ ID NO: 296224 - DNA, 1073 bp, Homo sapiens
aacagactgagctgtacatgggcccccttttagccacagctggaactggagctgctgggatgcagggtgccctgtcccaaggctgcacagagcagagcagccttggacctggcccatgaaaccattttatcctcctagacctctgcacctgtgatgggaggggctgccttgaagacctctggcatgccttggagacattttccctattttcttggtgattaacatttggctccttgttacttatgcaaatttatgcatctggcttgaatttctccccagaaaatgggtttttcttttctaccatatggtcaggcaacaaattttccaaacttttatgctctgtttcccttttaaacataagttccaatttcaagtcatctttttgtgagcacatatcactgtgcactttcaggaaaaaccaggtcacctcttgaatgstttgctgcttagaaatgtcttctgccagataccctaaatcatctctctcaagttcaaagtttcacawatgtaagaatttaaaaatcgttttgtaatccctaatggaataatggactcagtcattaataatcactgcatgccaaaaacatcaagtgaaatgtcgatggtagatgaggctgacaccacccaaatcctctcctaaatcttagtatcactcaaagtgaaacatgagaaatatgggtttcctgagatgatacagcaggaagagcagagcaagcaccccctatgaaggagwcttggcaaatatactgaacctaaatctaatcaagactcaaatataagggatagaggaacaagttgaaccacacctggaggaaacgaccagtcaaatccagaaggtggggccttctacagaatagatgagccagtttctcaaagaaacaagtgtctgttttttaaagatctgattttttaaaatatctgattattaaagatcaagaaagacctaagacatgccatatgtggacctaatttgactcttaaacaatccaactgcaaaaagacatttttgagaaaatcagagcaattggaaaatggactggatattggattatactaagaattactgttaattt

SEQ ID NO: 296225 - DNA, 568 bp, Homo sapiens
atgtaagaatttaaaaatcgttttgtaatccctaatggaataatggactcagtcattaataatcactgcatgccaaaaacatcaagtgaaatgtcgatggtagatgaggctgacaccacccaaatcctctcctaaatcttagtatcactcaaagtgaaacatgagaaatatgggtttcctgagatgatacagcaggaagagcagagcaagcaccccctatgaaggagtcttggcaaatatactgaacctaaatctaatcaagactcaaatataagggatagaggaacaagttgaaccacacctggaggaaacgaccagtcaaatccagaaggtggggccttctacagaatagatgagccagtttctcaaagamacaagtgtctgttttttaaagatctgattttttaaaatatctgattattaaagatcaagaaagacctaagacatgccatatgtggacctaatttgactcttaaacaatccaactgcaaaaagacatttttgagaaaatcagagcaattggaaaatggactggatattggattatactaagaattactgttaattt

SEQ ID NO: 296226 - DNA, 565 bp, Homo sapiens
agtccagaggtgggagctggggtgaagaaagggaatgggagaaacactgttccagagagagagctcagtgtgggaggaatggagtagaatgggagggagggtggtatgatttaatttgggttatttaaatctttgtatttttttcttttgactgggtgttacagaattaagttgaggacatatatagtcagaccacaaaacagtttagtttattatttctaaacattaagctccaatgacacaatgcaatattagcatcctaatattctttctctcgatgtagaccttggaaagagaaattgcactgttaataggagtattttttgttgtttttgtgacaattaaatgcttggagctagggctatgtatttacagaaggactcacctctggccttgtgcagtttatgattcctggtgggtggcrctgcctgctgggatcacctcgacagcagcactgctggcccagagctgtgttcttctgtaatctctcactgtccaccagtctgctcatactgaagtgttgccaacacttctgctctattgtctttgttcgttgtccacatct

SEQ ID NO: 296227 - DNA, 521 bp, Homo sapiens
gtctatagactagattatgcaacacaattttttagtaatatgttaaaactattttggttgtaaaataattaacacatactagcttaggcaaaaaaggatattttattggttcttgctactgaaaattctagtagacttcgcatgagagctcttccaggggctcagatgatatcatcaggactttttagctctctccctgaggcagacatgatggccacaggaagcccaagtttagtaatctcagtggaaaaatacagtcaattccacayctctaaagaacgattcagtggaagactgaagggcttgagtcatgtgccttctgccatctcatctgataggaactacctggaccacacatgaagtgggttttcctcagggaagaggagtttaattttcagaagatcagggaagggatgctgagcaggaaaaaagcaactgtgatgtccactgtggggtgggagtttaatgacctaaatctgaagttgcaaactggcagcttatgggtgaatataggccagaga

SEQ ID NO: 296228 - DNA, 546 bp, Homo sapiens
cagaggattaagtttgagatcttctgcacagcatagtgactacagtcaatgataatgtatatttcaaaatacctcagtaaaatgtcaaatatgtcaccataaaaagataggtaaacaaggtggtgggtatgttaatcagcctgatctaatcattccacattgtatacacatatgaaaacatcacatggtactccatagatgtatacaattagagtttgccaattaaaatattattaataaaattataaaatggataaacaagaaagaaaatgataaaggtagtatatctactcattcttcaattacaaatagtgaggaaaaaacagaaaaatttgaggctaatttaccctatgtctgtattaaaataagcatgaatttatacacacacacamaaaaaaaatttaatggcaataatccacatccataaaatagaaaaaaacaggtacaggattagaacatgttacattggaatcagaacacaattttgctatattgaaaattccccatgattacaggagtaaaaagctaagactatgaccactaaaa

SEQ ID NO: 296229 - DNA, 528 bp, Homo sapiens
tcatcttgcagctgaaactctatacccattaaacaactcccaatcccccttcccccagcccccggcaacccgttctgctttttggttctatgaattttggctactccaggtacttcatgtggaattacatagttgtaaatgctgtcttatttttaaccatggattctattaactgtggtaatttgatgaaatatcagctcactaagttataagtatttggttaaaaatcaaaatgggtttgaaaaagagccctcagaaagttggtggattcaaaaatccccgctttcatggctgggtgtggtggctcacgcctataatcccagcactttgggaggccgagatgggcagaacacttgagcccaggagttcaagaccagcctgagcaatatggggagacctgtctctacaaaaaaaaaaaaaaaaaaaaaaaaaaccyaaaaatttaaaaaagaatatccccacattcagaattagcacactgctgaaaaacctcatgccatttgcaaccatgtacttttccatgagatg

SEQ ID NO: 296230 - DNA, 598 bp, Homo sapiens
tgtgtaaccagtctcaatggactcccatttctactttgtggggttattttgcacatatgagcagatacatttatattttcctattttcccccttttattcaaaaggtatactgtggccgtgatttgcactttgggtttttaacttaataaatcctggaattcatacttagtcaattatagggctcttcttctttccttttgtttttcccccagcagattcatagtactccattataggaatgtaccatagtttactctattagtctcccatgaatgggcatttaggtgtttcctaatactttgtaaggctgcagtgaataaccttatgcatatgtattttcatgttgttgttaagtatatctcttcacttgggacgattgtaacaaaatacataaactgggtggcttataaacaacagaaacttatttctcactggtctagaggctggaagtcctagatcagagtgayagcatggtggagttctggtgagggccctttttttccagttttcagactgtggacttagatcctcaggcatatctctggagagcagagagaggaagcatgctcttggactttcacaagggcactaatccca

SEQ ID NO: 296231 - DNA, 581 bp, Homo sapiens
agccttttaaaatcaaatctaaccctacaaagaatttattcattcattaaagtaataatcatttatgtcaactatttgtcaagaagaaaaaaaactgacattatgtctgtgaagtttacagtctaatagaagacagaaatccaaaaaagtaaaatatataatgacaaatcacagtaagtgctatacaagaccagaagaaaaggatataggaggggacactagagaaaacttggtttagactgacaggaatgagagcactggagtgagattcccacagtaatttttgcattttaatgtcagtaccatgcattctactcttaggtatttttctgtgcacactagtcattgattcattcaacaaatatttaacaaacacctagtatgtgccaagcatatggcagtgagcaaaagatgaagacacctgcttcctcatsgagctcatttaagctgagaccgaaaaggttaagtaggagttggctagtcagagaatgcagagatgatggttctaggaaggtgcaacagaaggtataaacgcctgagaggaagagttcggggtgtttgaggcactgaaaagccaaaat

SEQ ID NO: 296232 - DNA, 574 bp, Homo sapiens
atatattatttatattattaggtacctcctaatatgtagtgatccctccatatctgtgggggattggttccaggattcccccaagataccaaaatctatggagcctgtctcttatataaaatagtgcaatatttgcatataacctatgtatgtcctctcatatacagttaacccctgaacagtgcgggggtgaggggtgcccatcccctttgcagttgaaaatttgtgtataacttttgactccccaaaacctaactactaatagtgtcacaggatctttgggrtgccgcttcaccagccagaaatcacggtggctggtggcaccttctgcctgagtattgcccatgcccactgggcttgttcgcctactcggcttggcatgctgtgcttggctcacactacaagcctggatcccacacctgccaagggcgagccaggcgcagagctgtgaggggtgtgtgggtgtgtgagcatgtggtccagccaccttgcacagccagctgctgtagcggggtgggcagctccaggcactggcacaggtgccagttctgtgcaaggctgcagctggaccaga

SEQ ID NO: 296233 - DNA, 569 bp, Homo sapiens
cctaacgtcagttagatgtaccttttcagagcggagattgatagcagcaggagggagaaaaattcctaggcagacagggacaggtccccagtaaaactcaaccttcaaaccaaggacaatttaaagcctgaaaacagggttggcagtccaggtagagtccatgatcagagtgagaacttcttcgatgccttttagccaatcaaatggggctttttccaggcctgtccatggaccaatcacctcacattcccccattctgagcccataattaccccagactcagccacatgtggggctattcacttttgggccccctctcacacagagggccacccacytcaggtaccctctcatgacaagagatgttttgtcactcaacaaaacccttttctacgttgctcactctgtagtgtccatgtagcctcatttttcttggatgcaggacaagaacccaaaacccaccaactgggaggaacaaatgagagctgtaacacgaagaatctgtaacacccccgcccccctcccccagaccccatttgcttatctgtgggtggtgggaaggagagaga

SEQ ID NO: 296234 - DNA, 629 bp, Homo sapiens
ggggctattcacttttgggccccctctcacacagagggccacccacttcaggtaccctctcatgacaagagatgttttgtcactcaacaaaacccttttctacgttgctcactctgtagtgtccatgtagcctcatttttcttggatgcaggacaagaacccaaaacccaccaactgggaggaacaaatgagagctgtaacacgaagaatctgtaacacccccgcccccctcccccagaccccatttgcttatctgtgrgtggtgggaaggagagagaacagtaaaagtgcttgggggctcagaccttgggactctgtgggcaagagccataacaccgcttggggctccgcagttgctgtcatctcctagtttacaggctccaccacattccctcatccagatgccagtacccaaggtggaagcagactgcagtatgcccagcccacccacaggctgagcacaaaatccaggctggtagcatgagctgagtacaggctgccaggcagagtaggtgaagtgagcccagcagcaagcatggagccaagagaggcccaggcaggggtgccattgccaccgagatttccatgtggtgaagtggcacagaaggaatcctgtgtcaaccatagtg

SEQ ID NO: 296235 - DNA, 541 bp, Homo sapiens
aagataaaattaaataacaatgaaatagaaaacaaagatacagtagagaaaatcaatgtatctaaaagaagtttattttaaaatactaaagaaatggacaaaataatataggctaataagaaaaaatctaaataaaaacatttaacatgaaatattaaatgtaaaaaggaacaacagtttttgttcttaaattataaaatataacacaagtagtatgaacacacttatgacaataatttagaaaayagaaattaaatgaaaaattttctgggaaaatatcactgtgttgttgatcaccaagaccacccccaggtttgatgatttgctaagtatactcacaggactgagcatatagccatacttctgcctacagtttattatagtgagaggatacaaagcaaattcagcagagagaaaaggcacatgaagtgaagtccagaggaaaccaggagcaagtttcctagagttctctccctgtggagtcacataggatgacacatttgattcctctaggaataagttgtgatagcacgtgtgaagc

SEQ ID NO: 296236 - DNA, 541 bp, Homo sapiens
aagataaaattaaataacaatgaaatagaaaacaaagatacagtagagaaaatcaatgtatctaaaagaagtttattttaaaatactaaagaaatggacaaaataatataggctaataagaaaaaatctaaataaaaacatttaacatgaaatattaaatgtaaaaaggaacaacagtttttgttcttaaattataaaatataacacaagtagtatgaacacacttatgacaataatttagaaaacagaaattaaatgaaaaattttctgggaaaatatcactgtgttgttgatcaccaagaccacccccaggtttgatgatttgctaagtatactcacaggactgagcatatagccatacttctgcctacagtttattatagygagaggatacaaagcaaattcagcagagagaaaaggcacatgaagtgaagtccagaggaaaccaggagcaagtttcctagagttctctccctgtggagtcacataggatgacacatttgattcctctaggaataagttgtgatagcacgtgtgaagc

SEQ ID NO: 296237 - DNA, 582 bp, Homo sapiens
tttggctatttatcatctctagaaaagaaaaaaaaacattaaaattttaggatgtaggattcacaataaatctcttaccaaatcctccttaaatccctaaactctctacctggctctgactccaggatcaccctttcagttctttccatgtttttcttcggaaaatgtagtttcctaacctttctacccacccttctcgtctactcttaggtctgcagccacagtgatagttctaagttgcaaacctgatcatgtccttccagtacttagtctttcaaaaatcttcctacttcccgcagagtgaagcctgaactctttaataggcatctaaggacttggacccggatcctgttaacctgttaattcatctttgcctctaactccctcccttcatctttcaagrcacagcgcaggacttaactcattgtgaaagtactaagccttgatgtatctttaggaaaaacacacgtatacacacacacgcatgcaaagagaggaagcatagcttagtggttaacctacatagactgcaacttgcttaaataatccagtatttatctatgttttaataaaattgtttta

SEQ ID NO: 296238 - DNA, 640 bp, Homo sapiens
aacttcttttgtttataaattacccagcctcaggtattctgctgtaacaatacaaaatggattaaaccagttccctatttcaaatttggtaaaacctgaaacctttcccctgggcttcccaatttstctttgatactttccccttttactcttcattctattcactaagctttagccatactggctttctgattctttttgtaaaatgccagacatttgtatttgtttttccctccatgtgtaaagcttttccattcagtatccagttggtcaaattcttcaactcctttaagtttttgctcacgtgtcgttttctgaatgagcacatattcagtattgccactccccatctagcattcctgaactcatatttttttccataacacttatcaatttctaacataccctatacttttcaaattttcatgatgattgtaattgtctcccattactatgaagcaggttccacaaagcacttatatttctatggcttttattcatcaatctatcctgaaagctgagaacagtgctaagcaatactattttttgaataaattaattaatgactgctttatgaactccttaatgagtagagtgacacctttttcatttgtgtgcccagcactttattaaaaaccta

SEQ ID NO: 296239 - DNA, 640 bp, Homo sapiens
aacttcttttgtttataaattacccagcctcaggtattctgctgtaacaatacaaaatggattaaaccagttccctatttcaaatttggtaaaacctgaaacctttcccctgggcttcccaatttctctttgatactttccccttttactcttcattctattcactaagctttagccatactggctttctgattctttttgtaaaatgccagacatttgtatttgtttttccctccatgtgtaaagcttttccattcagtatccagttggtcaaattcttcaactcctttaagtttttgctcacgtgtcgttttctgaatgagcacatattcagtattgccactccccatctagcattcctgaactcatatttttttccataacacttatcaatttctaacataccctatacttttcaaattttcatgatgattgtaattgtctcccattactatgaagcargttccacaaagcacttatatttctatggcttttattcatcaatctatcctgaaagctgagaacagtgctaagcaatactattttttgaataaattaattaatgactgctttatgaactccttaatgagtagagtgacacctttttcatttgtgtgcccagcactttattaaaaaccta

SEQ ID NO: 296240 - DNA, 557 bp, Homo sapiens
acacatagataagttctttagtggtgatttctgagattttggtgcacccatcacgtgagcatttacactgtacccaataggtaattttctatccctcaccctcttctcagccttcctccctgagtcctcaaagcccattatatcattcatatgcctttgcatcctcgtagcttagctcccacttatgtgtgagaatatatgatatttggttttccgttcctgagttacttagaataatggcctccagctccatctaagttgctgcaaaagacactatttcattcctttttatgactgagtagtaatccatggtgyatatatacacattttctttatccacgtgttgtttgatggagacttagatatgttccatatctttacaactgcatattttctacactcttaagtgctatttatgatctttcaggctaacttattttaaaaaataaaagcaacattcatttttaatttaaaaatataatcagtaaacataggccatactaaataaaataattttatgaattactcctaaatgcatgttgtaaggaaacttacat

SEQ ID NO: 296241 - DNA, 575 bp, Homo sapiens
gggaagacatttttaccaaattgttgtacactattttgtaaaaataaattattttattcagtacagttatttcaaaataagagcatacacatgaacactgtcactaaagcctgtcagggaggtaccagagatcttcarggagttagagtctcgtatttgaaaaactgccgcaaaactacaaattaaatacccacagccttagaagtagaaattatatttaaagatcgtcgcatgtgatgataaaaaacattgtattcatatgaagctttggatgaacccattattaatgagaaagataattttaaaattaattacctccttatcaaagatagagtgattgcatgaaaaggcactttgaaacgaggaccactcgtgaatccactctgggtttcttgtactgccttcacaagttacaggaactgccagagaaatcattaaaatatgactgtgtatatttaaatttaagattaaattcagactcaaagctgatgtgtatgaagagttaagccttttcagaaaattgttccacaagaatcatcatctttagatgcactgaaatttatttttcataaggc

SEQ ID NO: 296242 - DNA, 519 bp, Homo sapiens
aataaatttctgttctttataaattactcagtctaaggtattctgttaaaacagtacaaatggactaagaagccagtatagactttttatagcccatgtgaatgatattacagtattatatgcactctagatgaaatgagcataattttattttcatggccttataggcccattccttcaacaaggaaagtcataaatttgtattatgttctagctgcatttttcaatttgggtacccratttatcaaaaatatataataatatgcacttagacaaatagctcccaagtgacttaaaatatgttgaggagcctctatgcatatgctgtttaaatcaaagtcagcaagaacatccactctatgttttttttttcacttttgatcatctatctttatgatggagctgagaaagtctgtaaagataaggtcaactctaaaatgggagaaatggatgggaacttcaagaaaaatggagaagcacacatgtttgcacacttcagttacacattgtgacttattc

SEQ ID NO: 296243 - DNA, 519 bp, Homo sapiens
aataaatttctgttctttataaattactcagtctaaggtattctgttaaaacagtacaaatggactaagaagccagtatagactttttatagcccatgtgaatgatattacagtattatatgcactctagatgaaatgagcataattttattttcatggccttataggcccattccttcaacaaggaaagtcataaatttgtattatgttctagctgcatttttcaatttgggtacccgatttatcaaaaatatataataatatgcacttagacaaatagctcccaagtgacttaaaatatgttgaggagcctctatgcatatgctgtttaaatcaaagtcagcaagaacatccactctatgttttttttttcacttttgatcatctrtctttatgatggagctgagaaagtctgtaaagataaggtcaactctaaaatgggagaaatggatgggaacttcaagaaaaatggagaagcacacatgtttgcacacttcagttacacattgtgacttattc

SEQ ID NO: 296244 - DNA, 1161 bp, Homo sapiens
gggaagacatttttaccaaattgttgtacactattttgtaaaaataaattattttattcagtacagttatttcaaaataagagcatacacatgaacactgtcactaaagcctgtcagggaggtaccagagatcttcaaggagttagagtctcgtatttgaaaaactgccgcaaaactacaaattaaatacccacagccttagaagtagaaattatatttaaagatcgtcgcatgtgatgataaaaaacattgtattcatatgaagctttggatgaacccattattaatgagaaagataattttaaaattaattacctccttatcaaagatagagtgattgcatgaaaaggcactttgaaacgaggaccactcgtgaatccactctgggtttcttgtactgccttcacaagttacaggaactgccagakaaatcattaaaatatgactgtgtatatttaaatttaagattaaattcagactcaaagctgatgtgtatgaagagttaagccttttcagaaaattgttccacaagaatcatcatctttagatgcactgaaatttatttttcataaggcwtgaatgtgattaggtgatcgttctgtgatagatggcttccagtacagggacaggcttttttgtctttttcttttttaaaatcttaattgcatcccatcaaaaaggatatgaattacggtagattttgctttgtgaaaaagtggtaataacaaaactgttgtattttactttgatgtgttaagttcttcatcttaaaataaaacagagtaaggctccttaattgtatcgtcgcacactgtggttgagggctcattgctctaatattacctagtctgcagtaaagtttagcctaagatgtagttttcttgaactccagacagagagcttaattaataaagaaaaaaagggtcacagttatgcagcgactctgaatacagatttctgtgtcgttataggataatwtataaattcaataaatatttaaaataaagttgtgctgcacttgtaagctctggctgttctccacccttaaaggttttgtgttaactgttaagaggaagtcactactgtgttaatcaacaatgatttgatgcagagggctgattacgccatatggaaataagacaaagcaataaaaaacaagac

SEQ ID NO: 296245 - DNA, 436 bp, Homo sapiens
tattacctagtctgcagtaaagtttagcctaagatgtagttttcttgaactccagacagagagcttaattaataaagaaaaaaagggtcacagttatgcagcgactctgaatacagatttctgtgtcgttataggataatatataaattcaataaatatttaaaataaagttgtgctgcacttgtaagctctggctgttctccacccttaaaggttttgtgttaactgttaagaggaagtcactactgtgttaatcaacaatgatttgatgcagagggctgattacgccatatggaaataagacaaagcaataaaaaacaagaccatgaagtgggggcrggagtggcatccattcatggcttaaataaagtgcctcagtggaattgcatgttgaccatgagcatcaaaacctgactcctagaaattcttggaaata

SEQ ID NO: 296246 - DNA, 1155 bp, Homo sapiens
tgtcctctgctttgggtaacgattattacccccctttcttttatgattttgccacataaagacatggttgcagtgtcacttagcattgtgtggtttgacctggaggcaaatggaaagatatacattcttgtgtgacttgctatttttcatttttattttgtcatgcagataaccaagatttcttagtcttcaccactatacaatgtccctttgtaatcctgaatttcatgttattccattgattgtcatatgtgatgtttccagttttttgctagcaccaacagtgctgctatggctatttctgtccaggtctcctggtgtagggattttcctaagtcagggcttcccaatgatgacaaccacaggaaataatattgtttgtatggttcgttgggaaacaaagctgtttgtgatggctgcaggagtagaagccttctccaagttggaaggcatcaatatcttggtgtacctgtaacacttyctggacctaagggctgagcaggtgagtgccaggtgtggaaagactggtccatcagggctctgagtactaactctgctacagctttctawgctcaggctacacaagaaacataaaaggtagtccttaactttaaagcatttacaattatagtccagggtgtgtttatatctggccataggaagtctttaaggatgatgcaaatttgttcaaagggaactcttcagattatggttaatgcagtgggagttcagacaaggataaaactgttatgaaatggaggatctagaaacaatgtagtgtagagggcaaaatataagctttagttctggacatgcctgtgatcatattcttactcacctattataagttacatgacacagtacatttctagaccwctggagttcccaggtttagtatctaccaagtagaattcacaatatctattctgcagaactgtcaacgtgaataaaaagagaagatgtatctccacggcctgtcacccactagtttgagttctagtatcttccctcccttaccccactggctttttctgatttgtaagtgcgttagatttcttctgtgtttcagtgggtctgctcatccagatgtccccattataggttgggttctccaggaggaagacagggatggagctagaagcacaagaaattttg

SEQ ID NO: 296247 - DNA, 490 bp, Homo sapiens
tctttgagttagatttacctggaattcttgttgatgacagtctccaggcccactgcagacctcccaaatcccagtctctggggctgcacctgaaaggttcatctcagccttctccctgagtagcttctctagtcataaagcctgggaaccactctgctgtatttagggctctcctcctgtcacgccttcctttcagatccctgccccaccccacctcacttcagcttctcacctcttgggcagctttcagtggagtgggcagcaagagaggtgcatagaaagttaggggtcacctgtctgctctggacacctatacacaatagaatttttaaacatgattattctgctgttccttggtgataaccaggaaaattgaaagataaatttcaaccctgagygcaaagattgacttcccaggcatgactctacacttgtgaaatccttatgtgttcattcattaaggcttgatcaatagcctagtgtgtccata

SEQ ID NO: 296248 - DNA, 594 bp, Homo sapiens
gtaaacaagtttaatgatttgtaaacttcctccagactgctgtgtgctttactgtttctaattgaatctgtcactgttttatttatttgttcatgtttgtaaacatttctccttcccagtgagtcaaggagctttcaacccatcaacgtgagctgtgtcacctaattcccagttgtaaatatgagcttgtagaagggtgatacaatttgggtgtgtctccacccaaatctcatcttgaattatagttgccataacccctatgtgtcatgggagggaccctatgggaggtatttggatcatggaagccgttaccctcatgctgttctcattacagtgagtgagttctcacaaaatctggtggttttataagaggattttctcacttttgctcattcttctctttcctgccaccatgtgaagaaggacatattttcttccccrtctgccatgattgtaagtttcttcagatctccacagccctgtggaagtgtgagtcagttaaatctttttcctttataaattacccagtctcaggtatgtctttattagcagtgtgagaatgaactaatacagagtgacgctggttctccaggt

SEQ ID NO: 296249 - DNA, 554 bp, Homo sapiens
ttcttgtatatacaaagaggaaatttcttacatctgttttaaacaaaacaaaaaaacgtacgtattttcagtatttgcagcacttcttagtgtttgcaacatatcttaaaagcatgtataaatcattgactctgctgtgaagattaaaagttttgtgtctgtgtgtaaaatacatacacaaatacagcaccttagaatggtagaaaattttaaaatattatattatcatgatgtatcaacaactataaacaagttgcttgagttaataaacgattattcctaagacacctgtaaaatgaaccttcatcatctggggatagatatttagcatgtcacaaaagctattttaatctggccattgcttatgcctccatcattattgtctgccttcagccctcctgcagccctagttctctctgtggagtcyttgctgtctattgaatctgtcaacttccctttctgtgtagttccttgctccctgattcccctcttctcctctttgcctgactagctgccctacaccattcaccttaactgtttttccctccctgact

SEQ ID NO: 296250 - DNA, 544 bp, Homo sapiens
ttaaacgacgcacagctcttcatatgtaatgttgtttctaccacaataattctggcatttggaaaaaaatagagacatttgtatcagaacttattcattttttaattaaaatagaacaaaatcaaaactctggcaataaatctaattttgaacttataattacaaagtttaaagttcatcattttgtcagaaataatatctgataaatgtattccaaagtgaaataaccacattaagctagggcttaaattaaggacagtgatttatatgaaatattcatgaaatgttatttttgagttggaatgatatgtaaccatttttctattccttttaagkgccgaaagctcttgataatatgacttcaaagtttgagtaagctgagttgctcagatttaatagtgttcctactcctttttctatagaaactctattgggaagtaagaaccagacggcttagtaaagctaaaaaagttccaaacatccttatttttcgaacagtgtatatattagaatttattgtgacagtggtattttaaaagccaaa

SEQ ID NO: 296251 - DNA, 609 bp, Homo sapiens
gcttgaaagcattggtttctctcgtatgctgaattatgatgttatttttgggaggtgtcatattaaatacacacagacaaaattcattaacttgaaactaatttatttaaataaagctaatctttatttaaagttcttgaaatataagaatgaacaagagtccctgttcttaaggacctatgattctagactccagttcttttctgtgtattctagaggaagagataacctacaatatggtttgcatttgtgtccccactcaaatctcatttcaaactgtaatccccagtgttagaggatgggtgtggtaggagatgattggatcatggggatggagttccctcttgctgttctcatgaaagtgagttctcatgagatctggttgtttaaaactgtgtggcaattcccccttcactctcttcctcctgctgtggccatgtaagacatgcctccttcctcttcatcttttgccatgactgtaagtttcctgaggcctcctmagccatgcttcctgtacagcctgcagaattatgagtcaattaaacctcttttcttaatagagtgccagatctcaggtagttctttagagcaatgtgagagctgactaat

SEQ ID NO: 296252 - DNA, 600 bp, Homo sapiens
ggtttctctcgtatgctgaattatgatgttatttttgggaggtgtcatattaaatacacacagacaaaattcattaacttgaaactaatttatttaaataaagctaatctttatttaaagttcttgaaatataagaatgaacaagagtccctgttcttaaggacctatgattctagactccagttcttttctgtgtattctagaggaagagataacctacaatatggtttgcatttgtgtccccactcaaatctcatttcaaactgtaatccccagtgttagaggatgggtgtggtaggagatgattggatcatggggatggagttccctcttgctgttctcatgaaagtgagttctcatgagatctggttgtttaaaactgtgtggcaattcccccttcactctcttcctcctgctgtggccatgtaagacatgcctccttcctcttcatcttttgccatgactgtaagtttcctgaggcctcctcagccatgcttcctgtacagcctgcagaattatgagtcaattaaacctcttttcttaatagagtgccagatctcaggtagttctttakagcaatgtgagagctgactaatgcag

SEQ ID NO: 296253 - DNA, 605 bp, Homo sapiens
ggaccatgacaacagtgactatcattatctagatgacagtaggtttaaggaaaatattcatttactggttttcaaacttcatgaaagagaaagcatgaattgcagactcagtgtttaaaaatcacatgcattattcagaatcaaatataaaagccagatgccacaaattactcccaaattcacatttttttgagatatgattgattaaagttctatttgaggatgcattttcctaagtgacttttggtttaggagtcttcttcagataatcttttcctaagaactaaatgaaagaaatttatttgttatscaagaattgtcattactgtttcttcatttcagcactcatttatttattcacaggtcgcatgctgtctgacctgtcctggttggtgggagggatggagcctggcttcctgtgtagggtgccaaggactggctgtggaggctgctgggcctaaatgctttccccctacttttttccgtggactgacttctgtatcccaaatgattgacatatttattattgaccttctctgacaaaagacaaagaattacggatctacatttttctctcaatctcaggagccaatatattcagtgta

SEQ ID NO: 296254 - DNA, 605 bp, Homo sapiens
ggaccatgacaacagtgactatcattatctagatgacagtaggtttaaggaaaatattcatttactggttttcaaacttcatgaaagagaaagcatgaattgcagactcagtgtttaaaaatcacatgcattattcagaatcaaatataaaagccagatgccacaaattactcccaaattcacatttttttgagatatgattgattaaagttctatttgaggatgcattttcctaagtgacttttggtttaggagtcttcttcagataatcttttcctaagaactaaatgaaagaaatttatttgttatgcaagaattgtcattactgtttcttcatttcagcactcatttatttattcacaggtcgcatgctgtctgacctgtcctggttggtgggagggatggagcctggcttcctgtgtagggtgccaaggactggctgtggaggctgctgggcctaaatgctttccccctacttttttccrtggactgacttctgtatcccaaatgattgacatatttattattgaccttctctgacaaaagacaaagaattacggatctacatttttctctcaatctcaggagccaatatattcagtgta

SEQ ID NO: 296255 - DNA, 596 bp, Homo sapiens
aactaccatatttgataagtattcagttattttcagaaaactggaagttaccttctactttgtatgataaccatatgtgtatattctcactgtatgtaaatgaaactacctttgcaaaaattataacagtaagaaaattatgacagtgaatgatatgacctaactgactccattttgcctttaacctccaagctcccctaatttttttcctggacgtaggcyaaactaacagtaggaggaatttagtttatagtttaacaaaagatgataacatctcctccacaaaaccgatcccctctttgcctaggaaccagactgcctttgtgaaagtaacatattatccaaaagattaaaaattatggctcaggagtcatgcagtcacaggccacaagatctctaacccccccaattgctcctgttgataacattactgtcataaaacctaagattggtgtttgagatatttttcaggccctgcattccaatagatcagttggtgccccttagatcagtaaactggctcatctggtcttatggcttctacccaggaactgactcagtgcaagaaaacagccttgactctctgtgatttgtat

SEQ ID NO: 296256 - DNA, 569 bp, Homo sapiens
taatttaacaataagtggaaaagcagtgctcaggagtgagtggcatcccctttgatttcttcagtaggacatcatccttcaatagggcagaggtgtcttcctgggctggcctgagagattaaggatttaatggcatggagaagggatttgcttctccatacatggtgcatttagctcagaaagtgagatgatttttgaaaatatcaaaaactatcattaatttgggctgaaccagccagttttaaacattcaatattaaataccatgaaatagcattttagaaaaaagaactggatggaaatgtattttgcgtcttgagatttttcttcaaggatggggcttaagatggagtcatacttaggttcagctatatgagcctttaaaccagggattgcaaactgaaatacctgcagggctcacacaggaaatgtatgagagggaagaagtctgggtttmagaaattcgctgctctctgcctatctttgaactcttttgataggcacttgattataaagaaacctttctctaccataagaaaaatagcattataaactcaacgaggcaactga

SEQ ID NO: 296257 - DNA, 587 bp, Homo sapiens
atgccagtgcctaaagttttggtcagtctctcaactgagaggttgatcaaaagggggaattattaagtttagcgaaaagctgcctctttacatactttaaaggtttctccataagtagtgaactgcaacctaactggatgtgtaaacagactgtaacccactgttgtccaaacaaccgagtttcagccaatcaagggggaccaactgttcaaactgggctcaagtagggcaaatgccaagctgtaatggatccagctgtttctgcacctcgcttccattttctgtctgccactttccttctctgtccataaattttctttgtggtagaaatggagcctcttcacacctgttctggttcgagatctstacaattcttgaatcattctttgttcaattaaacacaattaaactttttaaaagagcagtttgggttttatttcaactgtgatggaaaaccactggaggggtctgaacaaaggattgacctaactttatttatgtctttaaaaaatactactctggatgctgcatggatagtaggagttctggagtgaggaggggatagggggcaccagggaggccagtta

SEQ ID NO: 296258 - DNA, 562 bp, Homo sapiens
gacatgtttccagtaagagatgaagaattgggccagttgtgcaatcatgcaatctactgcaaaaggttttttgtttttttttttcactttgttgcccgggtattccctaaaacacccagagactstagctcttaaatataaggctgattaaagctgatcgatgccacctgactataatactgtcacttgagtgaaggtgccaatgctacgcagcaaatgtaggagagatgctgtagattaactgtatgtttttagaagctatggaggcccagcccctcctacaagtcagggctgaacctagtggtctagtaagatggggaggcctgatgagaagcaggacacacacctgggatgtgcctatgatgattgagatcttctgacagaggctgctccttttggagctaggcaagataaaatgacacaatttcctttgggacctgcaggctgcaagagcaatggtacctaccccatctgttattatgacatacggaccctgcctgcagtgctgagcaactgtgactctgagccccacttgctcttctttcttctgggtttcagaaag

SEQ ID NO: 296259 - DNA, 576 bp, Homo sapiens
cctaggtcccagttgtggaacattaagctcactccatatccttttacccttacggagcttgcatttcagaggttggaggcagaaaataaataaataaataaataaataaagtgtcaggtggtgattaagacatgaatgaaaaatcatactagaaaagtcagatgagggagattaattcctaattgagcaaagatgatgaaaaacttccccagaggagatgacaccagctgagaagaggcatggtagtaagaggcaggcacccaacatgcaattccaaaatgagattttgctagagaatgggaatatccttcttgggggtcatattgttacatctttctttttcttgccgcctatgaacaggaattctaaataaggtcagagactggggttgtcttttggtcttagtggccttggtgttggaccccaggttccaggaagtcttttatcccagcagcagtttttcggagagaagactcacttayatgcaagactgacatgaaaaggggtttgctctgtatgaggctgtgagctcagccccatgcttaaagtgctgagtgggaaaaagggcagagacta

SEQ ID NO: 296260 - DNA, 535 bp, Homo sapiens
tgtcaaaaatcaattgacagtgtcagagcttatttctaaacgttcagttttgttccagtgatttgtctctttcccttaataccacactctcttgatttctgtagctttgtaatatgtttgaaatgagggtaatgtaagtccttcaccattgtttttctatttcaaaattattttgcctgggtctattttttttttggctactggaaacccctccctcttgggtctgacagggttggagatagatatggtaaaatagagtataggggacagagaccagtagactgtgtcttggtcaccgttgtgtctttagcacctcatataatgcctggtaggtcctaaatactaaaaaagctgtaaaataaatggataaatgtatcttaagatttttttttatcacatggtatcatctatgtcttgggattagggaaaatttccatgtcaaactaaagagtaaaaattcaccaaggttttgatatgctctgatatgatcactactacttgarcctccccctcatcggttttatttcccacccat

SEQ ID NO: 296261 - DNA, 594 bp, Homo sapiens
ttaagatttttttttatcacatggtatcatctatgtcttgggattagggaaaatttccatgtcaaactaaagagtaaaaattcaccaaggttttgatatgctctgatatgatcactactacttgagcctccccctcatcggttttatttcccacccatcatagctcctggaggaggatggaattaatttcaaggggatttgggaagtaattgtcttgttgttagttataaatttttgagagatgatggaaccttatcaagayagcttgctgttgaaatcttatagtttcccgtttagacctctgttattattatctgattatttgattattattatcaagggttttatatgtctaacagtgttagatattgagaggaccttcctacatgttgcctcttctgtctgaaacagagcccctcaaccctcccggaaagaagcacacataccccaaactctctcataattcttagacattctccagacctcaacctcatcattactccttagaaaaatcgttcctaaaccataacctgtatcaactgccctcctggaacccaccatatgcttctcgttggtaacacttatggtggttac

SEQ ID NO: 296262 - DNA, 570 bp, Homo sapiens
agatatagtagtgattattatcattgtccctttcttacagatgtggaaactgaggctcagagaggttaactttctccccagtgctgtgtatttattaagtgagaggttcaagatttgcatggacttggtcagactctcgagcctacagctttagccactgcattcatcgacttccattgttatagcaggagcttctcctccactccttgttcctcctccccaattcatggtaatccacacacaccagttttcttaaaacttcattcatgctcaagagaaaaccatgtccctatctggatcctgtgtttgcatagtccccagcctctgggctcattctggatcatccagctaggtaggcatttgtttggcaggattcctgcccactaagagcttaccatgagtgtcatggtgggaatgagctgggtatttttagagcttggcagcctagcactgcsgcttgctcttccccgaggtctgtggattagcctaggggtagcatatgcctacgctttgcttgcctggtcctggtacatggtcctgtgtactgttaagaaaacagattgtcccagg

SEQ ID NO: 296263 - DNA, 384 bp, Homo sapiens
ttctactatgttataccactgatatttgagggcttatttgttatagcatctaccatyatcctttgaattacgaagctaagggaaaaaaagcccattggctttaaaacccagcagaattcagtaggaggaggaagatggagaaagttataaagtaatcaagttgggtgggaacctcaggttagatcctcattacacttagaatgagcgttacccatttgacacaggtggatatctttgctgttactcaaagccaagaggaaggtattttccagctttatttgatgagttgttttcatgcttaatattttccagaaatctgttaattcatacaggtaagagactgtgccttagtcatctctgtagcctccacagcccttcataaac

SEQ ID NO: 296264 - DNA, 384 bp, Homo sapiens
ttctactatgttataccactgatatttgagggcttatttgttatagcatctaccatcatcctttgaattacgaagctaagrgaaaaaaagcccattggctttaaaacccagcagaattcagtaggaggaggaagatggagaaagttataaagtaatcaagttgggtgggaacctcaggttagatcctcattacacttagaatgagcgttacccatttgacacaggtggatatctttgctgttactcaaagccaagaggaaggtattttccagctttatttgatgagttgttttcatgcttaatattttccagaaatctgttaattcatacaggtaagagactgtgccttagtcatctctgtagcctccacagcccttcataaac

SEQ ID NO: 296265 - DNA, 384 bp, Homo sapiens
ttctactatgttataccactgatatttgagggcttatttgttatagcatctaccatcatcctttgaattacgaagctaaggraaaaaaagcccattggctttaaaacccagcagaattcagtaggaggaggaagatggagaaagttataaagtaatcaagttgggtgggaacctcaggttagatcctcattacacttagaatgagcgttacccatttgacacaggtggatatctttgctgttactcaaagccaagaggaaggtattttccagctttatttgatgagttgttttcatgcttaatattttccagaaatctgttaattcatacaggtaagagactgtgccttagtcatctctgtagcctccacagcccttcataaac

SEQ ID NO: 296266 - DNA, 384 bp, Homo sapiens
ttctactatgttataccactgatatttgagggcttatttgttatagcatctaccatcatcctttgaattacgaagctaagggaaaaaaagcccattggctttaaaacccagcagarttcagtaggaggaggaagatggagaaagttataaagtaatcaagttgggtgggaacctcaggttagatcctcattacacttagaatgagcgttacccatttgacacaggtggatatctttgctgttactcaaagccaagaggaaggtattttccagctttatttgatgagttgttttcatgcttaatattttccagaaatctgttaattcatacaggtaagagactgtgccttagtcatctctgtagcctccacagcccttcataaac

SEQ ID NO: 296267 - DNA, 456 bp, Homo sapiens
tgggtgcagccacatatcatgagtttccaggccattctgcctgagttgagatcattatgctgcttctttcattgcacaggaacgtgggggttttctctaaactatgactcatagcaaagcatacaggcaatcatgtagagaaacctgttctycccaggaaaggagggtgagcaaatgctaaaagttttgatactttaatatagcactggccttggctaattttacttaatatgaaagatttcaaataatggaaacactgacaggcaaaaacattaaaagtttgcataaaatctcaaaaaaccctgcaaacaagagagaagcatggtctaattaaaataaaggaaaagattgctactgggttcctgaatactcttttcacaaaggcttcacgtcagatgaacttcaagcaccaagcagcagggatcccactgaagtttattcagcgcccttctgggc

SEQ ID NO: 296268 - DNA, 456 bp, Homo sapiens
tgggtgcagccacatatcatgagtttccaggccattctgcctgagttgagatcattatgctgcttctttcattgcacaggaacgtgggggttttctctaaactatgactcatagcaaagcatacaggcaatcatgtagagaaacctgttctccccaggaaaggagggtgagcaaatgctaaaagttttgatactttaatatagcactggccktggctaattttacttaatatgaaagatttcaaataatggaaacactgacaggcaaaaacattaaaagtttgcataaaatctcaaaaaaccctgcaaacaagagagaagcatggtctaattaaaataaaggaaaagattgctactgggttcctgaatactcttttcacaaaggcttcacgtcagatgaacttcaagcaccaagcagcagggatcccactgaagtttattcagcgcccttctgggc

SEQ ID NO: 296269 - DNA, 468 bp, Homo sapiens
gctctaaatctccagcttttgacttcaggaaaatggcacttactttatattcatagaatttctggggcagttcttctcaaactttaacatgcacgtgaatcgccgagggatcttgttaagaggcagattctagctcggtcagtctggatgggacctgagattctrcattcaggttcccagaggatgtcaaagctgctggtgcatggaccacactttgaatgatgagatctgtttagctggttggtaggtacctggtggctgagctttcaaactctgtaatcagactacctgggtttgcatccagcctccactgtttaccctttcttactgtgtgcctcagcttccacatttgcagaatagtgctcaaaataacagtacaaatagagctgctccgtgggttacagaaagctatatgtataaatcactcggcacagtgtatggcacatgagcactcaagaggtgagctgt

SEQ ID NO: 296270 - DNA, 468 bp, Homo sapiens
gctctaaatctccagcttttgacttcaggaaaatggcacttactttatattcatagaatttctggggcagttcttctcaaactttaacatgcacgtgaatcgccgagggatcttgttaagaggcagattctagctcggtcagtctggatgggacctgagattctgcattcaggttcccagaggatgtcaaagctgctggtgcatggaccacactttgaatgatgagatctgtttagctggttggtaggtacctgrtggctgagctttcaaactctgtaatcagactacctgggtttgcatccagcctccactgtttaccctttcttactgtgtgcctcagcttccacatttgcagaatagtgctcaaaataacagtacaaatagagctgctccgtgggttacagaaagctatatgtataaatcactcggcacagtgtatggcacatgagcactcaagaggtgagctgt

SEQ ID NO: 296271 - DNA, 556 bp, Homo sapiens
ggccccactctcaaggagcaaccatttcacagaagagacagaaacatgtaaatgaacacatacaagttaaagttgtggtacagctaatgacatgagggctcctatggaaaaggttagcaggactgtcacgaagccctctcaaaggaaatgccccaaaagccaagttgtgaagaagtcatcgtcaaccagtgcagaatagtgggaagagcattccaggcatagggaaccatgaggacaaagcccctagggttggaaagaacaaggaggaaaatgacagcaaacaaagccccaaaaaagcacstagtgcccaaatcatgcagggtctcttcataggccatggtgaggatgttggattttattccaaaggctacaagatgccatgaaagggttttaaatctgtcttacaaaaccataaatttcacactgcagcaatcaagtcccacaatgtcctgaaactatggagtcagaacttgacctcttgacgccttctacttcttactagagattcaaggtctttgaccctggtgacacaacaccagtacgggattttttcaaa

SEQ ID NO: 296272 - DNA, 556 bp, Homo sapiens
ggccccactctcaaggagcaaccatttcacagaagagacagaaacatgtaaatgaacacatacaagttaaagttgtggtacagctaatgacatgagggctcctatggaaaaggttagcaggactgtcacgaagccctctcaaaggaaatgccccaaaagccaagttgtgaagaagtcatcgtcaaccagtgcagaatagtgggaagagcattccaggcatagggaaccatgaggacaaagcccctagggttggaaagaacaaggaggaaaatgacagcaaacaaagccccaaaaaagcacgtagtgcccaaatcatgcagggtctcttcataggccatggtgaggatgttgkattttattccaaaggctacaagatgccatgaaagggttttaaatctgtcttacaaaaccataaatttcacactgcagcaatcaagtcccacaatgtcctgaaactatggagtcagaacttgacctcttgacgccttctacttcttactagagattcaaggtctttgaccctggtgacacaacaccagtacgggattttttcaaa

SEQ ID NO: 296273 - DNA, 561 bp, Homo sapiens
tccctgaaacgaccacaaagcaaccatttgattctgccaaaaatattgtctttgaaatatggtttctagaacgtctgtgagtcacctgctcacatgtccaagatgtctcagaaatccttctgcttttataaaccttgtcttttggcctacagcaccagtctacactttttaccagctctgaggaccttctgagtcacactctgaagtcctgacctcaccataaacaaagagccttttctgggggagttggagctgccctaagccagtgaaagccaatgctcayacgcttgccctatccaactgctttcattagctccattctttttagtctaaaagccttcctgacagcaacaggggccaagaatttctctcatgaaccccattttcttgatttcaaaatccacttgccttgggagaaacgcttgaacctgggaggtagagattgcagtgagcagagatcgtgccactccactccagcctggcaacagagattcagtcttgaaaaaaaaaaaaatccacctgccttggtacaagatgggaaagtctttgggtgtttattgg

SEQ ID NO: 296274 - DNA, 561 bp, Homo sapiens
tccctgaaacgaccacaaagcaaccatttgattctgccaaaaatattgtctttgaaatatggtttctagaacgtctgtgagtcacctgctcacatgtccaagatgtctcagaaatccttctgcttttataaaccttgtcttttggcctacagcaccagtctacactttttaccagctctgaggaccttctgagtcacactctgaagtcctgacctcaccataaacaaagagccttttctgggggagttggagctgccctaagccagtgaaagccaatgctcacacgcttgccctatccaactgctttcattagctccattctttttagtctaaaagccttcctgacagcaacaggggccaagaatttctctcatgaamcccattttcttgatttcaaaatccacttgccttgggagaaacgcttgaacctgggaggtagagattgcagtgagcagagatcgtgccactccactccagcctggcaacagagattcagtcttgaaaaaaaaaaaaatccacctgccttggtacaagatgggaaagtctttgggtgtttattgg

SEQ ID NO: 296275 - DNA, 561 bp, Homo sapiens
tccctgaaacgaccacaaagcaaccatttgattctgccaaaaatattgtctttgaaatatggtttctagaacgtctgtgagtcacctgctcacatgtccaagatgtctcagaaatccttctgcttttataaaccttgtcttttggcctacagcaccagtctacactttttaccagctctgaggaccttctgagtcacactctgaagtcctgacctcaccataaacaaagagccttttctgggggagttggagctgccctaagccagtgaaagccaatgctcacacgcttgccctatccaactgctttcattagctccattctttttagtctaaaagccttcctgacagcaacaggggccaagaatttctctcatgaaccccattttcttgatttcaaaatccacttgccttgggagaaacgcttgaacctgggaggtagagattgcagtgagcagagatygtgccactccactccagcctggcaacagagattcagtcttgaaaaaaaaaaaaatccacctgccttggtacaagatgggaaagtctttgggtgtttattgg

SEQ ID NO: 296276 - DNA, 561 bp, Homo sapiens
tccctgaaacgaccacaaagcaaccatttgattctgccaaaaatattgtctttgaaatatggtttctagaacgtctgtgagtcacctgctcacatgtccaagatgtctcagaaatccttctgcttttataaaccttgtcttttggcctacagcaccagtctacactttttaccagctctgaggaccttctgagtcacactctgaagtcctgacctcaccataaacaaagagccttttctgggggagttggagctgccctaagccagtgaaagccaatgctcacacgcttgccctatccaactgctttcattagctccattctttttagtctaaaagccttcctgacagcaacaggggccaagaatttctctcatgaaccccattttcttgatttcaaaatccacttgccttgggagaaacgcttgaacctgggaggtagagattgcagtgagcagagatcgtgccactscactccagcctggcaacagagattcagtcttgaaaaaaaaaaaaatccacctgccttggtacaagatgggaaagtctttgggtgtttattgg

SEQ ID NO: 296277 - DNA, 526 bp, Homo sapiens
tcataaggagttgcagtgaaggtagaagcatgtttcatggatctgtgttaagggcagagctagaagcccttgctgatggtttctacatagcaggtaagagggagagagaaatcaaaggtgacttgtaggtttgtagtttgaacagctagatggaaaatgaggtcatttactaagacaagaaagtaagaaggagagataggtatggggacatgctaaagacaatgagactcagaaaagccaagagactcattcaaggttacatggctgggaaatgrtagaggcagacttggaacgctggtccctgggactccacggcagggttcaaatggtaaagcaagctgaatttccaggccaggttcagggaaacattgaggggaaaatcaaatcagtaatccaggcaaattcagggcataccacgtggctgatctattttcagcatccactcttgtgaaggctacttgtagaatcttagaattaatagaattttcgagctgagcagatctttgggctcaaaagggcatctgtg

SEQ ID NO: 296278 - DNA, 614 bp, Homo sapiens
taagttccctaggtattcctgccacttgtaactatgttggtggcacttaggcccttccaatataaatgttctggggcctccactagatgaggagcaaaatatccaaggcctcttcccaaatggatatatagacaataaataaatcatacaagtaaatatatatttatcaatttygttgaattctatgaaggaaaaaaatacagctctacaaagaaaataacaagggtgcaggggacagggcactaattatgattagggagtaacagaaagcctctgtaaggtggaaaaacaaaacaaactcataagtagttaaaaaaaaaaaatcacttcccaaagaggcttacacgatcagggaagtattgggctttgggtaagtgctacacactctcagaggacagggagtccactgaagactgcaaagctttcttgaagaaaagtctgcctggatactgaaggataaatgacagttaagtaatgggagggatacctatttttagcgtggtcctcaataaacaaaagcgcagacatcactcgttcattttaagagatcttgacttttatgtgccaacgaccactttggcaggctggtgaagccttcaaattccttctcagaa

SEQ ID NO: 296279 - DNA, 500 bp, Homo sapiens
ggttaacctcccaggagattgagaaggttaaatgagataccacgtgtgcagaggccagcatggtgcccagctcagcagtaggcacttgggaaatgtcacctttaacactgatatgtaagaccagcccatcatagcagcattattcacaatagccaaaggtgggaacaacccaaatgtccattgacagaagaacaggtaaacaaaatgtaaatacatacaatkaaatattagccagcgttcaaaaacaaaggacattcggatacatgctacaccagcacactccctagctcacgatattttaagtggatgaataaatgaatgagcaaaaaaagagcaccctacctctaactggatcccccagctgtgaactctctcacattttttctctagcaaattccctcttttttgctgtttctttctcctcttttctgttctattctctttcttcatcccctatgctttaaaagacacttgcatctggggctttttctgaagccgtt

SEQ ID NO: 296280 - DNA, 500 bp, Homo sapiens
ggttaacctcccaggagattgagaaggttaaatgagataccacgtgtgcagaggccagcatggtgcccagctcagcagtaggcacttgggaaatgtcacctttaacactgatatgtaagaccagcccatcatagcagcattattcacaatagccaaaggtgggaacaacccaaatgtccattgacagaagaacaggtaaacaaaatgtaaatacatacaattaaatattagccagcgttcaaaaasaaaggacattcggatacatgctacaccagcacactccctagctcacgatattttaagtggatgaataaatgaatgagcaaaaaaagagcaccctacctctaactggatcccccagctgtgaactctctcacattttttctctagcaaattccctcttttttgctgtttctttctcctcttttctgttctattctctttcttcatcccctatgctttaaaagacacttgcatctggggctttttctgaagccgtt

SEQ ID NO: 296281 - DNA, 500 bp, Homo sapiens
ggttaacctcccaggagattgagaaggttaaatgagataccacgtgtgcagaggccagcatggtgcccagctcagcagtaggcacttgggaaatgtcacctttaacactgatatgtaagaccagcccatcatagcagcattattcacaatagccaaaggtgggaacaacccaaatgtccattgacagaagaacaggtaaacaaaatgtaaatacatacaattaaatattagccagcgttcaaaaacaaaggacattckgatacatgctacaccagcacactccctagctcacgatattttaagtggatgaataaatgaatgagcaaaaaaagagcaccctacctctaactggatcccccagctgtgaactctctcacattttttctctagcaaattccctcttttttgctgtttctttctcctcttttctgttctattctctttcttcatcccctatgctttaaaagacacttgcatctggggctttttctgaagccgtt

SEQ ID NO: 296282 - DNA, 500 bp, Homo sapiens
ggttaacctcccaggagattgagaaggttaaatgagataccacgtgtgcagaggccagcatggtgcccagctcagcagtaggcacttgggaaatgtcacctttaacactgatatgtaagaccagcccatcatagcagcattattcacaatagccaaaggtgggaacaacccaaatgtccattgacagaagaacaggtaaacaaaatgtaaatacatacaattaaatattagccagcgttcaaaaacaaaggacattcggatacatgctacaccagcacactccctagctcacgatattttaaktggatgaataaatgaatgagcaaaaaaagagcaccctacctctaactggatcccccagctgtgaactctctcacattttttctctagcaaattccctcttttttgctgtttctttctcctcttttctgttctattctctttcttcatcccctatgctttaaaagacacttgcatctggggctttttctgaagccgtt

SEQ ID NO: 296283 - DNA, 645 bp, Homo sapiens
tccagacagagagaaccaaatacacaaagactctaagaaggaaagaaaacagggtatgttcaaaactgacagagagcacaggtgacaactgacagagcacaggtgcgtggtggggagcaggtggcaagaggagagggataagacaggtgggtaaggaccccgcagttcatgagaaggcacctaggttctagccaccaagatgtcatgagaagcccttaaaggctattcagaagagaagtgacctgatccaatttaccctggctgcaaaggaaaggatgaagtaggggaggagtagaggtagaagcagggagaccagtggaggctgcttcatctacarctccagatggtgatgatggtggtagcactggagatgaggaaggatctgagatatacatttgaaggagaataattatacattgcactagactctggtggggatgagagaaagagaatgttccaccattcactgggtggtcaggctgggcagccaaggttaaaaggctaagtgtcatccagggaagagaccatcacacgatttgaggttgctgagaacagacaacacacacaccaggctcaagtggtagagcaagaggagacagactacacaagatgcagtcccttgcaatgcgtcagtcccccacagcc

SEQ ID NO: 296284 - DNA, 635 bp, Homo sapiens
gcaagagctagtccataggcattggaatcattcgggcatggggttaaatcccagagccaccactaactagatctgtcattttaagcaagctatctgaactttcattgcctcggtttccacaaccacaaaatgggaatttagtacgtatgtcctaaaggactgcagaaagaagcaaaataatacgtctaagcagtgtagcagaagacctggcacttaacagattataagtttcccattgctgctgtaacaaattgccataaagttagtggcttagagtgatgtaaaatgtattaaagtcctggaggtcagaaacctaaaatggaccagcaggccttcctagtgcttccttctaaggctttagaggagaatccatttcttaccttttccagtttgtagagtctgcccacattccttagctcatggccacatcactctaactctgtttccatggtcacatctccttctctgactcttccatgcccgcctcttataagtacagtcacaattatattgggcccaccagataattttggatgaggctctcatctcaagayggatccataacttaatcacatcttcaaaatcccttttgccataaatcataacatttatacaggagtcagagtttagaaggt

SEQ ID NO: 296285 - DNA, 481 bp, Homo sapiens
ctcatggccacatcactctaactctgtttccatggtcacatctccttctctgactcttccatgcccgcctcttataagtacagtcacaattatattgggcccaccagataattttggatgaggctctcatctcaagatggatccataacttaatcacatcttcaaaatcccttttgccataaatcataacatttatacaggagtcagagtttagaaggtgaacatctttgagaggtcgtagttctgcctgccaggccaccatcttgctccsaaagattcactccatctccccaaaactaactcacgatagtgtcaaagtccaaaattttcatcaaaatctcatcagaccaggcacagtgactcatgcctgtaatcccagcattttgggaggccaaggcgggtggatcacctgaggtcaggagttcgagaccagcctggccaacatgatgaaaccagtctctactaaaaatacaaaaattag

SEQ ID NO: 296286 - DNA, 502 bp, Homo sapiens
ttccttgcttggaaggaacatgarggacggatgtatattgagctccctgatgtgcaggcagagtgttgcaggcagggatccgaggaccaccaccctcattgtagagaggaggaaagtgaagcccagggaatcacagaagcttatttttggtgacactgctggtaggcaggtaacagagctgggccctgaactcaggtctcctgactccacaacctctgtttttttgatcagaagaatttcttaagttttgtttccttccatggcaccttcacaacattttggccactttgactaattttttattgtgatataatacacataacatagaatctgccattctaaacattttaaagtgaacaattcagtggcgtttagtacgttcacaatgttgtgtgaccagcacctccatctaggtccagaacatcatcactccaaaaggagaccagtaaccatcaagcagttacgatctatttccccacccctccagctcctggaaaccttt

SEQ ID NO: 296287 - DNA, 525 bp, Homo sapiens
tctgtgcgattatttattcttgccccttcttttgaagtcctttgagcctttgaacttgatatggtttggctgtgtccccacctaaatctcaccttgaattgtagcttccataatcctcatgtgtcctgggagggattcagtgggaggtaattgaatcatgggggcaggtctttcccgtgctgttttcgtgatagtgaataagtctcacaagatctgatggttttataaatgggagttcccctgcacatgctctcttgccatgtaagatgtgaccttgcttctcatttgccttctgccatgattgtgaggcctccccagccatgtggaactgtgagtccattaaacctctttcccttataagttaccagtctccgatatgtctttattatcagtgtgagaacagactaatacagagctctttcagtggaaaagatartacattaaatcgttataccaaacattataatcatggatggtattgcagtcacattatctgccaggagaattggcagggactgtagaagg

SEQ ID NO: 296288 - DNA, 525 bp, Homo sapiens
tctgtgcgattatttattcttgccccttcttttgaagtcctttgagcctttgaacttgatatggtttggctgtgtccccacctaaatctcaccttgaattgtagcttccataatcctcatgtgtcctgggagggattcagtgggaggtaattgaatcatgggggcaggtctttcccgtgctgttttcgtgatagtgaataagtctcacaagatctgatggttttataaatgggagttcccctgcacatgctctcttgccatgtaagatgtgaccttgcttctcatttgccttctgccatgattgtgaggcctccccagccatgtggaactgtgagtccattaaacctctttcccttataagttaccagtctccgatatgtctttattatcagtgtgagaacagactaatacagagctctttcagtggaaaagatagtacattaaatcgttataccaaacrttataatcatggatggtattgcagtcacattatctgccaggagaattggcagggactgtagaagg

SEQ ID NO: 296289 - DNA, 476 bp, Homo sapiens
ggtataatgcccacttcacaggtggacaaagtgagactcaggagccacacatgtagaatgttctagaacacagaaagtcctctttccagcatgtccttgtggcagattaggcaagacaaggggggaaaagcagagtccaggggggaggcaaattgagatgcaggagggaaggagataagagcaatagggaatcctcagagcacctggcaggcccccagcccctggcgaggaagaagccaggccacgtagtcatgtccccatggagaatgcagctgctcctctgtgctctgccctcggttgctactgccctgcgaggcaamctcgaggctgggaatctcctcctttctctgtctgcagcagctgcagtgaaacaaagggcacagcccccttcaggccaagagaggtgagaagctgctggggagctgatgtcaccactaccccctccgaagcccatccatggggcacagtgcactcca

SEQ ID NO: 296290 - DNA, 442 bp, Homo sapiens
tggatttctccacggcagcagctatttatcagggtagatctatacaccacagaacacaaagggagcgatggagtacagatgagcgctacttaaagcaatatcaccctcaccttgtattgcagatccttgtattgcagccagatgacaatgcctgggaccctcttaccatccaaacacccacctcaaggaggcccagccctgtcatatgactgtcccyattatacttgaacagcctttgaagggctttcaaagtgtttcccagccacatctccaccctccaagctcaggtagcccattccttcattcccgtctcaaatgttctgccccagtgaatatcttcgcctccctgttagactctgagatcttgtactgcagaatccactgttgctcatacaattctgagttgtacctgagggcagaatcagagtggtctttttgcctt

SEQ ID NO: 296291 - DNA, 442 bp, Homo sapiens
tggatttctccacggcagcagctatttatcagggtagatctatacaccacagaacacaaagggagcgatggagtacagatgagcgctacttaaagcaatatcaccctcaccttgtattgcagatccttgtattgcagccagatgacaatgcctgggaccctcttaccatccaaacacccacctcaaggaggcccagccctgtcatatgactgtccccattatacttgaacagcctttgaagggctttcaaagtgtttcccagccacatctccaccctccaagctcaggtagcccattccttcattcccgtctcraatgttctgccccagtgaatatcttcgcctccctgttagactctgagatcttgtactgcagaatccactgttgctcatacaattctgagttgtacctgagggcagaatcagagtggtctttttgcctt

SEQ ID NO: 296292 - DNA, 619 bp, Homo sapiens
ccctgttagactctgagatcttgtactgcagaatccactgttgctcatacaattctgagttgtacctgagggcagaatcagagtggtctttttgccttttgtgtttgcagagtcccaactgcagaagagagtgacatgccataaacaggtcaaatgtcgttaatataaatatctaccatggggcaatttccgaggctcttacatgcttcgtcctgaggttagcatgaggcaactgcactcactgctacgccttcccacacttattctaagggacagccagctaggatggagtgggagctgatgccctggattaaggtgcctggttaattccacttgcctggtttcctttgttctcaaactctgcctggagatgaagctattgcgaagtcagtctcagcttgtgcttctaagttctgctccttacatatgcccccagaaagttgttccaagtgaaggcagcttaattaaaaaccacattcaatcaaactgtcactttgtttatgaaaaagtgtckagtggctggaaatggcaagaacaagcactgaagattaatgctctaaattttttctgattaaaagtatgattgaggcattaagaaagctagctccatgaacccagg

SEQ ID NO: 296293 - DNA, 599 bp, Homo sapiens
ggagctgatgccctggattaaggtgcctggttaattccacttgcctggtttcctttgttctcaaactctgcctggagatgaagctattgcgaagtcagtctcagcttgtgcttctaagttctgctccttacatatgcccccagaaagttgttccaagtgaaggcagcttaattaaaaaccacattcaatcaaactgtcactttgtttatgaaaaagtgtctagtggctggaaatggcaagaacaagcactgaagattaatgctctaaattttttctgattaaaagtatgattgaggcattaagaaagctagctccatgaacccagggcaggccttaagcccaacattttgccatcttcaaatacaactggggayagttgtaaaaacaaatagaacttctctctgcctagaggtttcctttcatgaagataaagtttctagctggaactggctgtttttgcagggaagcacacatgagacaagctttttggagtctctccaatacctgcctgtttcataaatggcacagtctccaaatctgatgctcactggaccagggtcaggctatggaactgattaaaataagtaggaacctccaag

SEQ ID NO: 296294 - DNA, 508 bp, Homo sapiens
ctggaaaaataagctcaagggctccaagtagaaatagttgtagtcctggagtcagccttgggtttagctccacttccaaaatgtgtcaacttatagaacccttattttttcatagggttatgaagccactggtctattttatccaacagagaaatcagctccaagcaaatcccacctggacacagtgtctttgcctgactccagaaacaagatggcactctgtctccagtggttccactttacctagatttggagcctccaaaacattgtatggccacactccatctctgcctacgatggaattatgagagagctttggaaaatggctgttccaaaagtggtagtcttaacacaaagatcaggaagaatatttgatttggattaccasccacagcaggcagaattctaagatgttcccaaagtgatagtcttaatccacaggaagaatatttggtttggattaccagccacagtaggcaaaattctaagatgaccaccaatgacccat

SEQ ID NO: 296295 - DNA, 496 bp, Homo sapiens
gcctggaaggaaatgtctctgaaagacaaggatagtggccagtagacaatggcacacatgcccaaaacattgtcatcaggaaattcaagaggtcattaaattctactgtaggaggaaattaacacaaagatgatcccaatgacagatgtattctcatgataattcaagctcttctccatctggaataagagaaaaacaaatgactttccaaagagctgatcacatttaatcttcctttaaagacctgtgggttggatgtgctatcatcacttcacagttaaggagactgagccccgtgggccagttttgcagagctggtgtttgaacttkggcagctacaaagcctgtgctccttcccatgctcaccctaagtccttttacatatcatgcactgaacttccaacaggaacggtcaagtccccaagacctaggccctgtccttaaggaatcgccatctgccccaggggacatgaatgatgcttctagccagggagag

SEQ ID NO: 296296 - DNA, 592 bp, Homo sapiens
gagtaaccagtcctttctcatgaagggtaatatgtgtttccagcctaagagttttaaccgtcatttcctgcctgtagaatttggggagtatatcataggtgataattgaacaatgagaacacttggacagaaggcggggaatatcacacaccggggcctgtcagggggtagggggctgggggagggatagcattaggagaaatacttaatgtaaatgatgagttgatgggtgcagcaaaccaacaggggacatgtatacctatgtaacaaacctgcacattgtgcacatgtaccctagaacttcgagtataataataataaaaaaaraatttagggagtgtaatggccttccttcattttatcttctctgttcccttctgtccaaattgccaatgtttatgctggtaggaaatttcaaaaaccttatgggtctcctgagtatgtcatggggattcactccatcagacaaaaaatggttcttcacagttctttcctagataatcctaatatctattctttgcttctgatttgatggccaaggggtacatgagtctcatacctaatctcttcaaagagcactctgtgtggctga

SEQ ID NO: 296297 - DNA, 596 bp, Homo sapiens
tcaaatagcaacaaaaacttcaaggaggagattcatttgcaactaggtgctaatgaaaccaggtcctccttccaagaaaatcaaactgtgtaactcagaatagccaatttaggatgcaagaggcatttggctaattatactcaattgtagacctgttatccatggtgttaaacaaggactaaaggttaaagatactgattaataattaataaactatctcattaaaaaaagaaatcattgcaatattttgctctgcatattctaggtgaccttttcctcccccatttttcttcatattttggatgaatttatctgtcagtggaaatgtcttgaaagaataagttcactccaccttcacaaggatggtaatgatgatgatgtttatagcagctaccatttatsggggaactgaccttgggcctcacgactgtgctaagcacttaacatacaatgtttcgttttatcattattatgacctgaggccctgaaaaagaatttgagctcccagtggtttgagaaatgatcccaggaaacactggtaagaggaaagagaagtgagacagggaagtaaaaggaaacaataaatggtaaatttt

SEQ ID NO: 296298 - DNA, 600 bp, Homo sapiens
atcagtacaacaatcccttggctcccatgaacatcgtagaccccactgtgtgcaggggccgcagtcgacggcagggtatgaggagaaacaggacaggtttccatgtcccttgtgagcgcagagtgtaggaggaagattgacaggaaaaccaaaataagacacctgaaactccacgatatgataaatgatatgacaacagggggaggtgctaaatgttacgagagtgcagcagaggcataaaataaaagaagcctgaagcaaacttttaattcgttacacaaaaaagtctttagtcttctttgccgagattaaagcagtgccactctgggtctggagccgaactggtagctggggtctagaagaattcagagttcatcccgagtcttctctagagayggaagcctggagaagcctggagaagcctggggaagccagaaggccctgaacccctgacaaaaagcctaaggatcctcacccagcaatgctgaccacgaccattaaaacatgaagcccacccccaaagaggaaaatccttgccctttaatgaagctgccaaaaacctccaaatttaacagtttgcactgtgtctttctgcagaca

SEQ ID NO: 296299 - DNA, 567 bp, Homo sapiens
cactcttctgtatttgtcagttgggtttctgtcaaaaggaagaactttttcatttagttcatttatctagctattgatttattatttatcagtgtggatccttgaactattttattgaaaatgttagaattcttattgtcattatttattttgagtctcaaattgtcccagatctcagcaagataagcccttcaaactcactcttctgtcttttgacatgtatcctttaacrctttcttattttctcacacatccaaatgttccaggattattttcttaggtttcagccctatttctagattcaggcatttcttcacagttatcttttcttttctgttatttgtagtagtagtagttgttgttgttgtttgagactccaggctggagtgcagtagcacgatctcggctcactgcaacctctgcctcccgggttcaagcgactctcctgcctcagcctcccgagtagctggactacaggcacacacctccacgcccagctaatttttgtatttttggtagagacggggtttcaccatgttggccaggatggtctcgatctcttgacct

SEQ ID NO: 296300 - DNA, 640 bp, Homo sapiens
aaccagcctcaccaacagggcgaaaccctatttctactaaaaatacaaaaaaatcatccgggggtggcggcgcacgcctgtaatcccagctactccagcaactgaggcacaaaagtcacttgaacctgggagacggagtttgtactctagcctgggtgacagaatgagactctgtctcaaataaatgaataaataaataaataaataattcagaagagtcatctgggttagaatttaaagtttatagacatcatcttgagaatgaaatgtagatagaaaaaaaaatacaaacctcaagcaacaggtcacacaaatttgagtagtcagtaaagtgagagagaagcaaagaaaactgagaaagtaatctcactgagcaagataggaggaaaaccaaaaggaaatggtatcccagaatacaagggaaggaatgattaagaaagaattgaatgatcatttacgcctaatgctgctaattatgaaattaaacttgacgactggactaagtagcatagagattattgataactttaaaaaaaatttttctgtaaagtggtaagaaaatttgyctgattacattggttaattggagatttggaggacaggaagtgatgatagtgatttgaagttttgatataacgga

SEQ ID NO: 296301 - DNA, 602 bp, Homo sapiens
cctctttgtcttgctcaccctcacttgtctgcataccttattcttcctgggcagaggacaataactttggacccactgaatgaggctaaaagagcggtaacacgaacagggctgagacatgccccttgcttgccacatttcgggaaaagataaggaaagaaaagctatggtccattggggatcccagacctgggagctccctgatccagagctgtcactccctttttggggtcccgtggttcctggcatctccaagtttccagacaccaccatgttccctggtgctagctgtggaagctgtttgtggtgtgtctggtccagcagcagcttcagagagagcaagtgcccatgctggcacctggaactgcctgccttgctgtagtagccagcatgtctgactgcacagtggccagagcctacacctgctcacacatcccttaccagtccatgcagtctacattggcagaggtggtatccaggctggtagtgtgagcagagtgcagtctgccaggctgagtgggaagaatgagcccartgggcccaagaaaaactcggaaaaagaagccaccagccacagaggtttctggccagaaaattgacac

SEQ ID NO: 296302 - DNA, 602 bp, Homo sapiens
aatcacttagtttttacttaaatatgtgaaatacacacacacacacacacacacacacacatactttttttacccgaatatcctcaaaatgcattgttttacttggctgaaagtattactgtgtgtggttttttttttttttttakatatttaggaaacaatttaacttttttaattaaactttttattctagaataattatacattcatatacatttgtaagaaataatacaggagaatcccatttaccacaaatccagtagccacaagggtaacatcttcaaaaactatagtgcagtatgacaaccaggatattgacttttactttgatgcagtccatttatagaatctttccatcaccacagggatcatttgtgtcatccttttatatccatactcacttccctttctccatcttcctctttctaatcccaggcagtcagtaataatctgttctccacttttataatttggttatattatgaatgtggtataaattgaattatatagcaacgctttattactatacagtatattatacagtaaacctttagggatttttttttcactcaacataattacctggagattcattttaaatt

SEQ ID NO: 296303 - DNA, 576 bp, Homo sapiens
ggatactactttacttttcccagttggaaatagcagtcagcacttgctctagcattacgtgagaatgcataatgactttctattaaagacagataattttgaggtctgcttcaaagtacatcattattttcatttttttaaaagctaactacattgttattttcaagaatcgttgatggaacctaccttttagatataaaaaatacccacaattattctacttatctcagraaataagctattttctttagttgtgtttagtacctgaattcactcattatattatttccaggcattaaataaattatattcacagagctaaagagtttcagcctcatcagaataggcagagggtttctaaagggaaacacacgtaagttcttggttttatctccaaagcaataattattttctcttcaggagtaaataacagggaccaattgtttaataaaaagatgaaacagaagaattgtcttcctcttttccccaggtcaactcctaaccaaattctgccaatcataataatttttgattgtaacttttccttaaaccctgcatatatctgcttatttttgc

SEQ ID NO: 296304 - DNA, 569 bp, Homo sapiens
tggtaagctattattctttgcttattaggagtatattgttcaaaagatttgaaaagcactacaaaatgagggtgacaattgttttatgcagggagctgagataatcggttttgaattttttataaaaattttgattgaacaagtataataaagaagctatgccaatcagtaagatcaaataggacctttgccatattctgcsatatagataatgaagacttaaattacagcagtgagtataaaaatgaaaaaaggggtatagctttgagaaaaaaattaagagatacaagacataaaacttggtaattaattagatgtggtggatatggaagatggtaaagtcaaaggtgcaattctagatttccatattgggtgactggctcaataacaatgctgaacactggcatggaaattaccagaaggtattagatttaatggataatatataaattgatttggggcttactgaatttgaagcattggtatgttcattctgctggagatgcccagaatcctttaagatttgagagactcaagcaagtttatagagtaaattaaaataaagagac

SEQ ID NO: 296305 - DNA, 569 bp, Homo sapiens
tggtaagctattattctttgcttattaggagtatattgttcaaaagatttgaaaagcactacaaaatgagggtgacaattgttttatgcagggagctgagataatcggttttgaattttttataaaaattttgattgaacaagtataataaagaagctatgccaatcagtaagatcaaataggacctttgccatattctgcgatatagataatgaagacttaaattacagcagtgagtataaaaatgaaaaaaggggtatagctttgagaaaaaaattaagagatacaagacataaarcttggtaattaattagatgtggtggatatggaagatggtaaagtcaaaggtgcaattctagatttccatattgggtgactggctcaataacaatgctgaacactggcatggaaattaccagaaggtattagatttaatggataatatataaattgatttggggcttactgaatttgaagcattggtatgttcattctgctggagatgcccagaatcctttaagatttgagagactcaagcaagtttatagagtaaattaaaataaagagac

SEQ ID NO: 296306 - DNA, 562 bp, Homo sapiens
acactttccttttgcagctcagtcttagtagggacttcactatttgcctatggaagattttatgtcattatgtataatagatagcacaacacatatattgaacttatctatttgaatctgccctttttcgactacaaaattaatttggagggcggggggcaagtttcttttttatccatacctatacctttccacatcccaaatacagagtgtgtcttcaatccatattgctgaacttactgaattgaaattgaaagattgtcaccaaggcagtatgacaactgaagaccactcaaattagcttaaggaaaacatcttgattgttgtcaggacacacagtgtccaggaaatttaagagcaggaagccaggcttcaggaaggtccagggtccagacccagaatgcatttctgaaacraagcagcttcttccccagtattgatgtatctgggcttgtatggtcttcagaggaaagagtcctatcttttccatctcagtggtgacacatgggaaaccaaacatatgagttcccatttcaagtgcaccacaatgaagactgactgg

SEQ ID NO: 296307 - DNA, 548 bp, Homo sapiens
tgaagttatgtatctgaagttcgtatatttatgattatgttataaatgactttcttatgggactatttatataaggagttttctgtttggtacaatatgtatgtgaagatatattagagatacagagccattgtcaggctgccagcaagggccagaactcatccattctgcttcagttaggcatagatatgaatataaaatctcagaacactctataaggggtgctagctttgaggagtcccagctgtgttcagagttcagtgaattgttttctcttgattgaatacccattgctcactatgaattcgttttaacgcatcaagagaataaggctcagatactgtaaaaaaacccaggtagctttcagagaaaatcccatttgttaaacactgggaaataaaggagtctggtgaatcctttttaacagaaggtggtgagatttatataatccaaacagtgatgatcccacagtacccaaaactttgccatgtcccctgtgctyttctttgtcaaacagagagaacaatcaaactactgacaaattgatt

SEQ ID NO: 296308 - DNA, 639 bp, Homo sapiens
ttatctcgctgttatttttaaatatccaaatgactatgtcataatcacttagaattaattcttaatgaatttcttacatagacaagattcttgttactcaaattgtggtccaaacttcccagcaacatgaacatcaactggagacttgttagagatacagaatgtcaccctcactccatttaatcataatttacattttagatactgatatggtttggatatttgtcccctccaaatctcacattaaaacctaatccccattgtggagttggggcctggtgggaggtgtttgggtcttgagggcaggtccctcatgaatgctattctcacagtaataagtgagctctttcttcgagttcatgtgagatctggttgtttaaaatagtgtggcacgtcccacctctatctttctcttgttcctgctctcacattgtgatatgtctgtccccccatctgatttcaccatgattgtaagcttcctaagacccccaccagaagttctagatactggtaccatatttcttgtacagyctgcagaactatgagccaaaataaacctgctttctttataaattacccagactcaggtatttctttatagaaacccaaaaatggactaacatgatactaattggtacc

SEQ ID NO: 296309 - DNA, 608 bp, Homo sapiens
attggaaacattctaagaccaactcctcaaatgacttcttcaactttgcgtatattttactggattaagacttaggyttagggttgatctatgctacaatgtgaatattgacaggtattgtagcagtagaaaaacaaattgatctctttgagtctcaggtatcttacctgcaaataagggttttaggtcaaatagtctctgaagacctgcttgttcgaatattttataattacagttttttaagggaacttagcacagtatcacaaattggtgtacagatttatttaaatacaccacaggagaaacagatttagtctgtgagcacatgagtggggcacgtgagctgagtaacaatgtcttgtcctatcttcagttttgtgcaagaagccaacagaaaatgaagaataccttccactttggaaaattcatattcttattaaaaataggtaaaactatgtgttttcattcaaattgttgtactgatctcaagctgattttccttaacaaaaagttcctcttaggattgtccagttagttacgttcacatagaaagtcttcttatgaataagaatgcttcactaggattcagattagattctaagctttcc

SEQ ID NO: 296310 - DNA, 602 bp, Homo sapiens
aaagttcaacttcaagaagtgtagtcttcagcaaccctttaatatgtccttccaagctgtttcactcatgcagggtttctatttatagcaaatggtctttactttccttagttgatttatacgtttatatggattagtcttggatgttccttcatatgcttgtcattaatagttaatatttaatgagtactttattaatggctgacactgtgctaagtatttgcatgtattaatgtatttaatactctactcccaatagtcccctaaagtaggtgttattattatcctaatttgatagatgagaaaatcacaggaaacaaaagtaaaataacttttaaatagttgcactggtagatgaaaatactgtgtcacatatgtcacacagttcacaaagagaagcatcaaacccagctttaatgacagagctcgtagtgttagctcttgccctacytaagtttggagaatcttaatacctcccccagggtcacctaagtagtgtttgatataacaagaatttcaattcaagtcttagaactccagttccaagagcacagtatctattttattccagtaaaagtcttcttaataaagtgcttatcata

SEQ ID NO: 296311 - DNA, 602 bp, Homo sapiens
aaagttcaacttcaagaagtgtagtcttcagcaaccctttaatatgtccttccaagctgtttcactcatgcagggtttctatttatagcaaatggtctttactttccttagttgatttatacgtttatatggattagtcttggatgttccttcatatgcttgtcattaatagttaatatttaatgagtactttattaatggctgacactgtgctaagtatttgcatgtattaatgtatttaatactctactcccaatagtcccctaaagtaggtgttattattatcctaatttgatagatgagaaaatcacaggaaacaaaagtaaaataacttttaaatagttgcactggtagatgaaaatactgtgtcacatatgtcacacagttcacaaagagaagcatcaaacccagctttaatgacagagctcgtagtgttagctcttgccctacctaagtttggagaatcttaatacctcccccagggtcacytaagtagtgtttgatataacaagaatttcaattcaagtcttagaactccagttccaagagcacagtatctattttattccagtaaaagtcttcttaataaagtgcttatcata

SEQ ID NO: 296312 - DNA, 566 bp, Homo sapiens
aagaggaaagcctaatctccacaactcatgcagttggaaagcctcctaaagagacccagttcacttgaagacgagaagagcccagaatcaagagtcctcaccctgtcttctcatctttaatactcaaaaccattattgcttcaaagatgtatgtaaacattactcacataaactttcaccatatctcaattttaatatttatattatttgtaactcatgtagttatgtcaagccataaggcattaggatataatcactctacttttgacagtgaaaatcaatcatatttgataatttgggtaacaataaataattctgtgtagagtaaaaaatgcatttagaatcagagttttctttgaatattcctctcgtagaaattgaaaagagtttacttaaaattctccatgctccatttctacctcgggaaaataggtataataaaagttacctaggttttctttttgtaaaagcttttgtggaaaaaatctgtataaatttttactaytatcattagtatcaggttctctgtgtgttgtaacagtcaatatatataatataaataataa

SEQ ID NO: 296313 - DNA, 550 bp, Homo sapiens
cttacatgtttgaggaaagaaagagattagtattgaatggtgtagtatgaatttctgaaagacrccaaaagaatatatcaaacaataaattaaccattacttgcagaggcatagatgattagaaataaaaaagaatacaactttggcattagtaaatctttccaaagttaagtagctatttctgctgtactaatgcagacaagggtagagtggaagatacactgcctcaatttctctattgcttttggggtctcatcaattacccagttaaatgattctgggatattgatggtgcttgtgaaggtagcagcacatctgattttcacgatgcatggttacttactgtttacatgtgatatttttttcctccataattggagcacgaatgcctgatgttcaattaaatcatatcagcttcatcagaatttctgggaatggggtttagacatctgtattttttttaagctgctttggtggttctgttgcccagagagggttgagagctactgtctgtgatgaaaggtactgctgctctaaccccacagagtgg

SEQ ID NO: 296314 - DNA, 583 bp, Homo sapiens
aggctcccagctgtatttataaatgtctttcccaaagcaaatgagactagggggaggaaaaagaaataaagaggagagaatgtgaaaatcctacaccaagctggattgggagtgggggtggggaagtcacctgaggcagatgctccagtgcttagctggtctgctatctccttcccagttaggaagcatagccaggagcttaccagggcatggggaggtggagccacctctctgctctactggtgatttatttgctatgtccacagcctcctctgttacaaactggactggttttactctaagctgacttgagatcataaaaggaatattctccttgactgccacatgtttgggagggagactgggactgagtggccaaatgattcccccagaactactgggcgtgaggccagctgcttcaaaaactcttggaggaatgtacagtactgaaatgaaaaaaaatgttcctctctgtagactagtgctgtggtcactgtgtgtccagagccagascgggtgcttatgccggtgatgcacctaaatgtgcctagaaggctctcgagggcatttcacaagacgatgt

SEQ ID NO: 296315 - DNA, 583 bp, Homo sapiens
aggctcccagctgtatttataaatgtctttcccaaagcaaatgagactagggggaggaaaaagaaataaagaggagagaatgtgaaaatcctacaccaagctggattgggagtgggggtggggaagtcacctgaggcagatgctccagtgcttagctggtctgctatctccttcccagttaggaagcatagccaggagcttaccagggcatggggaggtggagccacctctctgctctactggtgatttatttgctatgtccacagcctcctctgttacaaactggactggttttactctaagctgacttgagatcataaaaggaatattctccttgactgccacatgtttgggagggagactgggactgagtggccaaatgattcccccagaactactgggcgtgaggccagctgcttcaaaaactcttggaggaatgtacagtactgaaatgaaaaaaaatgttcctctctgtagactagtgctgtggtcactgtgtgtccagagccagagsgggtgcttatgccggtgatgcacctaaatgtgcctagaaggctctcgagggcatttcacaagacgatgt

SEQ ID NO: 296316 - DNA, 550 bp, Homo sapiens
cttacatgtttgaggaaagaaagagattagtattgaatggtgtagtatgaatttctgaaagacaccaaaagaatatatcaaacaataaattaaccattacttgcagaggcatagatgattagaaataaaaaagaatacaactttggcattagtaaatctttccaaagttaagtagctatttctgctgtactaatgcagacaagggtagagtggaagatacactgcctcaatttctctattgcttttggggtctcatcaattacccagttaartgattctgggatattgatggtgcttgtgaaggtagcagcacatctgattttcacgatgcatggttacttactgtttacatgtgatatttttttcctccataattggagcacgaatgcctgatgttcaattaaatcatatcagcttcatcagaatttctgggaatggggtttagacatctgtattttttttaagctgctttggtggttctgttgcccagagagggttgagagctactgtctgtgatgaaaggtactgctgctctaaccccacagagtgg

SEQ ID NO: 296317 - DNA, 550 bp, Homo sapiens
cttacatgtttgaggaaagaaagagattagtattgaatggtgtagtatgaatttctgaaagacaccaaaagaatatatcaaacaataaattaaccattacttgcagaggcatagatgattagaaataaaaaagaatacaactttggcattagtaaatctttccaaagttaagtagctatttctgctgtactaatgcagacaagggtagagtggaagatacactgcctcaatttctctattgcttttggggtctcatcaattacccagttaaatgrttctgggatattgatggtgcttgtgaaggtagcagcacatctgattttcacgatgcatggttacttactgtttacatgtgatatttttttcctccataattggagcacgaatgcctgatgttcaattaaatcatatcagcttcatcagaatttctgggaatggggtttagacatctgtattttttttaagctgctttggtggttctgttgcccagagagggttgagagctactgtctgtgatgaaaggtactgctgctctaaccccacagagtgg

SEQ ID NO: 296318 - DNA, 646 bp, Homo sapiens
agtggaagatacactgcctcaatttctctattgcttttggggtctcatcaattacccagttaaatgattctgggatattgatggtgcttgtgaaggtagcagcacatctgattttcamgatgcatggttacttactgtttacatgtgatatttttttcctccataattggagcacgaatgcctgatgttcaattaaatcatatcagcttcatcagaatttctgggaatggggtttagacatctgtattttttttaagctgctttggtggttctgttgcccagagagggttgagagctactgtctgtgatgaaaggtactgctgctctaaccccacagagtgggaccagactagagacttcatctaccaattgaatatttcctcacagccccgcatgcttttcctgccttctgccttctaatggcattcctgtgcctacaaagtcacctattttttcctgagatgtccatgtctcatgtatccttcaagccccagctcggttttatctctctcatgaagcttccctgacagtcctagctcttactgggcagccctctttcaccctcaacatcagtagccccactaagcaaaatgtgatgcataaaccagtaacgtaaaacttcgcatggaagcttgttagaaatgta

SEQ ID NO: 296319 - DNA, 578 bp, Homo sapiens
attatggcttgaaggagaatatgttcataatgcctaagcagaaaccctcaagcctagcaaattcttaataaaagtaactactactattataaaccgcatcttgtacatttttaaccaccaataaaaaggaaatgatactcacactgagatcctgacacttatggtctgtaaagtaacagttctttctactagatatttactattgtaggacaagactattattggaactagtatgaatgctcaaattttcatttcccatttgctatttattgtcaaaattttctctgtgctagagaaaagaaagtctcactgcattctacccatgtagaacaatttcagagaacaattaagtagatttaaaaggaaataaattagtttatagagcyctcaaaaatgcaatgatatattcgcaaatacataaacactttgttaaaacatgagcttaataaggttatggtgccctttacagtatttaagaaaaaaaaaaagtctttgtaagcaaattagcaatataaacaagatttgaaaggaaaagttttcacttcaaaatacttctaagatttttaaagcaatagcat

SEQ ID NO: 296320 - DNA, 579 bp, Homo sapiens
catgatcctctttgaattactctgaggtcatactctccaccttctttgaagctctttagatgcaaagtcaaaatggaatcccagttctgccaggcacttgtcatatgaccttgggcaagcccctgtccgcgtgtgtagacacatgtgtaacctgctcccaggctagtctcaaacttctggccttaagcagtcgtccagctttggcctcccaaaatgctgggattactggcgtgagccattgcacccggcctcatttgtaaaactgagataacacttcatatcagagttgttataagaaattaaggtatgtcaagtaccccarcatctccttgtttacatcataattgttttaaacacatttctcattcatattttattcaaccagattttttatactaataaaaattcttattttatatagttacataggtcagatcttgatgacctagacaatgttttttctgttaaaaccttgggaaagcataaatttatttgaaaaattattctattgagctattttgggccacagttagctactttaatttctctcttgaaaaaaagaaatgtttccaatttggt

SEQ ID NO: 296321 - DNA, 579 bp, Homo sapiens
catgatcctctttgaattactctgaggtcatactctccaccttctttgaagctctttagatgcaaagtcaaaatggaatcccagttctgccaggcacttgtcatatgaccttgggcaagcccctgtccgcgtgtgtagacacatgtgtaacctgctcccaggctagtctcaaacttctggccttaagcagtcgtccagctttggcctcccaaaatgctgggattactggcgtgagccattgcacccggcctcatttgtaaaactgagataacacttcatatcagagttgttataagaaattaaggtatgtcaagtaccccagcatctccttgtttacatcataattgttttaaacacatttctcattcatattttattcaaccagattttttatactaataaaaattcttattttatatagttacataggtcagatcttgatgacctagacaatgttttttctgttaaaaccttgggaaagcataaatttatttgaaaaattattctattgagmtattttgggccacagttagctactttaatttctctcttgaaaaaaagaaatgtttccaatttggt

SEQ ID NO: 296322 - DNA, 549 bp, Homo sapiens
agtatcaaatcctcacacaatgataagacaatggaatttttaaatacaccaaatggttttcctggccaagccttgcttctgagtcatgtgaaaatgtgtttaatgctattgaccaaggtggttttggtttttcttcaagggaaactctcaagggactggatgggaaccgrattttgacaatttgcccggcaggatttttagagtgtggtgtccccagcaggcaaactggcactcggcagcctcgttagcataactctgatctgtgtgtcccacgaggccatccttccagtcaagggtggagccaaagaagtcagcagaagcaagtcaaagccagatggaaaatcacagactccacgacacatatgtccattttctcaggaatccaaaaggtgctggggcactaatgtactacctttctcacctctcctgacatgggcaacagggtctgttctaagaggtgggaacacggggtcaccttggatcagtccctctttgttccaggaagttcacccgaaatggtcctttataaataaattttgaatcaagtgc

SEQ ID NO: 296323 - DNA, 518 bp, Homo sapiens
ttcttactcaacactatattatcttttggactggtttttccctttcaaatataggaaaagagtctttttaaaatttttcttctctagatgagtaacatactacagaaaattctgctctgaactcttaaccactggacttcaaagaaaacatctcaaatccattacatgtttctcaagcctgtgattttatatacrtaaatatatgttatctaatatacgtatataaaatatctatgtatgtacttctctccaccttggatttgttttctggcatttcacaattattcctgccatagctctccaattacttcaattctcaagaacctttcctctaagtcaaggctgattttaggcaatttgagtctgacttaaggagggtaaaacccaggcccagttttggtgtattttgagactccccattctactgaaggatggatgtagttctattcagctcttgaggccataaaaagatcaaatggtctggaggtgaagagcctagtgtatggatcagactgcca

SEQ ID NO: 296324 - DNA, 1765 bp, Homo sapiens
gagactccccattctactgaaggatggatgtagttctattcagctcttgaggccataaaaagatcaaatggtctggaggtgaagagcctagtgtatggatcagactgccaggggtgaaatcccagttcctacatttatcagctgtgtgccttgagggattactcaacctctttaggctttagtttcctcatctagcaaatggggcaatagtagcatctctcctctagggatattctaaagattaagtgaggtaatacatacagagcccctagaagaggactttacaagttgtaagggctcaatgagtgttcatcattattaaaggtggctttggcatcctcaagagagagctgacaggttggtcacaaytggtgcaaccaaactatgtgttggtttgatagccctgggaaacttaatagccttttggcaaaggcacatccagcctggaacagctgtagggctccctcttggccatgaaaagaaggaaaatgttttcttatttcctggccacaggggaaagtgtttctattccaatgttgattcctcagtaagtgtaccattcattgatgcattcaatawgagactccccattctactgaaggatggatgtagttctattcagctcttgaggccataaaaagatcaaatggtctggaggtgaagagcctagtgtatggatcagactgccaggggtgaaatcccagttcctacatttatcagctgtgtgccttgagggattactcaacctctttaggctttagtttcctcatctagcaaatggggcaatagtagcatctctcctctagggatattctaaagattaagtgaggtaatacatacagagcccctagaagaggactttacaagttgtaagggctcaatgagtgttcatcattattaaaggtggctttggcatcctcaagagagagctgacaggttggtcacaattggtgcaaccaaactatgtgttggtttgatagccctgggaaacttaatagccttttggcaaaggcacatccagcctggaacagctgtagggctcccwcttggccatgaaaagaaggaaaatgttttcttatttcctggccacaggggaaagtgtttctattccaatgttgattcctcagtaagtgtaccattcattgatgcattcaatawtgccagggtttgaccaggaaaaaaagaagccaattgccagcaaggctcacaggactggtaaatagaggcagcaccaatgacttaatgctactctggacagctcaaggagagaggctcaagggaaaagaccatctgggtcttttgtcttcaccgagccttggaagaggcctccatggccacgtccaccacagggtgtaaatccccatggtgggcatgaccacggaggagacctgagttttgctcttgttgtccaggctggagtacaatggcacgatcttggctcactgcaacctctgcctcccaggttcaagtgattctcctgcctcagcctcctgagtagctggtattacaggcgcccaccaccwcgcttggctaatttttgtagttttagtagagacggggtttcaccacattggccaggctggtctcgaacttctgacctcaggtgatccacccaccttggcctcccaaagtgctgggattacaggagtaagccatcacgcctggcctccctctatgactttgaacaaatcacttaactgccatgagttttaatttccctgtcactaaatggagaggtcagcttagatgatccagaaggtgtctt

SEQ ID NO: 296325 - DNA, 525 bp, Homo sapiens
tttaaataagaagtgatcatgtatgtcaaatgctgctgagaggtctagaaagatgaggtccatkggatctggtgatgggcagaagtagtgaggataagtctgattgaaggggattcaggaaaaagtggaatttaaaaaaaatggagaaaagggtagataattatttaaagagtttttctataaaaggaatcagagaactagaggagtaaatgaaaaatgtgaaggtcttaaatatgtatctttgtcatgggagatatcttagcatgtttgcctggctatggaaatatcaaggagaaagagagaaaaaaaaattggtggtaccactgcaggtagatggttagatttcatggtcagaagttgtagttcttttctgatggcatctatttcctcagtgaaataagaaacaagatcactagatgagagtgagaagtggccaggggatctcctggattttatgagaaatataaagtgtgaaacaattatcttggaaattgggagattgacttgtaacatggaaaagggtca

SEQ ID NO: 296326 - DNA, 525 bp, Homo sapiens
tttaaataagaagtgatcatgtatgtcaaatgctgctgagaggtctagaaagatgaggtccatgggatctggtgatgggcagaagtagtgaggataagtctgattgaagkggattcaggaaaaagtggaatttaaaaaaaatggagaaaagggtagataattatttaaagagtttttctataaaaggaatcagagaactagaggagtaaatgaaaaatgtgaaggtcttaaatatgtatctttgtcatgggagatatcttagcatgtttgcctggctatggaaatatcaaggagaaagagagaaaaaaaaattggtggtaccactgcaggtagatggttagatttcatggtcagaagttgtagttcttttctgatggcatctatttcctcagtgaaataagaaacaagatcactagatgagagtgagaagtggccaggggatctcctggattttatgagaaatataaagtgtgaaacaattatcttggaaattgggagattgacttgtaacatggaaaagggtca

SEQ ID NO: 296327 - DNA, 525 bp, Homo sapiens
tttaaataagaagtgatcatgtatgtcaaatgctgctgagaggtctagaaagatgaggtccatgggatctggtgatgggcagaagtagtgaggataagtctgattgaaggggattcaggaaaaagtggaatttaaaaaaaatggagaaaagggtagataattatttaaagagtttttctataaaaggaatcagagaactagaggagtaaatgaaaaatgtgaaggtcttaaatatgtatctttgtcatgggagatatcttagcatgtttgcctggctatggaaatatcaaggagaaagagagaaaaaaaaattggtggtaccactgcaggtagatggttagatttcrtggtcagaagttgtagttcttttctgatggcatctatttcctcagtgaaataagaaacaagatcactagatgagagtgagaagtggccaggggatctcctggattttatgagaaatataaagtgtgaaacaattatcttggaaattgggagattgacttgtaacatggaaaagggtca

SEQ ID NO: 296328 - DNA, 651 bp, Homo sapiens
gtagcttcctgctgttcaacatatacaggaatagaactgagagattcctgggaaggaacacatggttagcatgtcctttagccttcaaatataaatgatttcaaagacatttagcatttattttgagattaaactatctggraagtattgagaaatttggtatattgtgctaaacacgaaaacttggggacaaatgacactttgttatttatttatgtaaagtatttattgagcatctacaatatgtctggtactgttctagacacttgggttacattcatgaacaaaataaacaatgttccctgccctcatgcataaatgttatgaaaattaaagaccctgacttgcttcatgctcacacaggcaatagctataagatttggtggggaggtggagtaattagccaggagaggaaaggtctttaaaattcttgtatttgttcattcattctttcattcattcattcagtaacatttagtaagtgattgctaataaatcgggcactgacccaggctgagataggtgagtcaaggctgtgagacagttatcagaaagaaagactgttgggacaatttgcatcaaggaaaagcctgtgggcaaaatattggtgtaagataaaagaatatcctgccatttagactccttcaaaaa

SEQ ID NO: 296329 - DNA, 592 bp, Homo sapiens
tgttcactgtgatgtacaatggcattaacttcttgaagcctaaaggcgagttagaaaatagcaactcttgaaaggtgatcatacgtgagatgtatttatyttgtagataggagtgaatgcaaaatctctcatctcactaacattcttccttgctgcagaatagcagctgtcaaaaagtggtacaggtggaatgagggactctcagctgcaatctcttggaacactggagccaggcatcctgctcatgacactcacaaggggagtccctttctgaccagagaaacacggagttactggaaaagattttcttcattaactttttatctcataatgctttccctttaaatgtttctgattactttactcaaaaaatctcagaactaataatcctcatttatcacaatgtgatatagtttgtcattttaagttttattaataatattttgtggtatttaacaaagaatagtaaaattttcaggggttccactgcctggataagtttgagaacagctgtgtgagatcctcctttaatttatatatttaacaaccattcattaaatgtttgctaggactatacacagttaataacaca

SEQ ID NO: 296330 - DNA, 592 bp, Homo sapiens
tgttcactgtgatgtacaatggcattaacttcttgaagcctaaaggcgagttagaaaatagcaactcttgaaaggtgatcatacgtgagatgtatttattttgtagataggagtgaatgcaaaatctctcatctcactaacattcttccttgctgcagaayagcagctgtcaaaaagtggtacaggtggaatgagggactctcagctgcaatctcttggaacactggagccaggcatcctgctcatgacactcacaaggggagtccctttctgaccagagaaacacggagttactggaaaagattttcttcattaactttttatctcataatgctttccctttaaatgtttctgattactttactcaaaaaatctcagaactaataatcctcatttatcacaatgtgatatagtttgtcattttaagttttattaataatattttgtggtatttaacaaagaatagtaaaattttcaggggttccactgcctggataagtttgagaacagctgtgtgagatcctcctttaatttatatatttaacaaccattcattaaatgtttgctaggactatacacagttaataacaca

SEQ ID NO: 296331 - DNA, 521 bp, Homo sapiens
tatatatttaacaaccattcattaaatgtttgctaggactatacacagttaataacacagggagtggatacataaastttaaacatgattctaagataaaaattattaaacagtttaggaatataatgggaggaatattgaacaaacaagtataatacaatatgtgatataataagacaagatagttaaatagtccaaagagaatttaaatgttgccagtgtccaaagcaataattaatcttaactggagatctggggataaagtagccttgaagattgagtcagtagaaatgctggtttaagactttgggcatcagttacaaaaacagaggtatgaaaaggcacaaattgtttagggcagtgagttgccttgcaattatggtacttggtagggtgaagtaggacacactagatgggtaagcagagatgagtcattcagcaatggctattgaatacttcctatcagccacactcctatcccagtttgtgaggaccttgagtgtcatactaaggatttagaa

SEQ ID NO: 296332 - DNA, 562 bp, Homo sapiens
acttgaacttcaaaaattaggcatgagaaatctaaggagctaaaagtcaggtgcatagttakgtgtggggaggaggaagtcagtgttctatatcttgatctaggtgatgattgcacaggtatattcaccatgtaataattcattgatctatatacttataatttgtgctttctattctgaatatatgatagtttacttttaaaatttttaaatgattttcaatttcccaggggaagatttgttttgaagacaccttgagaatggtcaatatgtaattaccttagttccctaacttttatcttatactccaccttggggctgagagggaaacgtgaaaaatttgaattcttaacactatctgtagttcttagatttcataatcgtcccagattttttactttcagataatcccttgcttgtattttccaacaatacatgataaattatagacaaatacaatctcattttctccatttaaactaatgtctttattgccaatcatttctgaaccagccaactgtggtagaactgatgaaatagtatcccacttataataaatatg

SEQ ID NO: 296333 - DNA, 537 bp, Homo sapiens
ccgccaagtaaacaaagatttcaactgtgagaagggcgagacttttgttgcttggccattgaaggcacaggaatggtccaaaatgtgcccctagcgtgcactgataaagggccccttcccagaagaaggacgggttacactcagtcaaggagccctgtgtagatcaatctacatgacagaactgggcccggagacacggtgtcccattgggaaaaccccycggcctgtcctttgattgaaaattcttcaccctcccagaggggaggaagttgagttcagcgtgttacaaatcttcatgacacttattgaattggataggaaaatagcttcatcactgacctttgctatcattctccattgaaatgttaaatgaatctaaagttgattgaatggtttaggaaagaaacatggaaatgagaaactctccatcctaggtcatgccatactgagggttttaaaaaaatctttgtacccctctgtgccttgcacagtgccaacaaggaggagtgctcgggaagatctgctcattaatgacaa

SEQ ID NO: 296334 - DNA, 567 bp, Homo sapiens
tttgggagcaaaaaccctatttactctctatcgttctgggtccttatgctttagctgtacctcggaaatagtttatagctggattatataacattttgatcccatatgacaaattttcatttaaactagtagtttatttacctacactgtaacaaaggacatattttgtttatttctaccatcagatttggggctttctatgagccacaccttattatgcttcctttgctctccattcttttgtttttcttattccatctttgccctatactagtagggaagttaatttaatttaatatttatccttgcaattatccattaatttaatatttatccttgcaattatctttcatacattactaggtttaaatttaaaccatattttaatctttctccaaaaatattcaaraaactttaaaaataccattcagtattcatttgttgggggaagaagtctttatttggccctccttcttgaaaaacataatcctaaattgatagttgttcttttatagagttttaaaacattatcccactgtttctgacttccactgctacttacagcag

SEQ ID NO: 296335 - DNA, 588 bp, Homo sapiens
agtttacgtggttgatctccacgtatccatatagcagatatttgcaatgttatactaacttaagcccaagagagaatcctggatctgaagcattgctgatctatctcacaattttaagaggttccacagtacctgataaaatagcattaagtaaatactcactgaatgtatcagaggatcaggttttaattttctatggaaaattctaagaagacatctcaggatgtttctgtattttcaagcatctgccctagcattatggctcagtttcaagataaattaattttactggaaaaaaattcgcccatgtgtccattaagactcattatgttgcaagtaaaataggatgagcaaaaaacacgggagaggaggattcattctctcttcaaagmaaagtcctcggcttgacggcaattggactgtcacatgaccattcctatgccaatggcagcaaggtgattgtgccacacactttagccaatcagggcccacccgaagctaaggtggcggcaatctcacccaactgagggctcaaaatagggaaagggcagtgctcaactggaaattttggtgctgataaaaaaagag

SEQ ID NO: 296336 - DNA, 588 bp, Homo sapiens
agtttacgtggttgatctccacgtatccatatagcagatatttgcaatgttatactaacttaagcccaagagagaatcctggatctgaagcattgctgatctatctcacaattttaagaggttccacagtacctgataaaatagcattaagtaaatactcactgaatgtatcagaggatcaggttttaattttctatggaaaattctaagaagacatctcaggatgtttctgtattttcaagcatctgccctagcattatggctcagtttcaagataaattaattttactggaaaaaaattcgcccatgtgtccattaagactcattatgttgcaagtaaaataggatgagcaaaaaacacgggagaggaggattcattctctcttcaaagcaaagtcctcggcttgacggcaattggactgtcacatgaccattcctatgccaatggcagcaaggtgattgtgccacacactttagccaatcagggcccacccgaagctaaggtggcggcaatctcacccaactgagggctcaaaatagggaaagggcagtgctcaamtggaaattttggtgctgataaaaaaagag

SEQ ID NO: 296337 - DNA, 643 bp, Homo sapiens
tgtgtggtcatgggtaagttactcaatgtttctgggcctcaatgttctcatcctttgaaggggaaattaatagagaagttaaattggatcacctggtgtagatgctgtagatgtaccacctaaagccattgagtctgcctatttcatgtctgcagatcaactcccactaatccctgtctatatctctttgtcaggctttatccaaagctgttgaaggctgcacctttgaggtgctagggaatgaatgsccaaggagcatctcccaaataatgaccgaagggaattggtagataaatacccatgttttatgtgggattaagcttcagtttcctggagtgataactggcttgataatgcacacactcgttcttggcttccttcccttccctgtctcatctctctacctcttttctagttttcactatatcttgcaaattaacaacttgcccttgaatctttgttagagtctttttctgaggaactcaaaccaagatataattcacgtaaaggatttagcacatagcaaacactaaaaaatacaacaaagcaaacactatgttattactattggataacctcttacttttcctgtttcatctcaaaagttctggattgttgaatatcatgaagcaatgcactgccc

SEQ ID NO: 296338 - DNA, 643 bp, Homo sapiens
tgtgtggtcatgggtaagttactcaatgtttctgggcctcaatgttctcatcctttgaaggggaaattaatagagaagttaaattggatcacctggtgtagatgctgtagatgtaccacctaaagccattgagtctgcctatttcatgtctgcagatcaactcccactaatccctgtctatatctctttgtcaggctttatccaaagctgttgaaggctgcacctttgaggtgctagggaatgaatggccaaggagcatctcccaaatmatgaccgaagggaattggtagataaatacccatgttttatgtgggattaagcttcagtttcctggagtgataactggcttgataatgcacacactcgttcttggcttccttcccttccctgtctcatctctctacctcttttctagttttcactatatcttgcaaattaacaacttgcccttgaatctttgttagagtctttttctgaggaactcaaaccaagatataattcacgtaaaggatttagcacatagcaaacactaaaaaatacaacaaagcaaacactatgttattactattggataacctcttacttttcctgtttcatctcaaaagttctggattgttgaatatcatgaagcaatgcactgccc

SEQ ID NO: 296339 - DNA, 643 bp, Homo sapiens
tgtgtggtcatgggtaagttactcaatgtttctgggcctcaatgttctcatcctttgaaggggaaattaatagagaagttaaattggatcacctggtgtagatgctgtagatgtaccacctaaagccattgagtctgcctatttcatgtctgcagatcaactcccactaatccctgtctatatctctttgtcaggctttatccaaagctgttgaaggctgcacctttgaggtgctagggaatgaatggccaaggagcatctcccaaataatgaccgaagggaattggtagataaatacccatgttttatgtgggattaagcttcagtttcctggagtgataactggcttgataatgcacacactcgttcttggcttccttcccttccctgtctcatctctctacctcttttctagttttcactayatcttgcaaattaacaacttgcccttgaatctttgttagagtctttttctgaggaactcaaaccaagatataattcacgtaaaggatttagcacatagcaaacactaaaaaatacaacaaagcaaacactatgttattactattggataacctcttacttttcctgtttcatctcaaaagttctggattgttgaatatcatgaagcaatgcactgccc

SEQ ID NO: 296340 - DNA, 643 bp, Homo sapiens
tgtgtggtcatgggtaagttactcaatgtttctgggcctcaatgttctcatcctttgaaggggaaattaatagagaagttaaattggatcacctggtgtagatgctgtagatgtaccacctaaagccattgagtctgcctatttcatgtctgcagatcaactcccactaatccctgtctatatctctttgtcaggctttatccaaagctgttgaaggctgcacctttgaggtgctagggaatgaatggccaaggagcatctcccaaataatgaccgaagggaattggtagataaatacccatgttttatgtgggattaagcttcagtttcctggagtgataactggcttgataatgcacacactcgttcttggcttccttcccttccctgtctcatctctctacctcttttctagttttcactatatcttgcaaattaacaacttgcccttgaatctttgttagagtctttttctgaggaactcaaaccaagatataattcacgtaaaggatttagcacatagcaaacactaaaaaatacaacaaagcaaacactatgttattactattggatracctcttacttttcctgtttcatctcaaaagttctggattgttgaatatcatgaagcaatgcactgccc

SEQ ID NO: 296341 - DNA, 576 bp, Homo sapiens
aactttttttttttttttttgagacacagtcttgttctgtcaccgaggcaggagtgcaatggcacaatctcggctcattgcaacctccgccttccaggttcaaacaattctcctgcctcagcctccagagtagcttggattaccggtgcccaccaccacacttggctaatttttgtagttttagtagagacgggatttcatcgtgtcagccagactggtctcgaactcctgacctcaagttatccactcrccttggcctcccaaagtgctggaattacaggcgcaaaccactgcacccgacccacaacttttgaagacagtattaaacatttaaagcttaaaatagtaaaaatcagatgaaaaagtattcttctactcccatgtgaaagtttcttttttctctaaaaaaaagaagaggaaggaggatgagaagtccattaaaatgttttgtatgacatatttgatgcagtagtgcatgaccaacaagaaaagagtggataaaaatctgttacaggaagtgaatcaactttacacaactcttaaactgtccaatgatttttatttaagcatatgaaa

SEQ ID NO: 296342 - DNA, 583 bp, Homo sapiens
accactgcacccgacccacaacttttgaagacagtattaaacatttaaagcttaaaatagtaaaaatcagatgaaaaagtattcttctactcccatgtgaaagtttcttttttctctaaaaaaaagaagaggaaggaggaygagaagtccattaaaatgttttgtatgacatatttgatgcagtagtgcatgaccaacaagaaaagagtggataaaaatctgttacaggaagtgaatcaactttacacaactcttaaactgtccaatgatttttatttaagcatatgaaataaacttgactctcacattttatatatgttatggatcaatattataaactcaatagagaagcttaggttttttagtttgtatgtcatccattgggtctcccatgaagacctacacataataggtatgtacttattgcaaattaacctgcactaatatcctcatcaaggaagtataattggcaaacgtccttccatttttgtctattcttgagggctccattattcatctgaagtcttcttccaagacctgggggtgttaacaaatacagaagcatttcaatttcataagtctg

SEQ ID NO: 296343 - DNA, 570 bp, Homo sapiens
ttgtctattcttgagggctccattattcatctgaagtcttcttccaagacctgggggtgttaacaaatacagaagcatttcaatttcataagtctgactttctcatttcagaagccagtgccaataaacctctttttggaaggcaaacatcaaaggcccacctttccagtgctaattacccaaatagaaagagaaacacaattcttaagtggataactgttcccagcagttagagatctaatcctggtctttggtcaggatatgattagtgtgtgagtgttgagatattctgtttatgtattccaygtttgatctggtgttcagccatgtgccaataataacaacaaaaacagtagcatttgttgtgtatcttctatgtgccaagtaatcttctgagtactttacatgtattaaaacatttaatgcagcctctatgttatgtcccatggttctcagccttgccagcacattaaaattacgcagggagtttttaaaacaagaaacccatatgcccagggcacactgccttgaccaacaaaatcagaatctctgggagtggacccagacttt

SEQ ID NO: 296344 - DNA, 570 bp, Homo sapiens
ttgtctattcttgagggctccattattcatctgaagtcttcttccaagacctgggggtgttaacaaatacagaagcatttcaatttcataagtctgactttctcatttcagaagccagtgccaataaacctctttttggaaggcaaacatcaaaggcccacctttccagtgctaattacccaaatagaaagagaaacacaattcttaagtggataactgttcccagcagttagagatctaatcctggtctttggtcaggatatgattagtgtgtgagtgttgagatattctgtttatgtattccatgtttgatctggtgttcagccatgtgccaataataacaacaaaaacagtagcatttgttgtgtatcttctatgtgccaagtaatcttctgagtactttacatgtattaaaacatttaatgcagcctctatgttatgtcccatggttctcagccttrccagcacattaaaattacgcagggagtttttaaaacaagaaacccatatgcccagggcacactgccttgaccaacaaaatcagaatctctgggagtggacccagacttt

SEQ ID NO: 296345 - DNA, 590 bp, Homo sapiens
gcttccaccctcgtcctagtgtctgaggccaggagttgaaggcgtctctctgtctgctagtgccaggcacacagtgcagcttcagaggcccccatggctagaactggatagattctgctaaacccccaagggtccaattcactttccagccagaatccagcccagtggctttttttctcagctgattcaacccttcttctcattacccaaagctccagtacccttcctactattcctgcagagattaatttatctccaataaccccagtaggaaccaaagctttcctgttacacacaatcaagatgtaattccaagttatgtttgagtatataggaagaaagttcarccatatgtacagaaatggcaatgattttaacctgtaactctacctactaatagccattggaaggcatctaaaagatgtggatagatttcctctaaggaggtgcaggccataccaacaaactgctcaacattgccattttaaaggtgtgggaagtaagagcttgtttccacatacccaccatgagctgagtgagaacaacaggattatgaattggattcacatgtctaaaattgggtcctgcac

SEQ ID NO: 296346 - DNA, 563 bp, Homo sapiens
agagatgcttactttcttttctcagaactgttgtataccacttaagcattttcctgaagggaaactgccccaaccaagggaaggtcaccggtgcacgccatctttgacataaatgtgacttgtttgatttcctgagaatgaaaagccaccaatccatcttatcagcaacacattttgtgaatgatacaagcatctgcttcttgacaagactggagtgattaataccatccgagaaagggttaattaaattaccatctattttcaagccatcctgaaataaccttgtgggaattctttgaacctgagaaaagycaccaaataaagaaatttgatgcgtagttcccctcacaaggatagttttggctatttggcaacaggaaagagttctggcaacaaaaccctctaaggaggacactcccatagttgccaattaacagaaagtcatctggggagaatgcactattcagagaatacagttggcagaacctgtatcaacatatttgcaggtgaattactgtatgcagttgttcaatggttttgcctctgctctttggcaagaaggg

SEQ ID NO: 296347 - DNA, 563 bp, Homo sapiens
agagatgcttactttcttttctcagaactgttgtataccacttaagcattttcctgaagggaaactgccccaaccaagggaaggtcaccggtgcacgccatctttgacataaatgtgacttgtttgatttcctgagaatgaaaagccaccaatccatcttatcagcaacacattttgtgaatgatacaagcatctgcttcttgacaagactggagtgattaataccatccgagaaagggttaattaaattaccatctattttcaagccatcctgaaataaccttgtgggaattctttgaacctgagaaaagccaccaaataaagaaatttgatgcgtagttcccctcacaaggatagttttggctatttggcaacaggaaagagttctggcaacaaaaccctctaaggaggacactcccatagttgccaattaacagaaagtcatctggggagaatgcactattcagagaatacagttggcagaacctgtatcamcatatttgcaggtgaattactgtatgcagttgttcaatggttttgcctctgctctttggcaagaaggg

SEQ ID NO: 296348 - DNA, 531 bp, Homo sapiens
tgcttttaaatgtgcttttaaatgtgctatttaaccctccttcctatgtgaaataaaaggggactttttayagacattaaatttcctatgagccatttctcaaaactaaaatatgtttatatgtgttttccgctatgctaacccctggtgttttccggtcttcaaccagagctcttcttcaagctgtgacccattcctttgtttcaagtgttttaatacttgttttttttttttttttttccatctccatggtgtttttccttctgcaaattatttttccctttggacctccttcctccagcagtgtacaggcctgtgaaagtaaagtttgaagagtcttcctgatttttacaggaagctctaagaaagaagtagatgaatattatccatgtttaaataggattcatttgtctggtgtttacctactattgtagtgttccactaaaatttaatagaaaaagtttcaatggaataccttgccttttaattaaaagccacaattttatttgaatgtcagaaatgcactaaaga

SEQ ID NO: 296349 - DNA, 568 bp, Homo sapiens
tctctggctacctctcttgcaatgcttgatgatctttggcatctgagctgccctattcttgttcctacaggttttctaaacactggtaataagtgtgaagaatctagcagtgtcttggagcacagcaaacattggtgactacattttgcatcccaatggctatcttaaatgtgaagaatttttggtaatctccctcagaggttttagacattaagtttttcattatagaacaagatcaatgcggctactttttacataattcatatcatgaggacctgataacattccagtgactctttgtagtacctcaaaagaaatgaagttccttctaaaatgcaytagccagtcaagaatacaatgttctggtaaggctgctgaaggctgccatgtgatatcaaagatttccaaagaatatctgagtcatgaatccttcatttagtgatttaagattattatgaagcatctgacccccaatccaaaatgtaaaacactaataaactctttaaaatattcaagttaaacacaatttattatcttaatatcctcctactaattatgcagttgtcat

SEQ ID NO: 296350 - DNA, 568 bp, Homo sapiens
tctctggctacctctcttgcaatgcttgatgatctttggcatctgagctgccctattcttgttcctacaggttttctaaacactggtaataagtgtgaagaatctagcagtgtcttggagcacagcaaacattggtgactacattttgcatcccaatggctatcttaaatgtgaagaatttttggtaatctccctcagaggttttagacattaagtttttcattatagaacaagatcaatgcggctactttttacataattcatatcatgaggacctgataacattccagtgactctttgtagtacctcaaaagaaatgaagttccttctaaaatgcattagccagtcaagaatacaatgttctggtaaggctgctgaaggctgccatgtgatatcaaagatttccaaagaatatctgagtcatgaatccttcatttagtgatttaagattattatgaagcatctgacmcccaatccaaaatgtaaaacactaataaactctttaaaatattcaagttaaacacaatttattatcttaatatcctcctactaattatgcagttgtcat

SEQ ID NO: 296351 - DNA, 568 bp, Homo sapiens
tctctggctacctctcttgcaatgcttgatgatctttggcatctgagctgccctattcttgttcctacaggttttctaaacactggtaataagtgtgaagaatctagcagtgtcttggagcacagcaaacattggtgactacattttgcatcccaatggctatcttaaatgtgaagaatttttggtaatctccctcagaggttttagacattaagtttttcattatagaacaagatcaatgcggctactttttacataattcatatcatgaggacctgataacattccagtgactctttgtagtacctcaaaagaaatgaagttccttctaaaatgcattagccagtcaagaatacaatgttctggtaaggctgctgaaggctgccatgtgatatcaaagatttccaaagaatatctgagtcatgaatccttcatttagtgatttaagattattatgaagcatctgacccccaatccaaaatgtaaaacactaataaacyctttaaaatattcaagttaaacacaatttattatcttaatatcctcctactaattatgcagttgtcat

SEQ ID NO: 296352 - DNA, 579 bp, Homo sapiens
gttccaatttaattccaggtagctccagcccaactctgatcctgacaggtcgaccaagtaatgctctgataggaaatgccttccctggatttctcaggcaggccctcaatcttcccactcttttagttgctgtgtgatattctgaaattgttcttttataatcctaatttttctctgtgcctcattttcctcatctgcatattgaggaaaattatggcccctatctcataatgttgtagtgataataagttagtctaaacaaagaatttagctctctcactggtacacagaatgcactttgtaggtgttagctgcttttctcattttcaatggaacagaacactttatttctaagcagctccagtgaaatacttcattgccccaaacaaagagctayagcaatatcccttcctatttggtaatcatcctaaactgtctgtggggtttcacatcttcttgtcacaaaaccatccaccaaaacactactatgcattcacactggtaatctagcgggtcacaactttggtatcctataaacccagctagactctccccaattccctaagcccctccctagcc

SEQ ID NO: 296353 - DNA, 1068 bp, Homo sapiens
gataataagttagtctaaacaaagaatttagctctctcactggtacacagaatgcactttgtaggtgttagctgcttttctcattttcaatggaacagaacactttatttctaagcagctccagtgaaatacttcattgccccaaacaaagagctacagcaatatcccttcctatttggtaatcatcctaaactgtctgtggggtttcacatcttcttgtcacaaaaccatccaccaaaacactactatgcattcacactggtaatctagcgggtcacaactttggtatcctataaacccagctagactctccccaattccctaagcccctccctagccccttccagggaggcagtttccctgtaactcttgcatttctgagtgtcctgggagcatagcaytaactgtgttttcaccctggactatcttttgaaggatgtctgtatagtaagcagcattgcaagatagagatagtgacagcctccagagtaaagggaagatttgcctactgcwtcatcctaaactgtctgtggggtttcacatcttcttgtcacaaaaccatccaccaaaacactactatgcattcacactggtaatctagcgggtcacaactttggtatcctataaacccagctagactctccccaattccctaagcccctccctagccccttccagggaggcagtttccctgtaactcttgcatttctgagtgtcctgggagcatagcattaactgtgttttcaccctggactatcttttgaaggatgtctgtatagtaagcagcattgcaagatagagatagtgacagcctccagagtaaagggaagwtttgcctactgcccagcatagaaaagatgatgtctctctccagagaaaagggaaggtttgctagcagccctaagattcaggttccctaagccaagggttcctcaggtgtgaggtcagcccactgaatgcacagcattcacctgggtccctccacatcaaccccataagacatggaggggcaggtgaccaatataaacataatgtttatgctgcttgctctgccatgagtgaataata

SEQ ID NO: 296354 - DNA, 445 bp, Homo sapiens
aatccttccagctccaccctggcaccctatatcccctgaaggctattaggaacaacattgggatgcaatagtccagggtgtaaaatgtgataactcactcagaaaaaacaaagaagcctggccagtatggmgaaaccccgtcttgactaaaaaaaaaaaaaaacaaaaaaaaaactagctgggtgtggtggcgcatgcctgtattcggcaggctgaggtgggagaatcactgaactcgggaggcagacattgcagtgagctgagattgcgccactgtactccagcctaggtgacagagtgagactctatctcaaaaaaaaaaaaaaaaaaagaaaaaaaagaaaaaaaaaaaaaagaacaagcaaagagctgttgagaattaggcagctttttgcttgtaggccccttgaaactacctccactggtttttgagtgaaggacatag

SEQ ID NO: 296355 - DNA, 525 bp, Homo sapiens
tgctctatttctctgcaattcttgtggctcagcccttgttccactataaaaaatggctacagaaacttaaagcatcatatacagttaactttatatccagagaagaaagaggatttttgtttcaggagaagaaaactttcccagccacatgtaatatacttcttaacatcccacagtccagaatctaggccctccccaccccatttttaaactaatcaccrgcaagtggaacaggcggcttttggtttagactcctcatcattttacatgtgatacattctagttttaggagaaaaaaaagcataaaaattgaaattgaaggttgattctaagaatgctatgattttgtctggggagtagtaacattctgtactattcctgttgttcataccacaattatttcatccattcatccagccaccaaaccatctctccattcatccaagaagtatttattgagtgtcaagcagatgccaggcattgttttaactgctgagatacacgagtcaacaaaacaaagtccct

SEQ ID NO: 296356 - DNA, 525 bp, Homo sapiens
tgctctatttctctgcaattcttgtggctcagcccttgttccactataaaaaatggctacagaaacttaaagcatcatatacagttaactttatatccagagaagaaagaggatttttgtttcaggagaagaaaactttcccagccacatgtaatatacttcttaacatcccacagtccagaatctaggccctccccaccccatttttaaactaatcaccggcaagtggaacaggyggcttttggtttagactcctcatcattttacatgtgatacattctagttttaggagaaaaaaaagcataaaaattgaaattgaaggttgattctaagaatgctatgattttgtctggggagtagtaacattctgtactattcctgttgttcataccacaattatttcatccattcatccagccaccaaaccatctctccattcatccaagaagtatttattgagtgtcaagcagatgccaggcattgttttaactgctgagatacacgagtcaacaaaacaaagtccct

SEQ ID NO: 296357 - DNA, 525 bp, Homo sapiens
tgctctatttctctgcaattcttgtggctcagcccttgttccactataaaaaatggctacagaaacttaaagcatcatatacagttaactttatatccagagaagaaagaggatttttgtttcaggagaagaaaactttcccagccacatgtaatatacttcttaacatcccacagtccagaatctaggccctccccaccccatttttaaactaatcaccggcaagtggaacaggcggcttttggttyagactcctcatcattttacatgtgatacattctagttttaggagaaaaaaaagcataaaaattgaaattgaaggttgattctaagaatgctatgattttgtctggggagtagtaacattctgtactattcctgttgttcataccacaattatttcatccattcatccagccaccaaaccatctctccattcatccaagaagtatttattgagtgtcaagcagatgccaggcattgttttaactgctgagatacacgagtcaacaaaacaaagtccct

SEQ ID NO: 296358 - DNA, 479 bp, Homo sapiens
ttttgcttttaaggccttcaactgattagatgacactacattatcaagggtgatttcctttacttagagccgactgagtgtagatgccatccacatctacaagataccttcatagcaacccctagagtagtgtctgattaaataactggatactatagtctagccaagttgacacatcaaactaagcatcatmgatgtcttgcttatcttttcaactccactgccagtttctggggaaaatgatggtatcctatacctgtctatctacaacccctacagagcttcacgcagtgccttgtggctagtagatgtccaagatccatgctattgcattacttaacctcagtgttatgacacatgctatgtctgcatgtctttgaatgagaagggaagttcaaatcaaagaggatcacccagagctgaagcaagatcatgaatcataaaataaaagggacaacctcctcattcacttggcccaa

SEQ ID NO: 296359 - DNA, 520 bp, Homo sapiens
tgaagactctgcccttctttcgagccacacaccctatcttcactgtrgagtgcatcccagaccatcaaccaatgtcaaggaatgacattcctctaaaaatgctactaagtacaccatgtgccttttttaggaaatgaacttaagcctagggcttaagagacttcattttttccatctgacttgaatctttcctggggccatttggtctgcttctttccgtaaagcagatgtttcccagtgagattgcacagggagccctgatccggagccagccctctgatctgcatgtgtctccactgaccacccaaggggtgtcaggcaaactgtggcctctgtgactgaaaatctggcatttccaagcattccatacacctgatatcttaccataccacaccccccatccaatccttaaagggaagtatacttgcaaatgttctcttcgtatgcggatgcctgatcctaaggtattttgtataaattgttttctccattgtgtaaatgtaaccacattctccaggct

SEQ ID NO: 296360 - DNA, 520 bp, Homo sapiens
tgaagactctgcccttctttcgagccacacaccctatcttcactgtggagtgcatcccagaccatcaaccaatgtcaaggaatgacattcctctaaaaatgctactaagtacaccatgtgccttttttaggaaatgaacttaagcctagggcttaagagacttcattttttccatctgacttgaatctttcctggggccatttggtctgcttctttccgtaaagcagatgtttcccagtgagattgcacagggagccctgatccrgagccagccctctgatctgcatgtgtctccactgaccacccaaggggtgtcaggcaaactgtggcctctgtgactgaaaatctggcatttccaagcattccatacacctgatatcttaccataccacaccccccatccaatccttaaagggaagtatacttgcaaatgttctcttcgtatgcggatgcctgatcctaaggtattttgtataaattgttttctccattgtgtaaatgtaaccacattctccaggct

SEQ ID NO: 296361 - DNA, 1614 bp, Homo sapiens
ctacaattatagtgtgtgtgtctgtgtgcatctctgtgtgtgtatgtgtgacattcatagtactctggatgcaggaatggagaaggcaaattgattggtcccagattggggttttgtcatgtgagtatggcaaaatcacaaggcgacaagttagttaacagcactggcaagtttcatgggtagtggaatctatgatgaatagaaaagaaaaatgtggcacacatgttgattagccatcccttttcttccatgggaacagaaccaccattttattcatatgttggacagtaatggaaggtggtcccaactcaagcagtgaatsacaattagtttaagctactcataaaagttacattactctatgccacttgtttcagggtaggcatgtgacctagttctggccaaagagatacaagaagtttgatagtgacatctgggaaaagttttcctcttggcaaagacacaggagaaatgcatttttctttaccttttatwatcctcccacctcagcatcccaaagtgctaggattacagattataggtgttagccactgaacccagcaggcaatttctttcttaaatagcatttatatttgattattctaagtacctgtaactaaaatagtctcaggtcagtaggcacaaaaaaaaaaaagaaaaaaaatctttctttttgctcaactattattaggaaaaaacggattttatgttaataagggaaaaataaaatacagaatccctggagagagagagagagagagwgtgtgtgtgtgtgtgtgtgtgtgtgtgtgtgtgtgtgtgtgtgtgtgtgtgtgtgtgttaaggcatggttagttcagttatctaagagtatattttcacgtaggttgtcatcacaataaaaattctgtgttcactaaagtcatactgacccacgtgtatatctttttttacaaagaaaccttctaaatgcatcattggctcagaattcaggctccactctcaattttcaaattgtttgtttttgaaagtcaaagcccattagtgaaaaaaagttgagatcccattcacaaagawacaagccagaggaagaaccattgtttagagagctcaactgtgttttcaaactctaaatcccatcattttttattttacacaccaattcatgatgatttatttattttttatttgtatttatctatttattttctggtaaagatagggtctatctctgttgcccaagatggtctcaaacacctgaatgatcctcccacctcagcatcccaaagtgctaggattacagattataggtgttagccactgaacccagcaggcaatttctttcttaaatagcatttatatttgattattctaagtacctgtaactaaaatagtctcaggtcagtaggcacaaaaaaaaaaaagaaaaaaaatctttctttttgctcaactattattaggaaaaaacggattttatgttaataagggaaaaataaaatacagaatccctggagagagagagagagagagagwgtgtgtgtgtgtgtgtgtgtgtgtgtgtgtgtgtgtgtgtgtgtgtgtgtgtgtgttaaggcatggttagttcagttatctaagagtatattttcacgtagg

SEQ ID NO: 296362 - DNA, 753 bp, Homo sapiens
tcaagtccttcactttttcacactgaggtctgtcttcatatccacttatctttcaagtctatgaaaccccttataaaaactttcctttgaaatattttaaaattcaaggcccamggctgattaatactgtttctcctccataacccctaggatcctccagttctgggttttaacaagaaaaatatcctcaatcctctctagtttctaggtgtaaagcagcttggaccctcctgggtttggtgggtccatctctcttggagtccaactctgtattcctaaaaagcaattattgaaatagaagctagtcagttaatggcaataaaagaagggaattccaagtgggagcttcccaagccaagaggaagagaggtttcttgccttatcactgtaagtggcagagtggagttccwttaacatctgctctttcaacctgttcagctggttgtttgtaaaacattccagcttatctcttcaaagtaatgtgagtgggagtaggaaccctttgttgagaacattttttaagtaagattctagagggccagttatttgtggaaaccagctgatggawgggggcagctggaggagccagagataggtgaagagaataatttgatcctcctgtgacttttcctagtgctgacttccatcttcccagctgagaactcctgtgatagcttcctgtctatccccccacctccaccactggctcattcctccctgcagtctagtctctccccaagccccaccacagca

SEQ ID NO: 296363 - DNA, 621 bp, Homo sapiens
caaataaaacacaagcattattaatatggtgagcataaacctaaataaatcagcaagtatattaaaatgmaaatggtctaaatggcctcattaaaagataaagattgtcagaattgacaaaaaacattaagaaaacctatgtgttgcttataaaaagggtacggaaagatgtactatgcaaatgccaagagaagtctggttttgatatactgatgtcagataagatctactataaggcaagaaacattcctaaagatgagaagaattctttcataataataaaaggatcaatccaccaggaagatataaaaattctaaatttgtgtggacctaataatatagtttcacaatatgtaaaaacaaaaattgatcaatttaaaaactggaatacacaaatccacaactaaagtgagagaatatgacactctttgataactgataaaacaagcatccagaaaattagtaaggctatttataatctaagtaacacaattaataaaacaaaaacacttgctaaaatataccatcgaatgacagaatatacaattttgacaagtgtacatttacaaaaatagtccatatgttgggccaaaaagtcagacttgacaaatctacaaggac

SEQ ID NO: 296364 - DNA, 508 bp, Homo sapiens
tctttctttatcctcagtcttggtcaagacctgtctttttgtgtctcacaggtatgtcttcctcaatgattctgcctcttgaccagcagtagtaaactgctaatggtcttggctaaaagcaattttctgtccttccctcaaagatagaagatctttttttctatttcttctcctagctccaatgggtcttcacctacrtctgagacagtatttgttgtcctgcccctagtggcttaaagtgtttgtttcacagaaaagataggaagaaggatgcaggcagggctttctttatctcccattgctgttactctactcagtatcgcattgcaaaggagttctctttggtctactgccttgatctcagtcattctcatgagcaatcaatgaggtccatagagaagagcctgccagtgagtacaaactgcctttctatttgctattcttaggtattctatgttagaagtcagtaaactatggcttgttagaccaatcatctgtttttgcaaat

SEQ ID NO: 296365 - DNA, 574 bp, Homo sapiens
attttataaagtgcagaagcttgtcaattatgctaccgaacaattgcccgtggagtactaaggcctttctaacaattttaaggaggaattgattcaaactttgaaaaactttatgtactttccaaagctttagattagtcaggtgatgtaagtgatactgcctaagtaatgttttgggtacattttgtctcaaaagactcacaaatttacccccccccccaaaaaaaatgatgtcgattagtagcttaaaaatcraatttatgatgtagatttttttaatgttacatctgtcaaagaagaatttcaatgagatatgaaaagcattagtttctatcataacagatgatgctccagctatgttagtttcaaaaatatggttttattaaatttttaaactaaagactgatgtttcccttatggctttgttccactgtatgatacatacttaaaacatttgtgctgagttttctgaagcaaacctaggaaaagtgtcatggatacagttattaaaattgttctgtacacatgcaaatgctatgaatcattgccagtttatggaactgttgacagaaat

SEQ ID NO: 296366 - DNA, 463 bp, Homo sapiens
agggaactgggctcagtgaagtttagagaaaaagagatgggaaaaatgaggaaataagagcagacaaatgctaggaaaacgcatcaacgcagagtgtggtcaacaatattgaatactgccaagaggtcagtaggataaatacttggcattgacaattccatttggaagttagggtgctgtagaagagaattaaggacaatttccttatgaaagccagattgcaaggaactgacgagtggagaataaagtgtaggcatcaagcgcacctcttattctgaaaaggtcacaggaaagaagaatgtrtgttgggggggcggggagggggtgagtacagtgtcttgcagaagaaccatccctgggaagaaattatttaggaaattaaaactgcagtatgcttaatggataaggtgaaagatcaagtggaaaatcagactgaaactgaagaaaggagaaagaaatacaa

SEQ ID NO: 296367 - DNA, 573 bp, Homo sapiens
tagagagcaatgtgagcattgggctttttaatttccaagtgtttctaatatgtagccaagcctgagaaccactgaggtagaggattcaacttaggcttcttacagctttcgaacccctgggtttctaagggcttcctaaaatcaaaggccatttctctggttaaaactaataatgttgaacaaaggatctcctttttaaaatttcttttaaagttagtgaagcctgtaactcatctctctcttagcctcttcttgtttcccacccactctactttcccgaccatttraatatttgctgtgatcccaggcagcacaaagggtggacacccagccccacttccctcaccatgactcatcctaaaagctgtttgccgaatgaggctctggtttttgtttcagacttcatgtaagggcatccacaaccctacacaacaatgcctgttcttgctcaactccccctcagtccccgcccaacctcctactctctattcaaaacccagccagaagaaaaacaaggcatttgtccccagcagtttgcaaaccagtcatgcttttccaacatacacagggtta

SEQ ID NO: 296368 - DNA, 604 bp, Homo sapiens
cacagtggcccctggagggtcaagaatggccaacgtacattcatctcttttccaagttttcratatacaagggaaaactgcccctaaaaaacaagtgactccctagggagttgggagcagttatggggtgtgattttttcctgtttatggccacaaacaaaaatgagcccagttgggccacaaatagaggctctacagggtgtgatattttatactttgctgccaagttgggtctgcagagatattctctccccttgccacaccctggttctagtgagggtggttggacaatccttgttttccagagcggagcggggagtactcccaccttcccagactaggcagttgtttttccgttgtatgttctgatccatgagaaggcatcgtatatgctctccttgcttacacgtggaatcccatttacctcactgtggccttgggaacttgtcaagtagagttggatcagagcatcacagggaagcttctgctttagtgtcattaacacaaccgtgggcgcaaaagacagaatcataagtgcactgaagatggacagacccaaattcccaggtcctggtaatagcggtggggagttcagtgggaagcc

SEQ ID NO: 296369 - DNA, 604 bp, Homo sapiens
cacagtggcccctggagggtcaagaatggccaacgtacattcatctcttttccaagttttcaatatacaagggaaaactgcccctaaaaaacaagtgactccctagggagttgggagcagttatggggtgtgattttttcctgtttatggccacaaacaaaaatgagcccagttgggccacaaatagaggctctacagggtgtgatattttatactttgctgccaagttgggtctrcagagatattctctccccttgccacaccctggttctagtgagggtggttggacaatccttgttttccagagcggagcggggagtactcccaccttcccagactaggcagttgtttttccgttgtatgttctgatccatgagaaggcatcgtatatgctctccttgcttacacgtggaatcccatttacctcactgtggccttgggaacttgtcaagtagagttggatcagagcatcacagggaagcttctgctttagtgtcattaacacaaccgtgggcgcaaaagacagaatcataagtgcactgaagatggacagacccaaattcccaggtcctggtaatagcggtggggagttcagtgggaagcc

SEQ ID NO: 296370 - DNA, 544 bp, Homo sapiens
ctgtcatcctatccacccacaggtgcctcctgatcatgctgacctcccaccccagggcctttgtacacacagttccctayacctggatcgctctcccctctcccttttcacctggaaaactcctgtttatctttcagtaatcaacttaaatatcatctttttggtgaagccttctcaaacctccctaccacctctgcactaagatgcagtttcacatatgtttgtatgaatttgttgtggtagaatgcctctcttccattgtagtctagtctttgggaggaaagaatcacatctgtttttactcactgttgtatccccagcgcttggcacagtgtcagcacagagcgggtacccagtaaagatgggcgaattcatgaatgcaccatgagtttcaacagtggtcactggaaacggataaggctgcattgggggaatgtgccaccttcgttaacttgctttctggtagtctcaccagctcggggaatcccagagctgcaatgtgcttagagggcagtttgggaaatccaaattaaggcaagcaaag

SEQ ID NO: 296371 - DNA, 561 bp, Homo sapiens
tgatatttccctgaagcccaccatctctggccgggctcctctctgaagtcgtgccttctgaagttaaaccgtgtctattgatagtctccaaacctcagttgcttcttctctgctccatgtttggctgcctgtctctccgccagctgaggtctggggtttatatgggcacaagatagggggctggggcaggccaaaaaggtaacatttgggcaggaaaacagggataacagtcctcatttaggacctcagtttccatgcttgagggtggggcctttgccaaggaaccgccttcttctacccagtatttcaccacctcctgtccgtatcaatactgtataatattaagtaagtggtgtttcaacagaaataaccataaaacaaggttatgcattgatcrgtttacttttgtgagaaactgccagagtgactgtatcattttacagacagagtaactgtatcattttatagacagagtgactatatcattttacaaacttttccagactgcctcactttaaatgcaatgaatgaagtaatccacttcttcacaaactcactaac

SEQ ID NO: 296372 - DNA, 561 bp, Homo sapiens
tgatatttccctgaagcccaccatctctggccgggctcctctctgaagtcgtgccttctgaagttaaaccgtgtctattgatagtctccaaacctcagttgcttcttctctgctccatgtttggctgcctgtctctccgccagctgaggtctggggtttatatgggcacaagatagggggctggggcaggccaaaaaggtaacatttgggcaggaaaacagggataacagtcctcatttaggacctcagtttccatgcttgagggtggggcctttgccaaggaaccgccttcttctacccagtatttcaccacctcctgtccgtatcaatactgtataatattaagtaagtggtgtttcaacagaaataaccataaaacaaggttatgcattgatcggtttacttttgtgagaaactgccagagtgactgtatcattttacagacagagtaactgtatcattttatagrcagagtgactatatcattttacaaacttttccagactgcctcactttaaatgcaatgaatgaagtaatccacttcttcacaaactcactaac

SEQ ID NO: 296373 - DNA, 557 bp, Homo sapiens
aaagaaggcaacagcacagattttggagaccaattgggtgctctggggctagcccagagtactagctcagctagtacttcactgtggggcccctgccatgcactcaacctctcactgcctgctcaggacagccaacaagactgtgagtggatccaatgaggtagcaagcatgaaaatgagatgtcaagtatcaggacagagactgtggcactcacattaaccttcttttactttttttccagcagaacccctgtttcattgggaacaatttcctctgcttaaaaacattacatttcccrcctggctgcagcagtcatgtgacacagctctggccaatgaaatgggaaaacactacatttctccacccctactttaggcagtcatgtgacacacctccaaccaatgagaggggagtggaggttgccacagggcattctgggaaagctccccggaagagatgggaacctgctggacttggttgtggacccatggctgccagtcctggcagtggactcgaggcccagtggggaggggcagccaccacgctgtgactgcaa

SEQ ID NO: 296374 - DNA, 557 bp, Homo sapiens
aaagaaggcaacagcacagattttggagaccaattgggtgctctggggctagcccagagtactagctcagctagtacttcactgtggggcccctgccatgcactcaacctctcactgcctgctcaggacagccaacaagactgtgagtggatccaatgaggtagcaagcatgaaaatgagatgtcaagtatcaggacagagactgtggcactcacattaaccttcttttactttttttccagcagaacccctgtttcattgggaacaatttcctctgcttaaaaacattacatttcccacctggctgcagcagtcatgtgacacagctctggccaatgaaatgggaaaacactacatttctccacccctactttaggcagtcatgtgacacacctccaaccaatgagaggggagtggaggttgccacrgggcattctgggaaagctccccggaagagatgggaacctgctggacttggttgtggacccatggctgccagtcctggcagtggactcgaggcccagtggggaggggcagccaccacgctgtgactgcaa

SEQ ID NO: 296375 - DNA, 560 bp, Homo sapiens
aacctggggagctgctgagccagcactgtgactgatgacttgccttcctctgtcaggaggctggttttagcaggggggtgaggaaagcatcatacagaatcatagagttaaggtctgagctgagaggagtcttaaagatcctrtagttaaatcttctcattctcagatatgcagaccaactgcagagagggtgagtgacttgccccaggtcacacagtaatttagcaatagaggctggtccagaacccacatctcctgactctgattctagttgctttttctattctgcatgttcttccccaaagatgagctgtttcctccccacccctttctccttgtgtcctccatgattcttgcaagagttgaccctaagcagagatctcacatcctgctgtgaaatgtccatggcacaccaaacactcccaggcacccacccatcccaacctccacttctttctccaatgtgtcgttcctcacctgcaccctgacctccacccatccctctgccactgccccattgcagccctcatggggtgccacactgatagtggcaggaggca

SEQ ID NO: 296376 - DNA, 567 bp, Homo sapiens
gcttgcttgtgtcctgacactgtgaggcttctcagagctgccttcatctggggaggctcccagcatgaagaacattgtgtgggaataatggatgcgtggagcatcattcattcattcattcgttcattcgttacccaggcctaaccctgggtataaatcagtgaaaccagacaagctccctcccacagctcacactccagccaggacctgaagcctacaagtcagcgcagatcagcaagatgaagccagctcttggcttccctaagcctcgggctccttgcctgtgcaacagaggtgagagcagcgaaccccagcatgggtcatgataatagcaggagccatcactcattgactgggctgcctgttctaggaacgctgccgagggccggcacakctcatctctgcccagcctcgtgactgccctgtacaccacaaggaacagatgaggaaactgaggcccagagaggtgacctcagctggtcaaggtcacagggtcagcaggtggcttcagagtcagaatactccagctgtgtccaggctcagccattccccagctgcgtgatcttg

SEQ ID NO: 296377 - DNA, 598 bp, Homo sapiens
taacaataataatattgccccctgatcagatggggagctccttactggagagacaggtgaataggagagacaagtcattgtctattagaccctcagtggatgaccaagagacccagagcaagtgctgtgtaattttaatccagagccatgagccttgacttctttataagaaagaaatcattgtggggataagctgagataatggtgactggcatataataatcgttcaagaaatactagtttgctttcctgaatgctgccacaactatgatagggtttggtaactgtccagtgaatagggaaatgatggaaaatacatacrtgatattttgggtaaatggaaatgttatttcatataaagtactcagctcagcagctggaacatacactgttgtcaataagcattactattatgactactaactttctaaggttcagtgtgaaggatgggtttggggaggagacgggagactggggaatatggggctggagaggagcaaggacagctggggggcagtggggtgggccccatgtctggccactcctccctctgtctccagctgtaactgacattaatggaactctagtttctaatcct

SEQ ID NO: 296378 - DNA, 1098 bp, Homo sapiens
gaacttataattctataaccagtaaaaatatctttcaaaatgaaggtaaaataaaaacttttttcagacatataaaaatcctcaatacagaaatgttaaagatagtccttcaggcagaaggaaaatgatatcagatgaaaatatgtatctacacacaaaaaaataaaaagcaccagaaatgtaagatcttttcttgttttttgaaasataattcacacacacacacacacacaaatgatgaacatataactttatatccagtgaaaatttctttgaaaacataacgctattgacaatagccccaagaaaaatgcaataaatacgtataaatctaataaagcgtggatagtatttatatgctagaaactacaaaatgctgttgaaagaaattttttaaagtctttaataaataaaaagacataccatgttcatagattggaagatatccccaagtgacataatgcaataccaatcaaaagttaaggaaaaattgtttacatatataaggaagttggttctaaaatttgtatgawcagctccagggctctgggctgtgaaatgggtccagatgcagagttgacctcaggcagccgttgggaacagtttcctcwcctgccccacaaggctgcagggagaggacccactgtataggattgtgtgagggtgaagggagatttgacaccctcattgctcaccttttccagccctgctttcagggcttctttcagggccctactttctgaagggcagttctgatgtagtcaagctaaggactttgaacaatgttagttccagggacctctccttcccagggatgtttgaatacaataggaagctggggaaaggggaaggcagtcatgcagaagtcgagtccctctcatcagacaggtgaggatgtgacactctgataggggatgctttataaatatgtgtcccaacccagacatcccacctctaggaatttaatccttagaaacaatcagggatgcacacagagctctaatgtataggatattgctgataatagctaaagagcaacacacaataatctaataatctggaaataatctatacacctcaagagttaggtagagttat

SEQ ID NO: 296379 - DNA, 523 bp, Homo sapiens
tatctcactaataatttttatattgattataagttgaaatactattttggatatattgggttaaacaaaatatatgattaaaataaattccacctgttcctttttactttttaatgtgcatacagaaaaattaaaaattacatatgtgtttatatttgcggtttgtgttgtgttatacttcaactgggtggcactgatctggactcctctgtggttagatatttaggctctttcagattttatcccactataaacaacaccatagtgagcatcatggaatacagtactagtcagcactgagctgtgttcctattaccatccccttttatagatgagaaaccaggactcagagatgtyagcaacgtgctcagggtcacacagcagctatttaattggtgaagtcaagactaaaaccccaacttgattgactcccatgatttttatcaggtggctatccccactttttgtgtatcttcctgataattgccttgggattaatttctagaagtaggagtcatgggtg

SEQ ID NO: 296380 - DNA, 654 bp, Homo sapiens
gtcaagggtcttatcactggaagacagatgataaccagtcctcaaagtgcaaaatatgagggtattgagttataggaagacaaagattggagagaaaagatctagagcattgggagatctttgaggagtttgatctgtggctactacattatatctctataaattcaaggcaraaatgaataatggttctgcaggtttgaggcatatatcatttctaaggtggtcttataggaacgcgattatttcagagcaatggtgatgaaggcaaccgctttattctgaatgaagtgcaccaggcagaagtgttaaacctatcaaaaaatttaaaagcattaagtaaatctcaaagttaaatctgtggttataattttgaattgagggtttcaacataatgaccaacctgtgcacttatgtatattcctacttgaatagaaacatgtcagatatttctaagaagaaatgatgataaggactagcctggcgagagttttctcctgataaatagcaatgtggccccagccactcagggcataagaaatagaaagctagcaatatgattagaacaatgtgtttgactgcttgacttttgtgaacctctattttataatgatctttatttttttctcttcccatcactatgttcttattaactat

SEQ ID NO: 296381 - DNA, 573 bp, Homo sapiens
ttataaagatacatgcatgtgtatgatcattgcagcactactcacaatagcaaagacatgggatcaaactaaatgaccrtcagaggaagactttataaagaaaatgggctgcatgcggtggctcacgcctgtaatcccaacattttgggaggccaaggtaggtggcttacggggtcagcagttcgagataagcctgccaatatagagaaaccctgtctctactaaaaatacaaaaattagccaggcatggtggcggacacctgcagtcccagctacttgggaggctgaggcagtagaatcgcttgaacctgggaggcagaggttgcagtgagctgagactgcaccactgcatccagcctgggtgacagaacaagactccttctaagaaaaggaaaaaaaaaaaaaagaaaagaaaatggggtacatatataccatggaatactatgcaaccattaaaaaagaacgaaatcatgttctttgcaggaacatggatgggagctagaggccattatccttagcaaactaatgcaggaacagaaaaccaaacaccacatgttctcacttatgatggga

SEQ ID NO: 296382 - DNA, 573 bp, Homo sapiens
tgagccgcagatgtgattgggccatttgaagaacagaaaataaacctgaagggaccagaataagcatagtcatgggagagggtcaggctgtcctgggcagatggcactggggctagtgggtcaggctgtcctacaaaacccatcagtcatagactgttcagtgcatcggractctggatgagttaaaatgctttatagaggtacagtgaactgactactccatgaggctcaatgttgaggcccagatagctttgagaatagctgctgacagcatcattctttttctgtctgaagaaaagaatcattcaccaagaggagaactttccactagctgctggatcttgagccaactaattcagtttgatcagtcaaacttgaacttgcttctgatttcagccatcgctgatcatatcacccggcactatgctcttaggccccccattgtctaatggagaggctcaatagagagatgcatagctgtacactcacactaatgcttctatttcttgtgtcaaaatcctaaggggcaattttaccaaagctacattgtaggtagggatcacagggtgtatt

SEQ ID NO: 296383 - DNA, 605 bp, Homo sapiens
gagcacctggtcagaggatgggattaccttgatagatttctaccaatcaaaattcagggcatagagctgggcatgatgccacctgaaagacacttggtgttctttgagcaaggcaggtgaccaactgagtcgctctacataagcagctgagactaacacagttggaatgcaaaacagacatcatttcataaatgatcaaaaggaagtttgagacttgctcaaatttgtatagagaggtacaagatgagrctccaaccccaaatcccttggtctacaacactggtgattttcccactgagtgcctcagagtttctacaaaatttgtatcagaatattattttaaacatgtgtttaaaaatgtggttaaaaatatggtactcatgtaattttctcataaattggaatttgacaaaatgcaatccctagtataaaactgtgttagtctgtgctgtcagttggcttggtttttgctgttgttgcttttccaacttgaagaaaagagtctcctgccatctctattgaatcatgaagtctcctgggattgctaggaaggatattaaaaatgattcataaccgtttatccatattaatttggattttctcaa

SEQ ID NO: 296384 - DNA, 605 bp, Homo sapiens
gagcacctggtcagaggatgggattaccttgatagatttctaccaatcaaaattcagggcatagagctgggcatgatgccacctgaaagacacttggtgttctttgagcaaggcaggtgaccaactgagtcgctctacataagcagctgagactaacacagttggaatgcaaaacagacatcatttcataaatgatcaaaaggaagtttgagacttgctcaaatttgtatagagaggtacaagatgaggctccaaccccaaatcccttggtctacaacactggtgattttcccactgagtgcctcagagtttctacaaaatttgtatcagaatattattttaaacatgtgtttaaaaatgtggttaaaaatatggtactcatgtaattttctcataaattggaatttgacaaaatgcaatccctagtataaaactgtgttagtctgtgctgtcagttggcttrgtttttgctgttgttgcttttccaacttgaagaaaagagtctcctgccatctctattgaatcatgaagtctcctgggattgctaggaaggatattaaaaatgattcataaccgtttatccatattaatttggattttctcaa

SEQ ID NO: 296385 - DNA, 544 bp, Homo sapiens
aatctaagaaatagagagaccaattgagattttcagaggctgtcatgcctggatgctgtgtgtcatttatacattacctgggagagcactgtgcggctgcatattctcagctgttgaatgtgttctgctcattttccagcagagaggatgagtttaatgttttcttggcaatgtgtactttttcacttttgctgtttctgtttgtctgtctacgtgcttatttattgtttgcatttagcttgycctgcaagtggttctgagaattgtaaggtgaatggataatacttacagaataaatctctctttcttcagtttttattctggggtttttgggggattcattcttttcttgaacttgaaattgtctttttaaaaattttttctttttaaattttttttattatactttaagttctggggtacatgtgtacaacatgcaggtttgttagttacataggtatacttgtgccatgttggtttgctgcacccatcagctcgtcatttacattaggcttttctcctaatgctatccctcccccaaccc

SEQ ID NO: 296386 - DNA, 566 bp, Homo sapiens
gagcacttgaaatgtggctagtctgaattgcagtgtgttgtaagtgtaaaatacatgtcagatggcaaaaactatttttaaaatgtaaaacagcttagcagtcattttatgttgataatatgttgaaataatattttggttatactggattaaataaaatggataattgatgttaatttcacctgcttcttttcacttttgcagatggctactagaaaacataaaattacactcataggtcgaatttgggacttgcatcatttttctattggctggcactgttctaaggctccctctacccatctttgggaaggaggaaactgcaccctggcccctgactttataatctctccagtgatgcctcaggactggtcagggtcacctttgggctttcmctctgtattaagctgttcttgcactgcttacctgagactgggtaatttataaagaaatacctgagactgggtaatttatgaagaaaagaggtttagttggcttacagttctgcaggttgtacaggaagcatgatgctggcatctgcttggcttttggggaggcatcaggaa

SEQ ID NO: 296387 - DNA, 564 bp, Homo sapiens
attttaaaactatcttgccctacttagttgtgatgtctcctttatcatatattaaattcccatatggattgggctaatttctataattaatgtgcattgcttctaacaagtttttacaaggtaatttaaaaaattgtgcctctgtttatgatttgtgttgagggactttttcacattcatgaactatcctatgtgcttctrctagcctggtggatcaaatgaaattatggatatgaaagtgctttgtaaattctaaagaaatgctgtaatggaaggttttatgattattattactgtgtgattatatatccaaaaatttctgtattttagttccagtttgatttgatgaaattggttcttggatccaagttggaatgcaagttgggagccagttgtggaattttccatcataacatttcctgtggatacaaagtgaactgaaacccaacccaggaaacaagcataaaatgtgccaacgagtttagattcactaaattttatctgccactcctgaggaaggtctatttatctgtcatgttgttatttggacaatcaaagttattg

SEQ ID NO: 296388 - DNA, 537 bp, Homo sapiens
ctcaccagtcctttgttcctcatcatcacggaggttacatattagctaccacttagcctcttgctttcactgttgtcattcatcctaataaaaatgggasaggaaagacagattggagggaccacataatttaaggaattgaacagcaggctgtagggtgggccacttaccttgtgggcacttgaatgtgctctccctaagttagatagcgctgaagtctgaagcatcattagagccctctgtcagtaatgtgcctatgtgtccctactttgtcatcatatgctcttaaatactgcggcagccactttagtgtctaatagcctgggtagccttcccctagaatgcttatcgggctgcaccttgctgctatcaggaaaacatgtgctcgaggttgtgtttaaattgcagtgacagttgcactgggtgatccacattctccatcacattctcccttggtctattgcagctgacctatcaaaagatgctggcttcagattacagatagaggttttctgtgtgctgttcttggcagcagat

SEQ ID NO: 296389 - DNA, 587 bp, Homo sapiens
gagctatgaatgggccaccgcacyccagcctgagcaacagagcaagaccctgtcttaaaaaataaataaataaaataaatcctaagcatcatctaagattcagctacatgtaatagtcagatgtcattaatactcaatgctctatcttttgctcctgtatctttagcacatggctttcattcatgtgtttgttgctttatggtcacaagaaggctgctacatcttcagccttaactctgcattctgggcaggaagaaaaagtaaaaagaagaagaaagggggagcatttgtattggtaaagcaaaaactctcccagaaatcctcaacagattttgcttacatgtcattggccataactatgtcacgtagccctccctaggagttagagaatctgataaatagaatattttaactaagcacacttctgccctcctttcccctaccacccacctgttctgtgaggaagaaaggaacaaggggaaattgataataggtagtttcattatctaacagtgacagtcaattcttatgagtttcagtaaagcatataaacatattttggaaattacttattttttcattttcct

SEQ ID NO: 296390 - DNA, 568 bp, Homo sapiens
acaccttgctgtaacttgtcacttaacctcagacactactagtttaactgttttttattcctctggggattcttgaagaaattctggaccaagaccaaagtgaggagtgtgatgatgggaaggcttgtggtttgtaaggcttgctgtttttcaaatatggcttcaagaagtgattatagaccttcctcaaaagagcagtgcagaaaagagaacttatgccctcaagccaggcagacccaggcaactccaactacaactcttgtgggatagagatccttaattgggaaattacaatgacaccagggagtttcaacagaattatccagggcaataaatcyttaataaagaggaagcccaggggagaggagaagggacatatgaggaaattatcccagagggtgagatttagattcatgctggggagaaatggggagctttggctggtaagagagggaagtgtgttcagggaagaccttgacttcctcaatgagaaggagaaatatcctgttccatgactgtggggaagatatgaaaaagaaaataaatgtagttcaaacaacatgacatc

SEQ ID NO: 296391 - DNA, 601 bp, Homo sapiens
gataacatctatagcttaaaaatactcattcctcaacgaacttgaagtaaatgactaaagtaagtgaaactgagtctatttgacaagtcttctgatatgattaaaatattgtgtgaagaaaggacttgatggaaaaatgtgatgtcaaagcctgtttttcaaagtttaagtttcattcaacgccaaatgagcatgtgaaaatcccctggagaatacccactctgaggtccattctaacctgaaactgttttttaattggtacttctaccaaatctaagtttaacaatagggcatgcattgacttttcagtatgatgcccagtccattttattctgtggtataaatagtttaccatactctaggaaatatattttgaatttaacaaagctttatggagtgtccagttcattctggctacaacaggacaaaatccaactggggatattgctcctggcaggttctctgctgtcttgcctgatcttgctttgtgaaccttcccctataggtccttatattaatgggcctcactttcctttagagataggagtttacactaacagttaattaatrtaacagtgttaagtgtttctatgtgcaaagc

SEQ ID NO: 296392 - DNA, 624 bp, Homo sapiens
aatcttcttggcctgcatttactcagtgatgctcccagcagctggaagaccctcccagtgagaagcccagaagatgtagtgccttcaagtcttcaaagcagttaggagggaaaacttgttcctttttaggtggtttctttccttcaagcggccttataatttgccactctcctctccctacactctttacctgctgctttcagtcagtgaagaacagttcagccttggaattgcccaggatttcggaactccctagggggacaggacagaaractgtgcgactgtgacgtatacattcatccaacaaatatttgttgagcccctactatgtgatagggatgggatggtgaaaaaatatagacatggtccttgttttactttgaatctggggtcagatctccacctcaccaattgtctgtgtgagcttggtaagatacttcatttctagggtttccctttcatcctctgtataaggttgttgaggaaattaaataagataatctacttgaatggctttttgcatactaaatgcttaatcagcccaacacacacacacacacacacacacacacacacacatactcagcagccagaaccatgggtgcataaacaatacatggtgta

SEQ ID NO: 296393 - DNA, 570 bp, Homo sapiens
taaatgtattatgagacaggcattgtactaagcctaagggacagaaaggtgaattaaagagacagggtaatttctcttaaagaacttacctccatcccatggggaggcagaaaggaaacagacagtttccatatarccgagtgtgatatggcccagtggggcagtacagtgtgtactgtggagctctgggtagtgacacttaaccacatgttgaggaggaagggacaattgaagctgaggtctgaggagcttatggaaattagtcagaggaagatggggagggagtagatggggaggacagtattccagccaaatgaagtataatgtactggcagtgcagtaagaaccatatacaaaagtttacaggcaacttacagcctagagtttcttcctgcgtttacaagaatgagaaaatacctgcttagacatcagacccagtttgatgcataaaagaaccactcccttttaaaacaatttccctcaaagaagtgaattcgataataagcagcacagagaaaaagaggtgtttgataccgactgaacagagtaacaataagcatttcattagca

SEQ ID NO: 296394 - DNA, 671 bp, Homo sapiens
tgcagcctcaaactcttgtgctcaagggatcctcccacctcagcctcccaagtaactggaataacaaggcgtgaatcactgagcccagttaatgactactttctaatatgttgctagacctttactaaattatttatagaaattgttttctttagcctcaacttgcaaatattttcccaatttttgtttcttttttaacttaaaaatgtttttacataggaagatatttcaaattttccttttatctaccaatatatttctatagcttttcagttttatcatggttagagaggtcttaagcttactttktttaatcaccaagattattcaaaacttttaatatttcatttttatgctcaaattttggagccaaatagaattcattttgagtaaggagtaagataaagcttcagttttattactttccaaatggctagccagttgtccaataccctttattgaataatccttcttttctacaatgttttgaaaggccacctttatcatatcccaaatttgtacattttcctgtatgtctgacctctctgaatacagagttaaaggtgaaagacaataaatgaagtaagaataaaaaagataaaatagaaaattagtcaaaatagattaagaaaaaagaaaataatttttagaggaatattaaaaatggagcc

SEQ ID NO: 296395 - DNA, 586 bp, Homo sapiens
atctttgtgaaactgagagtagaagtcatgtaataaagagatcacccagatggtatgtcgacatgtaaaagagagacaaggatgaaacctcaacagatatcgatattagctcagagaaaagaagaaaagcaaacatgggttttcacggaggcagaaggaggagcagaggaatacagcgacctgggggtcaagattgcaaagcacttcaaggatggaggcccatcatgccaacccttcaaagcaactgtgttgaagaaatgaaaagatgagtcaatggtaaggtcatggttgaccttgacacatgtcctgatggaagttgatttgcaatgaactgtgtaatacaygataactgaaaacttagagacccactttcaagaagtttagctgagacaccaggtgaagtgggaagtacaggtagaacaccgagggacaggaggcattaagggaggcccagtcacatttactgcaaaatgggaatttcaaacttttatttagaatgtttcagatttgtccaccctgtgaggtaaatcctgatgtggttttctggagagtgtagagatcaaggggtcttattaagaagaggtag

SEQ ID NO: 296396 - DNA, 586 bp, Homo sapiens
atctttgtgaaactgagagtagaagtcatgtaataaagagatcacccagatggtatgtcgacatgtaaaagagagacaaggatgaaacctcaacagatatcgatattagctcagagaaaagaagaaaagcaaacatgggttttcacggaggcagaaggaggagcagaggaatacagcgacctgggggtcaagattgcaaagcacttcaaggatggaggcccatcatgccaacccttcaaagcaactgtgttgaagaaatgaaaagatgagtcaatggtaaggtcatggttgaccttgacacatgtcctgatggaagttgatttgcaatgaactgtgtaatacacgataactgaaaacttagagacccactttcaagaagtttagctgagacaccaggtgaagtgggaagtacaggtagaacaccgagggacaggaggcattaagggaggcccagtcacatttactgcaaaatgggaatttcaaacttttatttagaatgtttcagatttgtccaccctgtgaggtaaatcctgatgtggttttcyggagagtgtagagatcaaggggtcttattaagaagaggtag

SEQ ID NO: 296397 - DNA, 591 bp, Homo sapiens
tgatatctcaggtgccggtcttctgcttctggactggacagccacagcgagactgctgctacctttcactgcatcccagatgcaacctaactcaggaaagctacatatgtcgtttattcaaggtcagcatctttctccttcctggcaagcccctgaccaccagaaccattgccctcctgccctctccacctctgaaggtcaaaggggtaaagaccaacttgggggaggataatagaatgacagcatctcataagagggagatctaaggctggagagaaagtctgctgattgggtgaggtgcttctgtggatagaggaggaggaatgttgacccagtgaactcaatttactccactgctttacacttaagaaaatatgccagctcttcctccgctttcgtgccccaagaaagcccaatggccacagctctctgcaacctgccacttgcctactaatttagccattgagcagaagttcgggctctgacaggtgggccttccgacaagygcagaatggatatcggggtctctggcctttgggtcctgatttcatttcagattaagagccgccgaaatgcagcaatcgataactc

SEQ ID NO: 296398 - DNA, 572 bp, Homo sapiens
acaacatttatttttatctttttttccacttgcacttctctgctaacattcctcccaatcttccaacccactctttaattcaaattctrtttaaaaggacattatatcaaaaacaagactttaaatctgttcctttgatttttaaatcaagttattttaaaagttcaagtttgtttggaaaatcttatggtaagaccagtggtcctttctttgcctcacccaagatgttccccatccctgtccccacacacaatggaagtttagactgaatctgtttattgagtctaactgtgtcttatacacatgcacctgattttgctggtaagtctagttggctccccaagcatagtgagtagaaaataagaagtcatcagccaatgttgaaggtggcagacaggctatggtgtttgatgggtagaagggagttcagggagaggcaaccgtgtgtttgacaaagattttcatggcttcttactcagcagttcctgtaacgcagcaaatgtgtaagtgaaataataatggtaaaaaatgatgagtttgaaggttaagttcatttaccattcgtaccctct

SEQ ID NO: 296399 - DNA, 609 bp, Homo sapiens
tatctccatgaattccctcctttccattgaaattaggtagctgggtatatcatggttccaaatcactacagttgttgatagagcaaatagaatcaagtatataactactatacttggaaaggaracagcttttttgaaatcaaaatcacaatttttttctcttcttttaatttatttttattgtgttggaaatttgcagacttattcctcactcggtcacactttcacaactgcaaggacaaggggaatgaaattactggcctgctttccagctcactgcacactcactgacacacacgtgtgcacacatgtgcatacacgtacacacacgcacatgcaaacacaccatacaggctcccaatccaatccttagttttctggcgtacagggactctgaagaattgcttcagtagtttgagaatgatgaatgacaatgtttttaaaatatatatttactgttggtaaaggaaagctaaggaagggagagagtagacgagaaaagaagagaatgtaagaggaactaaagacaaaaaggtggggacagatgggccaagaggggtaagaaggagagggatcccaggaggaaatgaattgtaactcagagaagcc

SEQ ID NO: 296400 - DNA, 609 bp, Homo sapiens
tatctccatgaattccctcctttccattgaaattaggtagctgggtatatcatggttccaaatcactacagttgttgatagagcaaatagaatcaagtatataactactatacttggaaaggagacagcttttttgaaatcaaaatcacaatttttttctcttcttttaatttatttttattgtgttggaaatttgcagacttattcctcactcggtcacactttcacaactgcaaggacaaggggaatgaaattactggcctgctttccagctcactgcacactcactgacacacacgtgtgcacacatgtgcatacacgtacacacackcacatgcaaacacaccatacaggctcccaatccaatccttagttttctggcgtacagggactctgaagaattgcttcagtagtttgagaatgatgaatgacaatgtttttaaaatatatatttactgttggtaaaggaaagctaaggaagggagagagtagacgagaaaagaagagaatgtaagaggaactaaagacaaaaaggtggggacagatgggccaagaggggtaagaaggagagggatcccaggaggaaatgaattgtaactcagagaagcc

SEQ ID NO: 296401 - DNA, 609 bp, Homo sapiens
tatctccatgaattccctcctttccattgaaattaggtagctgggtatatcatggttccaaatcactacagttgttgatagagcaaatagaatcaagtatataactactatacttggaaaggagacagcttttttgaaatcaaaatcacaatttttttctcttcttttaatttatttttattgtgttggaaatttgcagacttattcctcactcggtcacactttcacaactgcaaggacaaggggaatgaaattactggcctgctttccagctcactgcacactcactgacacacacgtgtgcacacatgtgcatacacgtacacacacgcacatgcaaacacaccatacaggctcccaatccaatccttagttttctggcgtacagggactctgaagaattgcttcagtagtttgagaatgatgaatgacaatgtttttaaaatatatatttactgttggtaaaggaaagctaaggaagggagagagtagacgagaaaagaagagaatgtaagaggaactaaagacaaaaaggtggggacagatgggccaagaggggtmagaaggagagggatcccaggaggaaatgaattgtaactcagagaagcc

SEQ ID NO: 296402 - DNA, 544 bp, Homo sapiens
catttacatactagtaattccccaatcttgatctccagtccatgagttccacccctacatgcccacctgtctgccaaacagagtcacctggatggttcccaggtaccatatgcctcaggctctttatatccagcatctcattcatcatctatagctcctgctctgctttcttctgaattctctttcttgatttgtagcatctccatctgctcagctgcctagccaggaacctggacttttcaacattyatctcttcccgtgctccattctccagtcttgaaatttttatttcaaatataggcccatcttatcattcctgatatcactctcttagttatagggtatcattatatccttcttggactatcgcaatagcccctattctccttacgccacccaaacctatcctccatactgctcccaaagcaatgtttccaaaatgtggagcgggccatattagtacccatatttgaccagacaaagtccaagctgctttatgtcacaacgaaaggcttaatatatgtgatgctgggctttctctcta

SEQ ID NO: 296403 - DNA, 599 bp, Homo sapiens
ggcataatcctcaggttgataattaagatagatgccgctaacatttcttaaaccatgctgcatacagctgtcagggcaggagggaatttgagaaggcggtatataattaacctagttggaattgggccaagggacccaaggttaatggccctgggaatgggagcattaatgacyattaatggtcaagccctttttcatgtcgtactcattagagctaccttttatattctgtaagatcatggcctttggcctcaggaccaagggtaatggagagttgccactcccccagacaatgtgttctgcattctgacagcttctgtccagctcttgattccccccacccatcacaatcttcaggtgtagtgtatagcagatctcaacacactccagccatctgctgagccctgctgatgagagctgagacatatacatcatgcatattcatgggcaaaaattgtttcaggtttttattcaacagatcgacaaaagcgtgacatcctcttgcttttacctgtttggctctggtgttcctttctctatacagtccctgggtgagctggaatagaatctttaaccactctgggatgtgtcctccctcc

SEQ ID NO: 296404 - DNA, 541 bp, Homo sapiens
tttttttcaatttaaaggtgagactatgaggatgccagtaaaagatacaagactggcacatccccaagagttgattttccttttcaaatgcaagtattggagaaggcaaaatggtccttcctttgaatttgccagttaaagggtggaggctcccaacttgagctggaggaggacacagcgctgcttcgggcagcacacagggttctttgctgagacagctgaggggkctgaggcaaggggcagaggtgaagagaggctgatgcatttggcccttccttagtcatcagatggccatccacaggagagtgagacggacacctgagaccctcttcctcctgcgtagacactgcccctttcccaggagcaatgagagtcagcccagccatgtcactgactgcctcttcctcttccagtctgggtctgaagtcctaaagacatttttttgcatgctcttccttcattcactcctcattcgtgctgtgaatacctcctaagcatcttctatgttgcagacagtgggccacaccctgagaattcaaaa

SEQ ID NO: 296405 - DNA, 585 bp, Homo sapiens
tcatatgccagccttctctgacttcaactattgcatcaacacatttattcttccaatagtttcagcagaagattggttattttccctctcccttaatacagccttctttcctcctccactccccgctactccctccctggcttggaccctatatattttgaagcattaaatctgacatattcatcttggtggctggcactaggtaactaactttatgtttacctgtcacgggtgtagaaatragccgcacagggtgctgggagcctgtttctgtctcccgaccctctcctcccgcacccaatcctagccttcttcttttcttttctttttttttttttttttttcccagataaaagtcatttgactgatttcaaattcctggtgatatcaggacagaaaaaaaaaaaaaaaaagacttgtcaacacctttctttcttttcccctattaaacatactgtaaaaatcaatcccttttgtcacttcgctctgcttgcgagaatgtttaatggatgtcaagggagctaatgatcgctggtagaaaattcattttagatttgctatttataaagtactcagtactcaggt

SEQ ID NO: 296406 - DNA, 428 bp, Homo sapiens
gccacggggtcagaccatcagaggtgccctgatgtacaaggggagcctggctaaaaggtacagtgatctgtgacaagattcccatcccagaacccaggatccttctgatacagagaacaatttaagatatttgccccctaaggacactcttaggcattattcttctccagaattaaaagaaccaaaactggaccatccgtgactcctgtcccaatcttcccatccaggctggatgttaccattttccccatccctgcttycttccctttgtcttcctttacctggctatgccttttgacctttggtgtgacaaatttcagctgccactaatgttcatgtagagcatgtttctctttcccttggatgactgtgcgcgcattgaaagactttgcagagacggctccctgaatagaaatgcatgccagaca

SEQ ID NO: 296407 - DNA, 565 bp, Homo sapiens
aacaggctccactgtcaacccactctgcttgccagatgaaaactgggtgagtcaagaaaaggcagcttctacctactcactccacttgttcgttccaggcaatgtccccatgtttactcacgcacgcattggattaggagacctggaatctgagatgtcccagcaagctttagctaaggtcatggttacctccatgaaactgctgctgtaagtgccacagctggagttataacgatttctctcctttcctgcaggtccctgcaggtaggctgctttcttttgtctcttaagtcactgccacttactttgtcctgcaaaataacttcccaaagactacactcccatgygggccagtcttcccaggtcccaccttccctccttgtatttgctaactcctttcttggtcctcagcttcattgctattcatccagtagatgaggaagaaagacaatgtttatgcatggggtgaggaagtgggggagtcataacccgaagtggctcgtggcttccacccaccatctattggccagaactcagtcaaagaagagctgctattacccttgac

SEQ ID NO: 296408 - DNA, 565 bp, Homo sapiens
aacaggctccactgtcaacccactctgcttgccagatgaaaactgggtgagtcaagaaaaggcagcttctacctactcactccacttgttcgttccaggcaatgtccccatgtttactcacgcacgcattggattaggagacctggaatctgagatgtcccagcaagctttagctaaggtcatggttacctccatgaaactgctgctgtaagtgccacagctggagttataacgatttctctcctttcctgcaggtccctgcaggtaggctgctttcttttgtctcttaagtcactgccacttactttgtcctgcaaaataacttcccaaagactacactcccatgtgggccagtcttcccaggtcccaccttccctccttgtatttgctaactcctttcttggtcctcagcttcattgctattcatccagtagatgaggaagaaagacaatgtttatgcatggggygaggaagtgggggagtcataacccgaagtggctcgtggcttccacccaccatctattggccagaactcagtcaaagaagagctgctattacccttgac

SEQ ID NO: 296409 - DNA, 577 bp, Homo sapiens
tctctaagtcctcccttcttgcccacaatgtcatctcaggaccaatggttgaggacagggattcagatcatcagcccccaactatcataggcagaggagaatcccycaaatttatgacagcaggagctcctctcagagatgggaggttgggacataggagaagaagaaagaaatgtcttctgtagaaaactcaacctctgcaacttccccgtatgtgccttcaaagagaggagaactcttgtgatgataatgagtaacagtgagtagtctgaattttttcatttttaggaggcttggggaacagtaactacttggtaccaacaaccctattatgaattaggccacaagtattattccctgcatgaagaatagagactacttttctctagaggtgggaaaagaaagagactacaaagcgacaagtacaacggaaagactttcattaaaaaaaaataacaaagaaaacacaagcaaacaaaagaagagtttatccaggaattagcaagtccacaaggagccttctggaatacccaccttcctggtgtattggtatattgtatgttggtataaaatatgc

SEQ ID NO: 296410 - DNA, 559 bp, Homo sapiens
tgactatttctccacctagaagctaagcagagaatggactcgttttccagccttaccatggtagtacatatgataatttaacaaaaatgactgtaaattaggctgggcatccacaggaagctttgtatgtgcaatctccctgaaacgtttctcatttctacacttaaacacctgatgcagctaaagtagccagatgagcaagagaaaatctccgatcctagggtcataactctgtaagtttattacatgygagttattgctttgaaccagggttggcttccaaggccagaatcacacatccctaaaataatgtccctagcaccagcagaaaacgatctttacaattctcgccttgaacccatgtagaactcctacctcattggttacttgttttctggacaggggagtccatccagctctgtagttcaccttcaattatccccaacatgtaacggctcatgttcatgctgggggaggatagagcaccaagttgctgctgcaggtgattaactgctcacatggaggcaggaaaggccatctaccacagggagaggactgg

SEQ ID NO: 296411 - DNA, 559 bp, Homo sapiens
tgactatttctccacctagaagctaagcagagaatggactcgttttccagccttaccatggtagtacatatgataatttaacaaaaatgactgtaaattaggctgggcatccacaggaagctttgtatgtgcaatctccctgaaacgtttctcatttctacacttaaacacctgatgcagctaaagtagccagatgagcaagagaaaatctccgatcctagggtcataactctgtaagtttattacatgtgagttattgctttgaaccagggttggcttccaaggccagaatcacacatccctaaaataatgtccctagcaccagcagaaaaygatctttacaattctcgccttgaacccatgtagaactcctacctcattggttacttgttttctggacaggggagtccatccagctctgtagttcaccttcaattatccccaacatgtaacggctcatgttcatgctgggggaggatagagcaccaagttgctgctgcaggtgattaactgctcacatggaggcaggaaaggccatctaccacagggagaggactgg

SEQ ID NO: 296412 - DNA, 570 bp, Homo sapiens
gtctctctccctctctctttatgtgtatatataaaatacaaggccgggcatgggggctcatgcctgtaatcccagcatcttgggaagccaaggcagtaggatcgtttgagccttaggagttcaataccagcatgggtaacatagagaaaccccacctctacaaaaagaatacaaaacttagtcaggcgtggtagcatggacctgtagggacctgtagtctcagctacttgggaggctgaggtgggaggattgcttgagcctgggagttcaggctgcagtgacccgaaattgtgtcactgcactccagcctgggagaaagagygagaccctgtctcaaataattaaataaataaataaataaatcacaaaacaaatttaatttttttaaaaaagtaacacataatacagtaaggaaaatacagatacctgaattccaccttcctaaagatttggattcattcatcttgggtgtgggctcccgtatctgccttttaaaattattgagaggtgactctgaggctttctaaagactgccaataaggccaatattaataatacctaatgtcactt

SEQ ID NO: 296413 - DNA, 562 bp, Homo sapiens
aataaccctggattgattttatctttctcttggtccgtgatccttgatamaaacaaggttcccacggccccgttagccattccactctatccctggccactgtcctgtttccctggcatcccatcgcaagagacctgcttttactttcacattctgcacagcagggatttctgcaaaaactgaaaaattgcctatcaatccctggtcaaagtcaactatgtcatgttctgggactcaggaggacagcctgtgcttaccttcctgcactccactggtgcaccaagctgtcctgctcctctccttcagagcttttccatttgacttcaccttgttcccgagcagtgagagagacccagcagcctctgcagctgcctggaccactgggggaatgtaaatggagcaaccacataaacgaggagtgacaagcaccacgctgagctctctgcaaagctgcccagtgaccctaggagggaatgagaaataaattagccttggggtttgtgaggaaagcaggaggcccggaaaactcttcctctttctttccattgcttctcaaactgta

SEQ ID NO: 296414 - DNA, 487 bp, Homo sapiens
tgagtaataaataagtacttattgttagtcacatttgtttccctgcaaccttttccatttttccaagcattagttccactcttctcacttttcagatttgtttgacttttttcaagaccatttaattgttctatataatctccaacctaacctccaacaaattagtaaaaccccttttaatcaaattttttcaacaatcaaacttaccaaatagcccattacgtaatttttctgtccttttgagacttttttccttttcttttttttttttttctagaggtttctatcctcttattycaacctggacttgtaactctaggaaaattgcacagttgttgttgtttgacttcttgtcacagtaggaattttccctctcctatatcctaaataggatctacttttttctagaaccctgtgtttttgtagttgtttactgacttaaatggtatagaatgtagttcatttatttcttgagaaaggatagtaa

SEQ ID NO: 296415 - DNA, 505 bp, Homo sapiens
tttcaacctggacttgtaactctaggaaaattgcacagttgttgttgtttgacttcttgtcacagtaggaattttccctctcctatatcctaaataggatctacttttttctagaaccctgtgtttttgtagttgtttactgacttaaatggtatagaatgtagttcatttatttcttgagaaaggatagtaaataggacaattttgagactacatttttccaagtagttttactctacttgaacacctgtatgatagtttgctgrgtaaaaaagagaagttggaattaattgtccttaactgttaaagatattgcaatattggtcatttggctttggttatcatgttgagaaggctaatactttcctatttttttttattctgctattttttattcagatatctttaagaattagctctttatcctgataatctcaaattttagaatgatttatctttgtctggggtatccatggaattgagtgcacagtggaccatctcaatg

SEQ ID NO: 296416 - DNA, 587 bp, Homo sapiens
caggttaaaagagaataaaactaagatgtattataagcactgtcatatcaattttattaagaaattttctcccaaaatgtctagtggtggtgttttttttttttcccccccaagtctttctctgtcacccaggctggagtgcaatggcgcgatttcggctcactacaacctccgcctcccaggttcaagcaattctcctgccttaktctcctcctgagtagctggaattacaggtgcacgccaacatgcctggctaatttttgtatttttagtagagacgggatttcaccatgttggtgaggctggtctcgaactcctgatctcatgatccgcctgcctcggccccccaaagtgctgatagtgagccaccgtgtctggccctagtttactttttctaagctgtgaccatacgaagtggagtgatgaaaatctagataattctaggtaacatcattgcacctaaaacgtaaaataaatgctaatagagatgatcaggttcaattatattaattttttttctatttccatattactctttgttgataaatctgtagcattatttattttaaaaaacactttcagagtaa

SEQ ID NO: 296417 - DNA, 553 bp, Homo sapiens
ttttagtttatgctaggtaagttaaacacatttcaattctttcgatcattatgaaatgatttttaaacttttttataaaacaaaattatctcgctctgttgcctaggctggagtgcagtggtgcaatctcagctcactccagcctctgcctccagggttcaagcgattctcctgcctcagcctcctgagtagccggactacaggtgcgcgccaccacgcccaggtaatttttgtatttgtagtagagatggcatttcaccatattgtccaggatggtctcgatcttctgacctagtcatccgcytgcctcagcctcccaaagtgctgggattacaggcgtgagccaccacgcccggcctgcatactgtttttcatagtgattgcatcattgtacattcccatcaaccgtgttcaaaggtgacaattttccatactgtcaccaatatttatattttttatatatagcaaccatattagcaggtgtgagctgataactcactgtggttttgatttttagttcccttgtgattagtgtgttgagcaccttatttta

SEQ ID NO: 296418 - DNA, 625 bp, Homo sapiens
ctgcttggctctgcaaagggtgagatttcttcctaactctatgatctcttagcggattccctgtgatcccctaatactcttgtttattgcttaccgaataataaaacttctttactgcccttctacttttgtggacaggctttctggtttggaaggagattttatttttaattatatttccccaacacttccaactgctgattaaactattggaattacgaaattaataatggtgaggttttttttttaactttcccgaattggctcttattctaacctttaaartttcaaatatttctaaaatatgagttgcaaaccttgatctatcaaaatttgaatattcatcttctaaataaggatgttttcactctttcttttttattattattatttcattggctaatggaaacagaagataatatcctggaagaaaaataaaattattaatagtaaaaatacaataattcacaggaacaaaatataattcttctattaaattaaatatatttcttttatttttaatagaaataataatattaaataaaaatttatcggaggtcattgttttagactgagctcctgtattaggccccaacagagcagactaaaccagaatggagtccct

SEQ ID NO: 296419 - DNA, 563 bp, Homo sapiens
tcccaactttatgtgaattaycttaattgtgaaatgttggcaattaatttacaatatttttaaatgtctgaactttagtgcctgcaaacctcaccaccgaagggtacaacactttgtgtctccaagtaaacttgaaaggcagtctaggccataggactgcaattcttaatgctgaactagggccagaaacagtgtgttagggggcatgtgacatgctgagacaccagctagggcagccaagggagtgctggcatcctcttttctgaccccaggctgtgcagtttgtagctccaaacgagacccctgtcttcctcttgagaagaggagagaaaagagtgggaaggactttgtcttgcatccaggataccatttcagccacagcaggatagggcatcagtccgttgtgaggcccccattctaggccctagctcccagacaacatttctagacacattcttggccagaagagaacctgctgcatcggtggagaggacccagtcctggtagcatttatcacctgctaactgaagagcccctgggccctgaataaccagcagtgatac

SEQ ID NO: 296420 - DNA, 472 bp, Homo sapiens
tgcatcttgttgtttgagtccagctcagccacaatacaatacaacaccaggtagacttctatggtttttgagtcaaatctctgactcctggacagcacttctggacccgcccagggcctgggggaccttgttgctcagaagagtaggacagaattctggctggcattaccacctgcagaatgtggagacccagggccttgagtgaacatagttggtagccggggagtggtcagagcaggccttgggtgagacctaraactttgagggcttcaggtctcactgaacacagtcatagtggtggtggccacagaggtgcgtatgtcactctatcctcagctttaggtgactcagaacagagacagaaactctaagtttggagaaagtaagggaagagaacaaagcctctgcctggtaatacagaaaattatctcaaatcttgtctaagactttcaagtctatgagtctgcaagaa

SEQ ID NO: 296421 - DNA, 587 bp, Homo sapiens
ttcctcggagcatagaaaccttggacttcttacattaatattcatggcttcaaagatctcaactcttccttaaatgaacgagcctcagatgtcatatcacgtgatatctgccaaaattaaaagtctaccacccagctccaaatgaagaaatgcagacactcatattttagttagaataacttcaaagttacattgtaagaatagcatgtgggttggagatattatttgtagtcatctatggagcatacaatccgctacttctatgcagctcaaacctatgatttcctataaagcctacatcatccaagcaaaagggcagcagaaattattgtccactaaatatctgttttagtgagaatgttttccttttttcgaagtgttaattttgttgttaactgtaattgatttgatgtyacaaaagtataaagcgtattccacatagaataacaaacacgagaggggaaaatggcagagaggaggcagaactaacttgcagctcacaaatggaaagacagagcagcatgtggagacccacctcatgaacttttgctccaagaactaccgcaggaacataccaggaaagccga

SEQ ID NO: 296422 - DNA, 512 bp, Homo sapiens
gcggtgacaagggaacagttttacactgttgatgggaagggaaactagtacaatcactacagaaaacagtgtgaagattccttaaagaactaaaagtagatctaccatttaatccagcagtcccactactggatatctacctagaggaaaagaagtcattatacaaaaaagatacttgtacacgcatgtttatagcagcacaatttgcaattgcaaaaatatggaacaagcacaaaagcccatcagtcaagaagtggataaagagaatatggtaatatatatttatatatacatacacacaccatgtatatatacacaccatggaatactrgtcagccataaaaaataatgaaataatggcatttgcagcaacttggatacagttggagacattattctaagtgaagtaacttgggaatgaaaaaaacattgttctcagtcataagtgggagctaagctatgaagatacaaaggcctaagaatgatacaatggactttggggacttcgggga

SEQ ID NO: 296423 - DNA, 512 bp, Homo sapiens
gcggtgacaagggaacagttttacactgttgatgggaagggaaactagtacaatcactacagaaaacagtgtgaagattccttaaagaactaaaagtagatctaccatttaatccagcagtcccactactggatatctacctagaggaaaagaagtcattatacaaaaaagatacttgtacacgcatgtttatagcagcacaatttgcaattgcaaaaatatggaacaagcacaaaagcccatcagtcaagaagtggataaagagaatatggtaatatatatttatatatacatacacacaccatgtatatatacacaccatggaatactagtcagccrtaaaaaataatgaaataatggcatttgcagcaacttggatacagttggagacattattctaagtgaagtaacttgggaatgaaaaaaacattgttctcagtcataagtgggagctaagctatgaagatacaaaggcctaagaatgatacaatggactttggggacttcgggga

SEQ ID NO: 296424 - DNA, 587 bp, Homo sapiens
ctgcagccttggtgacagagcagaatcctgtctcttgaaaaagaaagaaatttacctctccataagaacttattaaaccctcacaaatgtgcaagtatacacacaaaaacattctgtttcatatgtccctaaattatttttcaaatccaaaacatgtttgttactgagattacatgcttgaatagaattttttagaaagaaaaccttcatatgtcttcattatactatgaccaatagtatagtcaagaaaggtcataaaagtctccgagcctgaaattatttttccaattaactgtataaaatgttaaagttctgggtatagataactttttctcaataatggtagcaaagattataataacacagagtcgttgaatttagaactatggttcaagttctaccygtccaacttagtggcagtatgactttaggagtaaacaaaatcttatctaaaaacaagcaattaataaatatcactttaaatcaatattattatgattgttcaaataacagaatttaaacatactaattatatacttatatgtttaaattatttcagtttacaaggatacacatttaatacttct

SEQ ID NO: 296425 - DNA, 543 bp, Homo sapiens
cgaagtttcatttctattctgtttttgtttgtttgtttaatggagccatgamgtggtctcattactaatctccacgaaacagcaatttatttaatagcgggatgataatatttgcaacagcagtattcaaagtgaagagcagaatatggaattagcccatgcagatggcatatatatttttaagattgacataattgccacagacaatcctgttagggtcatcaggtagcctagtactggtgcagccaagtgcttggttcccttttccagtgcccagcaccccatgcacccattccttaagctggggtacttctactggcatttgcatgttagtcttactaagattatttagcattggtctccaaacttgactgtgacattttcaatcgatactttgattacataacttagccacatgtcacatcatcaagtgaaatataaatgtgaatgtcgttttcgctgtggaaacgaaattgaataccatagaatgactacgaaattcaggtattttaaaaatacatttttataaaaggcataggcaat

SEQ ID NO: 296426 - DNA, 446 bp, Homo sapiens
atttcttcctcacataggctgataggaatctcaggatcaaattaactgcataccactgttgactacagaatagctgatgatattttcatcagtgaattcatttttgccttcaacttgctataatacccttatttatcgtcatttttacttatccktattttaaattcaatttcattctgtgcatttgtgttatgtaacttaactattcgtgaaactgaatttggatagcactaagtaaataaagcaaacaccaaatcaccacagaaagtaacacaaaaaattgtcaatctcttaggctgctgtggactgtaaatgatgaaaatataactcaattatttttggaaataagaaaaacacagtgttttcctcaggaaatccaacactggggtaaatttcaggttggtttaataatcagtttagcaatattttcaagtgtttaaattctc

SEQ ID NO: 296427 - DNA, 603 bp, Homo sapiens
tttaattgtgttgacttaggaagagactgacatattgcttaaattaaaaatggtttatatttacaaactttaaactctggctactcataagttcataacattktaaagccatagcctccaaaggtgaagaataagaattcaaattctggctgggcacggtggctcacgcctgtaatcccagcacaatgggagatcaaggtgggaggactgcttgagccaaggagttcgagaaaagagggtaacatgataaaaacccatctctacaaaaaatacaaaaattagctgggaatggtagtgtacgcctgtagtcctggctacctgggaggctgaggtgggaggatcacttgagcccaggtcatcgaggctgcagtgagccctgatcacacttttgcactctggcctgggcaacagagtgagacctggttccaaaataaaaaaaagttaaattctgttaaaatggtaggattggtaggatggtgcaaaataaagatagtgtagacagacgtacatcgacatcaatggttaagacatcatgttctttggagtttctaagtatgaaatgacttttacttgtaaacatatagttcatatacacctaacata

SEQ ID NO: 296428 - DNA, 652 bp, Homo sapiens
ctacagaaagaaagaagggcttgatgaagcttttgggggtgattttggagtcaagcactataaaagggtagggggaggaaatgtatggtgaataagattgcattatattctgataagagtctctcaggtaataaaagttgcctctgagccgttttcctcctggtatagtcagtttttgtacatacaaactttctttacaaaagggcagcttttcygaactacccatgtgttcgcagtttctcaaaataactagctaataatcaatttgcaaagaagagtattttgggatagtgtcctgaaccccaacacttctactgagtcagtctagcaacagtgataacccaaaaacaatgaacacacccaaataatataacttgtttctaaataccattcatggtaaaagtaacaaggactataattttaaggcttggacagggtatatatgagtctagataatcttatactaccagaaagaagagaagtgaccacaaaataaaaagaaagagagcatgtcaaagggatagggggtaaaactgaaagagctcccaatggtgagacattggaacaatttgtactacattattaatagtattgcatctgtaggggtggaggggaagcttcctctcctctcatcagagtttcactaaaatga

SEQ ID NO: 296429 - DNA, 542 bp, Homo sapiens
accatcattagtagtatctaatctgctctcctcatatgtttgtgagaaccaaataatattttaaaacactagaaaatataaaatgttattatgatttttgatactaaatttttttaaccttgattgtattctcaatttttatttatttattttccaamttttattttagattcagggtgtacatgtgcaggtttgttacatgagtaaattgcatgtcactggagtttggtacacaaagtgatttcatcacgcaggtactgagcatggtacccaataggtagttttttgaccctcaccttcctcccaccctccactttcaagtaatccccattatctatcattcccctccttgagtccacgtgtacttgatgtttggccctcacttacaagtgagataatctggtatttggttttctgttcctgtgttaatttgtctaggataatggcttccagctccatccatattgctgcaaatgacatgatttcactctttttatgactgcatagtttcaagctgtatatgtactgcattttctttacct

SEQ ID NO: 296430 - DNA, 954 bp, Homo sapiens
agagctgcaacattggagagatggatcaatgggactggtgcttctagaagacatagccattaacagaaccatgcagagcccaccagtaatcactggcatcctttcctgccaaggaattcaggatgactttcataaatatattgtaactgatgaagtgttggtaaaagaacaagtagctatattctttggcaagataagtgcagctactccacgctgcacactaatatgagtctatgttttaacaattaatyaagataatgaaagtatggaatctttatcggaataacataaccaattcaaaatgctcgtttgactataatctctataaataaaaggactaaaaacatgagcagacaatccagatatattacaattagtaaaccaaaacagctggagaagtactacacctgactaatgtttgttaaaacaaaaacaactgcttattattaaaaaaaagtcaaagttaaataacwgataatttgacttcctagtttcctatttggatactatttctttctttctcttgcctgactgctctggctgggacttccagtactatgttgaatagaagtggtgtgagtggacatccttgtcttgttccagttcttagggggaatgtttccagcttttgcccattcagtacattggttgtgagtttgtcagaaatggctcttattatttttagtaataagatgtctagtgtgttgagttttttttaattgtgaagagatgttggattttgtcaaatgcttttctgcgtctaatgagatgatcatatggtttttctttttaattccgtatatgtggtgaatcacatttattgaattgctcatattgaccaaccttgcatcccagaaacaaagcctagttaattatagtgaattaactttttggtatgttgctggattcagtttgttagtattttwctggagatttttgcgtctatgttcatca

SEQ ID NO: 296431 - DNA, 511 bp, Homo sapiens
acaatttaatataacagaattttcatatagatgttttttgaaaagtgttgttttatgctcactacacaatggaagtgacatttaaatcatacttaaatatttttatcaacattatgattaaattttgttctttcctttgtgacctctttttgtactttgaaattgttttctttttcttttattcactttattttaagttcagggcggggtacgtgtacagatttgttatataggtaaactcaygtaacaggggtttgttgtacagattactccatcacttgggtactaaacctagaagccaatcattattttttctgatcctcttcctcctaccacctttcaccctctggtaggccccagtgtcttgttccctctatgtattcatgtgttctcatattttagctcccacttacaagagagaacatgaggtgtttgcttttctcttgctgcattagtgtgcaggaaaatggtctccagctccattcatgttcctgcaaaagaaatgtcctca

SEQ ID NO: 296432 - DNA, 535 bp, Homo sapiens
ggtattcaacacagcattgtcactgaccaagatactcaatttatggctaaagaagtgtggcagtgggctcatgcttatgaaattcactggtcttaccatgttcctcatcatcctgaaacagcgggattgatagaatggtggaatggccttttgaagtcacaattgcaatgccaactagattacaatactttgcagggctggggcaaagttctccagagggccatgtatgctctgactcagtgtccaaaatagggtactgtttctcccatagcaaggattcatgggtccagaaatcaaggagtggaagtggcaccactcatcatcacccctagtgatccactagcaaaatttttccttcctgttccatcgacattaggttctgctggccaagaggtcttagtctcagagacaggaatgctgccaccaggagacacaacaacaattccrttgaaatggaagttaagatagccacctgagcactttgggctcctcctacctttaagtcaacaggctaagaagggagttacagtgttgg

SEQ ID NO: 296433 - DNA, 461 bp, Homo sapiens
tgtttattttaaaactccttgaatgtagacaagtcctttgaattctaacctaactcatgttgtaacatyttcttaattcaacatttgttaggtggcttcaggccaggttgagagtaattttggtaccaggtatgtaggcaaacatcttagcctctctgattgaggttgattctaaatgtgaagagtgtctttgcactcataaatcagctgaaatctctttatgtagaactataatatgttaaatatgtatttctaaattttcatattttagtatcttcttggatgttaggaaattatgtcaaatgtctgaagttcataacttgagctgcaggattgctaaagagaaaatatcttgtcagtacattcttttaaaaagatccatatgtttgggacatttacatataaatggtttggaataagctccagttattgtttgatattgggtttaactaaactgggca

SEQ ID NO: 296434 - DNA, 678 bp, Homo sapiens
gtggtttttgcacaatgattttgtatactaagactttgctggagttgcttatcaggttaaggacttttggggctgagattattttttttttaagtacaataatgtcatctgmaaacagagacaatttgacttcatgtcttcctatttgaatacactttatttctttctctcacctgattgccctggctagaaattcctggccatgtctagtcagccatttacactctttcctggtcttttcccttgctattattttgaggggtatatcatatctttgaatggtcagagttgatgttaaataaaccacttttttcactataattaatgtaaaatctattgatgagtacaatgcttaggtaaaacacatgtaatatctagattgaagtgtacaaataggactgagtacatgaatttatgacattgtctatttaaaggaaagcttgaaataaactataaaaacatatttgtatttcagaaatatttcgaaatagagctgaagtgctgtagagaattcctttctttctaaaatcacagctctgtctatatgtgtgtagaaaaaaatttaaccttgtacaaaaagtgttcaggcttttacccttgggttctaggaggtaatctcttagcttttgaagaatcatgctagttggggtgtgtttgcttgcctaagagcctgtattg

SEQ ID NO: 296435 - DNA, 1357 bp, Homo sapiens
gtggtttttgcacaatgattttgtatactaagactttgctggagttgcttatcaggttaaggacttttggggctgagattattttttttttaagtacaataatgtcatctgaaaacagagacaatttgacttcatgtcttcctatttgaatacactttatttctttctctcacctgattgccctggctagaaattcctggccatgtctagtcagccatttacactctttcctggtcttttcccttgctattattttgaggggtatatcatatctttgaatggtcagagttgatgttaaataaaccacttttttcactataattaatgtaaaatctattgrtgagtacaatgcttaggtaaaacacatgtaatatctagattgaagtgtacaaataggactgagtacatgaatttatgacattgtctatttaaaggaaagcttgaaataaactataaaaacatatttgtatttcagaaatatttcgaaatagagctgaagtgctgtagagaattcctttctttctaaaatcacagctctgtctatatgtgtgtagaaaaaaatttaaccttgtacaaaaagtgttcaggcttttacccttgggttctaggaggtaatctcttagcttttgaagaatcatgctagttggggtgtgtttgcttgcctaagagcctgtattgwgtggtttttgcacaatgattttgtatactaagactttgctggagttgcttatcaggttaaggacttttggggctgagattattttttttttaagtacaataatgtcatctgaaaacagagacaatttgacttcatgtcttcctatttgaatacactttatttctttctctcacctgattgccctggctagaaattcctggccatgtctagtcagccatttacactctttcctggtcttttcccttgctattattttgaggggtatatcatatctttgaatggtcagagttgatgttaaataaaccacttttttcactataattaatgtaaaatctattgatgagtacaatgcttaggtaaaacacatgtaatatctagattgaagtgtacaaataggactgagtacatgaatttatgacattgtctatttaaaggaaagcttgaaataaactataaaaacatatttgtatttcagaaatatttcgaaatagagctgaagtgctgtagagaattcctttctttctaaaatcacagctctgtctatatgtgtgtagaaaaaaatttwaccttgtacaaaaagtgttcaggcttttacccttgggttctaggaggtaatctcttagcttttgaagaatcatgctagttggggtgtgtttgcttgcctaagagcctgtattg

SEQ ID NO: 296436 - DNA, 287 bp, Homo sapiens
accagataatctaacaatatgatttaaggtgggcctgttaggttatccgcttgacctccagaggaactgaaggctgaggtcatcttgagaatctatcatgtatatgtgatgaaaccccaataaagtctccaaacgccaagaatcagataagctacatgggttgatgacacttcatgaaattkcatattatcactcatcaatgccaggaatataacactatccattactcacagagataaaacaactaaaagatccacatttggaactttctcagacccttcactata

SEQ ID NO: 296437 - DNA, 628 bp, Homo sapiens
tcattttgaatttaaagtgaaatttttactgctaaattattacatttatgccattaaggtgttctaacaattaagtctacagacgttctattaaaaatgagaaaattgtgttcctcagttatattcaatttctcaccaatggtctggatcaagctgctttatttgtgtttataaaaaaagggtgaataacttttatttcccaaaagttttttcaattttttttcaaaggacctgttatattttaaatcagacgtgtaggaatgtcagagctttttaagggaattttgtagttagcatatgttttataatttagatagaaatcaagtctctgcaataaaacaactgtcttttaatagtttcagttgataatamaatcatgtaatagtttgtatattttattattagtagatgtagaaagtttaggaaactgaacttcattagttgtgttgtgagggaagaattaatgcagcatactaaaatataataagcccagtgctgggtttaaatcctgtctcctacaaatgagataatttcagcttatccatttctggctctaaaatataaattaattgaatataactgggcagcaagtggtggtgggaaatggctttaattggtggataaagaa

SEQ ID NO: 296438 - DNA, 552 bp, Homo sapiens
gatgatagacagatagatgagatagatgatagatgatagatagatagatagatagatagatagataatatttattgtgaggattggcttacccaattatggagactgagaattgctaagatctatcatctgctagaggaccaggaaagctggtggtatcatttgatttgagtctgaaatctcaagatccaggatctcagctgtctaagagtaggagaatattgatgtcctaactcaaaaagggagaaaaaatgttctctttttaaaatctttttgttctgttcaggccttcaacaacttgatgatgtctgccctcatttggtgagtgtagatttcttttactaagtttactgatgcaaatgctaatgtcttccagaaattccctyatagacagacaccagaaataatattttaccgtctatctaggatcctttagcttacttaagtgatgcttggattagacatcacagctacatataattttgcatccctcacgggttcactgctgaattcaaccactcctttctgccacagtttgtttcttttttaaata

SEQ ID NO: 296439 - DNA, 529 bp, Homo sapiens
tttgttacataagcgatcatgaacagctagaactgtagaaccactattgattaaattttcaattaaaattaaaatgtagattctagagacgtttctgaaagatattaaaagtatatggcattaaaataactctctcaagtctgaggaaaaatgcttgggtaagcytaagctgtagattggcctggcatatagaagataattagaagttgatgtatcatgccaaaaatttaaaagaggaaaattcagagaggattatgttatagtcatttctttagtttttcctcaataatgaaacagatgacaaaggacaacaaactgatctcattaacagggaacattgtattgtaaattatatcatgagaaagaaaattcctttgttacctttacataacaggaaagaaaataagaataaacaacatgagaatctgtaaagcttatgtgatcagtaatgagaaggtagttttgagatttttcagtggtctgcaagttgttctcacaactgtattcatatgacttttactgtaaaaaa

SEQ ID NO: 296440 - DNA, 527 bp, Homo sapiens
aatacattttgaactgtaattacatgyttttcagtaacttatgcattttattaaatatttcattcaaaaaagggtatttatttagtttttttaaatttattgagtcacgtgctaagcatttttcacatatgtgactaaaataatataccttcaattacaatttgtaaattataagtaaaggattttgcactgttaaaaaaagagtaagttactttcacagtaaaccctataatggaatgttaatttgtttctgcatgaattcaaagtcaagtacttttggacttcctcttccatctttgatggagcacttaaaatcagacccatgcacccctagttcttggggaaatagaaaaaaaaaaaattaaattttaaaataaaaattaaaaaacaggaaacaaagcaaggaggaagaggagcaacctaaggggcactgaagaattaatgaaaagacaggtcttgaggggacaaaatcttggagaagcaggacaacactcaggaagtcaaccagctgttcctttttccttcag

SEQ ID NO: 296441 - DNA, 459 bp, Homo sapiens
gagacccaatacacatataacagcatctgtgtgaaaggtgggagggggggaaacagaaaacaaatatttatattaataattgattactttgcaaatttgatgaaaattaataattcaaagattcaagaaaactatcaacctcaaatataagaaacatgaagaaaaccacacaaagacacatcatgactaaaagtctcaaaaccagtgataaagaaaaacatatttactgtagtcagaagaatggaraattataggcctagaggaagaaaactaaaagtgggaatattctatagaaacaaagcaatctggaagacagttgaagaatgtctttaaagtacagaaagaaaaaaaaattcaaatagaactctacattgaggaaaaatatctttcaaattaaaagataaaataatgacactttcagacattaaaaaaacaccttaaaatgtatcattagaaaac

SEQ ID NO: 296442 - DNA, 575 bp, Homo sapiens
ttttgaaatatgaaacggacatgagatttcagaggggctgtggcagaacggtatgattaggctttgtgttcccacccaaatctcatcttaaattgtaatccccaggtgtttagagagagacctgacrggaggtgattgggtcatggggtcagtttcccccatgctgttctcatgatagtgaatgagttattatgagatctgatggctttataaggggctcttccctttttggtctttctctcacctgccaccatgtaagatgtgcctgcttctccttcctccatgactacatttcctgagacctccaagccatgtggaactgtgagtcaattaaacctttttcctttacagattactattcttgggtatttctttatggcagtgtgagaaaatactaacacaggctattttttcgtttcatataaattttaagttagattttctagttctgtaaaaaatatcattggtagtttgatagatatagtattcaatctgtaattgcttttggctgtatggctattttaaaatattgaatctttctttccatgagcatgggatgttttcccatttgattg

SEQ ID NO: 296443 - DNA, 477 bp, Homo sapiens
tacttgcttgatatctctggtggtgtgtggctggaggaccaggtatggagaaccctaccagcaaagagatgtaggaatgggcactgatatagcagtttggccgttttctgtagggctgctgtggtatgctgggggcctgctctactccctagtcatctcagattttccagtacctggaggtaacaacaatgaaggctgtataacagcaaagataactgcctgcccctctctgggagctctgtcccagggatttaccaaactgctgccagcccaaatgcacctgtagaaggtggctgaagacttcggttgggaggtcacctccagtraggagaaatgggaccagagactcacttaaaaaagaagtttggccatgttttcataaagcagctgtgctgtgctgaagaaccacttctgccactggttggcttggactctacaaagcccaatagctggaatagctaagttgcccaaacagca

SEQ ID NO: 296444 - DNA, 444 bp, Homo sapiens
attaatgactgcacaggcatcagatcttaaggtgacttgtttgggaacccctttttcttctgttctggttaatactttacttgtaactttcacgggtccccaccagtcctcagttcttaatcttatttcaaaaaactgtggtcataggaggctcagacgggttgtaacacacatcaggttggtcattccctgtgccacatactttatacttcagtggcattatataagcaagtccctttcaaagttcctagacattcttaatatctataaaacagaaagattgttttaatttgttcccttacctcagtaacttgatkaatacactgggtacagtcctccctgtggggaaaatcagctgaagtttttattgtacaagtccaaattctaaagagaatgagtcccacaatgagtttcctcgtgttttggcggtgggtagacaagtga

SEQ ID NO: 296445 - DNA, 577 bp, Homo sapiens
aaattgtatattcttcggggctttactaagaatatcatgtaaagtgttgagaaaaatttatgaaaaatattgatattctaatagcctcatccaacctgggaatttcagacccgtctttttgtaagaaagcaaggctaccatgttggtgtgctggacccattaactcrtcacttacattaggtatatctcctaatgctttctctccgcccaccccagcccaccccaggacaggccctggtgtgtgatgttccccttcctgtgtccaagtgttctcattgttcaattcctacctatgactgagaacatgcagtgtttgattttttgttcttgcaatagtttgctgagaatgatggtttccagcttcatccatgtccctacaaaggacatgaactcatccttttttatggctgcatagtattccatcgtgtatatgtgccacattttcctaatccagtctatcgcatgtatacatatgtaacaagcctgcatgttgtgcacatgtaccccagaacttaaagtataataattaaaaaaaaagaaattaaaaggaataagaaaaagaaaaaggaaataaaat

SEQ ID NO: 296446 - DNA, 584 bp, Homo sapiens
gataaaatggttttaaatatcaaagctgaagactttttttttaaccttcagccacagtgtccttttgacctccaaccttgtatatttaactcctcaataattctcttcacgtgaaatgtaatttatttttctaagacaaaaataataatttctctgctttccaaattatttctccaccagtactgatcatttaattttatcctacatttctacttggtatgaataattctcaatacttccctttctgtcatactccayatccagtccatcagcaattttcattggtacaacgatttaaatatatacattatcattcatttgatgtggaatcaataaaaatcatggatctgctccttacagtgtcacaacttgaaaaaaaacaatctataatgcatcagttttgtaattgagattctctggcatacatagcctatggtaagaattcagtaattttatatggagtatagttaattgcacaaaatacactgaatttaaagtagcaataaattaaagtagcagtaaattaaagatagacccacatgtagaaataataggttacttttaagacctagattaagaattct

SEQ ID NO: 296447 - DNA, 556 bp, Homo sapiens
actattgggtactgggattaattcctggrtgatgaaataatctgtaaaacaaatccccatgacataagtttacttatataacaaatctgcacatgtacccctgaacttaaaaaaaaagttaaaacaaaaggaaagaccatgatactaaggaattctcagggtgtggaataaactgaaggaatcaaaacatctgtttatgtgaaagcttttaatattccaggtagggagggagggtgtaaggtagttaatcttttataaggaatatagtttatggtagtagattttcataaaatttatttatataaaattaaaaacacccacagagttctaagacctttatttggcaggagaaaaataaataatgaacaagattttcatattatgtgtaacctattgatgaattagtaagcagtggattcatactggcatacctgagagatatcatggattttgttccagattgctgcaataaaataaatatttcaataaatgatgtcatgtaaactttttggtttctcagtgcatataaaagttatgtttatactatactgtagtt

SEQ ID NO: 296448 - DNA, 1702 bp, Homo sapiens
actattgggtactgggattaattcctggatgatgaaataatctgtaaaacaaatccccatgacataagtttacttatataacaaatctgcacatgtacmcctgaacttaaaaaaaaagttaaaacaaaaggaaagaccatgatactaaggaattctcagggtgtggaataaactgaaggaatcaaaacatctgtttatgtgaaagcttttaatattccaggtagggagggagggtgtaaggtagttaatcttttataaggaatatagtttatggtagtagattttcataaaatttatttatataaaattaaaaacacccacagagttctaagacctttatttggcaggagaaaaataaataatgaacaagattttcatattatgtgtaacctattgatgaattagtaagcagtggattcatactggcatacctgagagatatcatggattttgttccagattgctgcaataaaataaatatttcaataaatgatgtcatgtaaactttttggtttctcagtgcatataaaagttatgtttatactatactgtagttwactattgggtactgggattaattcctggatgatgaaataatctgtaaaacaaatccccatgacataagtttacttatataacaaatctgcacatgtacccctgaacttaaaaaaaaagttaaaacaaaaggaaagaccatgatactaaggaattctcagggtgtggaataaactgaaggaatcaaaacatctgtttatgtgaaagcttttaatattccaggtagggagggagggtgtaaggtagttaatcttttataaggaatatagtttatggtagtagattttcataaaatttatttatataaaattaaaaacacccacagagttctaagacctttatttggcaggagaaaaataaataatgaacaagattttcatattatgtgtaacctattgatgaattagtaagcagtggattcatactggcatacctgagagatatcatggattttgttccagattgctgcaataaaataaatatttcaataaatgatgtcatgtaaactttttggtttctcagtgcatataaawgttatgtttatactatactgtagttwatcactatattaactttttattattttgtataaatatttcagtaaagtttccagagtgwctgaagtttttttctattgttgttacagacatcttagtttttacattttaaatttatgagtgatgattatttttctaaagctattgctcacaaagaatgcaaattcacaaatagtattttgacaacagagctggagtaatatcataaaattaatgacaaccatgttttatataattacataaattctatatgacaactttgacttcatgttaaggaataattgcatagaatccgggcaaaattttaaaatgtaataaaataaaatttattaacaataaaagttattaataataaaagcattgcctaaaacaaatagatcaaccaggtaaaaagttcaaaaatatttgtctatgttaagctatagcatttcatagcatacaatggaaaattaaagaaataggaaaaagttaattgaatagattttcaaaaatgaaaacaatagtcattaggataaagtttaaatcatataaaaagaagactgaataaaatagatttaattttatggttgattaagatgttagtgcaagtt

SEQ ID NO: 296449 - DNA, 588 bp, Homo sapiens
atcactatattaactttttattattttgtataaatatttcagtaaagtttccagagtgactgaagtttttttctattgttgttacagacatcttagtttttacattttaaatttatgagtgatgattatttttctaaagctattgctcacaaagaatgcaaattcacaaatagtattttgacaacagagctggagtaatatcataaaattaatgacaaccatgttttatataattacataaattctatatgacaactttgacttcatgttaaggaataattgcatagaatccgggcaaaattttaaaatgtaataaaataaaatttattaacaataaaagttattaataataaaagcattgcctaaaacaaatagatcaaccaggtaaaaagttcaaaaatatttgtctatgttaagctmtagcatttcatagcatacaatggaaaattaaagaaataggaaaaagttaattgaatagattttcaaaaatgaaaacaatagtcattaggataaagtttaaatcatataaaaagaagactgaataaaatagatttaattttatggttgattaagatgttagtgcaagtt

SEQ ID NO: 296450 - DNA, 492 bp, Homo sapiens
cacaattaaaaataacaaaagagatattatcacagaccccaccaaaacacaaataaccatcaaagaatattcttaatacctctatacacataaactacaaaatctagaagaactggttacatttcagacacatacatccttccaagactgagccaggaaataactgaatagctcaacagaccaataatgaactccaaaataaagtyagtaataaatagcctcccaccaaaaaaaaatcccatgaccaggcagagtcacagttaaattataccagatatacaaagaaaagttggtatcatttctgctgaaactattccaaaaaagaattagaaggagaaactcctccccaaatcatcctgtgaagctagaatcattctgataccaaaacctggcagacacacccacacacacaaaaaaacttcaggccaatatctttgattaatattgatgtgaagctatcaacaaaatactggcaaactgaatccagcagcg

SEQ ID NO: 296451 - DNA, 482 bp, Homo sapiens
tcagctgacagaagagcccttaggctttgaatgaatatcagtggcagccaggcaatacatgtgattggcctggggtagtggtgrcacagggagagatttctttctttctggaaaggggagggaagagagataaagactttgtctggtggctcaggtgcccactcagccatagtagaacagagcaccaggtagattgataagttttgtgatactaggttctgactttcaggcagcatatctagacctgccccaaaccatgggaaactcactgctctgaagggaaggacacaaacgtggctggcttcaacacctgctgattgtatagccctagagccttgggtagaaatatggcaggtagacagtggttaccactagccttggatgagacccagtgctgtgctggtttcaggtctgattcagcaaagtcccagtggtggtggcaactggggtgcttgtgtcacccctccccaatctccgggtag

SEQ ID NO: 296452 - DNA, 482 bp, Homo sapiens
tcagctgacagaagagcccttaggctttgaatgaatatcagtggcagccaggcaatacatgtgattggcctggggtagtggtggcacagggagagatttctttctttctggaaaggggagggaagagagataaagactttgtctggtggctcaggtgcccactcagccatagtagaayagagcaccaggtagattgataagttttgtgatactaggttctgactttcaggcagcatatctagacctgccccaaaccatgggaaactcactgctctgaagggaaggacacaaacgtggctggcttcaacacctgctgattgtatagccctagagccttgggtagaaatatggcaggtagacagtggttaccactagccttggatgagacccagtgctgtgctggtttcaggtctgattcagcaaagtcccagtggtggtggcaactggggtgcttgtgtcacccctccccaatctccgggtag

SEQ ID NO: 296453 - DNA, 618 bp, Homo sapiens
atcccaaactcaaaattattagtagatatcatcacttctttgacaggtattaggtattttatattctgggatccagttttaagtaaggatgtcataaggattccacacacaaaatattacaaacattaaaatacttttaaaatatattacctttaaggcaaaattttgttttgtgaacatatatcaaataataaatataaaagtgtttatacacctatattcaatgagtcctacatcaaatatataaactttgcatgtcttttgcagtatatacttgcatattrttattcatgcgtaaagtgatagatttgtatttttaaattacaatagtaatttgataatatagattatacttaacactaaatgaaaaaagtacatttatatgtgaactctaatttcaaaatctaactcattacagattgtaatataaatataacatttgtagatctgatttaggtattcaacacacatgttagtttataatcataggtagagataatagaatagaaagtaaaacaaacttataactatgaataacaaaaaaagaaaaataaagatgtataccaaaggtgatgtaccaattttgctgtttatgataattgatgaaataacatatat

SEQ ID NO: 296454 - DNA, 1249 bp, Homo sapiens
atcccaaactcaaaattattagtagatatcatcacttctttgacaggtattaggtattttatattctgggatccagttttaagtaaggatgtcataaggattccacacacaaaatattacaaacattaaaatacttttaaaatatattacctttaaggcaaaattttgttttgtgaacatatatcaaataataaatataaaagtgtttatacacctatattcaatgagtcctacatcaaatatataaactttgcatgtcttttgcagtatatacttgcatattgttattcatgcgtaaagtgatagatttgtatttttaaattacaatagtaatttgataatatagattatacttaacactaaatgaaaaaagtacatttatatgtgaactctaatttcaaaatctaactcattacagattgtaatataaatataacatttgtagatctgatttaggyattcaacacacatgttagtttataatcataggtagagataatagaatagaaagtaaaacaaacttataactatgaataacaaaaaaagaaaaataaagatgtataccaaaggtgatgtaccaattttgctgtttatgataattgatgaaataacatatatwtaattctttggtttctgcagttctatttatgcagtgacatactctgaaatggttcaaaagctctattttatgtcagtaatggagaaattttccaaactgcatttttacttattgagcaatgagggaaggggaaatcttatatgtccatgtctcccaaggcwgctcacaaaggttacaatctatttctgttattgaggttttatggagataaatacctgtgctcctttcaaagtcctagatagataagtatgtctgtcaatttctagtcagaatctgacagaataaagtatgacacactgtttcagtaactgcccccttttattttcatttttatttttttaattatttgtgtgaagtctgacttcaattctgcagacattctgataatcagattatcagtaacagaacaatgcaactatttctttctctaatacttgcatatgtttagtaaaggaagttcttatttcataatatttgtattctagaataatggttctcaaaatattgtctatgaactagttatctatatcacctggaacttatgataaaaatatagattccagggccccaccagcctcctactgaatcttggagttgggtctcaaaagttaatatttatttttaaaaagc

SEQ ID NO: 296455 - DNA, 630 bp, Homo sapiens
taattctttggtttctgcagttctatttatgcagtgacatactctgaaatggttcaaaagctctattttatgtcagtaatggagaaattttccaaactgcatttttacttattgagcaatgagggaaggggaaatcttatatgtccatgtctcccaaggcagctcacaaaggttacaatctatttctgttattgaggttttatggagataaatacctgtgctcctttcaaagtcctagatagataagtatgtctgtcaatttctagtcagaatctgacagaataaagtatgacacactgtttcagtractgcccccttttattttcatttttatttttttaattatttgtgtgaagtctgacttcaattctgcagacattctgataatcagattatcagtaacagaacaatgcaactatttctttctctaatacttgcatatgtttagtaaaggaagttcttatttcataatatttgtattctagaataatggttctcaaaatattgtctatgaactagttatctatatcacctggaacttatgataaaaatatagattccagggccccaccagcctcctactgaatcttggagttgggtctcaaaagttaatatttatttttaaaaagc

SEQ ID NO: 296456 - DNA, 582 bp, Homo sapiens
tcaaaaggcagatttgcttataacaaaaggaaaccctatttttgtgaaccagaaatataaaaataaagcaaattgaaatcatatatctttatgaattcaagtcctaaatgagacagaagcagccaagagactaatgccaattacagttcttccatttaagacagaggaagtgatagatcttctatataatcccattaatgaaaggaacttgaaataagcctagttgttgaattttaactaagttaattttattaagaaaatggaarattatacctacacaatttgtgaaatataatttgaaatgaaacaaagttttctgcatgtttggtgattagatgtctagtatatcacagctgttctgaaatacctttatatactctatctagttctgtattgggggtctaggatccgagtggaagcaattgtgtaaatgttagagtgttttttcaaaggagtgaaaaaaagaaggacaaacagagagagagagagagagcctggataaaaaatataaatgaagcagaaaatctctaacgagaagtaaaatattcataaaaatatgaattaaaatccaaaaagcaatat

SEQ ID NO: 296457 - DNA, 390 bp, Homo sapiens
gatgcatttttttttttttttttggaactcaaaaggcagacaaaagrgtgaatgctgacaacattttgtctagatcccctttagccacccgttgccctcatgtctaacttctttgggttagtctctaacagctcacagctgctctctcttctgaagaattttccttgactgtatggtaggttcctcacccaggaggtgaaattcaccattcaggggaaacctacaaccaatgactgactgatggaggtataaacagaacagccctcttgtccaaaggggtattttttcccccagagtttgccatgaaattttaatggagctgaacgcactcccactgaaataataattttgtttagtttttattctacttcccttactcttttattcctt

SEQ ID NO: 296458 - DNA, 1125 bp, Homo sapiens
aagttattgaaggaaattaaaaatgctactctaatgaacatacaaatgataaaaaagcaaaacagctttattgctgatatsaagaaagtctgagtgatctgaatagaatatcaaaccagctacattttcttaagctaaagcctaatccagaacaaggccttaagtctccttagttctatggaggctgaaagaggtgaggaagctggagaagaaagttttaggcaagcagaggttagttcataaggtttaaggaaagaagccacctccataacatacaattgcaaagtaaagcaccaggtgttgatagagaaactctagcaagttatctggaggctctagctaggaaactggtaaagatagttacattaagcaacagactttgggtgtagaataaacagccttctattggatgaagatgccatctaggattttcatagctagagatgagaagttagtgcctggcttcaaacagtcaaagaacaggctcacgctcttgttctgggataaagcagctgctgactttaagttgaagccaatactcactttcctttctgaaaatattwaagttattgaaggaaattaaaaatgctactctaatgaacatacaaatgataaaaaagcaaaacagctttattgctgatatcaagaaagtctgagtgatctgaatagaatatcaaaccagctacattttcttaagctaaagcctaatccagaacaaggccttaagtctccttagttctatggaggctgaaagaggtgaggaagctggagaagaaagttttaggcaagcagaggttagttcataaggwttaaggaaagaagccacctccataacatacaattgcaaagtaaagcaccaggtgttgatagagaaactctagcaagttatctggaggctctagctaggaaactggtaaagatagttacattaagcaacagactttgggtgtagaataaacagccttctattggatgaagatgccatctaggattttcatagctagagatgagaagttagtgcctggcttcaaacagtcaaagaacaggctcacgctcttgttctgggataaagcagctgctgactttaagttgaagccaatactcactttcctttctgaaaatatt

SEQ ID NO: 296459 - DNA, 285 bp, Homo sapiens
tgtttggggaacctctcgctggtgcaagataaatggttgcagtaatttgaagagtggactcaaatgtaatgctatttcctcaactttgtctcccaatctcaagtttctgacctcagcttgaaaagggcttctataatctgtccagtttaatttyctgctcatgacttcaccttgccctttttgtttatttgttttaatgagaagcctctgccaatgcctaactgtaaattttaaccctcctttgattagcatgttcaggtttctctcctacttcaaattaacctc

SEQ ID NO: 296460 - DNA, 543 bp, Homo sapiens
aataaaacaattgtaacagaactaaagaatatctcaaaaatactataacatatatgaagcctagcattgacagtgycatcagaagactggacacagcagaagaaaaagcaacattgagtttaaagatagatcaatagaatattccaaaactgaaatgtggaggaaacatctttaaataaaatatgcacaaactttgggacaatttccaaaggtatcacacattaatattagtgatatctaaaaaaaatagaagacagaacagagctgcagaactattcagttaataatagctgtgaatttttcccaattaaaaacacataacagatataaaaaataaggaaacaaatatgaaaacaaaataagacaagaccaaaacacctgggcatattatattcaaactgcagacaaactaacacaaagaaaatatcccgaaagagactgtggaaggagttgagtaggaaacaccttagctatataagaattacagcacacttctcatgataaaccatacaagcaaaaacgtagtggaatgacgttttaaat

SEQ ID NO: 296461 - DNA, 543 bp, Homo sapiens
aataaaacaattgtaacagaactaaagaatatctcaaaaatactataacatatatgaagcctagcattgacagtgtcatcagaagactggacacagcagaagaaaaagcaacattgagtttaaagatagatcaatagaatattccaaaactgaaatgtggaggaaacatctttaaataaaatatgcacaaactttgggacaatttccaaaggtatcacacattaatattagtgatatctaaaaaaaatagaagacagaacagagctgcagaactattcagttaataatagctgtgaatttttcccaattaaaaacacataacagatataaaaaataaggaaacaaatatgaaaacaaaataagacaagaccaaaacacctgggcatattatattcaaactgcagacaaactaacacaaagaaaatatccygaaagagactgtggaaggagttgagtaggaaacaccttagctatataagaattacagcacacttctcatgataaaccatacaagcaaaaacgtagtggaatgacgttttaaat

SEQ ID NO: 296462 - DNA, 567 bp, Homo sapiens
tgatgaagctgaggacactgagtttgtaaactctgatgaaccatttttgccagaagaaacagtttctccatccccagtagtggcaacttccctccctgatccacattgccatcagcctgtccaacttcgtctgaggagataaactctgtgctgcctgaggcaacagtggtggcttcccctgaagcagttgcagggcaaaataatgtggattctcctcaggagccacccccaacacccctgtttccttctagacctataactagacataagtcccagtcagagtctagtggtaaggttgagagtgttaccaatgaggagatgtgctacactcgaaaagaacttcctgagttttctacttgataaaacagaaatctgaagaataggcatgggaaggatattaagggtgtgggataatgatggaaggaacataaaattggctgaacttrttgatttgggcccactagagactctgcatttgatgttgcagctcaggaagaaaaaaaaaggttctaatactttatttgcttggttagctgaaatatggattaaaagatgggagactgtgag

SEQ ID NO: 296463 - DNA, 580 bp, Homo sapiens
atcagtattgtgaaaatgaccatacagcctaaagcaatctacagattcaatgtaattcccatgaaaatgtcatcatcattcttgagagaactagaaaaataaatttcaattttatatggaaccaaaaaagagcccacatggacaaagcaagactaagcaatatgaacaaatctggaggcatcgcattacctgacttcattactatgaggtaatagttaccaaaaaaacatgatactagtataaaaataggcatgtagatcaatggaacagattagataacccagatataaagccaaatacatacagcaaactgatcttctacaaaacatacaaaaacataaagtggtgaaagtacactttattcaataaatcatgctgagaaaactggcaagccacatgtagaattaaacctaatcctcatctctcaccttatgcaaaaatgaactcaaggtggatcaaagacttgaatctaagattgaaaccacaaaatttctagaagataacattaaaaaaacttttytagacattggccgaggcaaaaaaaaaaaaaaaagaactatgactaagaacaaagaaacaa

SEQ ID NO: 296464 - DNA, 588 bp, Homo sapiens
taaaataacagctggaaatttcaacactgcactttcagcactggacagatctttcagacaaaaatcagcaaagaaacatcagccttaatcgtaactacagagcaaataaacctagtagatatttacagagcatttcatccaacagctgcagaatacacattattatcctcagcacatggattattctcaaggataaaccatatgttagatcacatcaggttttttttttgaagtgcatacatcatytgaagtgcctacatcaaaaaataagaaaaacttcaaataaacaacctaagaatgcatattaagtaactataaaagcaagagcaaaccaaccccaaaattaatagaaaaaaaatagctcagaggagagacaaatgacattgaaacgaaaaaagcaatacaaaagatcaatgaaacaaaaagtttttttaagtcaacagaagtgacaaacctttagtcagactaattaataaaaaaaaattaagaaagagaaaaagagggaagactcaaataaataaaatcagagacaaaaaagagacattacaattcatactgcagaaatccaaaggatcattagttgcaact

SEQ ID NO: 296465 - DNA, 509 bp, Homo sapiens
tgtgttttccttttcattgttttctctctgtctctttaatttacaagtggctcttaaatattttgaatactaatcctttgtcgcttttatgtgttgcagaaagagcacgctcccgttatttggtttctgtgatgtgaaagttaattcccacatatctggaattgttctcagttgttttactaaaataagaacagtacttgcacagtactgatcattgccaaggcacaaactatactgactactagtaatgctttgtaactaygggtctaaggagttctaggggtgatttgcatgtcaacattatttattgataaattgaagttgatgatttgcacctgatcttcatgaatgaattggagggctctgtcattggggctggttatgtcgcagaaatatgtctacatgaaaatcagaatataagaaatcctgactgagactccattttgggctctctggttctgtgattttatgtgcacacataggtggttactgatatgagaaaaaagtgt

SEQ ID NO: 296466 - DNA, 554 bp, Homo sapiens
gcctggcccatgtcttctttattttacttatggttacagcagtagatattgragaagacagaggagatttatgagataccttagaaggatttttgaaacttagtagtgtactaactgggcagggataaaatgagttgggaattagaaataggccattggaatgagtctaggataagagactaacattaagttattatctgcatttacttggaaaacaaaataaggatattccataccaatattcaagtgagaggcttaaggaatacaaagagaagattgttttttaaaaaccaccaataatatgttaggaaagtgagaggagtccaaaaatgagatgtggaaagaagcactaaacaaataaatggagaaatacgagaaaaactcagtaaatgagagaatttaaggaagaaaattattttaaggacagaatgataactgtgttcaacatcaaaattcaatttgataaatactagagtattcctggcataacattaaaatggctgagggcaacattatttaaaacatggcattatttaaaatatacttaatagctt

SEQ ID NO: 296467 - DNA, 604 bp, Homo sapiens
attggtctgattaatgtggactactatttccagatgtatgctggaggaaaacagaatatgtcatccccaaatgcctcttcaacataagcttattttaagctgaagacaatcaagaaggagcaaatgcaggaaaaggtctctctaactttttctgcttaaacacaggataaaaattctcctttactggagacaattctagagtattatcagtccagacttagcaccagacggatgtgcaaacaaaccttactccattagtttatttccatatatttaccttcctaatatttcccacttttgaaagcctaaaactacttcactttgtactgtaatttctctaaatgtactgttctttgttgaagatgctagataagccagggttttaagccatcactttgagttacttttagatgaagtttatcccctgtgatgtgagctgcaagtattaatacactcttgttgcttctcttgtcagtttrttttctgttggagttccaacagaaaacctaaaatgcgtagagttaaagttttgcctcccttatgatgctctgtctttgagctttcagaattgtttcccctcttcatgagaatatacttttaggac

SEQ ID NO: 296468 - DNA, 568 bp, Homo sapiens
tataaaattgcaattttaaaatctaatgaaataatggaaatagccaataaacttcaatggatgctcaaacttttagataaagttgtgatggatacatttataatggtgggataagactgataaccacatgaacctagtgatcagtcttagtataacaaataactagacaccactacattatttgactcctattatgatgcaataggaaataaacaacatcatctataaaatacttagtcagaatattgcttcattatacaataaagcctatagatctatctgaagtttacaggaaatatggggtttggggaatgggtataatagtataaaaagtaaaagcagaccatgaagaaagaaaagtaaaatttataatataagtcattttataggacaagtgacctagtttaacaaatcaatggcattaaaaaaaagtgasgattctgttacagagtaaaagagccgctagagacctaataaccaaatgtaatttatgggatttatttgaatcctgatttaaaagaaaaaaaattgggaagccacctttgaggtaactaggaaactcaaatat

SEQ ID NO: 296469 - DNA, 574 bp, Homo sapiens
atcatatcagtaataataatagctaatatttattgagttcttaacatgtgccagtccttggtttaagccctttcagtttatcctctccttacacatcagcaaggtggtagcttcaagtcacagaaaaaatataatactggctgagtaggaaaagaccaacataatatgtgaaaatcttcaacatgaacatatgactaagacacatttattttttccagtattttattatgaaaaatctcaagcatacagaaaatttgaaagaatcatacaattaacactcatatatgcaccacctagatcctacaaatcatatttgcatctttgcttgatcaaatttctatacattcaggaatccatcgatccatcttatttttaatccatttttaaagtaagttcaagcacctgattttgtcactataaccgtacagraaaaaaaaggaagccctgtttagacagaatcttagaaaactaatgtttttatcataccacaaatgggcacttatttttaatagtctatttaatagattctaggttctaacagactctattagataccagttaatgtctaaatcta

SEQ ID NO: 296470 - DNA, 574 bp, Homo sapiens
atcatatcagtaataataatagctaatatttattgagttcttaacatgtgccagtccttggtttaagccctttcagtttatcctctccttacacatcagcaaggtggtagcttcaagtcacagaaaaaatataatactggctgagtaggaaaagaccaacataatatgtgaaaatcttcaacatgaacatatgactaagacacatttattttttccagtattttattatgaaaaatctcaagcatacagaaaatttgaaagaatcatacaattaacactcatatatgcaccacctagatcctacaaatcatatttgcatctttgcttgatcaaatttctatacattcaggaatccatcgatccatcttatttttaatccatttttaaagtaagttcaagcacctgattttgtcactataaccgtacagaaaaaaaaaggaagccctgtttagasagaatcttagaaaactaatgtttttatcataccacaaatgggcacttatttttaatagtctatttaatagattctaggttctaacagactctattagataccagttaatgtctaaatcta

SEQ ID NO: 296471 - DNA, 442 bp, Homo sapiens
caggagatgagtagaaaataaaggagtcatgggtaatacagacataaccaatatcaygctacagaaacaaccaggatatggtattggtttggtatcattttggtggacttaaatgctgccagcatgtcattgcaggcctgactaaattctcaactatccttccatcgccacgtttttagattaaaatcctgaagtggggcatgtgatgagctgaacctaaaacacaggcttacatttgaatttacagaagatggtaagaggaaatattcctcccacccaccctcagcctagataaccattgttcagctctctgtcattgtagattggttttgtattttctagaattttatataaatggaatcttagcatatgtattctttttttatctggctccttttgcacagcatgatgtttttgaaattttttccatgatattctatgt

SEQ ID NO: 296472 - DNA, 442 bp, Homo sapiens
caggagatgagtagaaaataaaggagtcatgggtaatacagacataaccaatatcatgctacagaaacaaccaggatatggtattggtttggtatcattttggtggacttaaatgctgccagcatgtcattgcaggcctgactaaattctcaactatccttccatcgccacgtttttagaytaaaatcctgaagtggggcatgtgatgagctgaacctaaaacacaggcttacatttgaatttacagaagatggtaagaggaaatattcctcccacccaccctcagcctagataaccattgttcagctctctgtcattgtagattggttttgtattttctagaattttatataaatggaatcttagcatatgtattctttttttatctggctccttttgcacagcatgatgtttttgaaattttttccatgatattctatgt

SEQ ID NO: 296473 - DNA, 529 bp, Homo sapiens
cggagcatttttgatataagaaaatcctctcttcaccaatgaagtttctgaaactccaaagcagtgacttactcccatcattttatgagcattgagtgtgcatgcagaaactcccacacgcaagacttccttcagctctctctaggtttgtgacctccttgttctcagagaatactattacagtggaaatctctggtaaggtattggacccaacacttaagcaggtatctttggacaagtggataatcttctcaggagcctcggttattttagaggctcaaggtctactcactgtatatgccatgaatttactgccatgctaattttgatgggggaaatcattctaagcctccttgcatttagtttgagtcaaggataacacaaccttcttcttttctcatgagattggagaaaatggyggcgacaataacaatttcaaattgtcttccctcctttaaccacctcaaatattttaattcattcagacgagccttggaccaacaactgcggaacaaatttgagtccagtg

SEQ ID NO: 296474 - DNA, 570 bp, Homo sapiens
tacaaaacttatgttgtttttatttaatttttaaatttttaaaattaaataagtgactcgtatatatcttgtaaaaattaaaactttacatataaaaaagtccctcttgtctcactaaaattccaatcctctcccyaaagtatctatgttatcactttggtatttatgactccagatctcttcctagggatttaaatacatttgttaaaatagctgtaagacaagtcagcttttagaatattttgtaggtaaactaaataacagtgtgcttccatctgcaattttcctgcttaatttgcattgaagttcttttcattctgtagtatgaaatgtatctaatttatgtacaaaggtacaacaatacaaaatatgtaaatgcaagtgtttagccacatctatgctagttgtcatttcaatagttcactattttaagcttttggaaaaaatgctgtaagaaggattattgcacatgcttattggtgtacttgtgcaaaaatttctttaagataatattaggtgccaagtactgtgtttagtgagaaaggtgttattattacatttgcattgtac

SEQ ID NO: 296475 - DNA, 1167 bp, Homo sapiens
agggccaatattcttaacaacttctatctactccttgctttgtaaaaaattaatatttaaaaatcgaaaaaaatgtatayatatggtgtacaagatgctgttttgatatatgtatacattagggaattgttaaactaattaacgtaccctttaccttacatactagccattttttggtatgtgtggtgagaacatttataatttactctcttagcaatttttactccttgctttgaaacgacagaactactggatcaaactgtgcccacacttaagtctcaacatatactgtccatttgcctccagaaaagcaatagtaattcacattctcactaagagcgccatttgtattgttatttccctagcatatccttccaaggaaagaagctggctttaagtaaaacagtaatgaagaatgaagaatgaagaaaggaagaatgaagtaatgaagacacagtaatgaagtaatgaagaattcaatatatctttagttattgatgatatattcatcagcatatatatctttagttactgatgattattagaacctgcatgttaatgctcctgtgagaaaggcttagtgggtattgtwactaattaacgtaccctttaccttacatactagccattttttggtatgtgtggtgagaacatttataatttactctcttagcaatttttactccttgctttgaaacgacagaactactggatcaaactgtgcccacacttaagtctcaacatatactgtccatttgcctccagaaaagcaatagtaattcacattctcactaagagcgccatttgtattgttatttccctagcatatccttccaaggaaagaagctggctttaagwaaaacagtaatgaagaatgaagaatgaagaaaggaagaatgaagtaatgaagacacagtaatgaagtaatgaagaattcaatatatctttagttattgatgatatattcatcagcatatatatctttagttactgatgattattagaacctgcatgttaatgctcctgtgagaaaggcttagtgggtattgtctctggaggaacctaacagtgtcctgtaaagtgaaacaggaatgtgttccattcttacctactccacatttctttactgtgcttttaagattttataaaactttttaataagctacc

SEQ ID NO: 296476 - DNA, 557 bp, Homo sapiens
agaaaagcaatagtaattcacattctcactaagagcgccatttgtattgttatttccctagcatatccttccaaggaaagaagctggctttaagtaaaacagtaatgaagaatgaagaatgaagaaaggaagaatgaagtaatgaagacacagtaatgaagtaatgaagaattcaatatatctttagttattgatgatatattcatcagcatatatatctttagttactgatgattattagaacctgcatgttaatgctcctgtgagaaaggcttagtgggtattgtctctggaggaacctaacagtgtcctgtaaagtgaaacaggaatgtgttccattcttacctactccacatttctttactgtgcttttaagattttataaaactttttaataagctacctttgtaccactgtactttatttatcctgctgctggtataggaaatgggagagtgagaactctctcatagackgaaaagatggtattgtcatatatgtgtattttctgttgtcaaatacatgtaagtggctgtaacagaaaactggacccactc

SEQ ID NO: 296477 - DNA, 1066 bp, Homo sapiens
aatcctttttgtaataagcaaaattatatataaacaattactctatgtagagaaatgtataatatagaaagtatatcactcactttatttcatttaatgtacatcacaatgatgagagatagaagtagtcagggacgattttttattgccaattttgtgrgagagtagacatcaaaaatacttgggtaattgtaattggcatttaataagaatgtggaaaggcaaaatgtaacacaggtcttaatgcttcttactccacattccttttgcttaaatttactgctaaataaaataaaactttgccaaattaaactttgaacaccatgtataaaagtagatatgtagaatttcaatataaaaaagaacaaagaaaatttaatttagctggaatacaaaagctagttgaaatctcaattaaaatactactgaagatgtatattattacattttactttataattttactaattaaaatttatctaactgtattgtatgatcagcttccttttaaagttatttttacaagaatgcacattccgctccaagtactttagccattatttttcaggactttttgatatatcaacatccttggaaaaaatcctgacaataagacagtgwgttcacctcatgaatgcttttgataatttttttwaaaataaatattatttctaaaatagtttagctggttttggggggatttatcaatcaacggaattgacatgattttacaaatcagtttatatattgtcatgagtctcacttatttgttgtacatttgttaacatatctctgaaaagtaggcagttttattgtcagctgaatggaagaaatttcctcagagataaaaaatatatttgaagatctctttccaatcttttttgattccttaaataaaattaattgcaatcattagtataagaaaaaaatatatacttccctattttgtctttgaattggtgtgaatgtagtgcatacggtagtataatggaagaaaatattcaaaatagatgaaagaaaaatgaagaattatgtatatatggtacatctttaataggttgatatt

SEQ ID NO: 296478 - DNA, 626 bp, Homo sapiens
tgtcattcagctgtatttaaatttactactttacatggatgctcagataaccaaaaccatgactattaaatctattaaacactctatgaccaaagataatagcataatatttgtggtttattcaaggaataagagatattttgctgtgattatagagtctatgtaaattatggggaatgccataagtaaggccagaaaggaagcttggagccaaatgataatggactttgaatgttgtgatggttgcattgtttaatgtggagtcaattatttttagtttgtattatttcatttgtctatttgtttgmttttcactatagaagtgctatgatgttctaacacagtgtgaaaaacagactacttgggtttggagaaactggagtcagtttttggcaagcccaaaactaaaataaactatggaggaaaatcagagcaagggttacacccaaggaattctcttcaaagaggcatataggaattctgtggagcgactgaaatgtttcatatcttgatagggatttccatctgttttgtatcttcagggattacacaagtatatgcttttgtcaaaacacatggcacagtacttttaagatgtgttgattttactgtgtgtggattttacc

SEQ ID NO: 296479 - DNA, 557 bp, Homo sapiens
agagaggagacctggagtggatagctcctttccacaggcaggccatcccaacatttgtccagctctcagcagacatagctgggcccggattccacacaaatgaaggtgacattgacttgactcctttttcaggtgatgtaaaccatatttaagatcaaatccttcacatttgagctcagagattggaagctgcttatttcctttccatatttagctactaagttattcagtgtcagtgagaagaaatttggctgtcttatagcttcctactggggtccttgtctacttgtattttttctctggataccttgcaacactagtcctctgttaaacaaacacctgtttygttaaagagtgtcttgtgctttttagtctttttctctttctttcaaattggtttaaatacactgctggtgggtcactgtagaaaagagtttgatgatttctcaaagtacttaaaacagaattaccattcaacccagcaatctccttactgggtatatactcaaaggagtattaatcattctaccaaaaggacatacacactcatatgttca

SEQ ID NO: 296480 - DNA, 539 bp, Homo sapiens
tttcatgtatgcagagtaatgcagtacatattattccatttgtgaacatagtatagaatataatgcaayaaagagtagatattgttttgtataaggcctcttttgctcagcatgattttgaaatctatccaggttgttgagtttatcagtaatttgttcctttcttctgatgaatagtgttctattaactgagtatgccacagtttgttcattctcctattgattgacccctgaactgtatacaatttgggctattattaatataacttttgtgaatgatatttaaaggtcttactggaaacatatgttttcatttttcctggccgaatacttgagagaattgctttgtcacatggtagatatattgttagtttattaagaaactgccagaactttttctgaaatggttataccattttacactccagccaacaatgtatgagagttctggttgctcacaactttgtcaacatacagttttgtcattcttttaattttagccattctcatggatatgaaataaaatctcattctgttag

SEQ ID NO: 296481 - DNA, 1072 bp, Homo sapiens
taacaaggtttgcccatctacagtttattttagggaaaggatatattaagtcaaaagtcttagagtcaggatacgtgtcacagccacaggctgacttacaacaagaggttacaaagtttggaggaggttacaaagtttggaggaggctccaattgtccccctctgcaaggccctcaatggccatgctttgtcacttggattggaaaccaccaacatggagccagtaccattgaccagcagtcagtaccatgcagatacatctcatacgtcagtgaaacatctcaggcaaattccagaattgttagaattaaccctcagaacacaataactgagaagactmttttaaaaatatccattattttattccactgcaccatccattaaaaccaagcttcagtcttccatcttcgtggcctttcagagcaggctcctgtgccactgccatctcatattatcatattattttttcatttgcttacttttcaaactatctttttctaatccttcctaaataggccaagagttctgtaaaatgtttttcaatattattttctatataggcaaatgtatcagataatttcctatctccaccacttaawctttcacggttctcacttatcataattggagcaggctatcagcccctcctttggagacctacacaatccaaaactggaaggtggagtaggacctaccaatctggatttaacaaatcctgaatggattccaactcagcagtgtaaggatgataatccttgaacaaatgttttttcatactttcccaatcatggaatggcagatgattcattaaaaataactaaaacaaggttttacattcacattctgataatttgaggcgacctatcaaactctggataacaagtgttttcaaggtcccttagccawtctaatgtgcagtgtttgagaaacgttgctctggatccagcttgtccaaatttacaaagcctactggaaagtgaccttctcttcccacaaatctcaggaaaagaccttctgctcacctaaaatgggtaatatgccattcctcaagaggagagggctaactgatgta

SEQ ID NO: 296482 - DNA, 537 bp, Homo sapiens
ttcaacacagctgtctatactttgttgagcctaagcataaaaatgaataatttcctctgtatctttgagtcttcattctgaaggctcccgtgcatacatgttaagtacatttgtattttttctccaattaatctgccttttgcaatttgatttttcagtgaaccttcagagagccaagcctttggcccctacacaggtaaatattatttccagtacaccaacaactctgcatggcttaagtaatccatagaaaaataaactatagcaagtttataaaatagaaaataaactacaaatatgattacaaaatgctataccagtattcataattggtattttggtgcattcaaaactagaaaagatccagttcccagcaggcatctcttccaggaaaatgagctgaatcaaatcagatgaaccatttgtcttagtggtgataaggcctacttttttttaaatctaattcagtgtgtrtgtgtgtgtgtgtgtgtgtgtgtgtgcgcatgcgagcacgtgggtgtgtttgtttccatactg

SEQ ID NO: 296483 - DNA, 570 bp, Homo sapiens
gcttagtacatcactgacaacttcaattgagattgtgatttgttagatataattttcttgaaatccttgatactttcattaaggcctactatatgattttgtttcattagtatgtgctaatgtaggaatatgtatttaggttggtgcaaaagtaattstggtttttgccattacttttaatggcaaaaatatacaccttatttacttcactgttttcccactacacggtacatctgtaatgaatctttagcatatggcccatacctgacacaagtgtactaaagaaacatttattaaatcaattaaatgataaaattaattgaaagaatttaaggaaattatgacaaaaagatccactgccagtgagtatcatggtatcatgtacctaaatacaaattgatcttaattttgtattaattggcttcaaggataaaaagctacaaactaaagcatatttcagagaaaaaaaatagggtttgtaaagatatctgcttccagtaatgggagaataatctgtttcaacaaccatcctcctgggaaaatctagataaacaaaaacaaaaaaaatca

SEQ ID NO: 296484 - DNA, 550 bp, Homo sapiens
aagttattctcagtggaaaaaatccatactgttcaactcataaagacttatgagttatttctaaataagaaataatattgtaaaaattattacatttcaacattaaatgttttagaaaagaaaaacaaaatatggtcacgaaaataacaaagaaaaattttaaagaattaaatcaatagcattatttaaaaattctaatactttgggaggttgcagtgggaagattacttgaggscaggagtttcagatcagcctgggcaacatagtgagaccccatctctactaaaagataaaaaatagccatgcatggcgtcgcaagcctgtagtcctagctactccagaggctaaggtgggaggaacccttgagctctggagatctaggctgtagtgagctacgattctgtcactgcactccagcctgggaaacacagcaagaccttatctctaaaaaataaagtaataaaaaaattcacacctagttattttatacattttttaaatatataaatgatactagattaatatatgaataatgataaaatactatgct

SEQ ID NO: 296485 - DNA, 583 bp, Homo sapiens
gatgtttctgctctctcatgttcagtgcaaatggccttgtctagttgaaatgataaatgatactgagaaatcagcatgctattttgatgagtcttctgattagagaataattttagctacagataaaaccattttatgattttgtcaatcttttctgctatcacttgattaaaatattttcaagaaccttaaaatatcaaaactttagaaattaacactttctagaactgcaaaaaatatgttctagataaaaagtatattctagagctcctcaaaattatattctgtaacaaacatgggtccatattctttagtattcacaaggacgaaaaataatataagttaagcatatttttcattcaaatttcttgctcaaatgaagtcatctgakgcacaacatggctttttggagcaactgtactactaaaattatatttgtccagatgtacaaatgtttaaagtattataagcatataatgtttactctttgtgtctatcaaagtcagaaaaagagttctaaaaaccagggccatattctatcttaaattttataaaaacacaaatcagataaatgttttcaatg

SEQ ID NO: 296486 - DNA, 585 bp, Homo sapiens
ctgtgcaggtacctggggattgatcgtatatcagcactagttaaaatgtgacctctaggcctgaaggcagcgattaccagaatctgaagacagaatactaggtgtagagagccacgtgacaggagctgtggcttttttcagagggcaggagccagcccaaaatgaccaggggattaaaacaatgagctcactctgcttcctccctttgattctctgtgctgtgcctcataaacagtaggcacattcccacttcacccttgcctgggctgtgtttcctgcctggaacattctttccctaaatatccactgagtatctgcttcaccatcattttgagaattgctcagatattatcttctcagtgatgaccatctcatttaaaattccaactcccycttctcaccttgtacttccatcctcttctctatttttcccagtaatacttacattgttacatgttatttatttgtttttagtgaatgtctctttccctcaattagaatgtaagttccatgaggaccgttttttatctttgttcattgctgagactccagggcctaaacattgtctggtgcccagcacaagtt

SEQ ID NO: 296487 - DNA, 577 bp, Homo sapiens
cagtaagccttcaggcaaatacagaatattataacactgtaattgtgatgtgtaaactgctcataccttgagtaggaagactcaaatatgaacctataaaaatataataactacaaaaacatttaaatacatagatagtataataagatgyaaagagaaacaacaaaaagtttaaaaatgggaggacaaaggtaaagtgttttctctttgcttgttattttgtttgtttatgtaatcaaggttaagttgtcaacagtttaaaataacgggttacaagacatttgcaagcctcatgataacctcaaatcaaaaaacatacaacaaataccaagcaagaaattagaacataccaacagagaaactcaccttcaccaaaaggaagatgggaaagagcaaaagaaggaagaagagaagaccacaaaacaaccaaaataacaaataacaaaatggcaacagtaaggccttacttatcaataataacatttaatatacatggactacactctccagtcacaagatatagagtggctgaatggatgaaaaaacaaaactcaatgacctgttgccaaaagaaaca

SEQ ID NO: 296488 - DNA, 513 bp, Homo sapiens
gacagaaaatcaacaaagaatcattggacttaatctgctctatagaccaaatggacctaatagatatttacaraacatttcatccaatggctgcagaatacacatttttctcctgaacatatggatcatcctcaaggatagaccatactttaagtcacaaaacaagccttaaaaaattttaaaaagtgaaattatatcaaatattttataccacaatgaaataaaactagaagtccataacaatattaatttgggaaactatacaaacacatggaaattaaacaatatgcttccaaatgatcagtgggtcagtgaagaaattaagaaggaaattaaaaaatttcttgaaggctgggcaacataccgaggcctcacctctactaaaataaaataaattaggtgggcatgctggtttgttcctgtagtcccagctacttgggaggctggggagggaggatcacttgagctcaggagagtgagactgcagtgaaccatgatcttgccactcactgc

SEQ ID NO: 296489 - DNA, 585 bp, Homo sapiens
tttagggagatcaacttgcatttcttttgctacagttaaagtgaaagaacttgtggtgaaaacacacatttctagtatagtaacagaacttctactcagaatttttttaaaaacttatttttgaaattttagttgctgaaataaagagtaagatgaaatcatagatatgtacagatagttggcataggagatcccttctgactcttctgagcttgaactcaccagagaaatattttgaaccctgatactcactaaatgaagattgttttctctttctcttgggaaaacggtgaaatcaactgttatttgtaggtaaatcacacaaatatatgtatgttttttgtctagaatagaaattatacatactgtagtaagggaaaatatayaacatttcataattaccatgagaatcctttttgtttataaattatgcctacttgtaatttaatgtatctgtattcctcaggattgactaggcggtattatagtatcaaattaacacagagatcttggcagcttaatgcaataaaagctgtatttcaccctattgcatgtgagacacatttagtaaaaatatgtaatgca

SEQ ID NO: 296490 - DNA, 608 bp, Homo sapiens
ttcatgcaattgatttcttcctttgatcattttagatgctctttcctgcttttcttttttttcctctgctttttctggaaaagtactgataaaaaactgcacataattaccttggggctatataaaattttggaacataactttattgttttgttttcaatatccctcttgatgatgcctagggtgggggtaggtggaaagagaggaatataggaatacaggaacaatgacacttaatgtcttcatgtatgaacaacaacaaaagatctaacataactaatagaacatatacatgtataatgtaactatatttrcacatatgtactaaatactatacataaatacagctcagataatttttcactaaagacattatcattcacaatctactatttgctacagtaagacccaaggagaaaccttgggagaccataatcatcctctatggatgattttatctatattttagccctttgtaaaatcattgtaaaacttcacattttttaaagctgttgtctatatttgttctactgacagacgacacattataacaaaaacttagaaagctggaagagatgttggctagatcacagtaatgagaaaacttt

SEQ ID NO: 296491 - DNA, 608 bp, Homo sapiens
ttcatgcaattgatttcttcctttgatcattttagatgctctttcctgcttttcttttttttcctctgctttttctggaaaagtactgataaaaaactgcacataattaccttggggctatataaaattttggaacataactttattgttttgttttcaatatccctcttgatgatgcctagggtgggggtaggtggaaagagaggaatataggaatacaggaacaatgacacttaatgtcttcatgtatgaacaacaacaaaagatctaacataactaatagaacatatacatgtataatgtaactatatttgcacatatgtactaaatactatacataaatacagctcagataatttttcactaaagacattatcattcacaatctactatttgctacagtaagacccaaggagaaaccttgggagaccataatcatcctctatggatgattttatctatattttagccctttgtaaaatcattgtaaaacttcacattttttaaagctgttgtctatatttgttctactgacagacracacattataacaaaaacttagaaagctggaagagatgttggctagatcacagtaatgagaaaacttt

SEQ ID NO: 296492 - DNA, 573 bp, Homo sapiens
aagctcaatcacagctatttaaaggtatatatgttaaaatcctcctaggtcataagaagattaagtatactcaggtaaagaattatggttcatgcttgtaaaccaacattttgggaggctgagatgggaggattgcttgagcccagagttccagagtttgaggctagcctgagcaacaaagcaggaccctatctctacaaaaagaaaaaaattaaaaattagctgggcccagyggcacgcatctgtagttcagctattcaggaggctgtgcccaggaggttgagactgacttgagccatgatcacgccactgcactcaaccctgtctcaaaaaaaaccccaaattcttcacaaaacccaataagtaggcccaagtataggtatcaatcagttttctgtagtcagcataagataaacactgaaattaactaaaattaaagatccaaaatttacatactttataacttctacttacaaactttcctacataacgtttatctttataaatcccctgctaaactccaatggagaatttatccaatgaagacgaacaaatgctgagaaagtgaattca

SEQ ID NO: 296493 - DNA, 556 bp, Homo sapiens
gttttcattaatgatgcaactgtctaaggtttgaccgcacaataacagacattcttaatctgaaaactgtcaaagcaataataacctatttatgacaaagagaaaccttgagttattgaaattkctgggggcaggtaagaggtgtgtgggctggggaggtttatacagcacagacatttgaaaagggtcattaatatttttcagcttacaatggttctagaggaagactgtttttgaattcacacttactagctgtgtgaacttggataaattttaaagtctttatcaaagtttattttgctgtaaagtgaagatataataatatagtacatgtttcgtctttataggtgtgataattgagttaatacaatgaaaaggcttagaaagatgccctaactcactgtaaaattatgttgccaccgtcactctcagcattattatattaatgtacatctctagattaaatcactttttatctattccttgttccataaatctggttgggtgttagttgaagataggctgtcctttcagctttcaccatcttcatcaaggc

SEQ ID NO: 296494 - DNA, 556 bp, Homo sapiens
gttttcattaatgatgcaactgtctaaggtttgaccgcacaataacagacattcttaatctgaaaactgtcaaagcaataataacctatttatgacaaagagaaaccttgagttattgaaatttctgggggcaggtaagaggtgtgtgggctggggaggtttatacagcacagacatttgaaaagggtcattaatatttttcagcttacaatggttctagaggaagactgtttttgaattcacacttactagctgtgtgaacttggataaattttaaagtctttatcaaagtttattttgctgtaaagtgaagatataataatayagtacatgtttcgtctttataggtgtgataattgagttaatacaatgaaaaggcttagaaagatgccctaactcactgtaaaattatgttgccaccgtcactctcagcattattatattaatgtacatctctagattaaatcactttttatctattccttgttccataaatctggttgggtgttagttgaagataggctgtcctttcagctttcaccatcttcatcaaggc

SEQ ID NO: 296495 - DNA, 1158 bp, Homo sapiens
tcaaacttacattttaaatatccagtcgtatttccacctggagttatacatttattgagcaccttccttgtggtcctatttccataagactcctttttcaaacttatctttcagagttgatacaatctatgatagaagatatataaaactgagattcaaagcaccaaaatagaaatcatgaccgggtgtgttggctcacacctgtaatccagccctttgggaggccaaggtgggcagattgcttgagccaaggagtttgagaccagcctggtcaatatggcaaatccccatctctacaaaaaataaaaaaattacccaggcatgttgccatgtgcctatagtcmcccctggagtgtgagctggacttagtaaactgcttttagtgaatagaataaagagaaagtgactgtgggactttgttgactagggcataaaagacactgaagcttccttttgttctctcttggaggggaagccagctgccatgttatgaggacacacaagctgccttatagagaaacccacatggtgaggacctgaggcctcttcccaaccaccatgtgagcgaacaawtttttgggttctctattctgttccattggtctctttgtctgtttttatgccagttacaatgctgttttggttactatggctctgcagtataatgtcaagtcaggtaatttgatttctccaattttgttgttttttttttagctcagggtggctttggctatttggagccttttgtggttccatgtaaattttaggttatttttttctatttctgtgaagtatgccattggtattttgatagagattccattgaatctgtaaactgcttcgggtagtatggactgagttttgttttttttttcttaataggtccttttagaggtaaaatgtacatatgtgaaatgtacatattttagtgtacactcttgacaaawagatatacccatataaacatcaccctattgagatatagatgtttatatcaccttagaaagtttcttcatagccccttcccaggcaattcctgtccctcacctggagacatctgatgtgttgatttcattttcatcatagattaattttgcattttatagaacttcacaaaatggaatccatggcgtgtgtccagcttcttcagcttagtat

SEQ ID NO: 296496 - DNA, 532 bp, Homo sapiens
caactcactgatttacttctagcaatagcatgatgttacaggaatattacctctgtttaagcaaggtaatgtgtaaaatcagtctcggctgtcagaataacttctaaaaggtatttttataagcagttcaagttactgaaaaccttttaaacctttctgaagttcgttagtataaattacttttctaggattattaataaaagccacataggtggcaagttgtagttttatatggctytgtagagtggtgaaccttctagaggaatatatgatttattcacagttcctcaaggcctggggatgatgatcagttatacctatttttgtgcaattacatcatgttgtacattagaaatggagagtttaatagctctttaactgctgtcctcattaggtaatgataaatatttcccttaaataattgactattttgctgtgttttaaaaatgattgaaatttatcttgccatatctcataatttcatgcacaagttgactgagctaatcttgagaatatattcgtaaaataggag

SEQ ID NO: 296497 - DNA, 582 bp, Homo sapiens
tgggtttttttctctcatttttttcattcaaatacacattaagttttttttgtttttgtttttttttttttttttgagacggaatcttgctctgttgccaggctgaagtgcagtggcgcaatcttggctcactgcaacctccgcctcctgtgttcaagcgattaccctgcctcagcctcctgagtagctgggactacaggaacccaccaccacgcccggctaattttttgtatttcaggagagatgagatttcaccatgttgtccaggacagtcttgatctcctgacctcgtgatccacccaccttggcctcccaaagtgctgagattacaggcatgagccaccgtrcccagcctcaaatacatactaatttcttactttgtgcaagatgtaatatatataactgtagagacttggttttctgagcatggaagacattgcttttccatttctgaaactatctttcctgacagcatattttaatactatggctgcttcaatgccagctaagtcctttttttcccctatagagtgatatcagccaaatatctctatattacagttttattaatattttatacat

SEQ ID NO: 296498 - DNA, 582 bp, Homo sapiens
tgggtttttttctctcatttttttcattcaaatacacattaagttttttttgtttttgtttttttttttttttttgagacggaatcttgctctgttgccaggctgaagtgcagtggcgcaatcttggctcactgcaacctccgcctcctgtgttcaagcgattaccctgcctcagcctcctgagtagctgggactacaggaacccaccaccacgcccggctaattttttgtatttcaggagagatgagatttcaccatgttgtccaggacagtcttgatctcctgacctcgtgatccacccaccttggcctcccaaagtgctgagattacaggcatgagccaccgtacccagcctcaaatacatactaatttcttactttgtgcaagatgtaatatatataactrtagagacttggttttctgagcatggaagacattgcttttccatttctgaaactatctttcctgacagcatattttaatactatggctgcttcaatgccagctaagtcctttttttcccctatagagtgatatcagccaaatatctctatattacagttttattaatattttatacat

SEQ ID NO: 296499 - DNA, 299 bp, Homo sapiens
cccccaggcaggggcgctgggtgccttgggaatccgaggaatcccttctctttgccagtcggaggggactagagggagccgaaggggccggagatgggccgagcgctgccccccgggggtcctcggcgccgggcgcagcttacaagcgcagcgcagcgcagcaggctccattcccggccgccgccgctcagcccattgcgcaaaccaaccccgctctgccgccgctgctggaacccaggaagcgtgcttgsaggcttcgggcactacgcggggctggaaataccacgcactgccccttc

SEQ ID NO: 296500 - DNA, 1060 bp, Homo sapiens
atgatgcttcttaggataatattttaaaaggatatacattatgcaatttttaatgcttctatacaggactgaaggccaataataccatgatrataaggcatgtaaaaaaatttgttctgcagagagtgggatagcgtgagggaaaacacagtgcaggattctatgctgttgcccaagatcccagacaggcaagtgaaataatagagcagacatttcctaaggctgtggtagatatgattaggagatagtgggtaaaaatggcctttaaactatatacacatgagaagatagatgtgaaggcccattgcaaaggcaacaaaattatgcaaatataaaatatcactattaaaatgtatgatgaattgatgtgccatgaaaacaagttccagtgctgggccagaaatcaggaaacatgggcttttggtttctcaccattaaaatgaagaagttggatttatacccaagggtaccttgtgggctgtatggcttttaagtaactggtcataacaaaagtgagagggacacaatcaggtcagtttcaaaccaagaataaaatgggaaattaaagaactgaatwatacaacaagaagtcattatcaaattcggagccagtgatgattttctccctgctttattatagactttcatattctatttgtttatagtccttatccagtcagawtatagattatggtagagacgtcatttttgaggttgagtaatactttactgttgatgtatagaatattcctcacaacttatttcaactcatttttatatttctatgagattttcctcttttggagtttctggtttgtttgagaaaagggctagagaaatttaaacgcttgaaaacctttagagttttcagaagtacacagaacttcaaacgaacacaaaggtattctcattaatgctttcttaagacaaacaaagcaaagccctatcaaaagttagagctctccatttttcaagctatgcaagactgtctccaatagttatggcttcagcagtgtttcaacttgagtgtgcatcagaaccacctgcaaagcctaattaa

SEQ ID NO: 296501 - DNA, 334 bp, Homo sapiens
gccagggggcattttccaattaaacaacaacaaaaaaaatactttaaaaagcagtcccttactgkcaaggtacttctgacttcagggacaaagcgctgatggaaccaatccagaaaaagcattctcatagtccaggccttcttgttgtacaaccaaaagactggaaactagtgtttctcttttccctctcaagactcaggggatagcagctttatagttaagggcagccctgatcataaacccgactacatttgcacaaagcagtagagttagcctatcccttcctgccttaaatcttggtgcttgcttctcctccttatgaataaatgtcctt

SEQ ID NO: 296502 - DNA, 334 bp, Homo sapiens
gccagggggcattttccaattaaacaacaacaaaaaaaatactttaaaaagcagtcccttactgtcaaggtacttctgacttcagggacaaagcgctgatggaaccaatccagaaaaagcattctcatagtccaggccttcttgttgtacaaccaaaagactggaaactagtgtttctcttttccctytcaagactcaggggatagcagctttatagttaagggcagccctgatcataaacccgactacatttgcacaaagcagtagagttagcctatcccttcctgccttaaatcttggtgcttgcttctcctccttatgaataaatgtcctt

SEQ ID NO: 296503 - DNA, 954 bp, Homo sapiens
tattttgaaatggcaggcagctgcagacctcaatctataggaagcaatctaactttttctcataatgtcacaacttttctctgcttcttgggagcactccgagcatcacttgtggcactttgtattggtctcatggtgttattcaagatttatagtattacactaagcacaatgaaaagagaactgtgagagaacacactatttacttagatacagaatttactgaagagaccaagtgttcatggcagatactggcaacaggagctcaccacagtagcaacagggggtggctacaaaattattataatagtacatacactggaaagtagacattgaagaatattccaaaagatgccagggttggaggggagtgagggttgaaaaattattattgggtacgatgttcactattggggtgatgagtacagtaaaatctcagagttcaccactagcaatatatcccaataacaaaacaaccacataataaaagtacgcttgtacctagcacatttataaaaataaaataaaaataattattckggtagtacagtatgtgctacagttaattgtatgcagttgtggtttaatacagwccctacactatgcactaaaaactgcagaggaaatcaacacattctctacctcacagcagatttcttggagagagatgggggtggggaggggaataagggttgctaaatgttgtcaacwttgtaatacaactctcaaagggagatagttattagggtggcaaagtgctcaggctcagatttcaggttgcctagatttgaattctgtcttcactgcttcttttatgattttcccaaattacttaagctctttaaaccacagtttcctcatccttaagatagggataataaatagaacttatctcataaaattgccatgaggattgtaagtgattatgaagttgattaaatttccccagtgctt

SEQ ID NO: 296504 - DNA, 361 bp, Homo sapiens
ccctacactatgcactaaaaactgcagaggaaatcaacacattctctacctcacagcagatttcttggagagagatgggggtggggaggggaataagggttgctaaatgttgtcaacattgtaatacaactctcaaagggagatagttattagggtggcaaagtgctcaggctcagatttcaggttgcctagatttgaattctgtcttcactgcttcttttatgatttkcccaaattacttaagctctttaaaccacagtttcctcatccttaagatagggataataaatagaacttatctcataaaattgccatgaggattgtaagtgattatgaagttgattaaatttccccagtgctt

SEQ ID NO: 296505 - DNA, 361 bp, Homo sapiens
ccctacactatgcactaaaaactgcagaggaaatcaacacattctctacctcacagcagatttcttggagagagatgggggtggggaggggaataagggttgctaaatgttgtcaacattgtaatacaactctcaaagggagatagttattagggtggcaaagtgctcaggctcagatttcaggttgcctagatttgaattctgtcttcactgcttcttttatgattttcccaaattacttaagctctttaaaccacagtttcctcatccttaagatagggataataaatagaacttatctcataaaattgccatgaggattrtaagtgattatgaagttgattaaatttccccagtgctt

SEQ ID NO: 296506 - DNA, 605 bp, Homo sapiens
acaactagggcagcatggaacaccagggccgaggtcagaaacagggaccgcggggagcaggaccccaccctcgggtagcctgttctctagactcaacagtgggtttcggaagaggcccttgatagggccacaaaaactgaggaaaattaaaggaccccaatraacctcatgagcttgtgcgtaggacctcaaagggatatgccttatgagtaacgatggccagaaatccaccaggcctttgaaggcctgaaacccaactcagaatcagctccagacctgactgcattcagatgcttaagaaacttggccacttctggtcaactgcaagaaggaaaacaaagtccactcgaaaagaatgtgtcaccatcccaggtcccccatcatcacaacagtgcaaagtcagacatgcaacctaaaatatccaaccatagaaataaacacaatctgaccaaaaaaaaaaaaaaaaaaatgagagaaacaacaggcaggaaagccttgccacagggccagagagtgttaccagtcagactccaaaataactgcactacgtgcagaaaaaaataagatcaagaaagtctatggaaaactatgaaaaagggccaaat

SEQ ID NO: 296507 - DNA, 543 bp, Homo sapiens
gaggtcagaaacagggaccgcggggagcaggaccccaccctcgggtagcctgttctctagactcaacagtgggtttcggaagaggcccttgatagggccacaaaaactgaggaaaattaaaggaccccaataaacctcatgagcttgtgcgtaggacctcaaagggatatgccttatgagtaacgatggccagaaatccaccaggcctttgaaggcctgaaacccaactcagaatcagctccagacctgactgcattcagatgcttaagaaacttggccacttctggtcaactrcaagaaggaaaacaaagtccactcgaaaagaatgtgtcaccatcccaggtcccccatcatcacaacagtgcaaagtcagacatgcaacctaaaatatccaaccatagaaataaacacaatctgaccaaaaaaaaaaaaaaaaaaatgagagaaacaacaggcaggaaagccttgccacagggccagagagtgttaccagtcagactccaaaataactgcactacgtgcagaaaaaaataagatcaagaa

SEQ ID NO: 296508 - DNA, 565 bp, Homo sapiens
acacacaggaggtgtgcatacagaggatgggaatagtacaattcttacttcagccaacagataggcctcgaacctcttatcattaagccatgtatgccttttgctgcaagcctccatgaaacatttacaaaaaccaatgccacataaagaacacagtttccaaatacacacagtgtagactaaacactggaacacactgcaacagaaccagaaataaaaccaggagaaacaaaaatccaaccatgggaaaaatgagtctctttctcttaaacgcttcaaattctagtgaaagtggtaaaaatttataaagtaatgaacacatcacatatcgaaaattgtaggaattgcctaaaattgagctcagagaacaatgaatagctgcctacatgtaagtaactacaaaaggaacccaaacaaataaaaacattagactcaaaaagttagaaaaataactagaaaattaaagcatacaytgtgcactgaaaaagaggaagaagataataaagatgaaagaaatctgacagattgcggatctaggcagaagcgataaagcctatggtgggga

SEQ ID NO: 296509 - DNA, 567 bp, Homo sapiens
agttactgatctctaaatatccgtgagtctttataagaattctgaagtaataatcaaaaaaagaggtatagggctgggcacagtggctcacrcctataatcccagcactttgggaggtcaaggtggggagattacctgaggtcaggagtttgagatgagcctggccaacatggtgaaaccctgtctctactaaaaatacaaaagttagcccgacgtggtggcacacgcttgtaatcccagctactcgggaggctgaggcaggagaattgcttgagcccgggagatggaatggatgttgcagtgagctgagattgtgccactgcactccagcctggccgacagaatgagactgtgtctccaaaataaaaaaaaaaaaaagaggtgtagttaaaacaatggataagaaaatgtgcagcagtctggtttgtgtctataaagtggcagttatttaagtggttattcagaatctgaataaaaaagcatagttataatcccgttgattaaaataaaagtgaacaatctcatgctccaaatggtaaatacgaggaatgacttttagttttaaga

SEQ ID NO: 296510 - DNA, 614 bp, Homo sapiens
caatactaacattaatcaatagaaagagtagctatatttcagacaaagctgacttcagagcaaggagagttatcagggaggaagaggggcattacataataataaagtggtcaattcttcaggacgacataacaatcctcaacaggtatgtgcctaactacagggcatcaaaatatgtaaagcaaaaacttgtagaactgcatggagaaataggtaaatccactattacaattaaaggcttcaatagtcctctatcagaaatggacagatccagcaagcagaaattcagtaaggacatagttgacctcaaaacataatcaacaaaatataattgatatctatatactctttcattgtaacaacagcaaaatacacatttttctcaagctcacatagaatattcacaaagatgggccacattctgggttatacaatatgccttaacaaatttaaaagaagagaaatcatacaatgtctaagtttaggccacaatagaattgaactaaaaatcaataagagaaagataactggaaaattcagaaacacatggcaattgaacaacaaacatctacatagcacatgaatcaragaagaaatctcaagagaaattaaaa

SEQ ID NO: 296511 - DNA, 599 bp, Homo sapiens
agatatagcagtttctttttattttttaacatgtatagtatacctaaacggttgcagagaacacaagtttgagtcacacagactttaatttaaatcctgtgcccacaatttaccagtcatgtgacttcaggtgggaagctgctctgatccttagtctctttacaaaataggaaataaaaaccaattactcagttttcacattgaacctttaggagatttttagtattctgtagtacctaattttgaacatcagccctcactgcaaaatattaagaaataaacttagaaggttttggagattatatgcatgcctgaaatttttgcatttcaaaataactgttgtcactgcaggtatttttcatagtaattcccagaagccagaggtttttactataaaatgagaatgacagagaaaagagtggaatggctgaattcaatggtggtatatgtgtaacatttaagaaactgccaaattttccaagtgagtgttcaaattgcattactgcrctgacataatttggcatattttaattgtatagatccactctttattgccatcgccaaaattctgtatcttaagctttgttctgcattttgca

SEQ ID NO: 296512 - DNA, 547 bp, Homo sapiens
tctggggtgacggtaatgttctatatcttagtaggggtgtatacacttgcccaaagacatctaattgtgtatttaagatctgtacttttcataataagtacaatataacttaatttaaaaagaaaaaaaaggctcagctgtgaacctttctactttttctagtttcttctataatttcaatcttgagaaagctcataaaactataccttaacaaaagaaaaggtacatattcttggttgggaagacaataccataggaatatcacctctcctacaaataatattaaatttaatatattttctatgaaaatgtcaagaaggagttttgttgtggctatttgactttgattttgaaatttgataaamtgtattcaaactttaggaggaaagtgtaaaaagaaaaccagtaagggagactttaagaaatattagaacataccataaagtcataaagttataatcaaaacaatatgacactagcatagaaactgacgaacagatcagtgacaccaactagaatatatttcccatcatcccttgtcattgag

SEQ ID NO: 296513 - DNA, 582 bp, Homo sapiens
ggttctcttaatggattaggagggaatatgggaggatgacaggtttgttcttagactggaacacccagggacttaatgctaatattagactcttatagaacatacggacaaaggatgtgaatagacgtttttgcaaagaaacatacaaatggccaataagcacagggaaaaatgctcaacatctttagtcattagggaaatgcatatcaaaaccacaatgaaataccacttcacacccactgggctgggtattataaaaaaagatacaataacaagtgttgstgtggatgtggagaaattagaacccttatcactggtggtgggaaggtaaaatggtgcagccactttggaaaacagtttggcaattcctgaaaaagttaaatatacatcataagatctagcaattccactcctaggtatgtacccaagagaactgaaaacatgttcacacaaaaacttgtacattaatgttcataacagccaaagagtgacagcagcccaaatatctatcaactggtgaatggataaataaaatgtgatatatccatacaatggaatattattcagccataaaaaggaagt

SEQ ID NO: 296514 - DNA, 634 bp, Homo sapiens
ttttggccatctctagcttcatcaaatccaagccactggtcatctggctaggctccattttatatttgtccacaatttgttacagcagtaagattttggagttatactttccacacaagttctagtttttttgaarcatggtgcttctcccagaatgttttcttttccaagttttgcttggctggcatctcatagtccattgtcctgtcctcctaatctttgcctggttctttgcatcatcatatggaagctaccatatgatctattactatctccattagtaagacatggaaggggtattatctcctaggatatgagggatgaagtctgtggttaatgcacctcttagaacatttagcgaattcatcatcttgacacacttcgattttctttccccctggtttttaagtatgttaaagccttcctgttattggtctactctgtcttaccgaggactagtattactaagttcctgatgttcattcttctctacttaaacggataaatatttaatagaagaaacaaaacacctagcactcttccatttattaaaataaagtggaatggatactctcttcctttcttttgtatgataacacctcattgtgtgctttatattaactttttcatgtgt

SEQ ID NO: 296515 - DNA, 609 bp, Homo sapiens
ggaaatcttcattccattttttaaataagtgaagaaactgagattcagattaaatgaggtgtccaaaatgacaatgcaaataaaggctagattatgattcaaatccagtcattatctaggttgagtaaactgtgtgtggggaaggtacaaacttctaggcagactagcagtatgtcactccttgccttcccagctggacctctgctgtcagaaagctaatcccacctctgaattctcattcatatcctaacctgaagggtgatattgtatcaaacccctaacctcaatagggaagccaccaggctcaagagrccaaagaagagacccagagctagtaaacgagacatgcggctttatcagatgctaacatataggggagagggtccagtggcaacaggctggtcaggaaaactgcaactgcctgtaaacatcatgcagtttatagcattttcacttaacaccccccccaacgacctccacctggcattcttcatttaactgaaaactcagggcttcaatctcctgtatggcccatgttccatgggatgggatggggctcagatgtttatcatagataagggatgaatctctgggttggccactaccaga

SEQ ID NO: 296516 - DNA, 622 bp, Homo sapiens
caatgtgtagtgcttagaccaacagcagcagcagcacctgggactcattagaaagcaaattctactgccctactgctacggtttgcatagggtttgtttgtttgaccccaccaagtctcatattgaaatytgatccccaatgttgaatgtggggcatggtgggaggtgtttgggccatgggagcagatccctcacaaatagattggtggaattctcaagggagtgagtgacttctcttcattcctgcaataactggttgttgaaaagagcctgggggcctcctctgcacttgcactcacttactctcttcctctcacgccatctgatctgtgcatatgcaggctcccctttgccttccaccatgagtggaagcagcctgaggccctcatcagaagtggagcaggtgctggagccatgcttcttgtacagcctgcagaaccatgagccaactaaacctcctttctttataaattacccagcctcaggtattcctttataacaaaataaatagactaagagacccacccagaactaccaagcaaataatagtttaataagccctataggtgattctgatacacattagagaatcagtagcctagggaaatgcatttctattatc

SEQ ID NO: 296517 - DNA, 604 bp, Homo sapiens
gtctgtcttaggagttgaaacaactcacagctctgggaccctgaacaagtgaattcatcccactaagtctcagattctcccagctataaaacaggttcatgatttagtatcaatgtgccatcaagggtgttcaatcttttagcttccctaggccacactggaagaagaactgtcttgggccacatataaaatgcactaacactaacaatagctgatgagcttaaaaagaaaagaaaagaaaatctttgtatttatttatttatttatctgaaacgagtctcagtctgttgccaaggctggagtgcagtggcacgatctcggctcactgtagcctccacctcctgggttcaagcaattctcccgcctcagcctcctgagtagctgggactacaggtgtgagccgccatrcccagctaatttttgtatatttagtagagatggggtttcaccatgttggccaggctggtttcaaactcctgacctcaagtgatcctcccaccttggcctccctcccaaagtgttggaattacaggcatgagccaccgcacccggacgtatcttataatgttttaagaaagcttacgaatttgtgttggcctgcatt

SEQ ID NO: 296518 - DNA, 588 bp, Homo sapiens
tgccccgtttctcctccagttcagtgccttgggaaagaaaagaaagttaaattcgtattaattacagccaaatccgctcagtaagcacttgctgaatatgcttgaggatgaggtttaaagctctcctccaaacaaaacggtaaaatgaaaggaataatttatttggtcagacactataatttgccacgtcattccatttctcttgttactaaaatggattctctgctgaggccgtgacttccaactccaaaaaaaaaaaaaaaagatcatccacagccactattcctcacaatttctctgaaaggtcctccttgccccaccacgctgaagctaggcccagggctcttggaagaaacacacagcacttgctcctgcacactgacacactctgtcacccaaaatgacrtgctgtcactcatactcacacaccacatgctcacagtcacacacgtacgcatgcatgcacacagggacagccacgcacctgcacccatgcacgcactcactgtcacacacaccatcaccacgtgcacacccagcacccacacgcacccttcatacacttatacacacatgcacacattcgca

SEQ ID NO: 296519 - DNA, 588 bp, Homo sapiens
tgccccgtttctcctccagttcagtgccttgggaaagaaaagaaagttaaattcgtattaattacagccaaatccgctcagtaagcacttgctgaatatgcttgaggatgaggtttaaagctctcctccaaacaaaacggtaaaatgaaaggaataatttatttggtcagacactataatttgccacgtcattccatttctcttgttactaaaatggattctctgctgaggccgtgacttccaactccaaaaaaaaaaaaaaaagatcatccacagccactattcctcacaatttctctgaaaggtcctccttgccccaccacgctgaagctaggcccagggctcttggaagaaacacacagcacttgctcctgcacactgacacactctgtcacccaaaatgacatgctgtcactcatactcacacaccacatgctcacagtcacacacgtacgcatgcatgcacacagggacagccacgcacctgcacccatgcaygcactcactgtcacacacaccatcaccacgtgcacacccagcacccacacgcacccttcatacacttatacacacatgcacacattcgca

SEQ ID NO: 296520 - DNA, 541 bp, Homo sapiens
ccatacgatgattacagatgcagacccagaatccatttcccttctgcccttcgcacatagctcttgtacttcttgggtgtaagtcccattcctcatgcaaggggttggctcaggatcccaggctgaagccaatcagcacaaggcacaccattgacaacagggacygaaccatgtggctcagtgaaggataccgagacaaggggaattttgatgaggccttctggaaaagaagggtccctgctcttaggagcaagctaccagaaatgttctttctccctctggacctagtgggatagtcagagggaaagcctagaactactacagccactttgccacagcaaaggaagccagtctggggatgaagctgacccaaagggggacacagctgggacagctggggaaaacatggagaaatcatgacagagcccctgtattaaaccccctgaagccttccctctatcagggtgttcaactgcagaagccagtaaattccctcactgcataagttgattgaattgatttgccattatttacagcctaa

SEQ ID NO: 296521 - DNA, 1109 bp, Homo sapiens
ccatacgatgattacagatgcagacccagaatccatttcccttctgcccttcgcacatagctcttgtacttcttgggtgtaagtcccattcctcatgcaaggggttggctcaggatcccaggctgaagccaatcagcacaaggcacaccattgacaacagggaccgaaccatgtggctcagtgaaggataccgagacaaggggaattttgatgaggccttctggaaaagaagggtccctgctcttaggagcaagctaccagaaatgttctttctccctctggacctagtgggatagtcagagggaaagcctagaactactacagccactttgccacagcaaaggaagccagtctggggatgaagctgacccaaagggggacacagctgggacagctggggaaaacatggagaaatcatgacagagcccctgtattaaaccccctgaagscttccctctatcagggtgttcaactgcagaagccagtaaattccctcactgcataagttgattgaattgatttgccattatttacagcctaawagtaatctgctatacttggtggcatttactctttcccttcccttgagccataattatattttaaaatagttcaatatcaagctaatcattggtagctttatgaggttttcttaaactaattttttttaaatctgattttttaaatcaaacatttttcctggatttctaatatgagacatctaaaaacaactctatgatccttgggaaggcaatttattttctggaacaggttattcaaaatttttctatctaatgaccaaatagtgctttaagtgtctcttctaaaattaaacagtagcaagatggattatttcagtttctcctgcctctgaatgttgaatttacttgtgctggtaacaccaaaagtaatatgcattcaattcaatatgcactgttcattcattcaacaaataattgtggagtatccaatattgttctaggctctggggaaaccacagtgaacaaacacaaacaaaattctctgctcctgtggacctgctttttaatggaggggacagagagtaaataagataaagaagtaawtatacacaagataaaatatacatg

SEQ ID NO: 296522 - DNA, 519 bp, Homo sapiens
tattacatagatggccctacatttcctatgggtctgcggttgtgagccactgttctagacggctaggagggtttgaagtgagttgagaacctttactgtcctgaagatggggtaggggctagacaagggtatattctaaaaagasgaaagcgctactgtaataatcttgcctaggattacatacagatgggcataacagagtcccaggacttcaccccttcggtgtagagcagggatggcagggatggcaagagccccacttaggatacctggaaaaagaaatctccgcagcaaagggtccttgtgctgacttttctttttcatttacgagtgtaccctctgtctccttgggggcccaccttcttattcccagcaggaaaggggaagggggaggacaggaaatgtggaaaccgcgttaacagcctgattgtgaaccagcactgcgactgagatgcgaggagggaaggacaaaagtccctccctcgcttttcaaaaagtaagccacaaaagttatagaaa

SEQ ID NO: 296523 - DNA, 683 bp, Homo sapiens
ttgtccctgggaacttaaatcaatagaaagaagaggaaggagttgaaggagaataaattcttaatctataagcaccaaaaagaaaagatttattgctttatttagcctgcaactacaaaytaatgcttttgtctgactgttcattcacacatttacttattcatttaataatttatctatttctttgaaatatgtattgatcatctattttgtattagatactttggtagaaattgattttatacaatctatttcaggaaacaatgcacaattttttttacaagtagttttaacatgtatcttgcaactgagcaaagcgataagggaaataccaatattttactttaaaatttgatttttttaaaccaaacgaaactacagcattgcttgctatgattgaaactaatttttcgtgttagctgaaaacttttctttgatagatatataaaatgttgaatatccatgccaaaagtttaatattttaggccacaaattggtaacatttctttttcaatttaaaaatcttctgatacaaaatgtatccaaagtattaactgggcattgtttcataccacataaatcatctaaaagtttttttaaaaccttataattttctaaatgttgaaagaaatgatatttgatactggtggaaatttttgtattctaaagacagtggcctaaag

SEQ ID NO: 296524 - DNA, 683 bp, Homo sapiens
ttgtccctgggaacttaaatcaatagaaagaagaggaaggagttgaaggagaataaattcttaatctataagcaccaaaaagaaaagatttattgctttatttagcctgcaactacaaactaatgcttttgtctgactgttcattcayacatttacttattcatttaataatttatctatttctttgaaatatgtattgatcatctattttgtattagatactttggtagaaattgattttatacaatctatttcaggaaacaatgcacaattttttttacaagtagttttaacatgtatcttgcaactgagcaaagcgataagggaaataccaatattttactttaaaatttgatttttttaaaccaaacgaaactacagcattgcttgctatgattgaaactaatttttcgtgttagctgaaaacttttctttgatagatatataaaatgttgaatatccatgccaaaagtttaatattttaggccacaaattggtaacatttctttttcaatttaaaaatcttctgatacaaaatgtatccaaagtattaactgggcattgtttcataccacataaatcatctaaaagtttttttaaaaccttataattttctaaatgttgaaagaaatgatatttgatactggtggaaatttttgtattctaaagacagtggcctaaag

SEQ ID NO: 296525 - DNA, 683 bp, Homo sapiens
ttgtccctgggaacttaaatcaatagaaagaagaggaaggagttgaaggagaataaattcttaatctataagcaccaaaaagaaaagatttattgctttatttagcctgcaactacaaactaatgcttttgtctgactgttcattcacacatttacttattcatttaataatttatctatttctttgaaatatgtattgatcatctattttgtattagatactttggtagaaattgattttatacaatctatttcaggaaacaatgcacaattttttttacaagtagttttaacatgtatcttgcaactgagcaaagcgataagggaaataccaatattttactttaaaatttgatttttttaaaccaaacgaaactacagcattgcttgctatgattgaaactaatttttcrtgttagctgaaaacttttctttgatagatatataaaatgttgaatatccatgccaaaagtttaatattttaggccacaaattggtaacatttctttttcaatttaaaaatcttctgatacaaaatgtatccaaagtattaactgggcattgtttcataccacataaatcatctaaaagtttttttaaaaccttataattttctaaatgttgaaagaaatgatatttgatactggtggaaatttttgtattctaaagacagtggcctaaag

SEQ ID NO: 296526 - DNA, 562 bp, Homo sapiens
tagttttctgtcatatttaaacaagtctgcctttgaaaatacatatatttcaagaacattccttgaagttccacgtatttatggtaggcttttcaaactataacattaaaaagtctatatgtatgtattggtgtgcttaatttaatcacacctgaacaactccagcacgcaaataaaaaacaaaactgttttaaaggtgtattgattaatgttagtttcagctatgaatactagaaaacttagatactatagctttgataagttagaagtttaagccccattaaaaaagtaggcaaaggatatgaacagacacttttcaaaagaagacatacatgcggccaacaagcaaataaaaacaasctcaatgaccactagagaaatgcaaatcaaaaccataatgagatatcacctcacaccaatcagaatggctattattaaaaagtcaaaaaataacacacgctggcaaggttgtggagaaaaaggaatgcttatacactgttggtgggagtgtaaattagttcaaccaatgtggaaagcagtatggcaattcctcaaagaacta

SEQ ID NO: 296527 - DNA, 562 bp, Homo sapiens
tagttttctgtcatatttaaacaagtctgcctttgaaaatacatatatttcaagaacattccttgaagttccacgtatttatggtaggcttttcaaactataacattaaaaagtctatatgtatgtattggtgtgcttaatttaatcacacctgaacaactccagcacgcaaataaaaaacaaaactgttttaaaggtgtattgattaatgttagtttcagctatgaatactagaaaacttagatactatagctttgataagttagaagtttaagccccattaaaaaagtaggcaaaggatatgaacagacacttttcaaaagaagacatacatgcggccaacaagcaaataaaaacaacctcaatgaycactagagaaatgcaaatcaaaaccataatgagatatcacctcacaccaatcagaatggctattattaaaaagtcaaaaaataacacacgctggcaaggttgtggagaaaaaggaatgcttatacactgttggtgggagtgtaaattagttcaaccaatgtggaaagcagtatggcaattcctcaaagaacta

SEQ ID NO: 296528 - DNA, 611 bp, Homo sapiens
cttggatgtcattcattgatgcattactaaggttaaggcctaatgagcagacaactgttgagcaattaaatcagctatttttagattgtgctacatatatcaaaggctgaagtctatctaagctttgggataattatcaaaacccattcaacagcttctctttcttcctgatagctaccaggcctttatcgctgatttacactgtcatatgcagttttaaaacaccagggaaaatttccttccttttatgcagcatataatttcccactattcaaccctaagtctgtattcagtttatggtgttatttcaataaagctcaccaatgacttctatatggtgttcatattcagcaacaagtagctttaatayttgatgacatctcggtagagacggggagaaactgtatatttatagtacctttcctctcgccttcactttccgctatggtaacaaaggctggggtggttatttttctcattattttcccactgtgactgtgagcaaagtatcagactctgcaacttgaattcaaagacattaaactacttcctaagtatacccaaagaatgtctaataaaaaccaaaagctccacgaatctggtgaggactg

SEQ ID NO: 296529 - DNA, 460 bp, Homo sapiens
aacttccagataaatttggaaatttagcagtattcattgggcaacaatattttgttgatgtttgtttttcaaattatctaaaccaaaaagcttatttaagttctactatcccaggtttctatgtagaactagaaattgttagtccaaattttatttaaaaatgatttataaaggatgattcgactctatctttgmaaacaaataatttccagtttgaataatgatatgttaattaaattaaaattgattaagtcaggcggcattacatatttgctagtgcttcaattttagtcaggagaggaatggatatgctttaatattcaaatgccactgtcatgtttaaattcattgctgtgctgtggaaagagaaacaacagaagcagctgtgtgctcccaccgcattgagcagagaattcaataactctcagagtaggcaggattagctactcactgtcaaaca

SEQ ID NO: 296530 - DNA, 599 bp, Homo sapiens
gatttcatcatttttttgtcgctctaatgttggatttacgcctctcctcatgtcccctctgcctaatctgtgagccgctgcatggcatagactttggtccttcaaaaatttttgttatacactagtcagttaagaaacctgttacattaggccaggcgcggtggctcacgcctgtactcccagcactttgggaggctgaggcgggcggatcacttgaggtcaggagttcaaggccagcctggcgaacatggtgaagccctgtctctactaaaagtacaaaaattagctgggcgtggcaacacatgccygtagtcccagctacttgggaggctgaggcaggaggatcactcgaacccaggaggcaaaggcaaaggttgcagtgagccactacactccagcctgggcaacagagtgagactctttcaaaagaaacaaagaaagaaagaaagacagaaagacggaaggaaggaaggaaggagaaagaaagaaagatgttacattaataaacctgaagcacaataaatatttgctgtgaactagatcttcacagaaataaacagtgggtttattgctaaaaattttcagagaaaaattaatat

SEQ ID NO: 296531 - DNA, 570 bp, Homo sapiens
cttgtcatccttaagctataacccacatgcaagttccttcacacctttgcagtaccttcatttacgtttccaaaccttcctacccgacatcctcctagcactaactccccacttacccttaacactttgtcctcattaacttgtatttccaagaaatattatcatcctcttaacctcttcaaaaaattattttacctatttgccttatcactaattctcatgtaccttggggctggaatcagcaatgaatagttttagtaaagtcaagatagcccactctaaaatacagcttttctagccctctgtaaaattctctactcctttaatgaatgataaccagctaaaacaccttctagcctttcccactgttattatctattaacatcccgggtcattctccaacattttccaaaggctttgccttctattaacttatacattcatttaaaatagttaaaatgatgctaggcatggtggctcgtgcctayaatcccagcactttgggaggccatggtgggagtttttttagagcctaggagtttcagactaacctgggcaacatcgcaagac

SEQ ID NO: 296532 - DNA, 561 bp, Homo sapiens
aacccttgggtgattacactgttctgtggatctgaaatggtaatgtatgccatttctctccagagtctgtgtgccctccaccacctctgacagaaatgatgcaggatgtgcttcattcatgacaaacctgtgaagaccagaatcaccctcccattgtcaagaaatagaaaactctatgatttcatatagaaaactcatgtgaaactctatgatttcacaaaactctatgatttcacaatagaaaactcaatgatttcacaaaatgtggaatcattgttttaagacaaggaacaacaggcagtgcaggcctatgatccctaagagaagggcaacaaatgagtcaggtgttggggctgctctagctactggaggcaatttttatactgtgacacagagaaaaaggactcaaacagagcctactgtgatcatgagttttatgagacacggatcagagtttagggaggttgagacaggtagaattggtgaggaaaagtaccaagaggacaaagctgccaacagaaaagtttccagaaatctgyaaatgtgtagagtcaaaaagta

SEQ ID NO: 296533 - DNA, 588 bp, Homo sapiens
aaagatgacaagatgtacaggattacctgtataggattatgtgggtatgttccataagacttacttccaactcccaaagacagctgtggtaggttgtgtgttgccacttactcttagaataacctggggaaattttcatactaagcctccagttccttgtcaatagaatgaggataacataaactttcgtgcctagcacacaataagtacttaatacactttatcaactgagaaaatttacattataaattcttgtgaaaatatatttattattaattcttcccttatttttctggcggcaaaaccagtcttacaacytctgaactgagtcaagaatgtgttctattagagaagaagcaaatctgatttctttcacatacaaacttgtgaaatttgaggttcataataatcaaatgcatgttttgagaatcagaaacatgacttcaaggtcagttgattgattcaacttttgaactccagcattacattctacaaagatttacaatggtggtagcattatattttagtatttatttatttattaaacaagttaagaattgataattaaccattctaaaaagaagatat

SEQ ID NO: 296534 - DNA, 588 bp, Homo sapiens
aaagatgacaagatgtacaggattacctgtataggattatgtgggtatgttccataagacttacttccaactcccaaagacagctgtggtaggttgtgtgttgccacttactcttagaataacctggggaaattttcatactaagcctccagttccttgtcaatagaatgaggataacataaactttcgtgcctagcacacaataagtacttaatacactttatcaactgagaaaatttacattataaattcttgtgaaaatatatttattattaattcttcccttatttttctggcggcaaaaccagtcttacaacctctgaactgagtcaagaatgtgttctattagagaagaagcaaatctgatttctttcacatacaaacttgtgaaatttgaggttcataataatcaaatgcatgttttgagaatcagaaacatgacttcaaggtcagttgattgattcaacttttgaactccagcattacattcyacaaagatttacaatggtggtagcattatattttagtatttatttatttattaaacaagttaagaattgataattaaccattctaaaaagaagatat

SEQ ID NO: 296535 - DNA, 640 bp, Homo sapiens
ttccttaaagattctcaaggtattctggacctaccagctttttacattttgtatcttattcattgacacgaatggtaaaacacaagctgagcccattccataacgtgtttgggacgaaaagtctaatgaaaaataatttgaacatggtccactatgaatttcagagttgtttgatagatgatggggagggggacagtgaaagttgaattgaagagataaataagaggatctstaaaataaatcatgataaataagttagaatttgtgcaatgtgtgctatactgagaggcaaggccagagggtgtcaaagaatcatggtcacatttataatgtgaaatgtgctcaacatattccttgcttgattgaccttttcacttcttacagaaggcagagtgtagactgagtagaacaatagtgttcaatgatgctgataaaaaatgacagtaaaagatagaagctttggtttaattgatatgccctcacctttgattcttaaaaggaaaattaccatgttgcagtcaatttacatgtttaattgccatatgcactcttattgaacctctgggtttgagtaaggtatatttgggaatagtatttaatgagtcagcacagaggttatgaagcattcagatttgaaata

SEQ ID NO: 296536 - DNA, 567 bp, Homo sapiens
atcaaattaaatttggccacaaatggatgtcaaagccaggattatggtggtggaaatttgagtccaagaagagctcaaatcggtccgggacaatggagcaagcatgaaggggaaggagggtggaaatgggaatcttggaattgagattagaggttttgctgagcttccctcctatggcctatgaactgtgtagggaagagggctaggatagctatgcctctcttaaagtattcagacaaacagtatctgctaagaggtgaaaaactagaactttgtttcatccaagtgtgtctgtatcgmtctttccccacacctttattgtcacaggttctttgctggaggacaggttgggcttatttctctttattatgacgactttgtatttcatctgcttcaaggtatatattttgagtttttatgcacatttgactttattttaattggtgttacaatgcacttaccataaccccagttatcaatggaactttcagtgtcacttgtattacttctatctttagctataatattttggaccaaaataatattttcctttttaatactagaaaa

SEQ ID NO: 296537 - DNA, 578 bp, Homo sapiens
atctccccaaacaataatgcattgattatcatttcacatgtatatagccactcaaacttatttccagtggatttagtatacatctgtcatcttattgctatcaattcataggattaaaagtttttattaaaagtacaatttcaactttcacagaaggaaaggaattagagaaaaaagataaaagtgtaaatgagaagtgagaatctgacttaaactttttctttctttcttttttatttttttgtggaaatggggcctagctatgctgcccaggctgatcttaaactcctgggctcaagcaatcctcccacctcaatctcccaaatttttkggggagcaatcccaattttgctgggattacagatgtgagccaccatccatggctgggagaatttggaaatcaaaagaaagaaaaaaacaaaaaggaagttgagtccacctgtgcatggtccagttaaaatctggggaggatccaaagatgaaaaaaaaaaaaaaagaaaagaaatttggccccagtcaacaagaacattgtgactagaattgctgaggccaagccacagccatggaaaattccaaca

SEQ ID NO: 296538 - DNA, 580 bp, Homo sapiens
tgaggccaagccacagccatggaaaattccaacatacaaaagtaataatgtatctttgaattgggcatggtgaaggttactccaggcatatgagattyacagaaatctaagcagatttctggctggagttcagtagtaggaccctggtgcctaggaaggcgaatggaagggaagccatcttctagaggcactcaagtaccagacagattaccaaaatgggtattcagttaccatagtgatacataaggagatgtatcacttatggtacatcaatttggggatagaagagaggacaacagtaactgattgatatcagcaaattttggaaaacctacaagtatctaataaatccaacatttttctagcacctattacctgctggatatttttgtaagtactttaattgttgtactagccctatgagtcaggcaatattattatctacaattgacaggtaaggaaggcactgaaaggctgaagaagttatccaagatcatttacttcataagtggcagtcaagatttgaaccaaggcagtttatccccagagcctggacacctaaacactatttgtcatgttg

SEQ ID NO: 296539 - DNA, 483 bp, Homo sapiens
gtgacaatgccctgaggcatggtctcatctagctggctaaaggaccaacaaagaagtcagtgcagcaagagaagaatgaaccagggtgatagtaataaagttggaagtaaatgggcaggggatagagcttgtgggctttagcggggattataagaccattgrcttctattcttcatgagaagggatgccaaagttgggttttgagcagaggagtcgacagtcttaattatttgttacaaggatcactatgaaaaatctattgagaatagaccttgttgggaaggtaaacattcagtgcatttattcaagtcaaaatgatagtggcctggtagtgatggaggcaatgaggagtagttggatcgtggatatattttaaaggtagagcctacaggaattgctgacttcagatgaggtatgagaaaaaggaaggagtcaaagataacatcaagggtttgggcctcagccactggaaaaataaaagtt

SEQ ID NO: 296540 - DNA, 606 bp, Homo sapiens
agttgggtggcatagatgcacagatagaagcagggataaaagactctaagacttcacagtcctgtggcaaggcaaggggatcctcttagacttgacttccagcctcagcctcagagggctgactgttccttgcattttgtttttggatatttacaaacttttgtcattctttcaacaaacctttggagggacagctgcagctttcaattatagccttgaccagctgaggaagacttcaaggagcttcatgagtttggacttgaaggataaatttttgcttgaaggatgatttkttttttgtatttggaaaggtaagggaatggctagcaaaaatagttaccatgtactgagtatctcaatgtgtgccaagtgtttacgaacactttctcatttaattctcaccacatccccatggaataggtcttattatcttcattttacaaatgaggactagaaaggtgtaatgaatccctagattatacagccaatatctggtattgtccaggagccacctctggtctgtcatactccaaaattctcttaaacattctgctataatgtttccagtttggggaaataacaacaacaacaaaaattggaatcagg

SEQ ID NO: 296541 - DNA, 606 bp, Homo sapiens
agttgggtggcatagatgcacagatagaagcagggataaaagactctaagacttcacagtcctgtggcaaggcaaggggatcctcttagacttgacttccagcctcagcctcagagggctgactgttccttgcattttgtttttggatatttacaaacttttgtcattctttcaacaaacctttggagggacagctgcagctttcaattatagccttgaccagctgaggaagacttcaaggagcttcatgagtttggacttgaaggataaatttttgcttgaaggatgatttgttttttgtatttggaaaggtaagggaatggctagcaaaaatagttaccatgtactgagtatctcaatgtgtgccaagtgtttaygaacactttctcatttaattctcaccacatccccatggaataggtcttattatcttcattttacaaatgaggactagaaaggtgtaatgaatccctagattatacagccaatatctggtattgtccaggagccacctctggtctgtcatactccaaaattctcttaaacattctgctataatgtttccagtttggggaaataacaacaacaacaaaaattggaatcagg

SEQ ID NO: 296542 - DNA, 606 bp, Homo sapiens
agttgggtggcatagatgcacagatagaagcagggataaaagactctaagacttcacagtcctgtggcaaggcaaggggatcctcttagacttgacttccagcctcagcctcagagggctgactgttccttgcattttgtttttggatatttacaaacttttgtcattctttcaacaaacctttggagggacagctgcagctttcaattatagccttgaccagctgaggaagacttcaaggagcttcatgagtttggacttgaaggataaatttttgcttgaaggatgatttgttttttgtatttggaaaggtaagggaatggctagcaaaaatagttaccatgtactgagtatctcaatgtgtgccaagtgtttacgaacactttctcatttaattctcaccacatccccatggartaggtcttattatcttcattttacaaatgaggactagaaaggtgtaatgaatccctagattatacagccaatatctggtattgtccaggagccacctctggtctgtcatactccaaaattctcttaaacattctgctataatgtttccagtttggggaaataacaacaacaacaaaaattggaatcagg

SEQ ID NO: 296543 - DNA, 513 bp, Homo sapiens
agaaattggcaaatattgaaaacttgcatctttagagactctttgacatctgttactttaaaagcttctctttataaaatgactctggagcttaattctgtgtttaaatccrtatacccagccactctcaaaataaaattaaagttatttatatacaaaatctattaggaaatgtgtcaatgttttcctgtcatttatttgctagtttcactgtgaatcttaatgcttctgctgcataaatgctatgaggaaaacagacacacattgacaaatgaaaataattatttcataattatttcaataatgtattatgaatttaatgttattatagaaagtcatttcatctacctggaagctattcttctttttttttttttggagtcagataaacctgcatttatttttttatttttttttagaattggttcatgagtttaattttttttattatactttaagttctagggtacatgtgcacaacatgcaggtttgttacatatgtatacatgtgcc

SEQ ID NO: 296544 - DNA, 298 bp, Homo sapiens
agctcctttttcctttcttatagtgaccagtgggactacatttagggctactaagtaagtctttctggttctggagttaaattaataagcccccactygtgaatttcaggtttatcagaaaaataacacagatattttggttttcatctgccaattctctgtcctgtttctcatttgattcagaatttgagtgaaaaacttggtattatttactgacctctttcaaagtctgcagtagatataatttgggaaagctatcagaaagcagcttagctttggtgggttcataggaaaacat

SEQ ID NO: 296545 - DNA, 554 bp, Homo sapiens
caatttgcattttaaaagatacaaactagaggaagcctttgaggaggatttggactggcaaagacgaaaggctggagagtctcacgaggtaggcgcttcaagatgggcagcaggtggaggcagccagagtgtcatcatgcacagtggtgacctgctcacygccccctgctcacctgtcttctcttctatctctgtaaatccataattaaaattttaaaacctactaattttataatgtatggctccagttacaagaatgttttctaggagacttaactttgatttcatgtatttatttagagacaagttctcactatgttgcccaggctggtctcaaactcctggactcgagtgatccacctgccatggcctttcaaagtgctgggattacaggcttgagccactgcacccagccaactccctgtctcccaagaagtgaaaagagtttccaaagagaaaaatcaaacgtgaacaatttattcaaaaatggataagatatctctaaaattcactgtcagtaaaaattttctttctatttttactaaattatagaa

SEQ ID NO: 296546 - DNA, 554 bp, Homo sapiens
caatttgcattttaaaagatacaaactagaggaagcctttgaggaggatttggactggcaaagacgaaaggctggagagtctcacgaggtaggcgcttcaagatgggcagcaggtggaggcagccagagtgtcatcatgcacagtggtgacctgctcactgccccctgctcacctgtcttctcttctatctctgtaaatccataattaaaattttaaaacctactaattttataatgtatggctccagttacaagaatgttttctaggagacttaactttgatttcatgtatttatttagagacaagttctcactatgttkcccaggctggtctcaaactcctggactcgagtgatccacctgccatggcctttcaaagtgctgggattacaggcttgagccactgcacccagccaactccctgtctcccaagaagtgaaaagagtttccaaagagaaaaatcaaacgtgaacaatttattcaaaaatggataagatatctctaaaattcactgtcagtaaaaattttctttctatttttactaaattatagaa

SEQ ID NO: 296547 - DNA, 518 bp, Homo sapiens
taatcccagcactttgggaggctgaggcaggaggatcacgtgagctcaggaatttgagactagcctgggcaacatggtataaccccatctctacaaaacatacaaaaattagccaggcgtggtggcctgcamctgcagtctcagctactcgggaagctgaggtaggaggattgcttgagccagggaggtcaaggttgcagtgagccatgattgcaccaatgcactccagcctgggaaacagagcaagaacctgtctcaataataataatgataatgataataataatagaagcagggggagttgcactattcagtgattcccaagagttatttggcagacaaatgtaactgcatttcttctccacttaaaccagtcctattaacatttgtgggaaatgtgaaatacctctatttaagagtaatttcaggacttagtttcaaaataacaacttttgacttacaactgagtttaggaggcccatcagcttctaggggctcagctagcaaaacaaatgaca

SEQ ID NO: 296548 - DNA, 664 bp, Homo sapiens
ttttcttgcaagtactgcatctctattcatccatggagtctacatacagtattttaaaaataaagtaatttggcctgattctcctcaaagagaaaaacaagactttcctaaatttgagagaggacacactctgtaagccaaggaggaggctatcactcacccctctcctttcctttgacccatatgcagcagcccagcgcccagtaacagcttggcagggtagcccagtggccrggcagccggcttgcccaggcattccccgtcccacctggccggcaccacagccccaccaccacgtgcaactgcttgggaggatggagagcaaggacacagagctcaacagggaagcgctccagaccagacgcagaatcctggagcacacacctagatttgtcctcagcaaattccaggcaggaatttttattatctgctaaatggatttccaaatacttctagacagtatactaagctctacaaagaaatcactattccagggcttcccttctcttgaaactgtatttctctctgggatgctagaagttggagtgaaaaaaaaggtttttctgagcaggtatgttcataaagcttaattgccataggctttcttatttttccttcattttctgtcagtgcccagagggtggctaagggggccccatctcca

SEQ ID NO: 296549 - DNA, 652 bp, Homo sapiens
tgcactgcttttgttcattttattaaatttcaaagcagttacaaggtgatttatatgtccatattactgagacaaataatgatgacaataataaaccttaattcaaggaattttcccttaagcacaaaactagtaatgattagggtgacattttttcctgagctttagtatcagacaaaactatcttccaatactttccagaccaacttagttttatagctgatgatagcactgataattcagagattaggtaatagtacaaaaatataatataagtattacaaatcaaagkttaaggttttgttaagattttttgctagtaagtattaatttgaagcattcattcattcagtcaacggaaatgtgctaggcacttactgtgtgctgcaaaactataccaggcatgggaaagtgacagacatgacgtccctggcccaggatgctcacagtctgcctgtgtggcctcagatgtggcagtgaaagtcatgagaaacagcaactgaacactgatgcttgtaataaagcatcacttctcatacaattcattgagcgagcttctaaaaatatgaatttttatctttctgaagaggagatagattttacattgatttatgtctgaaaaagtgtccttcctctaacaatgaaaaatgtc

SEQ ID NO: 296550 - DNA, 574 bp, Homo sapiens
gccatgcactccttaaatatgtgtgcaaaccaatttatttttccatttcttcttycttagccactcctggggtactaatcaggaccccaaaaggaaacagaaggtatattcaaattgggcaatttggcctaaactatcaagggaagggataagttgaggaactcgagagagctgtgtggagaaggccaccagacaggagctgttgacctggaagggagggagacaggagacaacaaatacctcaagctgactatcctctctctctctctctctgatctgccagggctccaaattggccaaccttaacaagaagcgtctgtaatgcatacaattcagcctcccaggacacagagaagggtggagaatggtggagagtggatttttgaggagcaaataaatagaagtttttttacctaaagatatcataagagttaaacttgttttgagacctagacttatttttcacttattttgtgaacatcttcaattgcatatttctctcaggcaccccaaatcaacataagcaaaacataactactctggcctttcaaaccctcttctcttcttaagcccc

SEQ ID NO: 296551 - DNA, 588 bp, Homo sapiens
tattatattaatgtgcaaacataaggctttattatgtagctactcatagagctaagtacagtatttaattgaatctaatatgctgtagattgtaaaggcagccaagaagaaaactctgccaataataattgtgagacacccattgattataagatacatcccaagttcagaaatattaaaatgtgaaaaaagcacaccttagaataagcaaaatcaggtaccacctagtctacactttcattatttacataaggaatcaggtctagagatgtaagtgacttgcttaaggtcacatagctccttagtggcagtgccacatcaagacatacctgatttccagtccaaagccatttcatttcatcatatatatttattattgatgatcagtgtgagtaataacaactcccaaattggtaaaataaacttaaattaagygcccttattcctctttatgtcaggaatagcagaaaaaatagatgctggttctttaatgcctgcaccctgccttcccccaacaccaccaaaaccaagtaaaaatataaggatctttcattaatgactgtggaaattagcttgtgaaatagtttg

SEQ ID NO: 296552 - DNA, 550 bp, Homo sapiens
ccaggaagctgaagttgcaaataaccttcttttttttcaagaactttccaaaaacccatttacttgaaaaatagaccgcccatctaaggctcataaatatatctttctcagaacaacatacagcacaaacaaatgactgtttcctatttaagagcttctccaaagcactcacatccctcaattcacctatcctaaactcttaatcacaaagtatgcccaactctaatcaagaccacttattgaaatacctgtcaaactacatacccccaaaaytttataagcaactcttctttgcttttctctttccatatgctgctcactttctgtgacaagagtgatcttttttaccaaactaagcaattaagtcagccatgctttatctttaataggttattttggtggaatttttggtgagccaccattcagtcattcacagcttttagagtatgtactacagccccatccagtagaatgatcacagcaaatatttttgtttcctctaagtttttgaccacatcgatcatatatatatatgtacttatttatttat

SEQ ID NO: 296553 - DNA, 604 bp, Homo sapiens
tttgtttcctctaagtttttgaccacatcgatcatatatatatatgtacttatttattkattgattgctgttgtgacgttatttagaaatgcatttagcactcctgatgaagatatctgccttgactaaaatttgttcaggctcctccatctacttcacaactagcccttgaccttggcctgcctttaacaagaatcctgctgggtcagtttagtgagaatcctcctgcctttgacacttgatcaaattcctctacccctacccttgaaatttaagtctatggcttgcctttagcaaaaattgtgttaatccagttgacagagcaggagcattgccatcttggacatgcccctcattctaaagttcaacctaataaaagccacctaaatccaaagtgtatcagcataatggctaaggtcagcatgaccataaaccacaaataacatctccaaccagaaacattccaaactcctccccgaccacagacatgctagcccctagataaccccttccagccaggaagatgctagccccgagacaaccctcctcctggctgaagagatgtctgccccaagataatctcctctcctcccagagacattcc

SEQ ID NO: 296554 - DNA, 628 bp, Homo sapiens
taaatttaaacttagcattgttaatggaagaaataaactttgtaaaataytttaaagaggtttattctgagccaatattagtgaccatggcccagggaacattcttaagaagtactgagaaatatgctgaagggagttgggttaccatttggttttacacattttagggagatcggaattgtaggtaaaaccattgatatggtttagctgtgtccccacccaaatctcatcttgaattgtaatccttataatccccatgtgtcaggggacccggtaggaggtaactgaatcatgggggtggtttcccccatgctgttgtcctgatagcgagtgagttctcacaaggtctgatggttttacaaacatctggcatttcccctgctggcactcattctctctcctgctgccctgtgaagacgtaccttctgccatgattgtaagtttcctgaggcctccttagccatgcagaactgtgagtcaattaaacctctcccctttataaattacccagtctcaggtatttctttataccaccatgagaacaggctaatacaactataaataaatacaaggaaggtgtacctgggttcagcctaaagatgtgggatatcttgaagtggggaaggtt

SEQ ID NO: 296555 - DNA, 628 bp, Homo sapiens
taaatttaaacttagcattgttaatggaagaaataaactttgtaaaatactttaaagagrtttattctgagccaatattagtgaccatggcccagggaacattcttaagaagtactgagaaatatgctgaagggagttgggttaccatttggttttacacattttagggagatcggaattgtaggtaaaaccattgatatggtttagctgtgtccccacccaaatctcatcttgaattgtaatccttataatccccatgtgtcaggggacccggtaggaggtaactgaatcatgggggtggtttcccccatgctgttgtcctgatagcgagtgagttctcacaaggtctgatggttttacaaacatctggcatttcccctgctggcactcattctctctcctgctgccctgtgaagacgtaccttctgccatgattgtaagtttcctgaggcctccttagccatgcagaactgtgagtcaattaaacctctcccctttataaattacccagtctcaggtatttctttataccaccatgagaacaggctaatacaactataaataaatacaaggaaggtgtacctgggttcagcctaaagatgtgggatatcttgaagtggggaaggtt

SEQ ID NO: 296556 - DNA, 628 bp, Homo sapiens
taaatttaaacttagcattgttaatggaagaaataaactttgtaaaatactttaaagaggtttattctgagccaatattagtgaccatggcccagggaacattcttaagaagtactgagaaatatgctgaagggagttgggttaccatttggttttacacattttagggagatcggaattgtaggtaaaaccattgatatggtttagctgtgtccccacccaaatctcatcttgaattgtaatccttataatccccatgtgtcaggggacccggtaggaggtaactgaatcatgggggtggtttcccccatgctgttgtcctgatagcgagtgagttctcacaaggtctgatggttttacaaacatctggcatttcccctgctggcactcattctctctcctgctgccctgtgaagacgtaccttctgccatgattgtaagtttcctgaggcctccttagccatgcagaactgtgagtcaattaaacctctyccctttataaattacccagtctcaggtatttctttataccaccatgagaacaggctaatacaactataaataaatacaaggaaggtgtacctgggttcagcctaaagatgtgggatatcttgaagtggggaaggtt

SEQ ID NO: 296557 - DNA, 321 bp, Homo sapiens
taaattacccagtctcaggtatttctttataccaccatgagaacaggctaatacaactataaataaatacaaggaaggtgtacctgggttcakcctaaagatgtgggatatcttgaagtggggaaggtttacatgtcatcagtggggtcaaagattttctgattggtaattggttgcaagagttaaactttgtctaaatatttgaagtcagaagaaataaatgcttgaatcaagattaaagggggttgtaaaggccaaggctctttttatgcagatgaagcctcagagagaatagatggtaaatgtctcttttcagacatt

SEQ ID NO: 296558 - DNA, 425 bp, Homo sapiens
tgcccacagggttggtgtcttttcaaggtgcccacaggattggtgtcttttgaggcctttctctcgggcttgtagatggccattttctccttatatgctcacatggtgttccctttttgcaggtatgtgtccaatatttctcatatgagaactcyagtcacattagattagggctcaccctaatgatttcattttaacttacttttctctttaaagaccctgtatctaaatgcagtcacattctgaaaaactggctgttaggacttcagcatacataattctagggggacacaattcagctcataacattattacaattattaattccagttcagtggttaaaataatatttttgcattatgacagtcataactttatctattaaaaaactgaatacctatttcacgttcctttgaggctttata

SEQ ID NO: 296559 - DNA, 638 bp, Homo sapiens
catttttgttcctatcaaagtgttctgatagaaccaacaagcaacaatagaatgaatacattttttcaatctcaataaactacttgttaagtgtttaccatgtccctaggaagtaggaacgaggaggggaaaaggcacctataacctagtcagtaagaaaaaaattcagttatgcagtacattaaaagaaagggccatttcttaacacctacaatgggaaggacattttgttagacatttatacttatctcatttaattcttatatttacataaacaaaattattatatttacataaagaaaattgaactccagggaacttaattaagtggactaacatcatacaattaagagaacgggggarccagaattccaatgggagacagactttaaatacaatttggaagtgaaaattttaatagctgccccaggggatggtgctgcttgatctccacccccttatagcacacacccgacctggttatggcctgcagcacccagaggctatagttgaaggggtagctctcaacattcctcgtactatcagaatttgttctattaggggaaataactgaggtctgaacatggcaaattcaggtgtggacgcattcatgtctcccctgcaaggtgcatgccact

SEQ ID NO: 296560 - DNA, 606 bp, Homo sapiens
tttgtaccctgtcactttgcttattgtttttaattagttctaacaaactttttggaaatctttaaaattttctaagaccayatcatgtgtaaacagaagtaattttacctctttgtttccagtttccaaggcttttatttctttttcttggctaatttccttgatcagaaattccagtactatgttgaatagaagtggcaaaagtgagcatcctatcatttttctgatcttcaaggacaatttttcagcaatttcaccattgcgagtaatgtgtgctatgggtttctcatgtgtggattagaatatattgaaatagttttcttttattcctagtttgttgagagttttcatcacgaaagggtattaattttttattaaatgattttttctgtatcaattgtgatgatcatgtaatttttatctttcattctgttaatgtagtgtattacatgattgatttttatatgttgaaccatcctagcacaggaataatcccagtgggtcatggtgtataatctcttaaacatgttgctaaattcagtttgttagtattttgttgagtatttctgtaacagtattaacacagtttggatgttgtactctcta

SEQ ID NO: 296561 - DNA, 606 bp, Homo sapiens
tttgtaccctgtcactttgcttattgtttttaattagttctaacaaactttttggaaatctttaaaattttctaagaccacatcatgtgtaaacagaagtaattttacctctttgtttccagtttccaaggcttttatttctttttcttggctaatttccttgatcagaaattccagtactatgttgaatagaagtggcaaaagtgagcatcctatcatttttctgatcttcarggacaatttttcagcaatttcaccattgcgagtaatgtgtgctatgggtttctcatgtgtggattagaatatattgaaatagttttcttttattcctagtttgttgagagttttcatcacgaaagggtattaattttttattaaatgattttttctgtatcaattgtgatgatcatgtaatttttatctttcattctgttaatgtagtgtattacatgattgatttttatatgttgaaccatcctagcacaggaataatcccagtgggtcatggtgtataatctcttaaacatgttgctaaattcagtttgttagtattttgttgagtatttctgtaacagtattaacacagtttggatgttgtactctcta

SEQ ID NO: 296562 - DNA, 585 bp, Homo sapiens
ttcaaggacaatttttcagcaatttcaccattgcgagtaatgtgtgctatgggtttctcatgtgtggmttagaatatattgaaatagttttcttttattcctagtttgttgagagttttcatcacgaaagggtattaattttttattaaatgattttttctgtatcaattgtgatgatcatgtaatttttatctttcattctgttaatgtagtgtattacatgattgatttttatatgttgaaccatcctagcacaggaataatcccagtgggtcatggtgtataatctcttaaacatgttgctaaattcagtttgttagtattttgttgagtatttctgtaacagtattaacacagtttggatgttgtactctctaaatttcatactgaatgtcattccccaatgttggaagtggagcctggtaggagatgattggattatggtggcaggtttctcattaattgcttagtgccatatccttggtgctgtcctcatgatagtgagatcttacaatatctggctatttaaatatgtgtggcatcttacccctaacttttttgcttctactctggccatgtgatgca

SEQ ID NO: 296563 - DNA, 598 bp, Homo sapiens
tttcatcacgaaagggtattaattttttattaaatgattttttctgtatcaattgtgatgatcatgtaatttttatctttcattctgttaatgtagtgtattacatgattgatttttatatgttgaaccatcctagcacaggaataatcccagtgggtcatggtgtataatctcttaaacatgttgctaaattcagtttgttagtattttgttgagtatttctgtaacagtattaacacagtttggatgttgtactctctaaatttcatactgaatgtcattcyccaatgttggaagtggagcctggtaggagatgattggattatggtggcaggtttctcattaattgcttagtgccatatccttggtgctgtcctcatgatagtgagatcttacaatatctggctatttaaatatgtgtggcatcttacccctaacttttttgcttctactctggccatgtgatgcattggctctctgtatttgcttgttcttgtactgctacaaataaatacctgagactggatgatttgtaaagaaaagaggtttaattgtctcatagttctataggctgtacaggaagtatagtggcttctac

SEQ ID NO: 296564 - DNA, 598 bp, Homo sapiens
tttcatcacgaaagggtattaattttttattaaatgattttttctgtatcaattgtgatgatcatgtaatttttatctttcattctgttaatgtagtgtattacatgattgatttttatatgttgaaccatcctagcacaggaataatcccagtgggtcatggtgtataatctcttaaacatgttgctaaattcagtttgttagtattttgttgagtatttctgtaacagtattaacacagtttggatgttgtactctctaaatttcatactgaatgtcattccccaatgttggaagtggagcctggtaggagatgattggattatggtggcaggtttctcattaattgyttagtgccatatccttggtgctgtcctcatgatagtgagatcttacaatatctggctatttaaatatgtgtggcatcttacccctaacttttttgcttctactctggccatgtgatgcattggctctctgtatttgcttgttcttgtactgctacaaataaatacctgagactggatgatttgtaaagaaaagaggtttaattgtctcatagttctataggctgtacaggaagtatagtggcttctac

SEQ ID NO: 296565 - DNA, 586 bp, Homo sapiens
actcactcattatcacaaaacaacatcgaaaggaaaatctgccctgttgatccaatcacctcaaatcaggctttaggtccagcattggagattacaattccacatgagatttgggtatggacacaaatccaagccatattattcaacccctggcaccttccaaatctcatggctctcttacatttcaaaatacaatcatatcttctcaagagtccccccgagtcttaactcactccagtattaactcaaagtcttatctgagacaaagcaagttccttttgcatatgagcttgtaaaatcaaaaacaagttagttacttccaagatacaatgttggtataggcattgggtaaatattccctttccaaaatggaaaaattggtcaaaagaaagaggctataggctctgtgcaagtctgaaacccagaaaagcagtcrttaaatcttaaagctccaaaataatcttctttgattccatgtctcaatccaggtcacactgacgcaaaaggagggctcccaaagccttgggcagctccactcctgtggctttctagggtttagcccccacaactgttctcatgggctggc

SEQ ID NO: 296566 - DNA, 531 bp, Homo sapiens
agtactgccatggaggtctctgaaatgccttcaaggccttcccattgtcttggctattggcaactggttcctcattacttatgcagatttctgcagcctgtttgaattcctcccctgcaaatggcttttcttttctaccaaatgactaggctgcaaattttctggctggagctggagcagagtgagatatggggagtagtgtcccaaggctgaacagggcagtggggccytgggcttggcccatgaaaccattcagtcctcctaggcctctgagcctattatgggagtggatgccacaaatgtctctgaaatgccttggaggctctttccccattgtcttggctattagtaattggctcctctttacttatgcaaatttctgccacctgcttgaattcctccctgttaaatgggctttttttttttttttctatcacatggtcagggtgcagattgtccaatcttttacactctgtttttcttttaaatataagttccagtttcaggtcattttttgctcgcacatacgaa

SEQ ID NO: 296567 - DNA, 613 bp, Homo sapiens
ttggctattggcaactggttcctcattacttatgcagatttctgcagcctgtttgaattcctcccctgcaaatggcttttcttttctaccaaatgactaggctgcaaattttctggctggagctggagcagagtgagatatggggagtagtgtcccaaggctgaacagggcagtggggccctgggcttggcccatgaaaccattcagtcctcctaggcctctgagcctattatgggagtggatgccacaaatgtctctgaaatgccttggaggctctttccccattgtcttggctattagtaattggctcstctttacttatgcaaatttctgccacctgcttgaattcctccctgttaaatgggctttttttttttttttctatcacatggtcagggtgcagattgtccaatcttttacactctgtttttcttttaaatataagttccagtttcaggtcattttttgctcgcacatacgaatataggcttttagaagcagcctggccacatcttgaatcagttgctccttagaaatttcttctaccagataccctaatccatcactcttaagttcaaagttccaaagatccataaggcatgggcaaaatgcc

SEQ ID NO: 296568 - DNA, 401 bp, Homo sapiens
tcagggtgcagattgtccaatcttttacactctgtttttcttttaaatataagttccagtttcaggtcattttttgctcgcacatacgaatataggcttttagaagcagcctggccacatcttgaatcagttgctccttagaaatttcttctaccagataccctaatccatcactcttaagttcaaagttccaaagatccataaggcatgggcaaaatgcctccaagttctttgctaatgcataacaaaagtgattttttgtattagtcygttctcacgcttcagaaaatctgtggctgaatttctaagcagttcaagtcgatatggtctatgatgttttctaattcctacctccatgggctgaacccattagagcctggctaagaggacagaggactcgt

SEQ ID NO: 296569 - DNA, 636 bp, Homo sapiens
aaatctctgtactctgaagccactgcaatactgcagcaacaaaattccataagcatttattgtttctatatcttaggcactaactagtctatatacttgaaataaagaaatgaatagcacattcttcacctagtaaagatgcacacagtagaatggggcaggtaggcaaataaaactatttcaatacaaagaggggtgctgtaattaagagtaaagacttgtgctgttgaacaaaggtagcaattaggcacatgtgttctagaatgctagtctgaatcaagatctgctttaagtttaaaatrtacactggatatgaaaactcagtgtgaagaaataaaaaaaatctcatttttataggtcatatgttgaaatgatattgagaataaaataacagtacaatgaatttcacctgtttctttctgcttttgtaatatatctacttgaaattttttaaaaattgcatagcatttttagttcatattcgacttctaatggacagtcctgtcacagacctcttcaaaatttgttctaccattagctgtgagacattgggtaagtaacttaattttctttgcattattttctacattcataaaataggactgatgataactacagttgtttactgaatatgct

SEQ ID NO: 296570 - DNA, 557 bp, Homo sapiens
tgaagaaataaaaaaaatctcatttttataggtcatatgttgaaatgatattgagaataaaataacagtacaatgaatttcacctgtttctttctgcttttgtaatatatctacttgaaattttttaaaaattgcatagcatttttagttcatattcgacttctaatggacagtcctgtcacagacctcttcaaaatttgttctaccattagctgtgagacattgggtaagtaacttaattttctttgcattattttcyacattcataaaataggactgatgataactacagttgtttactgaatatgcttgtcagaatgagtaaatgatttaaaacacataaagggttattatcattaaagataagcacagagcatgcaggcacctagaaggattgcacaacacagccaggagaattaatctcaaggaatgtttttttatttttttaattttatggtttaacaaagccttgaaaaaaatgttagaaagctgttccagtgcaatcagatggggagaatattccaaaaatagggaaaaatataagtaatgtcaccaaa

SEQ ID NO: 296571 - DNA, 557 bp, Homo sapiens
tgaagaaataaaaaaaatctcatttttataggtcatatgttgaaatgatattgagaataaaataacagtacaatgaatttcacctgtttctttctgcttttgtaatatatctacttgaaattttttaaaaattgcatagcatttttagttcatattcgacttctaatggacagtcctgtcacagacctcttcaaaatttgttctaccattagctgtgagacattgggtaagtaacttaattttctttgcattattttctacattcataaaataggactgatgataactacagttgtttactgaatatgcttgtcagaatgagtaaatgatttaaaacacataaagggttattatcattaaagataagcacagagcatgcaggcacctagaaggattrcacaacacagccaggagaattaatctcaaggaatgtttttttatttttttaattttatggtttaacaaagccttgaaaaaaatgttagaaagctgttccagtgcaatcagatggggagaatattccaaaaatagggaaaaatataagtaatgtcaccaaa

SEQ ID NO: 296572 - DNA, 557 bp, Homo sapiens
tgaagaaataaaaaaaatctcatttttataggtcatatgttgaaatgatattgagaataaaataacagtacaatgaatttcacctgtttctttctgcttttgtaatatatctacttgaaattttttaaaaattgcatagcatttttagttcatattcgacttctaatggacagtcctgtcacagacctcttcaaaatttgttctaccattagctgtgagacattgggtaagtaacttaattttctttgcattattttctacattcataaaataggactgatgataactacagttgtttactgaatatgcttgtcagaatgagtaaatgatttaaaacacataaagggttattatcattaaagataagcacagagcatgcaggcacctagaaggattgcacaacacagccaggagaattaatctcaaggaatgyttttttatttttttaattttatggtttaacaaagccttgaaaaaaatgttagaaagctgttccagtgcaatcagatggggagaatattccaaaaatagggaaaaatataagtaatgtcaccaaa

SEQ ID NO: 296573 - DNA, 636 bp, Homo sapiens
ggtccatttcacaaactgaaagtggttttcaagatgtaagactgcgaacctctcagaagccggtggtggaaggagagaccagagagcaaggtaagggccaatcactgcacagccttatactattctaaggaattcgtggaattaggtattcctataagattaactctactgtcccaggagaggcaaaggcaatattcaaagagaagaaatgaaatggcaataagtagtcatgtatgttactgaaacactgatacaaaggctgtctgaagagaaaagcatatttttcctttccccacttagctgactctcaaggtaggatgcttttgagtaggtagtgaattatccttttctatgrattgaacctattaagccaataagcctccaaaccgtgtatatgcttaatgaatttactgtaatattggttatgaaaataattatggattttagaaattgtgcatggtcaccaaaataaatattaatgctcagattctattatcattatggatagacaaaaaaaactcataagatatttatcacttacaagaacataatagaggtagagagacatactccaaggcaaaagagaaaaagttgaaagctcttctggaaagggtctctttgtccaagagctgcaga

SEQ ID NO: 296574 - DNA, 1214 bp, Homo sapiens
gaatcagttcatcaaggctgctaataactaaagcagtggctttcaaacttgaatggctttaagaattatctggagagcttgttaaaatgccacaggctcaaggaattctaactcattcagtcctgagtgggatctggaaacctacacaatatcaagcccgcttcctcaccccaagtgattttaatttttctaaccaacactcacatagtgtttattatatgtcagacactgttataagcattttataaatgttaacttatttcaagtcacacaatttttacattttttttcccattttttacaggagagcaatggagacagagttgcttatccaagggcagtctagcaagtggcagagctggggcrtgagtccaggcagttttgttccagagtccgtgctcttggtcaccttactttgatgcgtatcctccaccagcacactttgagaaacaccacagtaaggaatacgcacacagatgtgacaactgcccctacaaagcaaatcattcctgtcaattatggatacctgtctcatttattgaaaacctacttcgtgccaaggactctggtagacagacaagttttttaaagcattacaaaataagtgtgaaaaacaaaatwgctatttcaaaggtagtccatgctaatcacaatgacttgaaaacacacacagaaataaatctatttgcttgccaatctatttgcttgccaataaagaagctagaagttacagagaaatatcctctatgcacctcctccaccacacatacatgacaaaaagaaacatacacatttcatcagtaataggttwtacgatttattatttttggtatttcctcaagtgctaatataagaaggtaaaaaaggtcaaggatgtacttaggggataccatctttagatagaaaaaaggaacataatcatatgaagggaccaaatatgccacaccaaaatataccactttggaaaatgattttttataactgaaggtaattgagagaaatcagaaacagtaagagctctctgccctcccactttctgactacaagtatcacattagttttccttgtggaaatgttcccttctcccatctcaggaagacaaaaaccctcgttacgggaaataaagatagtactgagagatgagtctgcataaacaaaccttactaaataactcttctcatcgtagttttcccatatatttcctagtcattttc

SEQ ID NO: 296575 - DNA, 593 bp, Homo sapiens
gctatttcaaaggtagtccatgctaatcacaatgacttgaaaacacacacagaaataaatctatttgcttgccaatctatttgcttgccaataaagaagctagaagttacagagaaatatcctctatgcacctcctccaccacacatacatgacaaaaagaaacatacacatttcatcagtaataggttayacgatttattatttttggtatttcctcaagtgctaatataagaaggtaaaaaaggtcaaggatgtacttaggggataccatctttagatagaaaaaaggaacataatcatatgaagggaccaaatatgccacaccaaaatataccactttggaaaatgattttttataactgaaggtaattgagagaaatcagaaacagtaagagctctctgccctcccactttctgactacaagtatcacattagttttccttgtggaaatgttcccttctcccatctcaggaagacaaaaaccctcgttacgggaaataaagatagtactgagagatgagtctgcataaacaaaccttactaaataactcttctcatcgtagttttcccatatatttcctagtcattttc

SEQ ID NO: 296576 - DNA, 543 bp, Homo sapiens
tgtggcacacctggaactatggtagccaacttacagcaaggtcacaggcatcagtgaaagattaagggcaattagaaacgcagtggctgctattgtagagccacagaacaaatgaaattagctgcctacttaatagatataatttgaaattaataactagctttttttaaccaactgtgtttgagttttcttgtacttgtagctgaaaagatttctagttgttgtaggttgtaacttgagtgatttgtccttttttaaaaataaatgtaaatacatttcattaggaagtatgataaataaaatatatatacaaatagatacattggattcccatagtttgacagtatatgagcaaatgcttaaatgtcgattgtaccaaaatattggaaactgcccaagaggcagaagatcaaactggaatgtcatgytatctttcactgtccataaggaataaagagaaatgtaagaaaaatcaacatgagcatcttgaaattcatcatggaatactagggagaggcatgaaaagtttgaaagtcaaaaatt

SEQ ID NO: 296577 - DNA, 419 bp, Homo sapiens
gtatatacctaggaaggaatttttagattacagggcatgtgaaagttatacttcacacaataatgacaaaattttacccaaagtaaaaacacaaatgacattcctgctatcaaggagtaagaggctctattattccacagtctttccratacatggtaacatcagggttaatctttgccaataggatatgtgaaaaatactatcttcttgttgataaatattcctgtttgtgaattatgttaagcagcttttaaatttatcaacaatattttttgataaaaagtccatttatattttttgttcattttcaattgatttggaagagtttttacatattaattacattaacattctctaagttaactaagagttttcattatgtcttcataatttacaacttagcatattggtatgctaaa

SEQ ID NO: 296578 - DNA, 512 bp, Homo sapiens
taaaagtatccacacagttattatgaaagaaaacataaacacatttgcttgtaactcctttcttatcctacttgttttagaacatagctgcataaaaacaattattataaaagcgtgttgattgggttataacatataaagatataacttgtatgaaaattacagtacaaaggggtgaaaaacatgaaatgargttggaataatgtttgtatgccattgaaattaaattagtattttatctgaacaaattttttctaaattaagatgctagttgtaaattacaaggcaatggctaaataaataacacaaaaaatagtaaaaaggaacaatagcaaatataaaagatacagcagaaaatatctaacaaaaaaggagtgagaaatccaagaatggagaaacaaaaatgacatatgatatgtagaaaacaaatattattaaataaatggccaatatatgttctaccttattaataattgcattaaatgaaaataaacacatgaatcaaaatgtgt

SEQ ID NO: 296579 - DNA, 389 bp, Homo sapiens
aaagaaaaataaaattggcaagcctctagatagatggatgagaaaaaataacaagattcaaattactaaaatcaggcatgaaagaagaggcatcagtatcaaccttacagaaatgaacatgtaacagaatactataaaattgcttatcaacaaattcagttatttagatcaaaacaagaagtcttagaaagacataaatttcagaagtaatrtatatttggaataggcttataacatgtaaaaggattgatgaaataaatttaaaacttcctgtgaaaaagaagcctaggccataatggtatcatcagtgagttccatgaaacattaaaaaaaatccttcataaacttttccaaaaaataaaaggaagaaacaatttgctacttattct

SEQ ID NO: 296580 - DNA, 617 bp, Homo sapiens
ctccatgatatgaagcctatccacctcttcaatagcaattatagaacccgaccatatttaataagtttatttaatattgaatacagaatccgaaaccgtaataggttgtctcacacatatataaaataaaagtattataaagaatatttgctaatgtatatttatgcagttagtgattattttccctttgctctgatgttttttgtttttgttcctgcttttgtttgagagagtttcactctgtcacccagtctggagtgcagtggcacgatctcagctcactgcaacctctgcctcccaggctcaagcaaccctcccacctcagcctccccagtagctgtgactagaagcacatgccaccatgcccggctaattgttttgtatttttagtagagttggggttttgttatgttgcccaggctgctcaaacttctgagctcaggcaatctgcttgtctcagcctccgaaagtgctgggattaaaggtgttagctgctgcgcccagcctataatttttaattaatttattttctstatctggaataaccttacacaaaaagggtcatctagtgaaatagctactctgtgccagtgtcaactgcatttggaaattactca

SEQ ID NO: 296581 - DNA, 607 bp, Homo sapiens
actattactgtttatgtatctactgatttgaaagtgaaaatgtaaaaatgtttttatcaacatcaccaagatgtttttctacaaattctaactgaattgtattctactctataaactgatagacctttgctttagaaacttatgtggaaataccaatccagagaaatcctgtctccctatctcccacctgggactytttagaacctttagtattcacttcaaaacgtctgatatgggaattatagtgtggtgttctttaacttttaatatcacagatcccataatttggagcatcatgtaacattttgtagagctactattcctcagaacacaatttgagaaatgttctaatagagtcattttccacaaataggaaagtcctacaaatattattatactaaatcataatgaaaactagtctgatttgatgtattaattataaagtagtttagattactttaacttttggtgattattgccaaaacttctttcctattaagagtattctacaataaattaaatttagtccacatataatgctgatcatatgtacagtaacattaacatctaagatgacagagtaatatacatcttattacttttgtga

SEQ ID NO: 296582 - DNA, 1159 bp, Homo sapiens
ggatgttcttgtcagaaatgtagttctatattgggttctacttttgttgtcagtatgactgggrcaggttactggatctctttaggtttgtttactcacaggtaaaatggtggttaataatatcttcctggaagagttgtgatactaaagagatggcctatatatgtaaaccacctggcacctggtagaagcattgattactcttctaccattcattttctttgaattcaattttttttgaggaagtacttcttggtgacagtgaagttccttaaccctcaagaaaaagagaaaactcagattcttggaggaaagaatgtagcactctcttttaccttgttataaaaggttaaattttcccttcagaaatttggaaggcgtggggaaaatttaagggagcaataaagaagaaaagcagaaatctgaacatagatgacaataaaaagaaatgataaatacatgcatgtacactcatgcatgtttgcacacacacatgcacatgtgtacacatgcccaacaaccacaaacacatccacaaataaaacaawttaactgctacctgcactgcaatttaatatgatgaacttaagagtacaaggcatctggaattaatctgaaaaattattattagaataatgacacttgaagtgttgacttttgactwcaatggaatatttattaactagaacattctgcatacaggcaggaccttgtgaagcaaaatttatagctttgtgttcaggaatgattacaaacaaagatagcagaatcagggctttattagagtactatgcaacagttttgctaaatatatgttaaaggaatctgaaagaataaagagaatcatgaagattatcctaaggattctcctaaggaaattgagctttctgtgctacccagagaagggcccagatggtactggattcccgctgtaacttaaagggaagcttttacaatgtctggaacctgcgatgtcttgaaaatgaaggtagaggatgtcctcaagtttcttacagcaggaacccacttaggtggcaccaaccttgacttctaaatggatcagtacatctggaaaaggaaaagtgatggcatctatatcctaaatctgaagaggactcaggagaagcttctgctgaccgctcgtgtcattgttgccatt

SEQ ID NO: 296583 - DNA, 286 bp, Homo sapiens
attagagctcttttacatattttagtaatgaaacatcatatgtgcttataaatgtgtataaacacacagacatacaggcagagaaacaaatcttcacttgtcatatttcaaagtttctctccagtattttagactatcagtctcttgattacctgttttcttctctaagcaattattagctaggcaaccccaaatgtgcaattctaaagggacagctcttgtraaacaaagtagaaaatttatatcttagagtacaaaggtaaaacatttggcctaaatattgtat

SEQ ID NO: 296584 - DNA, 507 bp, Homo sapiens
gctcactgcaatctccgcctcccgggttcaagcgattcccctgcctcagcctcccaggtagctggtattgcrggtacgcacaaccatgcctggctattttttttttttttttgtactttaatagagacggggtttcaccatattagccaagatggtctcaatcttctgaccttgtgatccgcctgccttggcctcccaaagtgctgggattacaggtgtgagccaccgcgcccggccaattgtgtaactttcaacaactcatttgacctctaaaatttctgtttctttaattgtaaaactagatttttaaattaaatcacctgtatcttctcttttattctaaaaatggacattttcatgaataaaaccccacattgtaagcagaaacttaacagtctctaagtaaaattctgtttgtcaataggtctgagtactccaggcaatgatgactctcatgatcaccttcacctggatgtgtttccagagatcaaagaactatcagacaca

SEQ ID NO: 296585 - DNA, 507 bp, Homo sapiens
gctcactgcaatctccgcctcccgggttcaagcgattcccctgcctcagcctcccaggtagctggtattgcaggtacgcacaaccatgcctggctattttttttttttttttgtactttaatagagacggggtttcaccatattagccaagatggtctcaatcttctgaccttgtgatccgcctgccttggcctcccaaagtgctggrattacaggtgtgagccaccgcgcccggccaattgtgtaactttcaacaactcatttgacctctaaaatttctgtttctttaattgtaaaactagatttttaaattaaatcacctgtatcttctcttttattctaaaaatggacattttcatgaataaaaccccacattgtaagcagaaacttaacagtctctaagtaaaattctgtttgtcaataggtctgagtactccaggcaatgatgactctcatgatcaccttcacctggatgtgtttccagagatcaaagaactatcagacaca

SEQ ID NO: 296586 - DNA, 463 bp, Homo sapiens
tcttctcttttattctaaaaatggacattttcatgaataaaaccccacattgtaagcagaaacttaacagtctctaagtaaaattctgtttgtcaataggtctgagtactccaggcaatgatgactctcatgatcaccttcacctggatgtgtttccagagatcaaagaactatcagacacagtctctgtcctgaagaatctgattatctttatacaatgacagagttatacattgagaaacataatgaatggtttaaamaaatgctcgaacacatttccaaagtaaatgctcatttttagcacagaatcttttaaagaccttacaatcaaatttatatcacattagtccatttcaacgccatattttctatttatcgttacttctgtgtcctataaaggaaatgatatcattcaacattcaaaagcatcttttaaaaaaattatttttttagtctttctatt

SEQ ID NO: 296587 - DNA, 927 bp, Homo sapiens
tcttctcttttattctaaaaatggacattttcatgaataaaaccccacattgtaagcagaaacttaacagtctctaagtaaaattctgtttgtcaataggtctgagtactccaggcaatgatgactctcatgatcaccttcacctggatgtgtttccagagatcaaagaactatcagacacagtctctgtcctgaagaatctgattatctttatacaatgacagagttatacattgagaaacataatgaatggtttaaacaaatgctmgaacacatttccaaagtaaatgctcatttttagcacagaatcttttaaagaccttacaatcaaatttatatcacattagtccatttcaacgccatattttctatttatcgttacttctgtgtcctataaaggaaatgatatcattcaacattcaaaagcatcttttaaaaaaattatttttttagtctttctattwtcttctcttttattctaaaaatggacattttcatgaataaaaccccacattgtaagcagaaacttaacagtctctaagtaaaattctgtttgtcaataggtctgagtactccaggcaatgatgactctcatgatcaccttcacctggatgtgtttccagagatcaaagaactatcagacacagtctctgtcctgaagaatctgattatctttatacaatgacagagttatacattgagaaacataatgaatggtttaaacaaatgctcgaacacatttccaaagtaaatgctcatttttagcacagaatcttttaaagaccttacaatcaaatttawatcacattagtccatttcaacgccatattttctatttatcgttacttctgtgtcctataaaggaaatgatatcattcaacattcaaaagcatcttttaaaaaaattatttttttagtctttctatt

SEQ ID NO: 296588 - DNA, 634 bp, Homo sapiens
aataaatcttaaccattttagagcactgctatttcttcactggaatttggatcagagaacaaatccagtccactgacaagatgtgagagaaacacaagagtttctttattctgtaagataaaatatttatgagatgatttttatcagaaggcacttattatgtagcaatctttacagactctatgcttgctgcagagttatctatgcaaaatttaaactaaaggaaacctaggtgtttacatcttaagaaagacatacatttcaaccaacagaacatgtgttatagagttgtgttttataaaggtagagtggtaaacataccttaggctaaaggaagaaaaatgatagggatatgctgcaacgctgaataaacctcccttctagctgtttttttktttttttttttttttttttaagatggtagcttttgagacagtgctatctttcaggatattcagattccctttcaaacaaatgaatattctgtgccctgattgcatgttttgttaagttgggtgatgacagtggattcttagggttgtcctcctgagagagtagccccaactctattttcggagtttttctattctctagtctttgtatatgccacagacatttggtctctgagtcctca

SEQ ID NO: 296589 - DNA, 634 bp, Homo sapiens
aataaatcttaaccattttagagcactgctatttcttcactggaatttggatcagagaacaaatccagtccactgacaagatgtgagagaaacacaagagtttctttattctgtaagataaaatatttatgagatgatttttatcagaaggcacttattatgtagcaatctttacagactctatgcttgctgcagagttatctatgcaaaatttaaactaaaggaaacctaggtgtttacatcttaagaaagacatacatttcaaccaacagaacatgtgttatagagttgtgttttataaaggtagagtggtaaacataccttaggctaaaggaagaaaaatgatagggatatgctgcaacgctgaataaacctcccttctagctgtttttttttttttttttttttttttttaagatggtagcttttgagacagtgctatctttcaggatattcagattccctttcaaacaaatgaatattctgtgcyctgattgcatgttttgttaagttgggtgatgacagtggattcttagggttgtcctcctgagagagtagccccaactctattttcggagtttttctattctctagtctttgtatatgccacagacatttggtctctgagtcctca

SEQ ID NO: 296590 - DNA, 634 bp, Homo sapiens
aataaatcttaaccattttagagcactgctatttcttcactggaatttggatcagagaacaaatccagtccactgacaagatgtgagagaaacacaagagtttctttattctgtaagataaaatatttatgagatgatttttatcagaaggcacttattatgtagcaatctttacagactctatgcttgctgcagagttatctatgcaaaatttaaactaaaggaaacctaggtgtttacatcttaagaaagacatacatttcaaccaacagaacatgtgttatagagttgtgttttataaaggtagagtggtaaacataccttaggctaaaggaagaaaaatgatagggatatgctgcaacgctgaataaacctcccttctagctgtttttttttttttttttttttttttttaagatggtagcttttgagacagtgctatctttcaggatattcagattccctttcaaacaaatgaatattctgtgccctgattgcatgttttgttaagttgggtgatgacagtggrttcttagggttgtcctcctgagagagtagccccaactctattttcggagtttttctattctctagtctttgtatatgccacagacatttggtctctgagtcctca

SEQ ID NO: 296591 - DNA, 634 bp, Homo sapiens
aataaatcttaaccattttagagcactgctatttcttcactggaatttggatcagagaacaaatccagtccactgacaagatgtgagagaaacacaagagtttctttattctgtaagataaaatatttatgagatgatttttatcagaaggcacttattatgtagcaatctttacagactctatgcttgctgcagagttatctatgcaaaatttaaactaaaggaaacctaggtgtttacatcttaagaaagacatacatttcaaccaacagaacatgtgttatagagttgtgttttataaaggtagagtggtaaacataccttaggctaaaggaagaaaaatgatagggatatgctgcaacgctgaataaacctcccttctagctgtttttttttttttttttttttttttttaagatggtagcttttgagacagtgctatctttcaggatattcagattccctttcaaacaaatgaatattctgtgccctgattgcatgttttgttaagttgggtgatgacagtggattcttagggttgtcctcctgagagagtagccccaactctattttyggagtttttctattctctagtctttgtatatgccacagacatttggtctctgagtcctca

SEQ ID NO: 296592 - DNA, 648 bp, Homo sapiens
tttttaaaatattctgattctttccattctaagcaaagaagaagtgcatttttctccagaatgtaagggaagtactcggcatttgatcttaatttygctttttttacagtgtagaatgaactacagataagaggggtggaaagaaagaaaagggagagaaagccaacatgagcaaatttctattaattgtcagatcatgacacattccagccaagaatgttcctatcttcttatcaacaaaagtaaaatttactctctctctctcttttttttctcttgtaaaaatagaaacttctgacttgccttttaagctcaaaatcaaacatttctggagcacctagtatgtgagaggatcattttctctatcaaacatcttcccaacaatattatgaatgcaaagtattatgcagaattgtcaaataaactttaacaagttatgtatctgatccagattcacaaagaaatccaaactccaagttatcatgacttcaaacttctatgcctttgatattttatgtatcactagatgatattgtgtctttcaaattcctaatgtagaattgttggtaaaatgaagctctctagccaaatttaaattgacctacgagttaataaaaatgtgctaatttctaatgcaaaatcttattt

SEQ ID NO: 296593 - DNA, 622 bp, Homo sapiens
ccattaatcagaaattaatacagaatatctaaaattacaaaatcaagaaatgatgtacaacagttatcaattgcagaatattcaaacgttttgtagcttaaaacattaagtatttattatcttacatagtttctgtggtcaaaaacatggtactggcttcagtgtgtgaactgartctctcataaggttaaggttaggatgccagccaagcctgcagtcagtaaggcttgactggtactcaaggatctgtttacaaagtgactcagtcacatggatggcaagcacatactactgttggcatgaggcctcagttcccctcacccccccatggacctcacctgcataagactcaagatatggcggctgcatttccccagagtaaatgattcaagaaagggcctgtaatagggaaatgtcttctatgactagtcttagagggtacaagttgttatattcacagtatactattagttactgagatcaaccctattcatcatgggagaggacttcatgtgggtaacttaccatggggaacagaggatgatatgggccagcttgaaggctatgtaccacaagcagtatgagtgtgtgtgtgtgtgtgtgtgtgttttcaacatgaagt

SEQ ID NO: 296594 - DNA, 619 bp, Homo sapiens
aatgccattgataaataaacaataaaagtacttggagctaaaagggcataatgtgggcaacttattctcagttggttcagaaaaaatagctatatattaatgtatgtaaatgtgtatgtacataaaacatagtgaaagagaatctgggtgaagggtttatagtatttcattaaataattttgcaactttcttataaactaaaattgtttcaaattcaayagtttcaaaacatataaaacaaaaatgtaaattatcttcagggacacctacatacatatatacacacatacttacgcacaaagctcagtgtttgctaacttctgctttttggaggtaggagagaattctctgcttctggtatataacattttcatgattttgctctccgtgtcacaggaaataagaaggccagttggtgccagaatatagaaactccagtaatcactcaccctctcccaatgaaaacagggaaaatgcctttagcatttgaacatcaagcatcaaaggccacgtctaagcccaggacctgcctccagacctccagctcttcccactctaacccaactgactaatactattgattcttctatcaataaaagacaaatgaatacagaaatgt

SEQ ID NO: 296595 - DNA, 1836 bp, Homo sapiens
aacattctgggtttttgaagcagaaaaggtgagatatgactttgaagtagcaatgaggaacaagtaaagcacctactttatatactggctctataacatgtgggaaatggaataaaacattgtcatcacctataaaaggctaccagggttgtgtttttgacaaactgtcagatttcacagaaaggaaggagatgaggcatatattcagaaacgacttcaaagatataggacagtttgggagatgaaaggagaggagttccaagagacaccatggaagtgttcgttttgctttggggcaagttgagaagcggcaaagcgatgcagaacatttatttaaacccccaaatataagtaaatctacatataaacttgtatttttccaatttatttaaaaaaacttaaaaagattaagaagaaaatcaataatacgyctttgtctattttccttccataaggaaaattaatagccattgcaacactggttaaataattattctatattacttgaaatactttaatgaatttgtaagagaaatcatacaaaatgtatcccttcatttaaatacttctcatatatactatgcaccaggcctcttgtgctaaagtacattttgaaaatgagtggaaaaawaattttcctatcaccatttgttgaaaatactattctttccttcattgaattgccttgctattttttwaaattaattggccataaacctaagggcttatttcttgactttcaattctatttcactgatttatatttttgtcattatgatagtaccacattttcttggctactgtaacattatagtaagttttgaaatcgggtatggcaattcctccaatttcttttttgtttttattattatactttaagttctggggtacgtgtgcagaatgtgcaggtttgttacacaggtatagatgtgccatggtggtttgctgcacccatcaacccatcatttacattaggtattactcctatactcctaatgctatccctcccctagctcctcacccactgacaggtcccggtgtatgatgttccccttactgttcaccatgtgttctcattgtttagctcccacttatgagtgagagcatgtggtgtttggttttctgttcttgtgttagtttgctgagaatgatggtttccagcttcatccatgtccctccaaaggacaggaactcatcgttttttatggctgcatagtattccatggtgtatatwaattttcctatcaccatttgttgaaaatactattctttccttcattgaattgccttgctatttttttaaattaattggccataaacctaagggcttatttcttgactttcaattctatttcactgatttatatttttgtcattatgatagtaccacattttcttggctactgtaacwttatagtaagttttgaaatcgggtatggcaattcctccaatttcttttttgtttttattattatactttaagttctggggtacgtgtgcagaatgtgcaggtttgttacacaggtatagatgtgccatggtggtttgctgcacccatcaacccatcatttacattaggtattactcctatactcctaatgctatccctcccctagctcctcacccactgacaggtcccggtgtatgatgttccccttactgttcaccatgtgttctcattgtttagctcccacttatgagtgagagcatgtggtgtttggttttctgttcttgtgttagtttgctgagaatgatggtttccagcttcatccatgtccctccaaaggacaggaactcatcgttttttatggctgcatagtattccatggtgtatat

SEQ ID NO: 296596 - DNA, 609 bp, Homo sapiens
agatctccattttccagtgtgtgtatgttttccctggaatagaatctttcaagtatgccacatctcattctgtgtattttccaaaacttcaccgttcccataaatcaacaatctcattcacygtacctcagacctgttctcattgttccccacacagggtggatcttctccttctgtcgaacttaaacaatgttatgtctatccaataccagtcaggtctaacaaacttctgtactctttgaaacatatccttctaaaatttgttcttattacatattatttattatcatcatcatcctatccatcaccttttggtatcaaactgcattactgccatcctacccaagaatctgttgttggttgagataaaacatgcttgaccctcactgactataatagcccattttcacactgccataaagaaatgcctgagactgggtaatttacaaaggaaagaggtttaattgacgcagagttctgcatggctgaggagatctcaagaaacttacaatcatggcagaagatgaggagaagcaagtccctttggttcaaaaggcagcaggaaagaccaagagagcaggggacaccacaacttataaaaccatcaga

SEQ ID NO: 296597 - DNA, 609 bp, Homo sapiens
agatctccattttccagtgtgtgtatgttttccctggaatagaatctttcaagtatgccacatctcattctgtgtattttccaaaacttcaccgttcccataaatcaacaatctcattcactrtacctcagacctgttctcattgttccccacacagggtggatcttctccttctgtcgaacttaaacaatgttatgtctatccaataccagtcaggtctaacaaacttctgtactctttgaaacatatccttctaaaatttgttcttattacatattatttattatcatcatcatcctatccatcaccttttggtatcaaactgcattactgccatcctacccaagaatctgttgttggttgagataaaacatgcttgaccctcactgactataatagcccattttcacactgccataaagaaatgcctgagactgggtaatttacaaaggaaagaggtttaattgacgcagagttctgcatggctgaggagatctcaagaaacttacaatcatggcagaagatgaggagaagcaagtccctttggttcaaaaggcagcaggaaagaccaagagagcaggggacaccacaacttataaaaccatcaga

SEQ ID NO: 296598 - DNA, 560 bp, Homo sapiens
gaaaaacaggtcttctattataagagaaaggaagaagagtgtgtgagatttttattgggtagaaaagtagactctgttctgatgattttatttttctcaagaaagtaagtatggtcatctgcttaaagcagggagttggtaggagtgatctgaggtttatscttgagaggttagggtgccaattgttgtagagagtgaaatagtgggatggccacagacatgtgccattgctgggccatgagggtgcctcattttaaactagtgacatgtttgctctggcatgtggtcttagagcccttggctgctgtgcatagaacagagacaacagatgggtgggttgtggcacttggttatcttctgcttccacatttctgttcataatatgttctgctctaggctgtctttcccccacctttcccacaaattcaagtccaatcctttctttaaaatcctgttcatattgcacttcctcttgaaatctttccaatagcaccagccctcacagtggaaatggccatattttaaaacacaatattaaagaaatggacaaggatgctaat

SEQ ID NO: 296599 - DNA, 573 bp, Homo sapiens
acataaacattccattcacaacagatatcagatcattagatagaagaagtatgctgccttgaaacaagatcaatataaaaatgaaatgctttaggaaatcacttttttcagaagagttgttttatcagattgctacrtttctccacaattacagaaattacacacatatgcgcacacacacacacacacaacatcagaaaggacactgccaaaaatcacattgttgatttagacatttcaattgtctgtgccacagagagctagaacatagatattgtctagttcagcaacctcctttttaaaggggagcaaacaaaccatgagagttgaagggcctacccaagacagcttcaactacccaagatgcattaccttcaacacagttcttaacctctttaatcttattgtcttcatctgcaaaatctccagggattgatatgagggttaacttcctttctgcagggttaacttcgtttctgcatataaagcacttaggataatgcttggaatatggtaagtgggtaatacatgtctctattactattatcattattattattgctattatcaatc

SEQ ID NO: 296600 - DNA, 555 bp, Homo sapiens
ctgccctgagctctttgccacatggacctctttcacatggcagcttgcttcatcatagtgtgcaagccaagaaaacaattgtctactagcaagatggaagtcacaatcagaagtgacatcaccttcatgttgctgtattctattggataaaagcagattgtttaaaggcagtggattacacaaagctgtgagtatcaggaagtgaagatcactggtagatatcttacagtctgtctaccacaactgtgaagaataaaatcraaagacaaagaatattagagggaaaagcatatagaaacacatgtattcaaatacttttggaactacattttaaatgcttttccattcattgcaccttttaaatataagccacatatattaaattcaaacaatagcttaatataataatgacatttagagaagctaaaggatttctctcatttcctgaatttactctctaaagtaacaccttcacactatcctctggtaactatctaaaattttgtatgtttgttttacatgtctgcaatagaatgtgagatttatgacagtgga

SEQ ID NO: 296601 - DNA, 614 bp, Homo sapiens
tgaataaataaaagtaaccacagtattactcctgcatatgtacaagaaaatatcattgtgaatgagcaacaccagaaaactaaaccataatctcctgtatggaatgagagtaaaattctggaagaagaggtagccaagaacactcacatggatcagggtagaccgcattcgcatatcatattgtatctcatgccctttgattgaacctatttacttggtaagtgaatcattgttcagagtcactaacagattgacctggaactgaatttcattgataacgtaatgaaaggtaagcctatgctgtacaaagtactggaagctaaatccatgctcacaggggaggccacccagtgaactcagagggctgccctctcaagttgtctcytctgcttctttttggcatatattgagaaagtttctatcttgtgacttggctgtaaaaagcaggcaagtttgtagcagcatatgaaattccttttctaaatgtgttctaagacatttccctggtaaccatgccagatttccactcagctctctcctcctttcatgataaataactaatttcttagcggtactatgcctttacgttgctttaccactgcaggttgccgatg

SEQ ID NO: 296602 - DNA, 618 bp, Homo sapiens
ttgtggtgaaccaggatgtggtgagatcgtgccattgcactccagcctgggtaacaagagtgaaactctgtcacacacacacaaaaaaagtggctaaagaaaaaacaaaccaaaacattatgttcaggggaacaaagattagaattaatgaargcttctttttagaagaagcatggtttagaaaccgtgcaagccagaagtcattggaatgacatttttaaagtggtggatgaaaaaccatgtcaacctagaattctatacccagtgaaaatgtccttcacaaatgaagttaaaatagggcttttttcggataaaacaaagctgaaagaattaattagcagcagcttacattacaaaaagctttaaagaggttcttcaggccaaaggaaatgagacccagtggaaacttggatatacaaaggaatgaagagcactggaaaaggtaaataaaatatattggttaatataaaagactttgtcatttaaaaatttctttacaggtggttgactaaagcagaataccacaatgtataattgagtatataacatgtatagagataaaatatatgacacaacaacaggagaaaaatggaaataaactcttgcgtatgtacatat

SEQ ID NO: 296603 - DNA, 1165 bp, Homo sapiens
cacaaactaccactcaccccaaaacagctggcaggttagtcctaaatccccatttcaaagataaggaaactgaggctagagaacataatgacatgctcagggtcacaaggctgcttacatgactgaggcagaactaaactgaggtctgctggaccccaaagcctactcatccctaccaccctactcagctccatggttgactgaagmcaagggcttggccagccacaagtggtcaactccatgggctctcagggtcttcttcagagccacccagcaccaaggtttctactaggagacgataaagtgtgggggttctgaagaggcacaagtccccttagccccataatacctgaatccaggcatggtgtgagtaaatcccactcctacttcttttgcttcctgcagaaaattacaaactggcaactgagcaaaggctctggagccaggtgtgcagtgggagcacagctaagatggcaaggggttcagcggccatgactcaagccagcacaagcagtcgagggtctcaccttcctggtccatgtgcctgtatggcagatgcacctgaatgtgtgtttggagttctgwagtgtcgttacgtcagtcaggaggtgttcagcagcaactaataggacatctggctaacagtggcttaaaaaatgtctctcaaaacatggttcacgccaggcatggtagctcacacctacaatcacagcactttgggaggctgagaaaggaggatagcttgcatccaggagtttgagaccagcctgggcaatatagcaagaccttgtctctacaaaagaaatwaaaaaacacaaaaattagccaagtgtggtggtgcgggcctatagtcccaactactcaggaggctgaggcagaaggatcacttgagtctaggagatcgaggccgcagtaagctgtgatcatatcactacactcagcctgggcaacagagtgagactgtctcaaaaaaataaaataaaacaaaataaatgtggttcactggcatcttctgcatcatgcagtaacctgtcagaaatgcacattcttgggctccaccctagacctactgaataagaaacgtggcgagtgagggcaacaatttgtgtctgaacaagccctccagatgattctggtgcatgtgcaggtttgagaaaagcggttt

SEQ ID NO: 296604 - DNA, 580 bp, Homo sapiens
agtgtcgttacgtcagtcaggaggtgttcagcagcaactaataggacatctggctaacagtggcttaaaaaatgtctctcaaaacatggttcacgccaggcatggtagctcacacctacaatcacagcactttgggaggctgagaaaggaggatagcttgcatccaggagtttgagaccagcctgggcaatatagcaagaccttgtctctacaaaagaaataaaaaaamacaaaaattagccaagtgtggtggtgcgggcctatagtcccaactactcaggaggctgaggcagaaggatcacttgagtctaggagatcgaggccgcagtaagctgtgatcatatcactacactcagcctgggcaacagagtgagactgtctcaaaaaaataaaataaaacaaaataaatgtggttcactggcatcttctgcatcatgcagtaacctgtcagaaatgcacattcttgggctccaccctagacctactgaataagaaacgtggcgagtgagggcaacaatttgtgtctgaacaagccctccagatgattctggtgcatgtgcaggtttgagaaaagcggttt

SEQ ID NO: 296605 - DNA, 580 bp, Homo sapiens
agtgtcgttacgtcagtcaggaggtgttcagcagcaactaataggacatctggctaacagtggcttaaaaaatgtctctcaaaacatggttcacgccaggcatggtagctcacacctacaatcacagcactttgggaggctgagaaaggaggatagcttgcatccaggagtttgagaccagcctgggcaatatagcaagaccttgtctctacaaaagaaataaaaaaacacaaaaattagccaagtgtggtggtgcgggcctatagtcccaactactcaggaggctgaggcagaaggatcacttgagtctaggagatcgaggccgcagtaagctgtgatcatatcactacactcagcctgggcaacagagtgagactgtctcaaaaaaataaaataaaacaaaataaatgtggttcactggcatcttctgcatcatgcagkaacctgtcagaaatgcacattcttgggctccaccctagacctactgaataagaaacgtggcgagtgagggcaacaatttgtgtctgaacaagccctccagatgattctggtgcatgtgcaggtttgagaaaagcggttt

SEQ ID NO: 296606 - DNA, 621 bp, Homo sapiens
ttatctattttgtgcactgctatatcttaaatgcctaaaataaaacccataacctagcagttgctcagtatgtatttaactgaatcatgctctatacttcaagtcaggattcagccaactggtctccctcgaactagaactgaagttcccttaactgggaaactggggcagtcctgctctgcaaaatggacttcagggtgtgcaatgggaaaagaaggaggagaatgagcaagaagaatggaggcagagagagtggtgacaggcttcccgaatacatcccagtatccttatgataatgttcttctttttccttaagctagctggagtgggtcttcatatttaaaaccaagtcattctagcccaaacagcatgtctccctgaaatcctttcccaaaaggattggtgaaaagtcccatgaactcctgaaatatttttagcttagtgcacttggaggcatgaggcacaactttagtccttccccaaataccttgtctgatctgccaactgagacaccgcagagggaaagtgatagggtggccagttctggggcctcactgcctgaccccaatcctggctcctgcccaccctccctgaracccaactcaggttatctaacccttc

SEQ ID NO: 296607 - DNA, 526 bp, Homo sapiens
ggacctttccaaaccatttatccaataacaatgcactggagggattggcttcaccactcactatcaaaatggcttgttaactattcactctatgttaatgataatacctcaaatgggaaggcaggaagaaaatcatgtttaaaatgcagagggcttgaacaggttgcaaaacaaccaataaaagaagaaaacacgacccagcattagttaaaaaaaaaaaatyggtcctttctaagtaaatatgcattctttccaacactgaaagagagtgaagatcagaagtggggtttaacgaaacctgctttcatgacttggttttgtttctatcaagcttgccttatggtagtgagcttccaggcactcttggagaagaggatattccaaaggtaatttcacctttctttcttcccctaccttcacaggccctgcctttgaatattattattattattatttttagtttcattaaaacatatattccaccactacatcagaatgcttattaacgttgccaggcaaagtaact

SEQ ID NO: 296608 - DNA, 1179 bp, Homo sapiens
tgctttcatgacttggttttgtttctatcaagcttgccttatggtagtgagcttccaggcactcttggagaagaggatattccaaaggtaatttcacctttctttcttcccctaccttcacaggccctgcctttgaatattattattattattatttttagtttcattaaaacatatattccaccactacatcagaatgcttattaacgttgccaggcaaagtaactgctgggtattaatctcttggaggcctggaccatatacttgtccagacttgtcttctcactacagctcactaaccaaaaccaataccaaggacayagtgtccttcaattcaattacagaaagttcctgggctgctaactctaaaaggatcaagtgctttaaatatttctgcaggcaataagcatggctcatgtaatgagctttttttgtatgtgtgtcatatttgtataatgtgcccctgtgtcttagaaaaaaagaactgaaacagggctgctgccttgtacaactccattggatgcattcacatactagtctgtggtgccttatgaagttgcacagtgcacaaccwggccaaatttgaattccgcattaaccccttactagctatgtgaccttgggcaaatggtttcaccctcattttcttcttcagtttcttcatctgttaagtaaagctgataagagcacctatgtggtagatacactagagctcaccaacaactttttcagcacacataatcttttgaacttgggcatggactgtgaacttggactatgtgacttgccctgaccaggaaatataaggggaagtggtgtacatcacttctagatagaagcattcagagctggtwtgggttctccacactctctaccttgccatgttgaccaaggaggcaggccaggtgatttgagtgttgcaactacaggatggccagcttggattcccaagcaattacagtgaaaagagatcccctcagctcacaaagaatattgagcaggagtgagaaataaacctttggtatttacttcagcaaaacctagctcatgccaacaaattggcttacttcatagggtttttgttaggatctgatgagttaggcgttttagatgtttggaccagtggctgacacttagctaagtacacagttaatgcgagttgaagttattaatagtatg

SEQ ID NO: 296609 - DNA, 582 bp, Homo sapiens
aagcttaaaatctacacatggtggctgagtagggcgaggcagctcacctgagcacggctgggcccagtcctgggctggggccggggctgggaatggggcgcagtgaggctgtgagccggccctgagccagccctgcgtcgggtgagcggggctcagggggcgccagagctggaggcggaagsgtgaagtcaggactgagtgggtgaagagaacctgggctgagcagacatggccacttatcaccaagaagggcagatgcagctgcccctagctgatgccattcgttcatgtctcatcgatactttctcatctagcatttgcaaggcttgagccaagctgtgccgtggcacactatcagggagttacttcatccttcccaccagaagaaacttatgttgggagatcaacaccagctagtgtgcttctccataaagcctcaacgtataggacagatttcacatgcccagaggctgttgagcaggcttcatgtgcgctgcactcagaggccacctctttctttgtgggccggatgggtccttgagtgtcctctcttcacaaacttcgtcatcttcctcatctttt

SEQ ID NO: 296610 - DNA, 603 bp, Homo sapiens
ttgcatgccataacaacactcatgctcaggttatcctgttacacctgtgtgaaccttcctgctaggaaccgcttttctggctcaccactactacctgttgctgttttccctagagaccaagttctgtaagtcttgaggaggttgcaaactgatggtgcmtagggcaaatttagcccgctaacatatttggtttggcacattcaatgtttgaaatgtttacatttgaatgtccttaggccagacatatgttccccagtttgccatagcctccagtactccctactgtatatctgcccctttactggtttacttacttgcttggaacatgaagtcatttgagttagatccttagggagagagtccctccactatccctacagaacttaccatctcagctgggctctgcttatctagtaactcaacagaatgtctaattctaagtctcaattttgcctagtctttctggctccgttgatgtcagcaagtccattgtgtgaaataacaatactgcctcagttgcaagaaattgagctaggaagatgataagatattggatgctactctagacttactgacttgtttactacatccctccaaattata

SEQ ID NO: 296611 - DNA, 576 bp, Homo sapiens
tcactacgcgcctctagatccctgcggccgaaatatcgcgagacttcgytcggggcagctgctactgtggtaaagaattcacttttttaccacagcgtgcgtatcagcaagtgaacataaaaacgcctcttctagtcagaaactggccaatcccgacccccggtccacctagggctccgcccaccaccgagaataagccaatctctttgaggcttctacaggagaacgccgtgcgtttgagcttgaacctgataagcctggcagaagcctgatgaacccagaatgagtgagatgtggtaagttgtgctttaggttagggcgtcatctaactgttgggccagaaaatttaaaggggagaagtgcatcctaaagggagttgcagtttcctcggttctggtaggactacaagtcccaatatgcaccgctcccccgggcgacctgagtgtctcttgagtaaatgtgacccttgaaacgtctacgttagcagcttaatggtttctccagccttgcgcgtgtttccaagtccctaaacgggatggttttttgaaaggctcgaacacttgacaagtaggaaag

SEQ ID NO: 296612 - DNA, 586 bp, Homo sapiens
cagcagtagccttgaaaagctgttgcatctgtagagaaaaacacatggcagccaggctttctctgaggaccttcccttgtccagatctaggaaataataactgmaagtctgacaaccttaatggtctgaaagaaatatttaccctctattctctatgaaggctgctatcggtgcggtttcatctgcataacaagaccacttttgccagccaggcctcctcttctccccgtcccaaatgtttttgccataataaccagctttgccatgctctaagcccctattctttctgtaaacctcaagatgacataaaagcatcaaccatctggccatttctctgagttcttatatttcataagactcccttacacgtcaataaatttgtatgccttttctccctttaatttgtcttttgtcagatgattttcagcagaccttcagagggtgaagaggaacgttccccttggcccctacaccatcatccagttccgttatagagttagttgattcaacattcattcaaaaatgtgtcaaagctttttggtactggagacaaaacaatgaatgagacaccctttgcccacaagca

SEQ ID NO: 296613 - DNA, 568 bp, Homo sapiens
acggttttgtagtctttctgaagacttctccaacattttaaccttgttagtttttaaagagaaacagcctaattasaaaacttgagcagcttgcaagggcgacataacacatccctaattttgtacctatgttcaaacaaacaaaggaaaatgtacaacagactacacaatttactctcctattgaatttgctttaagcatgcgcggctaacaataacaccaggcatcttgcagtacatgtaaaattttattgtgaaaattttaaggtagatattacatctaaacacttttcaaatagcatcaacaagtatgaaattactttgaaaacaattccttttcctttgaatacctcaaaaaattcatggaggaagttagtatctacctctctccacaaaaccaacatgtttctttcagtaatatgcaggtaacaatgcagaaataacatttcaatttttgatttgcaaacaaggattggtatgcaataactattattttcaatgcttgctttaatatctgctcgagtctcctttttcagatcgactctccccaccatctactatagatgcca

SEQ ID NO: 296614 - DNA, 568 bp, Homo sapiens
acggttttgtagtctttctgaagacttctccaacattttaaccttgttagtttttaaagagaaacagcctaattagaaaacttgagcagcttgcaagggcgacataacacatccctaattttgtacctatgttcaaasaaacaaaggaaaatgtacaacagactacacaatttactctcctattgaatttgctttaagcatgcgcggctaacaataacaccaggcatcttgcagtacatgtaaaattttattgtgaaaattttaaggtagatattacatctaaacacttttcaaatagcatcaacaagtatgaaattactttgaaaacaattccttttcctttgaatacctcaaaaaattcatggaggaagttagtatctacctctctccacaaaaccaacatgtttctttcagtaatatgcaggtaacaatgcagaaataacatttcaatttttgatttgcaaacaaggattggtatgcaataactattattttcaatgcttgctttaatatctgctcgagtctcctttttcagatcgactctccccaccatctactatagatgcca

SEQ ID NO: 296615 - DNA, 568 bp, Homo sapiens
acggttttgtagtctttctgaagacttctccaacattttaaccttgttagtttttaaagagaaacagcctaattagaaaacttgagcagcttgcaagggcgacataacacatccctaattttgtacctatgttcaaacaaacaaaggaaaatgtacaacagactacacaatttactctcctattgaatttgctttaagcatgcgcggctaacaataacaccaggcatcttgcagtacatgtmaaattttattgtgaaaattttaaggtagatattacatctaaacacttttcaaatagcatcaacaagtatgaaattactttgaaaacaattccttttcctttgaatacctcaaaaaattcatggaggaagttagtatctacctctctccacaaaaccaacatgtttctttcagtaatatgcaggtaacaatgcagaaataacatttcaatttttgatttgcaaacaaggattggtatgcaataactattattttcaatgcttgctttaatatctgctcgagtctcctttttcagatcgactctccccaccatctactatagatgcca

SEQ ID NO: 296616 - DNA, 521 bp, Homo sapiens
ttctttgatctgcaatgagaagctcaagtatttcttcaacataaatctgaaatgtacctagtgagatagaaactataataaaagctatcaatcagtaattatgctcacgtatgtgtcacttctcttttgttcaatgaacttaaagctaagcattcagstaaaacggctcatttttagtcatacaaaaactacggtctttctgtcaggcagcatttaccttggcttcccatccaactattgcttcttgccacagcagaaggagcagattttttcggaggaggacctccacttcttgaagatggacctcttttaactggaatgagtcccctagaataactcatcttgagatcaggagtgtatccaccatcatctgtatttcaaacaaaatctttttagttaactgacgtcactgtttcttaaatggctaagttttagttgtttacaaatattttctacattttataacaaattcacattttgtctaaactaataaaattagcattcctacaaggtattagtac

SEQ ID NO: 296617 - DNA, 541 bp, Homo sapiens
agaatacatctagttgcagtctgggtgtctccaaaggctgggtagataaaatactcaatctcttctaattcattagccatttttcatttcaacttcaggccaataactttttggaggctggggaagatactcaagtccctcaagagcctctgatttagtaggcctaaatttctgttggctgtacagagttgaaaggctgaaataggaagggaaaggtttgtttaggggtaggtagaagaatggattatgagaggttggaaggaggatgtgtcaaaggattcaaggaaggtaaagggaagattgaaggtgatgagaggagaaacaagaaacatgagtaataagaaggaagatgtcaaagaggcaccagcataggaagatgttaagtttctgaaagatcattaagttccaaattatccttgaaaaatgcatgccaacaacaaggatgtagagttagcaaagcytaaagtccacaaaggttcaagaagatgggttttagttggctatgagacttccatgggagaggcaagaatccaaataaaga

SEQ ID NO: 296618 - DNA, 572 bp, Homo sapiens
atatgcccaggccacacccagacttatttgtaacaacaaagatgagctccagggacaatggttgacaagacccacccagtcatctttcttccattcagagccattgtagtactcgatactcatcagaaacagtctcttatcccaaagccctctcatacatagggtgtatcaatgggaatgggtcacacatggggcacaaagggcaaatttagtgagggaatcagagccagcacataaagaaggagctggtgattccaagtgtaaagaaaggcggtatgctaagaagttattgccctggagggtgaaggatacaagaggtttgtatgactaaatcagagggagmaagagagaaagcaggcaatggaccaaacacttagcacaagggacagtgattccttaacaaggtcgatgcagacctaccatgacatgatgtggccactgcactcctaggaatgaaccatgagaaatgaaggcaagctcacaggctacatacataaataaatattcatgacatccttacacataatggtcccaaaccaggagcccaaatgcccatacacagaagaagggtg

SEQ ID NO: 296619 - DNA, 551 bp, Homo sapiens
aacaggaaaacggaaggtgtccaccagtgatttttcaggtgggaggttagaaatgagggaagatgataaggatgtgataaaaggagatttaatttgaattttaatttagttccaacttaatttaatttaattttaaatttaatttaattttaatttaatttaattttaaatagaaagaaagaagaaaaggcaattagaaactccaagaaaagagaaagctaaagaaaaaatatgtatatacctatagaataccaagaaatgtaggtgaattcaaagtgccaatatacttcctacaagaagaaagtcacaagattctattgcattggattgaaaaaatatatacataaatatacatatactctacagttactttcaacatcaatgataactaagaaagaaactaaaatcatgatatttctatcattgkgtgagggtggaggaaaggtcagaagtctaagaaactcagccttcctctgttgtaccaggtgttaacaggtaattcaggggactagggttaggtgcacatggtggcagttccttctgagttaccc

SEQ ID NO: 296620 - DNA, 551 bp, Homo sapiens
aacaggaaaacggaaggtgtccaccagtgatttttcaggtgggaggttagaaatgagggaagatgataaggatgtgataaaaggagatttaatttgaattttaatttagttccaacttaatttaatttaattttaaatttaatttaattttaatttaatttaattttaaatagaaagaaagaagaaaaggcaattagaaactccaagaaaagagaaagctaaagaaaaaatatgtatatacctatagaataccaagaaatgtaggtgaattcaaagtgccaatatacttcctacaagaagaaagtcacaagattctattgcattggattgaaaaaatatatacataaatatacatatactctacagttactttcaacatcaatgataactaagaaagaaactaaaatcatgatatttctatcattgggtgagggtggaggaaaggtcagargtctaagaaactcagccttcctctgttgtaccaggtgttaacaggtaattcaggggactagggttaggtgcacatggtggcagttccttctgagttaccc

SEQ ID NO: 296621 - DNA, 175 bp, Homo sapiens
tcgttgagtgttctttgggcgacagaaacatacctgagacaccagaagtggatgtcagcaaaagatgattgggcttttgaactsaatgcctcccttcattctgagccttgcaggggctatctatgaaaggcaagaaccataacaaaggcaagtctaatgtggagcagtgttctca

SEQ ID NO: 296622 - DNA, 175 bp, Homo sapiens
tcgttgagtgttctttgggcgacagaaacatacctgagacaccagaagtggatgtcagcaaaagatgattgggcttttgaactgaatgsctcccttcattctgagccttgcaggggctatctatgaaaggcaagaaccataacaaaggcaagtctaatgtggagcagtgttctca

SEQ ID NO: 296623 - DNA, 650 bp, Homo sapiens
tcgttgagtgttctttgggcgacagaaacatacctgagacaccagaagtggatgtcagcaaaagatgattgggcttttgaactgaatgcctcccttcattctgagccttgcaggggctatctatgaaaggcaagaaccatracaaaggcaagtctaatgtggagcagtgttctcawgtgtggtggccacatcaaacctcacgtgaaatgatctcacttccatttagctcctggtatgatagtcctcaaatagggagtttgccaggatggctccagtttgcactccaaacattccctgcacattgtggtgctctcaactgtacaccaggccatggtatggacttgcttgtgtaattaaggaaatgtggggawacagttggaagcacattctgtgacatctatcttcacattttttgcaggtgaatgtgtgggaccgcatccacccctcaccagcttgtatcctcacctttatctgatgttatggctgctcaaagtatctgtcccaaaatgaaattccaagacaatgaaggagtgacgtgaaggtcctgctcagctaggaactgaatatgaagtaaattcaaggggccctgaggactggactgctagtgtttctccatgggatgtacactggagaataaagcagtgaaatat

SEQ ID NO: 296624 - DNA, 589 bp, Homo sapiens
actgctagtaataatgcaaagtgtggaaaactctatgaaaaacagttttgcaggttctcacaaagttaaacatagttaccacataatctagcgatttcactcctagatgtatatcccaaaataatggaaagcagggactcagatacttatacaccaatattcattgccacattattcaaaatagccaaaatgtggaaacaacccatgtctatcaataaaagattaataaaatatggtatatacacacaatgaaacatcatttactcataaaaggaatgaaattctgacacatgccgaatatgatgaaccttgaaaacatcatgctgaatgaataagccaggaacaaaaggacaaatgctgcatgagttcacgtgtatgaaatatctacaaaaggtaaatacagagacagaaagkaaattgcaggttccagagcctgtggggaggaaggcacggagagttattgcttaatgagcacagagttcatagttggagtgatgaaaaaattttagaatttgtgttgatggttgcccattaggaatgtaattaatgccattgaattgtacacttaaaaatggctaaaatggtagat

SEQ ID NO: 296625 - DNA, 589 bp, Homo sapiens
actgctagtaataatgcaaagtgtggaaaactctatgaaaaacagttttgcaggttctcacaaagttaaacatagttaccacataatctagcgatttcactcctagatgtatatcccaaaataatggaaagcagggactcagatacttatacaccaatattcattgccacattattcaaaatagccaaaatgtggaaacaacccatgtctatcaataaaagattaataaaatatggtatatacacacaatgaaacatcatttactcataaaaggaatgaaattctgacacatgccgaatatgatgaaccttgaaaacatcatgctgaatgaataagccaggaacaaaaggacaaatgctgcatgagttcacgtgtatgaaatatctacaaaaggtaaatacagagacagaaagtaaattgcaggttccagagcctgtggggaggaaggcacggagagttattgcttaatgagcacagagttcatagttggagtgatgaaaaaattttagaatttgtgytgatggttgcccattaggaatgtaattaatgccattgaattgtacacttaaaaatggctaaaatggtagat

SEQ ID NO: 296626 - DNA, 579 bp, Homo sapiens
gctgagtgtggtggcccttgcctgtaatcccagcactttgggaggccaaggcaggaggaycccttgagcacaggtcaagcatgcagtgagctatgactgcaccactgcactccaacctgagcgacagagcaagaccctgtctcagaaatagtaataataataatcatcatcatcataagacaaatctaaatttgagattaactaaaagatgtactacattaaaattatgtgaaaagaacaatttttaaagacttctaaatgccttttgctccctagtagtaaagtcttctgcagattttccattttattgacccaaaaagggaagagcaaatctcctcttggaaggaagcatgcctgggcagagctggaacacgcactgggtcacttcgtgtgtaattcattcactccagtttctattaaatataaccggccgctagtcccctcgatgaatgggagcatgtgaagtcaattagtacttactccatttctttctatttaagagtctctctttatgtacacattcattcaagccaaagttcagactcccaatcaggatttctccccacccaaggagcagca

SEQ ID NO: 296627 - DNA, 579 bp, Homo sapiens
gctgagtgtggtggcccttgcctgtaatcccagcactttgggaggccaaggcaggaggatcccttgagcacaggtcaagcatgcagtgagctatgactgcaccactgcactccaacctgagcgacagagcaagaccctgtctcagaaatagtaataataataatcatcatcatcataagacaaatctaaatttgagattaactaaaagatgtactacattaaaattatgtgaaaagaacaatttttaaagacttctaaatgccttttgctccctagtagtaaagtcttctgcagattttccattttattgacccaaaaagggaagagcaaatctcctcttggaaggaagcatgcctgggcagagctggaacacgcactgggtcacttcgtgtgtaattcattcactccagtttctattaaatataaccggccgctagtcccctygatgaatgggagcatgtgaagtcaattagtacttactccatttctttctatttaagagtctctctttatgtacacattcattcaagccaaagttcagactcccaatcaggatttctccccacccaaggagcagca

SEQ ID NO: 296628 - DNA, 579 bp, Homo sapiens
gctgagtgtggtggcccttgcctgtaatcccagcactttgggaggccaaggcaggaggatcccttgagcacaggtcaagcatgcagtgagctatgactgcaccactgcactccaacctgagcgacagagcaagaccctgtctcagaaatagtaataataataatcatcatcatcataagacaaatctaaatttgagattaactaaaagatgtactacattaaaattatgtgaaaagaacaatttttaaagacttctaaatgccttttgctccctagtagtaaagtcttctgcagattttccattttattgacccaaaaagggaagagcaaatctcctcttggaaggaagcatgcctgggcagagctggaacacgcactgggtcacttcgtgtgtaattcattcactccagtttctattaaatataaccggccgctagtcccctcgatgaatgggagcatgtgaagtcaattagtacttactccrtttctttctatttaagagtctctctttatgtacacattcattcaagccaaagttcagactcccaatcaggatttctccccacccaaggagcagca

SEQ ID NO: 296629 - DNA, 568 bp, Homo sapiens
caaaatatccaggatacaatcaaaagtcacctgtcatatcagaaactgagaaaatcacaacttgaatgggaaaggacaaacacctgatgccaacactgagatatatcggatgctggattatcttaaaaggattttaaagcagccttcctaaaaatgtctcaacaatcagttaacaacttctcttggaacaagtgaaaaatgaaaaactatgggaagaaacaaaagatayagaaaaaagaaccaaatggaaatgatagatctaaaatatacaataacagaatttcttttttttaattttatatcatcaatacaaattttacagcatcttcaatctgaaaacatcctaagagcaatctcttccttgaagaaggctgtgtgtgtgtgtatacatatatatatttacatgaactatatgtatatgtgtgtgtatttacatgaactacccttcttagagctcccagagtggtttttctgggtctgttacaacctttatcacattctctcttgtattgtagtgatacagagcaaaaatgtaaacgagacctggtgccttccctcatgtgaggaa

SEQ ID NO: 296630 - DNA, 568 bp, Homo sapiens
caaaatatccaggatacaatcaaaagtcacctgtcatatcagaaactgagaaaatcacaacttgaatgggaaaggacaaacacctgatgccaacactgagatatatcggatgctggattatcttaaaaggattttaaagcagccttcctaaaaatgtctcaacaatcagttaacaacttctcttggaacaagtgaaaaatgaaaaactatgggaagaaacaaaagatacagaaaaaagaaccaaatggaaatgatagatctaaaatatacaataacagaatttcttttttttaattttatatcatcaatacaaattttacagcatcttcaatctgaaaacatcctaagagcaatctcttccttgaagaaggcygtgtgtgtgtgtatacatatatatatttacatgaactatatgtatatgtgtgtgtatttacatgaactacccttcttagagctcccagagtggtttttctgggtctgttacaacctttatcacattctctcttgtattgtagtgatacagagcaaaaatgtaaacgagacctggtgccttccctcatgtgaggaa

SEQ ID NO: 296631 - DNA, 568 bp, Homo sapiens
caaaatatccaggatacaatcaaaagtcacctgtcatatcagaaactgagaaaatcacaacttgaatgggaaaggacaaacacctgatgccaacactgagatatatcggatgctggattatcttaaaaggattttaaagcagccttcctaaaaatgtctcaacaatcagttaacaacttctcttggaacaagtgaaaaatgaaaaactatgggaagaaacaaaagatacagaaaaaagaaccaaatggaaatgatagatctaaaatatacaataacagaatttcttttttttaattttatatcatcaatacaaattttacagcatcttcaatctgaaaacatcctaagagcaatctcttccttgaagaaggctgtgtgtgtgtgtatacatatatatatttacatgaactatatgtatatgtgtgtgtatttacatgaactacccttcttagagctcccagagtggtttttcygggtctgttacaacctttatcacattctctcttgtattgtagtgatacagagcaaaaatgtaaacgagacctggtgccttccctcatgtgaggaa

SEQ ID NO: 296632 - DNA, 574 bp, Homo sapiens
agactccgtctcaaaaaaaaaaaaaagaaatcttcttggcagcccatcccatcacaggcccagaggcctaaaagaaaaatatagtttcctgggtcgggcccagtgcctccctgccctgtgtagcccagggacttggtgccctgcattccagccagtccagtcatggttatatagtttcctgggtcgggcccagcacctccctgctctgtgcagcccagggacttggtgccctgcattccaaccagtccagccatggctaaaaggagccaaggcagagctcgggytgttgcttcagacagtggaagccccaagccttggcagctttcacgtgctgttgagcctgcaggtgcatggaagtcaagaattgaggtttggaaccctccacctagatttcaaagaatgtatgggaacacctggatgtccaggagaagtttgctgcaggggcggggccttcatgaagaacctctgctaggacagtgcagcagaaaaatgtggggtcagaggtgccacactgaggagtccctactggggcaccacctagtggagctgtgagaagctcccagatcccagaatg

SEQ ID NO: 296633 - DNA, 561 bp, Homo sapiens
cataatctctttcctgagaagtctgtgaatctgtactctccctgttctgtgactctatctcctgaaaatgtgtgcatagggccactatgcaaagctgtgctgaactttgcactgtattttttctgtgttacgttacacttaaagggctgaccttgctcatacagaatgatgccagactcccagaggctctgactgtacacgggtgaggaatcatagtctccttccaagccttctgaaaaattgcccatgagagctggcagcttccytactcatgtttcttcctcagatctgccttctgtctatgggaaacatgtttggctgtgttctgtgtggttgcttttggggtaaacctagccttaccactgcctgctagtttgctttttcctcctggaaaggcagcttgggtcagtgaagccaggatgaaaacaggccgcaaacaagagtccctgtcagagagagggagagagaaagagaggagaagagagaagagtacatagggatacagaaagagaaatagcgaagggaggagatagggatagagaaagagaaagagagaaagaa

SEQ ID NO: 296634 - DNA, 627 bp, Homo sapiens
gggttatcatgaaggttaaatgagataaaaaaggtgatagcttcacaagagcctaacatagaaagtacttgcttaaatgaccatggttgttattaatactcatcaamtaaaatcctggtaataatatggtggggaaaaggccttttgtctacaggatacttcagagatactgtcaagcaattgggacagagagtgaagggccccaagtagaaggcctaaacccgcttctgctgtctgcggcctgtctcttgccctggagatacttcccatgagggacccctcctggtcactgctgcataggctctgttacagagaaggcctcattgctcagcttggttttcccacagctgatctccaatgttaccaaccactggggtccttcctgttacagacctcctgacctgggtgtagagggaccaccagctgccttcctgccctctgacttctgcttgatttattttggtcccactcccagtctggccctgtcttgatttctcttggtcccactcccaggctggtcccactcccagcagctcttttacacggctctgcatggctgatgccatctgccacctgccctctgtcctgagccattggctctcgaccttcctgcctgctctgtggtct

SEQ ID NO: 296635 - DNA, 931 bp, Homo sapiens
agctgaggcatttccactgacccagctgcttcaagcttctgtactggtggataactgaattctcctccattgctcctaatcaataacttttaagacaaaaactttacgcacctattcccttaatgctttctcttgaattacttggtaaattgtaaaggcctgtgacattttagaacttgcaattcattggaaaaccattaatgtgtaagcattttttctggcatgcagagcagagacatgccctgggaggccgagctgggcctcatgtcacaaaaaccatttcaagggagtagaacatgggtcagctttgcttacaaaacgttttccttttctctttttgcatgaagctaattaagktattggtggtaggaatgtctttttcatgctttacttttatcaactttattttgttgcagttttaatttgatcaaatggcttattaggataatatccattgatttatatattttcagaagtattcttttaagggtgttgacawtgcctgccccactgcttgttttggtcagctttgtcgaagatcagatggtcataggtgtacggccttatttctgggctctctgttctgttccattggtctatgtgacatacctaactttgacttaatttttttcaatatttctaagctatgcagttcatctgtgttttttcaaattatcacaaatctccaaaaaawattcccatacatttattgaaaaagatctccatataagtagacccatgcagttcaaatccatgttgttcaagggtcaattgtatgtctttttttatcatttttcttttttctcttaatataaaatacattgcacaaaataattgaaatgataaaactattatatatgttaggcatataacgtagaagtacaacatacgtgaccatcaaagcacaaacaagggaggacaaatggagctc

SEQ ID NO: 296636 - DNA, 526 bp, Homo sapiens
agtggctataccagtatcaggcaaatagaccctaasacaaaaacattaccagagaaaaagagacatttagtaatgataaagttcaattcatttggatgatgtaataattataaaagtatatacacttaacaaccgatcctcaagatacatgaagcaaaagctgacatacttgaaaggaaaaatacccaatccaacaaaatagttgaagactgcaataccccactctcaataactgatagaacagtttcacagaatatcactaataatgtgcaagagacaaacagaactgttaacaagcaagacaaatctaatactgatagaatgctccacaaaacagcagcagaatacacatcacaagtagaatattctccaagacagatcaaatgctagaccgtaaaacaagtcttaataaaattaaaaggactgcaattgtgcaatgtatgtcctgtgaccacaactgaattaaattaaaagtcaaaaacataaagaaacatgggcaatccacaaatatttggagccttcaaaa

SEQ ID NO: 296637 - DNA, 1053 bp, Homo sapiens
agtggctataccagtatcaggcaaatagaccctaagacaaaaacattaccagagaaaaagagacatttagtaatgataaagttcaattcatttggatgatgtaataattataaaagtatatacacttaacaaccgatcctcaagatacatgaagcaaaagctgacatacttgaaaggaaaaatacccaatccaacaaaatagttgaagactgcaataccccactctcaataactgatagaacagtttcacagaatatcactaataatgtgcaagagacaaacagaactgttaacaagcaagacaaatctaayactgatagaatgctccacaaaacagcagcagaatacacatcacaagtagaatattctccaagacagatcaaatgctagaccgtaaaacaagtcttaataaaattaaaaggactgcaattgtgcaatgtatgtcctgtgaccacaactgaattaaattaaaagtcaaaaacataaagaaacatgggcaatccacaaatatttggagccttcaaaawagtggctataccagtatcaggcaaatagaccctaagacaaaaacattaccagagaaaaagagacatttagtaatgataaagttcaattcatttggatgatgtaataattataaaagtatatacacttaacaaccgatcctcaagatacatgaagcaaaagctgacatacttgaaaggaaaaatacccaatccaacaaaatagttgaagactgcaataccccactctcaataactgatagaacagtttcacagaatatcactaataatgtgcaagagacaaacagaactgttaacaagcaagacaaatctaatactgatagaatgctccacaaaacagcagcagaatacacatcacaagtagaatattctccaagacagatcaaatgctagaccgtaaaacaagtcttaataaaattaaaaggactgcaattgtgcaatgtatgtcctgtgaccacaactgaattaaatwaaaagtcaaaaacataaagaaacatgggcaatccacaaatatttggagccttcaaaa

SEQ ID NO: 296638 - DNA, 469 bp, Homo sapiens
aataccaattctatacaaagctttacagtaaattgaagaggtgagaatatttcccaattaattctatgaggccttgatatgtgaactagacaaaaccagtatgagaaaaggcaactatagataaatatttcttgtgaacatagatttaatatttaaaaaattagtaaatccaatttaacaatatctaaataggtaatacatcttaaccaagtagaatttatccaggaatggaagattcttatatttgaaatattaatcaatgtaatttactatactaacaaactaaatgagaaaaccatatgatcatctcaatagatrcagaaaaaacatttggcaaaatccgatatctattactgataaaatctctcaagaaactaaggataaaagagaaattcatcaacccaataaagaacatctgagaatctatagctagcatcatacttcattgagaataactgaatgatttccc

SEQ ID NO: 296639 - DNA, 469 bp, Homo sapiens
aataccaattctatacaaagctttacagtaaattgaagaggtgagaatatttcccaattaattctatgaggccttgatatgtgaactagacaaaaccagtatgagaaaaggcaactatagataaatatttcttgtgaacatagatttaatatttaaaaaattagtaaatccaatttaacaatatctaaataggtaatacatcttaaccaagtagaatttatccaggaatggaagattcttatatttgaaatattaatcaatgtaatttactatactaacaaactaaatgagaaaaccatatgatcatctcaatagatgmagaaaaaacatttggcaaaatccgatatctattactgataaaatctctcaagaaactaaggataaaagagaaattcatcaacccaataaagaacatctgagaatctatagctagcatcatacttcattgagaataactgaatgatttccc

SEQ ID NO: 296640 - DNA, 595 bp, Homo sapiens
ataaagcaacaacaataaaaacaatgtgatattgcatcaaaataaattgatcaatggagaatccaaaaatatacccatatatttatggtcaattgatttttttgcaaagattcaatggtggtttaatacagaaggagaagtcttttccacatatggtgctggaacagttggatatccacatgcaaaagaacttttactttgatctgctcactaatcatatacgaaatttaatacaaatggattataggtctgaatgtaaaacacaactataaaacttctggaagaaaatataggaaaaaatctctgaccctgagttaaaggttttcttagacataacagtaaaaacataatatatgaaaagaaaaaaatcatattaattggactttatcaaaattakgaattcctgtttttcaaagggcactgttaagttaaagtagagaaatgccacaaactgggagaaaatatttccaaatcatctatctgataaaagactaatatctagaatatatatatataaatttttaattctcaaattcaacaagtaaacaacacaattcaaatgggaaatattttaaacagacacttcaacaaagaa

SEQ ID NO: 296641 - DNA, 516 bp, Homo sapiens
tggaggaataataaacaaatcagcactagagtttggaacagtaaagaagtcacatctgaaaactcgtccacattttccgagcattrggcagaaacgacaggaagttgtgaggaaagttcttgccacctaccattgctgcacgaggcttaggtctctcaggtctcttgggataactctctgtcggtggaatttccagcactggacaggtaggtagggaggacctccaggacccaccacatggacaaccacttattccccagccacaagcctcccttgggtaagcatgagtcggcctggctgtagcatccacgcgcaccaacccactgcaccttcagctcctaacaagctgacaggataaagttttactttgctggttacatttgctcctttatgcctgttctacagagactcaccatggtgagcaaaactattcaactatctttaaaataatacctgaaaagtctcttgagggaagcgtgcccctatgcttctgaatagcatctttgtaagaagaca

SEQ ID NO: 296642 - DNA, 583 bp, Homo sapiens
tgctccaatttcacttctcctgggtaaagctttttgaccccagaaatggcatcccttgttttctctgctatatagcaataagaagctctctctaaaagtcagtaagaacacaagttcttttccatgattctgagagaaatttcagtcatgacaaaaagctggaaggtcctttagggctctttttatagttctgctttctcttatcaattgtggaggcctgagcttycctccagccaaaactcctgccatagcactcatccatccaacttcagaaagtttccatagtcacggagatttgtcttgttagaaaaattccctgcaatagcctacaatcgaatgaagaccttgtccctgcaaaacctcaattccctcttacttttaatcgcactgcctgcagagccagcggcactaatcaggctgccggtgcataagctcgtctgcttggtatcgcctggtcctgctctgagtccagaccacactttctactgcagccccggtccctgtgagcaatgctccaggctgctctgctcagcaccggctcctcagagacactgacaaagggtgaggcagtggttcttccaca

SEQ ID NO: 296643 - DNA, 1203 bp, Homo sapiens
ccaaccagagcttaactgaacattggagctcttctgtggtctcaagcatctttgaaacatgttgaaaatcaaacaggctctgaggagcttcatattcttgactgttaaaactcatgtgaactagaacatctatgacaaactcataaaaatgtcagcaagaaaggaaggcatcatagctgttttcttaacttacttttattttcactattttaggtctcaatatcaaatgattttctaacctctacttttaaaaaattaattgaaatgttggccatgtttatgatgagtattattcaccactccaaacaagactctgctaacatttgtactcaatttctggtaccctcggggmctaataaatgcagtgatatgtaaaatatgaatattatgctccctagatatcatgaaggagtagaattaaaattgtgagtgcttaaaatgatgtcatctcattgtggttaaattctgcattttactgatgacttacgaggttgagcaccttttcatatgctcatttattcattaaaatgagtaatccttacacaagaataactaagcataaagaaataatgctaaatgcagttaagaattctcattttgcwccaaccagagcttaactgaacattggagctcttctgtggtctcaagcatctttgaaacatgttgaaaatcaaacaggctctgaggagcttcatattcttgactgttaaaactcatgtgaactagaacatctatgacaaactcataaaaatgtcagcaagaaaggaaggcatcatagctgttttcttaacttacttttattttcactattttaggtctcaatatcaaatgattttctaacctctacttttaaaaaattaattgaaatgttggccatgtttatgatgagtattattcaccactccaaacaagactctgctaacatttgtactcaatttctggtaccctcggggcctawtaaatgcagtgatatgtaaaatatgaatattatgctccctagatatcatgaaggagtagaattaaaattgtgagtgcttaaaatgatgtcatctcattgtggttaaattctgcattttactgatgacttacgaggttgagcaccttttcatatgctcatttattcattaaaatgagtaatccttacacaagaataactaagcataaagaaataatgctaaatgcagttaagaattctcattttgc

SEQ ID NO: 296644 - DNA, 670 bp, Homo sapiens
ctcatatgtgtgcatgatgctcaggaagggagattcaaatgggcaaaaatgctccagagttaggaacaaatcttcatagcaaaagaaggctgttgttaatgtaaatcacagctgaaatttccaaacagatgcaaaaaacaagttcacatgttatttagtaaaagagcatttcataaatggccaataagcacatgaaaagatgctcaatgtcattcatcactaggaaatgcaaatcaaagctgtaatgaagtaccacttcacgcctggtatgatgagcataatcaaggacacacacaataacaagtgctggtgaaagtgtggagaaatcagaacgctcatgcattaccaccaggaatgtaaaggtgcatctgctctggaaaagcagttaggcagggtttctaaaagttcaacagagagttgcatatgaccttgcaattccactcctaggtcaaacagctaataaatggataaataaattgtgatacatattatatattactatatataatatatgatattatatatgatatacataygatatacataatatatatgatatacatatataatatacatagtttaatagaaaacatatatatgaatatcatacagccaaatgaaatgaagcactaatccatgatgcaacacggatgcaccttgaaaatgttat

SEQ ID NO: 296645 - DNA, 614 bp, Homo sapiens
gcctaacaggaatgtaaacagagagtgtgttccattctgcaggaagaagtaggttaacttcaatatccctttggtacttttatcagcttgcaatatatttggatatttctgcagatctatcaaaatttattgcatacacttggctctgtttatactttcagctttttctccttttctactttcaggattacaatgaagtcttcacttaaaattgtgaacaggttcccggaaacagagactttaagccaaacaatgtataaagaaaccaattctggccgggagtggtkgctcatgcctgtaatcccagcactttagaaggccaagcccaggagttcgagaccagtgtgagcaacatagtgagacctcatctctacaaaaaatatttcaaaattaaccgggtgtggttgtgcacagctatagtcccagctacttgggaggtggaggtggaggattgctagagcccaggaagtagaggctgcagtgagctgacattgtaccactgcactccagcctgggtgacagagtgagaccatgtcccaaaaaaggaaaaagaaaggaaaaagaaaccaattttctcttaaggtgattcatataaacaagagttaagttcctaa

SEQ ID NO: 296646 - DNA, 614 bp, Homo sapiens
gcctaacaggaatgtaaacagagagtgtgttccattctgcaggaagaagtaggttaacttcaatatccctttggtacttttatcagcttgcaatatatttggatatttctgcagatctatcaaaatttattgcatacacttggctctgtttatactttcagctttttctccttttctactttcaggattacaatgaagtcttcacttaaaattgtgaacaggttcccggaaacagagactttaagccaaacaatgtataaagaaaccaattctggccgggagtggtggctcatgcctgtaatcccagcactttagaaggccaagcccaggagttcgagaccagtgtgagcaacatagtgagacctcatctctacaaaaaatatttcaaaattaaccgggtgtggttgtgcacagctatagtcccagctacttgggaggyggaggtggaggattgctagagcccaggaagtagaggctgcagtgagctgacattgtaccactgcactccagcctgggtgacagagtgagaccatgtcccaaaaaaggaaaaagaaaggaaaaagaaaccaattttctcttaaggtgattcatataaacaagagttaagttcctaa

SEQ ID NO: 296647 - DNA, 575 bp, Homo sapiens
gtcaggcgattcttcctccaccaccaagcaatccaaaagcaaatgatcacaaatacagcagctcaccaagcattttgtaccacagaggtaattgttgtacatttggatgattatcatagacttaaaaaattttattttacagtaagttgtattcattcatttattttccaatctacttattcaagttcagggtctcaggtggctggagattttcccaactgctcagtgttctaggagggaaccagccacggacaggatgccattgcattgcagggcacactcacaggcacccacatccacaatggaactatgtagacacaccaatgaacctaaagtgcacatccttgggatacaagaggaaaccaggacacttggagaaaacccacaaaaaatggggtcaacatgcaaaacccacacagacagtagccctacctggaatcaactttctttagacmccctctcatcaatgttgtaataaaatgacatttaaatgaaagattattcgaggatctgctgtataccctaccaacataccatgactgtagttcaaagatgtctgaagtggttttgttgtg

SEQ ID NO: 296648 - DNA, 611 bp, Homo sapiens
ttatttttagcacactgccttgggtttacatgtgtatagcaatcatcgccctcagacgtgatgtccagcatgaataatgaacatggctgtgatgtgyaggcaccctcctggtgaccaaaagcattcgtttttcttgaaaatacctacccttaatttcaatcacttcagtaaattactgccatcacttcacagctattacttaaaagatcaacatggtgagtaccaaattcaataatcatttgataaagtgagatattagcatataagatgcattaattttcataatgcaattaagccttaaaatgttctgaagatccattgttaattgttttaaattgtttaatcaatgtgtacctctgaacctctaattttcagttacaagcaatatgaatttgccacaacaacagaactaatttcaaaatatagcatctaatctcataatggttacatgcaatatcaaatttaaaataagtcggcacccagaaggaaaagggtttaaaatactgcttcattagcattgtactgtgtaagcctaaaatgttccataattctggcagagtacctaattcatatttaatcccatttaaaatattccactgaataaattagac

SEQ ID NO: 296649 - DNA, 574 bp, Homo sapiens
cagctgccacatatcaccacatggacactgtgcacctcgaggatgggaagcaaaagagataaccctgaaatcaacaagatgcagatattaatcatccctctttgaagggagtctccctacttcccatctattcctcattaagaggaaatgactcagcgttcctcacagtgcttctccgtttctccactaaagtttctacaaagatgaagtcaaayttccctatatccaaaataataacaacaaagcacaaaaaatagaagaacatccaaaaccgaggcttgggttagtccagtggacatacaagaaggcttaccagtaactaccaggctacacaagatgactgagacatacagttaggggcaacccacacacacccatagcaggtgtcctcaaaccctggtcatggaccagtactggttcatggcctgttaggaaccccggcacatagccagtaagcagtgaagcttcatctgtatttacagctgctccctatcacttacattaccacctgagcgccatctcctgtcagatcagtagcagcattagattctcataggaactcccattgtgaaat

SEQ ID NO: 296650 - DNA, 574 bp, Homo sapiens
cagctgccacatatcaccacatggacactgtgcacctcgaggatgggaagcaaaagagataaccctgaaatcaacaagatgcagatattaatcatccctctttgaagggagtctccctacttcccatctattcctcattaagaggaaatgactcagcgttcctcacagtgcttctccgtttctccactaaagtttctacaaagatgaagtcaaatttccctatatccaaaataataacaacaaagcacaaaaaatagaagaacatccaaaaccgaggcttgggttagtccagtggacatacaagaaggcttaccagtaactaccaggctacacaagatgactgagacatacagttaggggcaacccacacacacccatarcaggtgtcctcaaaccctggtcatggaccagtactggttcatggcctgttaggaaccccggcacatagccagtaagcagtgaagcttcatctgtatttacagctgctccctatcacttacattaccacctgagcgccatctcctgtcagatcagtagcagcattagattctcataggaactcccattgtgaaat

SEQ ID NO: 296651 - DNA, 542 bp, Homo sapiens
acaaaaaatagaagaacatccaaaaccgaggcttgggttagtccagtggacatacaagaaggcttaccagtaactaccaggctacacaagatgactgagacatacagttaggggcaacccacacacacccatagcaggtgtcctcaaaccctggtcatggaccagtactggttcatggcctgttaggaaccccggcacatagccagtaagcagtgaagcttcatctgtatttacagctgctccctatcacttacattaccacctgagcgccatctcctgtcagatcagtagcagcattagattctcataggaactcccattgtgaaatgcacatgtgaggaaactaggttgtgtgctccttatgagaatctaatgcctgatgatctgtcattgtctctcatcacccccagatgggactgtctagttgcaggaaaacaagctcagagctctcactgattygacattttcatgagttgtataattatttcattatatattacaatgtaataatgatagaaataaagtgcacgataaatgtcatg

SEQ ID NO: 296652 - DNA, 593 bp, Homo sapiens
tatgtgaggtggtggacatgttaattagcttgatcattaacatcatttcacaaagtacacatatataaaaacataacatcatgtactgtaagtatatgtgtgacggtcaatattgagtgtcaacttgattggattgaaggatgcaaagtattgatcctgggtgggtctgtgagggtgttgtcagaggagattaacatttgagtcagtggactgggagaggcagacccacactcagtcttcgtgggcaccatctcatcagcttcccatgttgctgggataaaagcaggcagaagaacctggaaggactagactggcttagtctcccagcctacatctttctcccatgctggatgcttcctactctcaaacactggactccaatttattcagcttttggactcttggacctctgaccacagactgaaagctgcgctgttggctcccttacttttggtgttttgggactcagactggcttccttgctcctcagcttgcaggtggcctattgcgggacttcaccttgtgaagtcattatcctgtgagtcaatactccttaataaaytcccctttatgtatccatctatcctattagt

SEQ ID NO: 296653 - DNA, 1111 bp, Homo sapiens
gaaagaatgggggcttggatcctggtagagcagtgtattagtcttttctcatgctgctgataaagatatacccaagactgggtaattataaagaaaagaggtttaacagactcayagttccacgtggctggggaggcctcatagtcatggcagaaggtgaaaggcacatctcacgtggcagcaggcaaagagagaatgagaaccaagccaaaggggttaccccttgtaaaaccatcagatcttgtgagactttttcactaccatgagaacaatatgggggaaactggccccatgattcaattatctcccacccagtccctcctacaacaggtgggaattatgggagttataattcaagatgagatttgggtggggacacagccaaactatatcaaagaggttatgagaaggggagaaaaagaattctgtggaagggaaataaatgattgttagggaggataattgagtatgattgaatggggaacagagattaacctataaatacttctttttgggtgacttaatttaawaaaaaaaaaaacaaaaaacaaaaacaaaaaaaccgaaaaagaattttgagctccagctttatttggaattattttcatcagcaatttatggaaaagcaagacgatttatgctaaagttcattgattaactctgattaactcatttaaaaaaaatatcctcaacatagggtcatgaaatattcatgaaacattgcattcctgaccaaagcatgttcttctagggagatgttcgagaatgtgtaaatacaaatgaatatatttcacatgacctttcatacatacaaatgaatgcataaaatattgataatcaatccattgtaattccccaattgtgggcaataaacaatggaagtagggggtctcatgaagtgcatggggctgttcacagtgatttaatgcttgacatttgwgtgacagaacatcccgtcataggtatataataataaacaacagtgaaaacatagacatgaagcacaagcctggtttggggataagccccagtttggtgttgctagagactcaaactattggtataatctgttttggaactgtgtctctattaaccaccagatatagaaagg

SEQ ID NO: 296654 - DNA, 581 bp, Homo sapiens
aaaaaaaaaaacaaaaaacaaaaacaaaaaaaccgaaaaagaattttgagctccagctttatttggaattattttcatcagcaatttatggaaaagcaagacgatttatgctaaagttcattgattaactctgattaactcatttaaaaaaaatatcctcaacatagggtcatgaaatattcatgaaacattgcattcctgaccaaagcatgttcttctagggagatgttcgagaatgtgtaaatacaaatgaatatatttcacatgacctttcatacatacaaatgaatgcataaaatattgataatcaatccattgtaattccccaattgtgggcaataaacaatggaagtagggggtctcatgaagtgcatggggctgttcacagtgatttaatgcttgacatttgtgtgacagaacatcccgtcataggtatataataataaacaacagtgaaaacatagacaygaagcacaagcctggtttggggataagccccagtttggtgttgctagagactcaaactattggtataatctgttttggaactgtgtctctattaaccaccagatatagaaagg

SEQ ID NO: 296655 - DNA, 547 bp, Homo sapiens
ctttgcagaatctgggagtccaaaatcaaaacaatagcaacaaacttcagggaaaataactgtgrtaagcatgcatttcaataggtgcagtagtggaaaattaatatctctaaccaaaatgtttctgattttcttgagctatctttttactttcaaatatcagcagtgctaatgactgtcagctttattgaggtcatgagtaaaatcagaaactctacatttctcatgctgattcaatatggaggttgttttcacaccagcagctctacagggtagggaaccttagggttattcatgtgtgcttatgagacggaaacagcaaagaacctgtactagtccacttcatactcatataaagaactacccgtacctgagactgggtaatttataaagaaaaaaaggtttaattgactcaaagttccacatggctagggaggcctcagaaaacttccaatcatggcagaaggtgaaggggaagcaaggcacatcttacatggtggcaggagagagagagagagaccgaagggggaagtaccactttaaaagt

SEQ ID NO: 296656 - DNA, 547 bp, Homo sapiens
ctttgcagaatctgggagtccaaaatcaaaacaatagcaacaaacttcagggaaaataactgtgataagcrtgcatttcaataggtgcagtagtggaaaattaatatctctaaccaaaatgtttctgattttcttgagctatctttttactttcaaatatcagcagtgctaatgactgtcagctttattgaggtcatgagtaaaatcagaaactctacatttctcatgctgattcaatatggaggttgttttcacaccagcagctctacagggtagggaaccttagggttattcatgtgtgcttatgagacggaaacagcaaagaacctgtactagtccacttcatactcatataaagaactacccgtacctgagactgggtaatttataaagaaaaaaaggtttaattgactcaaagttccacatggctagggaggcctcagaaaacttccaatcatggcagaaggtgaaggggaagcaaggcacatcttacatggtggcaggagagagagagagagaccgaagggggaagtaccactttaaaagt

SEQ ID NO: 296657 - DNA, 547 bp, Homo sapiens
ctttgcagaatctgggagtccaaaatcaaaacaatagcaacaaacttcagggaaaataactgtgataagcatgcatttcaataggtgcagtagtggaaaattaatatctctaaccaaaatgtttctgattttcttgagctatctttttactttcaaatatcagcagtgctaatgactgtcagctttattgaggtcatgagtaaaatcagaaactctacatttctcatgctgattcaatatggaggttgttttcacaccagcakctctacagggtagggaaccttagggttattcatgtgtgcttatgagacggaaacagcaaagaacctgtactagtccacttcatactcatataaagaactacccgtacctgagactgggtaatttataaagaaaaaaaggtttaattgactcaaagttccacatggctagggaggcctcagaaaacttccaatcatggcagaaggtgaaggggaagcaaggcacatcttacatggtggcaggagagagagagagagaccgaagggggaagtaccactttaaaagt

SEQ ID NO: 296658 - DNA, 576 bp, Homo sapiens
gtgataagcatgcatttcaataggtgcagtagtggaaaattaatatctctaaccaaaatgtttctgattttcttgagctatctttttactttcaaatatcagcagtgctaatgactgtcagctttattgaggtcatgagtaaaatcagaaactctacatttctcatgctgattcaatatggaggttgttttcacaccagcagctctacagggtagggaaccttagggttattcatgtgtgcttatgagacggaaacagcaaagaacctgtactagtccacttcatactcatataaagaactacccgtacctgagactgggtaatttataaagaaaaaaaggtttaattgactcaaagttccacatggctagggaggcctcagaaaacttccaatcatggcagaaggtgaaggggaagcaaggcacatcttacatggtggcaggagagagagagagagaccgaagggggaagtaccactttaaaagtatcagatgtcatgagaacccactcattatcatgagaacagcatgggygaaaccacctccatgatccaatcacctcccatcaggttcctct

SEQ ID NO: 296659 - DNA, 1115 bp, Homo sapiens
caaaaataaataggaattccactaactttagttgaatagaatgaaaagaaaaaacaaaaatgacagttactaggtctccaattttctagtaaaataatataatatttaaagtagtattttagctaagaatgaagcacacatatatacttaagtgtgtcagtttttacaatatctaagttcattttcacacactatggggggaggagaatgtaattgctgtcaaaatayattgtgtttataacacttaacacttaaagagctgatggatggtctctgagaattgctcatgcttgcttgaattcgaactcattattgtcacagccaaatctcttatagttagattcttctctttaattttctcatctggattgaagatattaatgctttcagttattgcaactttaaccagagcctggcatagtgacagagtctcattgttctgttgaaataacttctcccactttattttctttttaaacatttttatgaactaattttaaaagattaacttcattcttcatattaattttttgcattgggaattgaaacactaatcttaatagtaataataagaagaaagtatcctgatatagacacwatcaatctatctgtcttctatcaaccatccatctcttatttttctatcttttcatccatatctgtctatctatctatctatctatctatctatctatctatctatatctatccaccatctccatttatcttgcatgtacttattcattttatctatccatccatctctatctttctatttctccatccatatctatctatctatccacctatccatctctatttatctatgaatgtatttatctattcattcattcatctatgcatttatctctatctatcwctctatatatccatctatatctatttatcatctatgtgtgtgtatctcttatctatctaattttaaaaacaactacataagctagaaagtcatgactaaacttagatcagcagatttttgatatggtgcttatttctaatgttaaacacatattatggttcttcttttaggatattttgacttgatggtggataatatatttatgttcattttataaacattttgtgtagtgtac

SEQ ID NO: 296660 - DNA, 616 bp, Homo sapiens
tacctcacatctcactacctggagataattcctgttcatgcttgcatagaaagatctctgaaaagaggaggaggctgggcacagtagctcacacctgtaatcccagcactatgagaggcagaagcaagatcatctgagaacagactgagcaacatagctagaccccatctctacaraaaagttacatatttagttaggtgtggtgatccatccctgtagtcccagatacttgggaggctaaagagggagggtcacttgggctctgaaggtcaagactgcagtgagctgtgatcatgccactgtactctagcatggttgacagagcaagatccttccttaaaaaaaaaagaaagaaagtaaaaaaaggagagagattttttcaaatgacagacagaatgagagagcaaactgtactggctactttatattctgcttctgtaacagagtcatgtattctttaaagtgtatcttttaatgactacatagtattctgtgctttggcttagaccacagtttacattttataaaatttctttgttgcatctctcaccatttatcttctgtttctggtgtggggatgagagagctgcagattttatcactgacaaagcagagg

SEQ ID NO: 296661 - DNA, 616 bp, Homo sapiens
tacctcacatctcactacctggagataattcctgttcatgcttgcatagaaagatctctgaaaagaggaggaggctgggcacagtagctcacacctgtaatcccagcactatgagaggcagaagcaagatcatctgagaacagactgagcaacatagctagaccccatctctacaaaaaagttacatatttagttaggtgtggtgatccatccctgtagtcccagatacttgggaggctaaagagggagggtcacttgggctctgaaggtcaagactgcagtgagctgtgatcatgccactgtactctagcatggttgacagagcaagatccttccttaaaaaaaaaagaaagaaagtaaaaaaaggagagagattttttcaaatgacagacagaatgagagagcaaactgtactggctactttatattctgcttctgtaacagagtcatgtattctttaaagtgtatcttttaatgactacatagtattctgtgytttggcttagaccacagtttacattttataaaatttctttgttgcatctctcaccatttatcttctgtttctggtgtggggatgagagagctgcagattttatcactgacaaagcagagg

SEQ ID NO: 296662 - DNA, 592 bp, Homo sapiens
tatcatattgctattcgtctgcctatgtatcctgtcaatctatttgttcatctatctctatctacctagctatctagctatctacctgtcatctaccaagtgaatctgaatctatccattcaaccatccaaccagccactctatctatctatctatctatcatctatccatcatctatctgaagctatctgtccatctatattccaaatgtatttatacttactatacraatctattatttatcctaatctgtctatccaaatctatctatccatctatttcatctgttcctttctgtcatttatccagctatctactcatctatcttatgtatctatctatctatctatctatctatctatctatctatctatctgatctatcaccatctatcatcgattaatctacctatctacccatctatttatgtttctatctatccattttctatctattaatctgtcatatctatacatctatctattgatctgtcttctatctatccaccttatctatctacctatctatcgatctatcaatctatctattaattatctatctacccatggcatctatctactcatgtatataa

SEQ ID NO: 296663 - DNA, 592 bp, Homo sapiens
tatcatattgctattcgtctgcctatgtatcctgtcaatctatttgttcatctatctctatctacctagctatctagctatctacctgtcatctaccaagtgaatctgaatctatccattcaaccatccaaccagccactctatctatctatctatctatcatctatccatcatctatctgaagctatctgtccatctatattccaaatgtatttatacttactatacaaatctattatttatcctaatctgtctatccaaatctatctatccatctatttcatctgttyctttctgtcatttatccagctatctactcatctatcttatgtatctatctatctatctatctatctatctatctatctatctatctgatctatcaccatctatcatcgattaatctacctatctacccatctatttatgtttctatctatccattttctatctattaatctgtcatatctatacatctatctattgatctgtcttctatctatccaccttatctatctacctatctatcgatctatcaatctatctattaattatctatctacccatggcatctatctactcatgtatataa

SEQ ID NO: 296664 - DNA, 592 bp, Homo sapiens
tatcatattgctattcgtctgcctatgtatcctgtcaatctatttgttcatctatctctatctacctagctatctagctatctacctgtcatctaccaagtgaatctgaatctatccattcaaccatccaaccagccactctatctatctatctatctatcatctatccatcatctatctgaagctatctgtccatctatattccaaatgtatttatacttactatacaaatctattatttatcctaatctgtctatccaaatctatctatccatctatttcatctgttcctttctgtcatttatccagctatctactcatctatcttatgtatctatctatctatmtatctatctatctatctatctatctatctgatctatcaccatctatcatcgattaatctacctatctacccatctatttatgtttctatctatccattttctatctattaatctgtcatatctatacatctatctattgatctgtcttctatctatccaccttatctatctacctatctatcgatctatcaatctatctattaattatctatctacccatggcatctatctactcatgtatataa

SEQ ID NO: 296665 - DNA, 606 bp, Homo sapiens
acttgcaaggtctcttcccactccctgtaagtgtatacccttttcaacttcctcatctaaaataatgtcatgaataagttatggagagactgagctgttactctctagggagcatctcctactcatcccaagttagataagattccagattcccttagagcatcatttgctcactctgcttatagtccctgtctggcgtgttttgagcgtcttagtacttgtctgctacctatccaggatgagagctcctggaatttcargttgacatttaactaacactgaaacatgaaaagcccatctcagtgtctggttggaagaaaatatatatatatttcccaagggattaagtcaataaatacatgattattacctttcatttttacctaggggtatttgttttagtctcactctagaatccaaagacctctcctacagaacagctattgctccactataaatgagtgaatgagctcatcctcacctataaattgttctcaccaagaacctttgagactctacaggacctattagagaactagcttcaatgcaagagattattaatgctcacaaattcataaaaatgaataacctagatatgttgcgtga

SEQ ID NO: 296666 - DNA, 594 bp, Homo sapiens
atgtccataacgtgattaatgcacattacagagaaggtagacaagtctgtgggaatatggcataattacaatacaaagagacaaaactcagccacagaggaaaggacttttgaataatgcagaaaattcctgcaagaaaatctcttacaggcttacatattgtctctgtgtacaatccaaaagccataatggctttctcctctgtaaacaaaagacgcttgtggaaatcctatttttataaaatcyatattttctaaagctcatacattaagtagacttctttggtatgtgatgcactgaggacagaagcagaaatacagatgctggccttggtagaggtgatgtagaaaggttatgtttaagggattgaccttaaaatctcttcagacatccaagctgaaaacactctgtagtttagaaatcaacacaaatacaaagtgtttacaatccaggcagaagcatgagctagtatgctacatgaaatcagaaaataataagtgaaaacaattctgtcaattctgatgaaaacagaaacatcttcctagttatggaatacatctattaacaaaggtgaaatattaataccaaaggcag

SEQ ID NO: 296667 - DNA, 642 bp, Homo sapiens
tagtgcttcttggtcttaagtactgactcactagaataggttacttagagcagcctacttttgagcagctggagattgctgtaaaaataggttttcgcctttgtttagcttgattacatacaccaacaacacaacatacatatatataaatatatataaattaatatatatttagcatgctaattttaattgtcaatataatattttaacttactttgaaataatgtttgcaaataaacttactttgatttaccataatactttatgtyatagaatatatatgttcatggatgtcataaaaatgattttaaactatctctttcaaatttcacctgttctcatttcctttccttttgaaaacacagatctggtttccagaaaagatgtgaaaaagaaatgtcaagaaaggtcctcatgttgcttttttgctttttccttggttggaatttccaattcaccactgatctaagaagctttgttcctgggtgtacacgtttgtcatgtgtactatatatagtatcattggcttttttttcacagtgcaactgtactttaccacacgggacacacttacatgaataagtagccatttggatttttaaccaggaaaccctggtaaaattcttggtcctgttgcatgca

SEQ ID NO: 296668 - DNA, 501 bp, Homo sapiens
tttccaattcaccactgatctaagaagctttgttcctgggtgtacacgtttgtcatgtgtactatatatagtatcattggcttttttttcacagtgcaactgtactttaccacacgggacacacttacatgaataagtagccatttggatttttaaccaggaaaccctggtaaaattcttggtcctgttgcatgcatgagaaaccataaaactttatctccctcatttgatttttaattcaataaagcacaaattcccaatgagcaaataaarcaagtgaaaggacattgtaaactatagtgttatatgaaaatctaagtttatatcactatagaatgtgggatttacatgtagtacactatcttggatattgaaacaggttatttaaagataaatacataaaatggaaaacaataataatcatacattttgtaatcatttatgaactaattctctaatctataatttaaagaaagcctctacctcctgacccctgaaaaa

SEQ ID NO: 296669 - DNA, 501 bp, Homo sapiens
tttccaattcaccactgatctaagaagctttgttcctgggtgtacacgtttgtcatgtgtactatatatagtatcattggcttttttttcacagtgcaactgtactttaccacacgggacacacttacatgaataagtagccatttggatttttaaccaggaaaccctggtaaaattcttggtcctgttgcatgcatgagaaaccataaaactttatctccctcatttgatttttaattcaataaagcacaaattcccaatgagcaaataaagcaagtgaaaggacattgtaaactatagtgttatatgaaaatctaagtttatatcactatagaatgtgggatttacatgtagtacactatcttggatattgaaacaggttatttaaagataaatacataaaatggaaaacaataataatcatacattttgtaatcatttatgaactaattctctaatctataatttaaagaaagcytctacctcctgacccctgaaaaa

SEQ ID NO: 296670 - DNA, 565 bp, Homo sapiens
catttatatgtcttcccagatcacaaaactctatattcccaaagtaatgtgatcattaaactctagagtcacataaactgttactggtcaatgattcagagtagactatyaaaatgtcttcacataagggattctcactcccgtcaaccatatggcttcacacaaggctttaaaatttgtgttttatctgccttcatctgtaaaatggttgcattaataactcaaaactcagtgagggaaggtattaaaagtctagagcggttttcaaaaataacatctaagcagtgcagtacccacaaagagttatcattgttcttctactggatcatacagaatgaacttggtagatattcaagtgtatagagttctataaccttatattaaataacctcagattgttgtttctaaaatggcttttctgtctttttccacatggatcaattgatgcatatccattataagctttaaaaaaatttttttcctcttaaggtgtttttgtagactctttatttgacttaggtcctgagggtggccacatagagaaagtaaattattaattactcag

SEQ ID NO: 296671 - DNA, 616 bp, Homo sapiens
cattaaactctagagtcacataaactgttactggtcaatgattcagagtagactattaaaatgtcttcacataagggattctcaytcccgtcaaccatatggcttcacacaaggctttaaaatttgtgttttatctgccttcatctgtaaaatggttgcattaataactcaaaactcagtgagggaaggtattaaaagtctagagcggttttcaaaaataacatctaagcagtgcagtacccacaaagagttatcattgttcttctactggatcatacagaatgaacttggtagatattcaagtgtatagagttctataaccttatattaaataacctcagattgttgtttctaaaatggcttttctgtctttttccacatggatcaattgatgcatatccattataagctttaaaaaaatttttttcctcttaaggtgtttttgtagactctttatttgacttaggtcctgagggtggccacatagagaaagtaaattattaattactcagaggctacttcaattacattcttgtcttggttcttagctgcgttgcattaggaataatttatagaaagtcagatcttgaaggaagtgaaatgttgctactgagac

SEQ ID NO: 296672 - DNA, 616 bp, Homo sapiens
cattaaactctagagtcacataaactgttactggtcaatgattcagagtagactattaaaatgtcttcacataagggattctcactcccgtcaaccatatggcttcacacaaggctttaaaatttgtgttttatctgccttcatctgtaaaatggttgcattaataactcaaaactcagtgagggaaggtattaaaagtctagagcggttttcaaaaataacatctaagcagtgcagtacccacaaagagttatcattgttcttctactggatcatacagaatgaacttggtagatattcaagtgtatagagttctataaccttatrttaaataacctcagattgttgtttctaaaatggcttttctgtctttttccacatggatcaattgatgcatatccattataagctttaaaaaaatttttttcctcttaaggtgtttttgtagactctttatttgacttaggtcctgagggtggccacatagagaaagtaaattattaattactcagaggctacttcaattacattcttgtcttggttcttagctgcgttgcattaggaataatttatagaaagtcagatcttgaaggaagtgaaatgttgctactgagac

SEQ ID NO: 296673 - DNA, 624 bp, Homo sapiens
aacattccttcaatgagcaattaaaaactcttgagacagatgaaaacgtagaaagtttcagagaagaaatagaagacatagagaataacaaaacgaaaattttaggactaacaaatatagtaactgaataaaagattaccagacaggcttaacagaagaatggagaaaacaaaggaaagataagtgagtttgaagatagaatagaaattgttttaacccaatttaaatagcagaaaaaatagaaaattatgtatagattttcagggacctaactttatatgattggaatcccagaaggaaaggggaaataatttgtgctgaaaaaaatacataactgaaaatgtttcctaatttagcaaaagtaataaatgtacaaattgaagaaactgtgaactcaaacagaataaacttaaagacattcacaccaggatgcaacctggtttaaytacagaaacttaaaggcaaagaaataaatcttgaaagcgttggagagaaatgatgcatcatctatgtaggacaaaacgcattgtctaacagtgtatttttcattaaaaaccatgaagtccaacaaacaccaacacaggatttttatgtgttgaatacaaatcactgtcaacacatgat

SEQ ID NO: 296674 - DNA, 617 bp, Homo sapiens
aaggctgtgtcattaaaagaaagcaagctgttgaaggcatgttactattcataaaattgaagataaataatttgtgattaataaaattgcagttttttaaacttttaggttcaggggtgcatgtgcaggtttgttatgtgtcacggggtttgttgtacagattattttgtcactcaggcactaagcctagaactcactagttattttttctgcttctctccttccccctaccctccactgtcaagtagaccccagtgtctgttgttccactctttgtgtccatgagttctcctcttctagctcccacttatacttttaaatataatccaagttcaaagttctttctaatyttaaagcatcgttaagccacattccctgaagcaactgacccaagagaattagagaagagtttatggcttgatgttccaggagaaaaatacaaaatcagattagaagaaaggaaagagctgagccaattctgtgtttactatgcctgtctaatttctccttgactattggcagcagaatgttttcgttccatgatgcagatgaattcttactgaagtttctgctatccatccaaggcaacatagcttgttccaatattcagagaacag

SEQ ID NO: 296675 - DNA, 576 bp, Homo sapiens
tccctttccttgttcataaagaggcactctacttaacatatgggattgcagattaattaaggcaatgccattaattaatttgaagacacaataattagattaacaataataataataaaaggatctacccatggaaaataaaagtaggaacaaagagtagaaattgtgatttatggattgagtacrcattttgtatatcatcagtacaattttaaataatgcctactggggtttttttccttttttttttttttttttttttttgttggttgaacttagttgagaggattcatttcatgtttctttcctaagtttaagtttgttctggaaatggggttgtgtgcgtacctgtttaacagagatcaaattaggtcaatctgtgttcacaccatttggaactgtaattggtttctttaattgactcctgtgaaccagcacagaatcagctcagattcttctgtcactactccagagagggcttggtctcctgggaacttgagtaattaaaactaccaaagggatttaaatcccgcactccatagagatgatcagctacaataagtttcatgaaattga

SEQ ID NO: 296676 - DNA, 581 bp, Homo sapiens
atatttattgctatactataaatatatacatactgtattttttagttttggctcattttagtgttgatcttcccaggcagaatgtgaggacagaatttttgtttgttttgctctctgttgcattagggcacatgacaagtatttaatataaatttttgaatgaatgaatgaatgaatagggtccaggttctctgctggtcacaactgatcaagtcaaatatggtttttcattgcaaggagtttatgtctcatgaggatggcagatatttaagtaattaaaatgtgtccacacataaacctgcatacagatgtttatggcagctttatccacaattcccsaaatttggaagcaaccatggtgtccttcagtatgtgaatggataaataagcttgaggacatccagacaatgaaatatttattcagtactaaaaatagctatcaagccatgaaaagatgtggaacaaagttaaatgcattttactaagtgaatgaagccaatctaaaaaggctatatactataataattccaactatatgacattctggaaaaggcaaaaccatgaagatagtaaaaagacca

SEQ ID NO: 296677 - DNA, 564 bp, Homo sapiens
atatgcagacagaagttacttttttatgacaccagttaattctgtctctcattttagtttttaaaaatctcaaaaagcaaatgattcttgctcatttagtttcagttttcttgtctataaaataaagcaatatgagatggtctttaagatcctttcaaaaccccaaaaacgtggatatctacatttggattttctgaagagctaagatttgggtactttaccttaattttgaatacttcataatgaagcctttctaaagtattctccttcacctgctgtcatacacagtgtaggcaaaacactgtgaatcttttcttggtgggccaggatcaggtgtatgggaacacccgtgggsctgaattctgcaccagtggcgatgtcctcagggattaaaacaacattcagaccactggctttttgagttattgtatcagaagtgatatattccgaaaaagcagaacaacaacaagcagataagtaagataagtgaaaaaggctcaaaggccgctaatgagtgggaaaattggccagtggctaaaagccaagtgccttcttgcaactaaa

SEQ ID NO: 296678 - DNA, 574 bp, Homo sapiens
tgcccaattactctcaatttctgtacatctcatttcagactagtaatagttgatgggccacactttgagttatgtagataaaggattcctttagttcagcaaagcaattgaggtcayctgttgtggtgaactcaagcaagagattggtggttggactcaaagcagattttatgagatcctgtagattgagaataacccaaaggaaaggctcagaaaaattgccattaggttcttcatttgaacctttcctgttcaatccttttaccaatgacttagatggggttataaacttatcagatttaaaaatatagtttatatttattaagcatttattttacataatccatatactcagctaattgttcaaggattatttcatttaatctttagaacaaaaattttattatgtacatactgtaatgcacagttcacaatagggttataaatccccaatttataagtgagagaagttaagtaacttccctgaagtcgcactgctagttgatggaactgggatttgagtccaagccagcagactccacatccaaaggcaaaccacctagtggacaggcaa

SEQ ID NO: 296679 - DNA, 594 bp, Homo sapiens
gcatcattgtgaaacctgaaaactcaacatggtttctgggtggaaggtgtccacatagaggtgccaattggcaactcctaatgtcagtgttcttagacaaaggggaagccagatagactgaagccatgtgtttgttagaatcagttaggaagtcaaaaggcacctttaggagctttaagaaatcaggcgagtatcaaaatatagagatcctactcttctggaaatccaatatcctaacttgattaagaagaaaaagcattttcaaagatctggatgcaaccactacaagtcacagatggctytgtagcactcttcagacaatgcaaagcttagagagttctgaagccttttatagaaataaattcacatttgacatatagtgaaatttgggccctaattcttttgtgttcaaatgggtgtcctaaagacacacattattcctgccttttcatgttctattttcctggatacagcatttgattttcttaatcacttgacgtatgacataggtgaattgaaaaatagcccaaggctattcgtaacagtaatagcttcatccaactttaattcttaatactgtgtgctaaatcggaa

SEQ ID NO: 296680 - DNA, 641 bp, Homo sapiens
ttttttactttcttatttctcagttctctctgggtattgacatatccccccatggactataagctcctttgaagtcagggacagtattccaggaatcactgtyatcttcctgtagtatcagggggaggagggggtcaataaatgtgtgttcaaaaatactttttaaaaggcttaggactatttgtaagacagagttgagagtatataacaaagcccctgaagagaaagcacatacatgaaaagatcattataatttcaagtagcactgcaacagctgcatgaaggagaaagtcaaagtcacgcaggcccgagttggaaaaggaaggatttatagaaggtctatacttctaactagtcctggaagtgagtaagactaagacaagaggaggaatagaagggcatatgaggcaggacacatggtgtgacaagacaagggaccatttcaggaaagcaaaggatcggtgtagggaaattaggagattaaatgggagaggatatttcatgtcagatggtagacattggtccttgttgccaagctgaggagtttgaactttatcttataggaaatggggaatccattgaaagttgtaggagacagttacaaacatataccttgcaaatactatttgctacactctttg

SEQ ID NO: 296681 - DNA, 641 bp, Homo sapiens
ttttttactttcttatttctcagttctctctgggtattgacatatccccccatggactataagctcctttgaagtcagggacagtattccaggaatcactgtcatcttcctgtagtatcagggggaggagggggtcaataaatgtgtgttcaaaaatactttttaaaaggcttaggactatttgtaagacagagttgagagtatataacaaagcccctgaagagaaagcacatacatgaaaagatcattataatttcaagtagcactgcaacagctgcatgaaggagaaagtcaaagtcacgcaggyccgagttggaaaaggaaggatttatagaaggtctatacttctaactagtcctggaagtgagtaagactaagacaagaggaggaatagaagggcatatgaggcaggacacatggtgtgacaagacaagggaccatttcaggaaagcaaaggatcggtgtagggaaattaggagattaaatgggagaggatatttcatgtcagatggtagacattggtccttgttgccaagctgaggagtttgaactttatcttataggaaatggggaatccattgaaagttgtaggagacagttacaaacatataccttgcaaatactatttgctacactctttg

SEQ ID NO: 296682 - DNA, 627 bp, Homo sapiens
atatttaaccattttatgctaacaaagaatttttctagcaaaatattaccagcgtatcttaggtacatataattttagtggatttcatcccccttgagaatatgttctagatcccagagaatttaatacagtttcatctaatttatgtttttaaaaatatactcatgtttggaaggtataaagaacaataattactccagcaatattgctgaactgagaatagaaagaaatgaaaastaatataaaagtcataatggcaaaatgtgttgaagttcagcagccaagagggaaacacaattgtaagctcagttggtcaggtcacaatgaaactgataaaaaaatacaaagattaattacaaaattattgggaaacgtcaagtaatgtatgaatcattgacataggatcagtcagattcctctggtattttgcagcagaaaaatgagaagaatggaactaaagtcttcaaatacatttaattgcattcctttttggatatgtaatatcaatacaaaaagtttcgatcaatactgtaagtcaaatgaaacatatgccatggtcaaatgaagcatttggttgtagtatatgaaactgccattttgtaggtcaaaattggttgaactttagca

SEQ ID NO: 296683 - DNA, 617 bp, Homo sapiens
aataatcttatatttcacccagtatttccaaaatattatcatttcaacgtggaatcaatataaaaataatgagctattttgcaattttgtttttatatgaagtcttcaaaatctggtgtgtattttacatgtatatgtttcaayttgtaccagcaaattgcagagctcaatagccacatgtggctagtggctcttatattgaggagtccagttttataacatcaacattaaatctcaccatggtcaccaatgaaaatgaacccagagtattctggctggatttattcatgataactaatccctcacttacataaacagtgtatgcttcaagaagggagaacaaagattctgtaaagatctatgtcctaggcatttctcttatatttgacagccaatagtgtttatgacaagccctatacttcataagcaagctatgacacagtattgtaaatacaaatgttttaactgtgggtatagtaaaagcattttgggcttcccagattggctagattccaccatcactggggcctgtttgtgattatgcatctatgatacaactcagaaccaattattccatcataaaaggcatggtcaaggcaaactctcacacataatgt

SEQ ID NO: 296684 - DNA, 617 bp, Homo sapiens
aataatcttatatttcacccagtatttccaaaatattatcatttcaacgtggaatcaatataaaaataatgagctattttgcaattttgtttttatatgaagtcttcaaaatctggtgtgtattttacatgtatatgtttcaatttgtaccagcaaattgcagagctcaatagccacatgtggctagtggctcttatattgaggagtccagttttataacatcaacattaaatctcaccatggtcaccaatgaaaatgaacccagagtattctggctggattkattcatgataactaatccctcacttacataaacagtgtatgcttcaagaagggagaacaaagattctgtaaagatctatgtcctaggcatttctcttatatttgacagccaatagtgtttatgacaagccctatacttcataagcaagctatgacacagtattgtaaatacaaatgttttaactgtgggtatagtaaaagcattttgggcttcccagattggctagattccaccatcactggggcctgtttgtgattatgcatctatgatacaactcagaaccaattattccatcataaaaggcatggtcaaggcaaactctcacacataatgt

SEQ ID NO: 296685 - DNA, 556 bp, Homo sapiens
gtggctcatttccccggctgtaagatggcacccattaaagggagctttgtaaattaggtatcttaaagggcagccaaacctgccatctgaagaattacttttgttttagacttaatttttatgattgcttcaagaaaaaaagggaaagaaaatgagccaaatcacactgtgataggggatttgaaaatgagaagtagcataaacaatatcatgttttcttgcctgaaaaataggaggttggatctgcttatatgccagcctttagactctcaaatctccttgttctatttctagcttatctcggtaggtccaccagtattttcctaccaagtgttctactatcattaattgtttaaaaaaagagaagagagagaattcatttctattcttcttgtggctgtcccttagtttttcatttctccttccatactggggaatrcaggtgcctggccagggactgcacttccaagcctcctttgcatctagctgggtcatgtgacaagttctcgccaatggaaaataagcagaagtagagtttctaagtggctgtgccttt

SEQ ID NO: 296686 - DNA, 556 bp, Homo sapiens
gtggctcatttccccggctgtaagatggcacccattaaagggagctttgtaaattaggtatcttaaagggcagccaaacctgccatctgaagaattacttttgttttagacttaatttttatgattgcttcaagaaaaaaagggaaagaaaatgagccaaatcacactgtgataggggatttgaaaatgagaagtagcataaacaatatcatgttttcttgcctgaaaaataggaggttggatctgcttatatgccagcctttagactctcaaatctccttgttctatttctagcttatctcggtaggtccaccagtattttcctaccaagtgttctactatcattaattgtttaaaaaaagagaagagagagaattcatttctattcttcttgtggctgtcccttagtttttcatttctccttccatactggggaatacaggtgcctggccagggactgcacttccmagcctcctttgcatctagctgggtcatgtgacaagttctcgccaatggaaaataagcagaagtagagtttctaagtggctgtgccttt

SEQ ID NO: 296687 - DNA, 525 bp, Homo sapiens
gatttctctcttaattttgtcagtgcttggacttggtccccaaatcttaaaagtgaatttgtttccagaacacctgaaacagagaccacatttttatgtttgcctttttgcagtgaagtttacattagggagctatattttccttatatttatttttaaatcatttgggctttccaataaaatagcattctcattttcttccctcttcccagattaatgcatttattattttaatgcatgaaggggtccacgtggcgctatggttggtggctgggatgctctggagtggtgcgcttggaaaacaatgtgttatttgcacttgagaaaatactttgttggmtaagtgtctaggcactgaaacagtaacagttcatcaaaagacagttatcccagatacgcttccaagagtggcaatcagttttcctaaagagtcaaagaaaagagtgagaattgtgggaagtgggagactagaaggacagactcatttggaaacaggaagtggttcaaggaacttaggatttggaa

SEQ ID NO: 296688 - DNA, 525 bp, Homo sapiens
gatttctctcttaattttgtcagtgcttggacttggtccccaaatcttaaaagtgaatttgtttccagaacacctgaaacagagaccacatttttatgtttgcctttttgcagtgaagtttacattagggagctatattttccttatatttatttttaaatcatttgggctttccaataaaatagcattctcattttcttccctcttcccagattaatgcatttattattttaatgcatgaaggggtccacgtggcgctatggttggtggctgggatgctctggagtggtgcgcttggaaaacaatgtgttatttgcacttgagaaaatactttgttggctaagtgtctaggcactgaaacagtaacagttcatcaaaagacagttatcccagatacgcttccaagagtggcaatcagttttcctaaagagtcaaagaaaagagtgagaattgtgggaagtgggagactagaaggacagacycatttggaaacaggaagtggttcaaggaacttaggatttggaa

SEQ ID NO: 296689 - DNA, 622 bp, Homo sapiens
atgagactgatattctcaaagtataatcttgaaaaagaaatgagtcaagcacatgcatggtcaggcaatgtactcatgcagtggacctctggtgttctggctggccagagtcaccttttccttgttctggtagccatagctttggtttcctgggaggaatcacctcccttaacctcagtgtacactgagattgggcacactccagcacctgaaggagacgtgtaacccaagcttttgccatgaacatatttcctctctttggccacagtgattgtctcaggagaaggcacaaaactccactctggtcagtaataatcagactgagctgcacatgaacccaggagggtgtaagactgaaggtgctkggggccatcctaagaagaggatccctccaagagttaagccaacaaaagggagagtgagtaagagactgagtccacataaatttgaactccagagtctagccatgcctaaagccagaatttctcctagtttttagaattattatataatgtcttaaatctttttttttttaaacctaatgttaccttaaaggtgacttttttgtcctttgtaaccaagacagtcctgttgggtatactccaaaataatgaacatgaac

SEQ ID NO: 296690 - DNA, 622 bp, Homo sapiens
atgagactgatattctcaaagtataatcttgaaaaagaaatgagtcaagcacatgcatggtcaggcaatgtactcatgcagtggacctctggtgttctggctggccagagtcaccttttccttgttctggtagccatagctttggtttcctgggaggaatcacctcccttaacctcagtgtacactgagattgggcacactccagcacctgaaggagacgtgtaacccaagcttttgccatgaacatatttcctctctttggccacagtgattgtctcaggagaaggcacaaaactccactctggtcagtaataatcagactgagctgcacatgaacccaggagggtgtaagactgaaggtgctgggggccatcctaagaagaggatccctccragagttaagccaacaaaagggagagtgagtaagagactgagtccacataaatttgaactccagagtctagccatgcctaaagccagaatttctcctagtttttagaattattatataatgtcttaaatctttttttttttaaacctaatgttaccttaaaggtgacttttttgtcctttgtaaccaagacagtcctgttgggtatactccaaaataatgaacatgaac

SEQ ID NO: 296691 - DNA, 565 bp, Homo sapiens
atttgataaaaacaagagaaaacattaaaaagcaacatgaactgcagagttcaatcccaccaaaataamaatgtagcactgtatatcttgaaactgaggttagactctctaggaagaacatggaggaaataaatgctcaatccatattgcagcagacataattttaagccaccacaactttcaaggacctttgaaccattttcttcaaatttgccttgcctttctttctgcatctgtgaacttgccaagttagagtttattgctgtaacaggttttgaatgatagtgtatctgttttgaaaaggtcagtactttttgattatttgatggaaagaatgtgtgcttttccttttttatgtatctttcaaaccaactgtcttgatataaatggaatctttaaaaaatatatttaccctttttagactaagaccaaacattccgttccatgaaagtcatgagtggttgctgaaaggaggttatgaatgaaatagtgtctccgcttgaacgtcagcagctagcctgcatttattcctcaatttccagaatctagaataaaaatagtgatt

SEQ ID NO: 296692 - DNA, 565 bp, Homo sapiens
atttgataaaaacaagagaaaacattaaaaagcaacatgaactgcagagttcaatcccaccaaaataaaaatgtagcactgtatatcttgaaactgaggttagactctctaggaagaacatggaggaaataaatgctcaatccatattgcagsagacataattttaagccaccacaactttcaaggacctttgaaccattttcttcaaatttgccttgcctttctttctgcatctgtgaacttgccaagttagagtttattgctgtaacaggttttgaatgatagtgtatctgttttgaaaaggtcagtactttttgattatttgatggaaagaatgtgtgcttttccttttttatgtatctttcaaaccaactgtcttgatataaatggaatctttaaaaaatatatttaccctttttagactaagaccaaacattccgttccatgaaagtcatgagtggttgctgaaaggaggttatgaatgaaatagtgtctccgcttgaacgtcagcagctagcctgcatttattcctcaatttccagaatctagaataaaaatagtgatt

SEQ ID NO: 296693 - DNA, 565 bp, Homo sapiens
atttgataaaaacaagagaaaacattaaaaagcaacatgaactgcagagttcaatcccaccaaaataaaaatgtagcactgtatatcttgaaactgaggttagactctctaggaagaacatggaggaaataaatgctcaatccatattgcagcagacataattttaagccaccacaactttcaaggacctttgaaccattttcttcaaatttgccttgcctttctttctgcatctgtgaacttgccaagttagagtttattgctgtaacaggttttgaatgatagtgtatctgttttgaaaaggtcagtactttttgattatttgatggaaagaatgtgtgcttttccttttttatgtatctttcaaaccaactgtcttgatataaatggaatctttaaaaaatatatttaccctttttagactaagaccaaacattccgttccatgaaagtcatgagtggttgctgaaaggaggttatgaatgaaatagtgtctccgcttgaaygtcagcagctagcctgcatttattcctcaatttccagaatctagaataaaaatagtgatt

SEQ ID NO: 296694 - DNA, 531 bp, Homo sapiens
gagaaatgaggtggctggataaggtgcagaccagttatgaagactcctaaaaaccagacagaaaatggcttaaagaaattagggagctactgtgggaatctgagcctggtagagatgaaagttttatggtttacaaatgcttcttttcaaatgcatcatcrcttaacatgtacagtttattatatgtccgttacaactcgataaagctgttaaaaatacatgatctcattaggtgttcaatatttggtgaaatggaccttatccttatttcatttttacagatgaggaaactgagacccagagaggttcatggcttgcccgagttcaaacgtttcagatgacaagccaagacttccgggttttctgcctccacgtccctctttgcttctttctgaatgcagctctctgctgagggacttggaaggagactggcctgtggttggggaggccagttgggaggcggcggcagatggctgtttgcagttttctctccctctctctcccttgctttcttgtctatgctgccctcac

SEQ ID NO: 296695 - DNA, 541 bp, Homo sapiens
atgcagttaacagatcatcttaatcgtcttccccagacctagcttcaaaagcattcacccagttctcacatgtgtgagtgaaaatcacttagattttgacttggctattaaatggcctcaagcaaaagcaagtcaaccaaattagaaagaaggcaaagtgctatgggctttggagcgagatgactgtgaagttcaatctggattcctccatttactacatgtcactagtgctagatgctacttagcctctttgggcctcagttttctcatctgtaaaatggaaataatgagtccaacttaacaggtttgttacagcaattaaataaccgatgtattgtgcacagtgccaggcatgyagtgagccctcaccatgtgaatggcagcaccagcatccacatcagctcatcatcttcatcagtggcattacctgaaacactctgtcctcatccgtgacatacattagaggaaaacagccttgttttctttaggttttgtattctcccaaggctgaaacttgtatttgtaatgctacaactttgat

SEQ ID NO: 296696 - DNA, 622 bp, Homo sapiens
ttgaatatctgaaaagtcacaccatattgggtaatacagattatcaatgtgatttgaattagctactccgaagtaaggaaaactgaaaggcagtttaatgattgttttcatctgtccaagcaggcaatctgacaggaggagatacctagaagaacattggactgggagtcagagatgtgccctagtgttgactttggcacraactcacttgtgatatgatgtgaactttgagtgtcttaggtttcccatatgaagaaaaagaggctcagcagatggccaagtccttttcagtgttatctttataaagcaagtgttaaaaagtttctttatggtatcagcttctaaatattgggtaggtgataaaagttaattagaaatgctccacatgacttaaaatagacttctgtctcaaaatgaatgctttagaactatgtattcttataaatgtgccctgtaaggtctacataagactttcctctggaagtcactctcaatcttgaacgtctaatgaaatgtatttattagtaaatgatgtgctaatacatggtatcattctaatgcaacgtgtctgttgagcagaaatctcactcgtgaggaaattgtgatgctaaattcctgatgt

SEQ ID NO: 296697 - DNA, 1101 bp, Homo sapiens
ttgggtaggtgataaaagttaattagaaatgctccacatgacttaaaatagacttctgtctcaaaatgaatgctttagaactatgtattcttataaatgtgccctgtaaggtctacataagactttcctctggaagtcactctcaatcttgaacgtctaatgaaatgtatttattagtaaatgatgtgctaatrcatggtatcattctaatgcaacgtgtctgttgagcagaaatctcactcgtgaggaaattgtgatgctaaattcctgatgtaaatatgtctctttccagctgtgtgatcttggcaagtcagttggccttcttgggtcttatgtgtcctcctaagtttgctatctaaatacagaaattttcttagatatcattcaggaaatttctagagaaaactgaaaatacaggaaaacactttgtagtcaagggcaagtgagacactacgccaatagtatatatgtatatattaggaaaaaaccttcagatatatggtttgttctacatgcaaaagagaaatagtctttcacaactttgaaatggtggttctccctcacataggawtcctgcatctctccagactgagctgtcaggaaaataaagaacttggatccttgcttttctgatgggccaccactgcctttggatggaaggacaaaagctgctttccaggctggtaggacattgggaggcagggtaggaaggacatggtggtggggtgtggtctgcaagcctttcgtgtcttccaggagcaatttcttccttctttgaccccatcaaaggagatgaatcccaggttcttgcaatacatgtttatttcagccawcttctccttcctaggttggggcaaaactgtgttctgtgatcaccatctgccattggtaggaaaggattccactgggggtgtgtggctaatttgtgtgcctaaagaaaatggattttgaggtgctgcattactgactagccacttgccatcttcctctcctgccctatctctcactggctaaataccatgcagtggccattctcattttggtttccagtgtattttgccacctcagaaatctagactctcacattcaaacctatgggag

SEQ ID NO: 296698 - DNA, 528 bp, Homo sapiens
aagtcactcagcagcaaacataggtctagaactcagagctctgacccttaccacccaggctctccttatggatcttttaccatcttgtgccctgtgaaatgtctaccaagttcagatcctaaccactgagagccataaaatgtatgcacaacagaatttctctacttgctacattctgacaaagtactacaccaaaagatggaatgcaaactaggctgtgaggccagcccttgacaggcatgccttttgtggctcacagcttcaactactacctcaggcaagcccttgagacatctctctggaccaacttctcttcatatagccacttagtctctggtcagagtcaactagctatatgagactatagatcaaacattcattgtgatttacacgaaattaatttccagaaagtgtaagtaatggtactttgtmtgaaaacacatattttccaggaattttttattgcccatgacacacacactaagattttgccaaaataagttcaagccagttgtgtaactgtactca

SEQ ID NO: 296699 - DNA, 673 bp, Homo sapiens
taactcattttcttcctcatacgcgccctctgagaaggggaaataaggatcagcaaataaagtcacagagtaaatggcacagttggggatcaaaccaggtctgtttgatgatgccaaaggccattcatggcccattacaccatgcagatctcttgttgaatataagtcaattggcagcaggctaaagagagcaattctagcaaatgcttatggaatatattctatatgcaggcttgtttcrtttgcaaagaatcaagctgggttggtgtactatgaccaccattttccaggaggagaaattgaggcttaggagaggagaagtaatgtgtttgatgtcttccgataagtggtggagctggatttgaaaccaacatctctctctctccagacctagccttgctaccctgcatgttatgcctcctcctgagcacagactgctgatgccagtggatggaaatttaaacacacacaaacatacaacctctttccttaagagccatgtgattaaccagagtgaagtgtcagtggccttctgggatctctctgatgggtgaatggataaaggtcatagcgacgaccacagaaacctgtttagtatcagcggataacattgcctgtcactttaaatgagccagagacctccagacactccagcaagtctcccattgcacag

SEQ ID NO: 296700 - DNA, 545 bp, Homo sapiens
cactagacaagttcattctaacagagctttcaaatagcagttacaatcctctattaaataaacctaaggtacatatgtagatgtgggcatagccctaaatgactgacagatttcagtagggaagtggagtgtggtggcacctacctgtagttccagctttgcaggaggctgaggcaggagcagcacttgagcccaggagtttgaggctgcagtgagctktgctcacaccactgcactccagcctgaataaaagagcaagacctcgtcttaaaaagaaaaaaaaatcagcaggaataaaggatttcactaatctacccaattccttctcgtctgctacaagttaatatgattgtgcctttttctctgccctaagaattaagaacaatagggaagctcctcttgtccctggaaaggagaaacaacttgttttgtaatccaaggattacagagcagaggagttaaattgactaagacaaggaaaggccttaagggtgagaactggacatggtccaatccaagggaacagaagtatcctcccaaaacaa

SEQ ID NO: 296701 - DNA, 567 bp, Homo sapiens
ccaccatgcctggcctgccccatctattgagttatgcaggggatgtgagggtctccttgrcgcacacaacacaaaacttaaaaaaaaaaagttttaaaaagtttaagtaattgaacataaaaactccccagaagcatgacctaatcgtttcatatttcatgcaatttaaagcagacatcattttccttaaatgactagacattaatcaaatggacctccacacttgagaagataaatgccaaccaaagaaaaggaagccttcggtatatttacctttccttttaaagcacagatatgagaaatgaatgagatttttgaccatttatcatgcacagagaccaactgtctctcagaaatttttatgtcaaaccacacctggccatacatgtttgtctcgattcacaagctctaaatatcatattgcaacattgtgggagagaagccaaaagtactgtgcttaaaactcctttgtcttaaataagctgtgatacttaaaaaagctgccttgatgttccaaaactatggataatgtgttatttatttagtgttttaaacatattatttagt

SEQ ID NO: 296702 - DNA, 567 bp, Homo sapiens
ccaccatgcctggcctgccccatctattgagttatgcaggggatgtgagggtctccttgacgcacacaacacaaaacttaaaaaaaaaaagttttaaaaagtttaagtaattgaacataaaaactccccagaagcatgacctaatcgtttcatatttcatgcaatttaaagcagacatcattttccttaaatgactagacattaatcaaatggacctccacacttgagaagataaatgccaaccaaagaaaaggaagccttcggtatatttacctttccttttaaagcacagatatgagaaatgaatgagatttttgaccatttatcaygcacagagaccaactgtctctcagaaatttttatgtcaaaccacacctggccatacatgtttgtctcgattcacaagctctaaatatcatattgcaacattgtgggagagaagccaaaagtactgtgcttaaaactcctttgtcttaaataagctgtgatacttaaaaaagctgccttgatgttccaaaactatggataatgtgttatttatttagtgttttaaacatattatttagt

SEQ ID NO: 296703 - DNA, 503 bp, Homo sapiens
tggcctatatagtcttgccttgcaggtcccttgccctaagaaatacactcacatgacatgaatagatggtgtcaccagctactgaaagtacatttttgaaattgtcatattgtatgagcattttttcaatttaaagtaaatcaaatcttctgtgtaggttcatagaaactaaacaaccaaaccttgaaaaattagttaaaaacagcttaaagtagaaatgattaaaatgctagttgatgtattcagttatgattttttttggctactcatcttctacacttcgatattattatatagatgtctagaatgtttcatatgtatgtttttaycttgctgtacaaaataaggtattatatgtattcatctacttgtgtgtatagaggttgtattatataaatgccaggcatacattttaaaaagccattttgtataatattttgattatgaatgattcattttcaaaataacatatgctgtggttgaaaaaaatagttatgttgggc

SEQ ID NO: 296704 - DNA, 562 bp, Homo sapiens
ttcccattttcacccccaccaccacaagaggtagccacagacttggtttcttctctctccctccagagcttacagattcttattccatcctcccctaaccctgactttttcttttacaaaagatgacacactactccgctccttycttttctctcctggagctctttctcatgagagctgctttattgtttttttaatcattgcctagtgttccattgtgtgtattcttcataattcaattaactagtatcctgtttaagggtattttgttttcagggttttttgttttttttttttttttttttgctattgtaaacaatgctgcaatgaagagccctgtataaatatcttatatgagtgtaagtgcagcagtggaacttctggataaaaaatgtatatgcatttgtaattttaatagatatgccaaattgtactctgcatgtgttatacaaatttacatttttattctctagatatgggaatgcctgtttctcttagccttatcaaacttggattttgcccaatctgatagatgaaaaagatctaggtattattttttata

SEQ ID NO: 296705 - DNA, 611 bp, Homo sapiens
acccagagtctagctctgtgtgccttgctccacatcatagatgtctaatgacactgctgagaaagtgattaggacacatatcactgagaaaatagaattaaaaaaacaaaagtagaaagcaggtgggtcgtgtacgtgtgtgtgtcagagaaatctatggtttgcctttattcagaaatgagtgtttgcaagcgagacattgttcttctgtaccttaaagagtggaatttccaattagggtggatatgtctctaatgaattctagatcctatctgtcagtgaagcttgcatgagacagttcgaagaatcttagagttgatagtgacatcatccagttaactcttttcccaatgcactcatatgtcctacaacatctccctcatgtatttgtcaagcctgtgctgtgatactttcagtgatggtagttgacttctttgcacagcaaaccattccagtttgtctattgttaaaaggtcttctttgtgttgaacttgaacttacctttttaacattttttcaaaattatagtgacattggctrtgttcttaaagaaagtgggtcaatttctaatgaaatccatctgacttcaaggacaagatacccttaaaagc

SEQ ID NO: 296706 - DNA, 574 bp, Homo sapiens
aacccaattcagatgataaaattcaaggtaataaaaaaatgtgtatacagtttctatcatatattgctgagcaaatatctgtatttccatttgataatacatagcttccccttaatacatcatctgtcagaatcttctcttaaaaaaaaaacaagattgtacactaacatgtattttgtggcaatgcttatgtttctgaaatatccatctctatacttagtttattagtcaaatattaatacctggtagaaaagtaaggcattctcggaaactttattaaatattctaagttaagtatacaaagaaaagtaatctaggatytgaggaccagatcagtctgtcttaagcaacaattacaaccttgattatactgacttacgctgtttattccttctttcataattcatgcaatacacataccctgaagatacagtcccagaatggtcagacctcaggaatcatctggtcacatcctcgtattttaaagagcaaaaactgaagcttaaagactatttgtgattgccagttgtggctaacagagaattgaatccagctcatctaacctttccagaac

SEQ ID NO: 296707 - DNA, 574 bp, Homo sapiens
aacccaattcagatgataaaattcaaggtaataaaaaaatgtgtatacagtttctatcatatattgctgagcaaatatctgtatttccatttgataatacatagcttccccttaatacatcatctgtcagaatcttctcttaaaaaaaaaacaagattgtacactaacatgtattttgtggcaatgcttatgtttctgaaatatccatctctatacttagtttattagtcaaatattaatacctggtagaaaagtaaggcattctcggaaactttattaaatattctaagttaagtatacaaagaaaagtaatctaggatctgaggaccagatcrgtctgtcttaagcaacaattacaaccttgattatactgacttacgctgtttattccttctttcataattcatgcaatacacataccctgaagatacagtcccagaatggtcagacctcaggaatcatctggtcacatcctcgtattttaaagagcaaaaactgaagcttaaagactatttgtgattgccagttgtggctaacagagaattgaatccagctcatctaacctttccagaac

SEQ ID NO: 296708 - DNA, 567 bp, Homo sapiens
gacaacaaataattaagctctctcggaaatgcatttaggaaaataataaataaattttgattattaaatttccccacacatttattctgttgtatacatttacatattaattgaatccctggcaaaaatatgtaatcaaattggggacttaaataatatcaacatttacattcttctcatagactcttagagtgcattattcctaagaaaaatgaaaccgctttgccttcctgccctaattaatcatgcaggcctgcatggacagccaaagagcaaggctcagaagtttttcttaaggtgctatgaacggtgtstgtttgatagtgtgtataaaagggaccgagagaagcacttgtcacagctaaagccagcagggtctccttattgccctggggaaagcactccacagctcagggtgtcaaatgctgacagacaggggtaaatggacgggcttgagagattcctcacgttctcctgctcctgctgcaactggcaccttccagccttgcctgcaaagaccacagaaagcagcagctggtgagccacattagcaaataaggcctcagg

SEQ ID NO: 296709 - DNA, 526 bp, Homo sapiens
agttacaactaagcatttgacatacagttcctaaagtacattttgaatataaaattgaagagcatgtatatatccaggacagctttcatgtgaatttaaggtttgatttctacctccactgggcccctgttgctgatagcagctcaaattcaacatattagttcatcaaaccacaactcatcacctccyacctgcttcctcacccactatcttctcttttttctttatggcttataatcagaagtgttaacaccacctgttcaaacacccaaaacagagacttggggagtctcccttgtcattctgcctttggttaattccaaatagtgttgattctactttttggcctaactcttgagtccagagagtgttgattctactttttggcctaactcttgagtacatctcctcttttccagctacacaatttctgcctttgttataggactcacagtttctcatgaactcatcttaccttctctcatttccttttcctcatctttgctgcctcaccattgtctacaag

SEQ ID NO: 296710 - DNA, 576 bp, Homo sapiens
ggttccaatctctgaactgggatgggtacatgtcactataaaatgtgatgaagaagatgataccacctttgaaaatctatacctggcctccctcagcattctagactggaacccagactcataggacttccaaggacatgtgattcactccttggtggcctctaatttgtttgtttttttttttttttagaaaaaaaaaaaagtagtcctcttgtctcctgggcatctggggatcatcttggaaaggaccaagtgatctttgttcccaagagagttggagaatgaatgatctgtaaactccaggcctcactgagtcttgagggagggaaataagcccaagtcagaaaaggamcctgctggaataagtggacatgtgtaccaggtcccctgtatcacccaggcatggccttcacataagccttctctgacaattcagcccctgatctcatcactcatataccttcttgtggtctaatcagggcttctcttctggccaggcatgggcatcagaactgctgctgtgacttccttcacgtgccccagcagtcacccaaggggccctgatatcctacctgc

SEQ ID NO: 296711 - DNA, 604 bp, Homo sapiens
tcttctctttgtgttgcattcatatgcattcatgcacacaggacttagaatagctaggccgttgggtgtctactctatgtagtagtgtatcattccaaccaacacagctgtgagagtcaagcaggtaactagtaataattaggcctacaactgggactgtcttgagggacccggaacccaggtcctggtaagctatgtgtgagacattatgcttggtgatagcaggagtacaaaaattaatatggaaatagttcctgccctccagtgtctagcaaaacaaatgaggtatgtattcagaaaatcatgcaacagtttaaagcatcactctccctttaagttataaaatgatgtaaggaatcaggaaaagctacctaattaatggagrtagtgttcttaaggatcttaaaaatgaaaaaaggtttgattaatgaatgacagggagaagtggggaagaagacgtttttggagtgaggaagtttcactgagtgagaattatgtgaaaggaaccattgtccctcccagatgctaggcacaaaaacctgggattcatccttcgttcatcttatttctgtcactccagacacccagttattatcttacccaa

SEQ ID NO: 296712 - DNA, 923 bp, Homo sapiens
agtgttagaaaccagtgcattcagcaaacgtgtattgagtgtttacgacgtgacttattgaaaatattatatagcaggatgccaactgggaaattaatttctgctttttttgttcccagttgctgtagatccatctgaaaggaaggaatcaagcctctgtgttcctgaagtcaggtccttttcactcccaaaaacacaggttcatttgyggtgggtctgaggctaggtgctctgggttatctagtgcttcctgaagccctagttttgaaagaagaagcaggatgaatttttctgtattggggacattggaaggggagaattaggctttgctccactagataatgcagaattgtgaataaggacaaggtttgcagattctgcagcagctcaggggcagggtcttaaaggtgtcaggcacttaaagggtacagggcaggacatcaggagcccagtctggggacwagtgttagaaaccagtgcattcagcaaacgtgtattgagtgtttacgacgtgacttattgaaaatattatatagcaggatgccaactgggaaattaatttctgctttttttgttcccagttgctgtagatccatctgaaaggaaggaatcaagcctctgtgttcctgaagtcaggtccttttcactcccaaaaacacaggttcatttgcggtgggtctgaggctaggtgctctgggttatctagtgcttcctgaagccctagttttgaaagaagaagcaggatgaatttttctgtattggggacattggaaggggagaatwaggctttgctccactagataatgcagaattgtgaataaggacaaggtttgcagattctgcagcagctcaggggcagggtcttaaaggtgtcaggcacttaaagggtacagggcaggacatcaggagcccagtctggggac

SEQ ID NO: 296713 - DNA, 554 bp, Homo sapiens
ttcttctttgacgctgggctgtgcagttattggagttacaatagagagaaagagaaatatggttgctttcctcatggagcttttagttaagcgaaagaacaagaaaacttatcaaaaaactaaaataaaatgtggtaggtgccataacgggagaagtacgtgttctgtattagcaaacagcagaacataatttagatgagggtggtatctcaaggaagtgataaactgagagtaaaatgataggaagagtcagccaggcgaccattgcataagttacagcttctcactatctcttccaccaccaaattgagaacatgttgtgaatttcagcsttataagatccttcaaatccaggtaagcatccatatcaagaatgtatttgaaactagagaattgtccaataggataaaagaggggatgctgcctcatccagagcccaagctctctattagccatgctgccctctgtgtcacttccctcaagaaagaccctccacttgagctatgaatcgcatcctctgtggccatctcaaggcttcacttcttaaattctcc

SEQ ID NO: 296714 - DNA, 371 bp, Homo sapiens
aaaatttaatcaactgattaagaaaagcaagttgggggaatgaactcttgagagaacatggggaataaaactaatgttgataaacttagagaaatagaaggggatattatatccatgaaacaaaaacagaatgctattaaaacaaaataaagagaagagacaaaataaagcattaaaaatccaagggtagaaatgaaaaactcagtagacacgttggaaaataacagtggagaagtctcccagagagragaccaaaaagagagctgaaaaccgggagaggaacaacagcaacatcagagagccatcccaggagattcaccagccaaatagtagagtttccagcagaatatagagaatggaggggaggaaac

SEQ ID NO: 296715 - DNA, 583 bp, Homo sapiens
cagtgactttcaagttagaatacttgtgtttcaattctcttaagagcatgtggccttcaggaagatatttaacttcgcttagcttgactctcctcatctgtaatacagaattatctgtaactcacaccatacttgtgagaattaaataaataaggtcatatgtgagaaagtgcctagtctaggctcttgcytgattaaggtttgaataactcttcactcaaagcaagaagtgttttcaccaaatgcattttccttatgttgtaaaacccaagcacagcaaatcagaagaaattgattcttatggattaatatcatcattcaaactcaccggcatgagtttaagatatgttgattttgaatttctcatgtcaatcttctatataatcagaaaatcactttaagaagctatgacagactgccaaccatatatacgaggctgaaatacatttgatttttttccctaaataagctgtttgaagaatgacagctagatagtaaaaaagaaaatcaacccctctgcaaagttagtagctttatataccttttcatcccagaaaatacctaagcagattaaaagctttct

SEQ ID NO: 296716 - DNA, 610 bp, Homo sapiens
tagtcacaaataaaaggttcagtggataaaggtttggcctttcgctacatgttttctgccaaactgtgacctgaaatgaatgaattggtattgagtgggtcctcctgactctgtaatttaatgctgacagtaattagctaacaaggtggtgttataatgaaagcccagggcatggtgtttatgtgattttacacagctgcaatagattggcacctcctttttccatctttttcatttactacctctgaaaaagaagaaggtgcaagtcataaaagatacagctgcttgactctctgataaatcyctggacagtgaagaccctggctttaaattagctgtcagcttcagccatcttactcactagctcactctggagttagcaacagtgcaaagagattataaatggatgcctatgtcttgattaatgccctctttagtaaacagactttacacatagagctgtggcatagcagatgccctgttataaaggttaatcttcacttcaatagcacattcaagacatcatgctttttcacagttcttctcttttctttttgaatttcaaattctcttagaataaatgagaaagaggaaacctaatagcagaatc

SEQ ID NO: 296717 - DNA, 551 bp, Homo sapiens
agggccacacttagactttagcccagtgaagctaatctcagacttttggcctctgcaatggtaagaaaataaatgtgtattgctttaagccactaagtttctggtaatatgttacagcatcaataagaaactaacacaaaaatgttctggattaagttaatatgaggcagccaaagacgttaagaaaggtaaaatataaaaataagcaaaaatatggtagtaaactctctagtattttaaagaatgaatctcaacttctaaagcacattcacccaaggctaaatttaccagaagtggatggcttcatgtaagaaaacaatacaacattcctagtgttatttcatctgatttgtagttggttaaaatcyataatgtttattttgatcagtacttctatttttttttttgaaacaggatctccctctgtcacctaggctggagagtggtagcaggatcatagatcactgcagccttaaactgctgggccccagtgatcctcccacctcagcctcctgagtagctagtactacgagcacttgccactaccccgc

SEQ ID NO: 296718 - DNA, 984 bp, Homo sapiens
tgactgcatcattcaaatctctgcctccatggtcatattaccttttctcttctgtctgtttaccccgctcttttatgaagacacttatgattgcatttaaggccatgcaaataatccaggatcatctctccatgtcaagatggttgacttaataacacctcaaagactgccatgtgaggtaatatttacaggttccaggaatttagatgtgaatttttttgaggagctattttttcacaaattttggaagaatttgtgaagtagtactcattctyttttttcaacatttggtaaaattcaccactgaagcaatctggagagagctccagcaagcttttctttatggcaagttttaaaatgacatatccaatctgtttawcactcaaaaaagaaaaaactccaggcccaaggaggacatttctgaaagcggtggcacagagatgaaaagtcctttgtaaatgttgattggtagagtgaaatttcacttataatatgaacttttttcctggtacctaagaaagctgaagaaatatttacatgcagacaagtaagatctttagaaccagacattatttaaataaactgtacctacaaataaaatacaaaacattttatttgcttattgacatattaggtgaaactacaatgacagaagagaaccagaaaaatattaagatgaaaaagaaataaaagatgacaacaaaaaatatttatagaggaggtgacattagcaagatggcatagtagggagccctagaccctcctttcccgcaaaaaacatactgactcagcaacaaattcactttctgaaaagtttacaaattccctttctgaaaaattcaaaaactaattgwaaggctactgcaccccaggtaaatgcaaaaccagactctaaagttggtagggagatttgggacaccctctcaccagaatccctaaccctggcacagtgctatatgatctggaagagactacctagcccca

SEQ ID NO: 296719 - DNA, 533 bp, Homo sapiens
aacatacaaaaattagttaatgtgatacaccataatcacagaataaggaataaaagttacacaataatctcaatagatgcagaataagcatttgacaaaatctgatatmatttattgattacaaaaagaaaagtctcaacaaactaggaacagaaaaaagtgcctcaacataataaaggccatatatgacaaaaccacagctaacattacattcaacagtgaaagcctgaaagctcttcctttatgataaggaacaatgcaagaatgctcattcttgccacttagtactggaaggtctagacaaagcaactgcaaacaaataataaaaggtatacaaatcagaatggaggaagaaaattgtcacaatcgcagatgggatattcttttatctagaaaatcctaaagactccataaaaattgttagaactcataaatgaattcagtaaagtttcaggatacaaaaccaacatacaaaaatcagttgtgtgtctgttcactaacaatgaactatctgaaaaagaaattaggaaaac

SEQ ID NO: 296720 - DNA, 622 bp, Homo sapiens
aaattttttttttgcagttgcaagatttaatagagtgaaaacagagctcccataaaatgggaggggacccaatggcttgaatgcctgggtttatatcccgatcattgtccctcccccatgctctcaggtgatagataattggctatttccttaccttctgttttagcctaattagcattttagtgagctctctttactacctgactggtcaagtgtgagctaagttgcaagccctgtgtttaaaggtggatgtggtcaccttcccagctaggcttagggattcttagtcggcctaggaaatccaggtagtcctgtctctcagtcccccctctcaacagtaaaacccaagtgctgttggggaggttggccgacaaccgctttaactgctttttgctgaattggggcatagtaggggtcgtgcagttgagatttcctcaggaggcatgccttcgatgtcatcaacattggagcatgggctagcaggccagtccaggggtctgcastagatcttagttgtggactgcattgtggctccatttgaagaaccatttgtagttttacagcttcgattctggaagagacaaacttaacaaagaggttaaagatacagggattgaaatgt

SEQ ID NO: 296721 - DNA, 573 bp, Homo sapiens
ttccctgtatcattttaactgcttcagatactaagactgctactgctgccactaccagtaaacaatgaggccaaccctttgtcactacatcagtttccttactcaagtatgccacgggttgcaagctggtccctcagacctgtgtaaggactcctagagctattcctgtttttctgtgacatataaagaaaagtctagcactgttggcaagcttaacactggggtttgggttagggccttctttagggcctggaaagccacttctgcttcaggtatccatcttactaaatgggtattggctttstgagtttccttaattagtgtatataatggcctggctatttcgctgtacctgggaatccatattcggcagaagccttttatgccaaggaaccctcttagttgctttagtgttttgggatgaggataagccagtataggctagataggtttcttactgaaggccctggtgcctttggataattttagccctaagtatttaacctgctgtgagcagagctgagcctttggtatggaaaccttgtagccacaggtggtgaggaaatttaagag

SEQ ID NO: 296722 - DNA, 523 bp, Homo sapiens
actaccagtaaacaatgaggccaaccctttgtcactacatcagtttccttactcaagtatgccacgggttgcaagctggtccctcagacctgtgtaaggactcctagagctattcctgtttttctgtgacatataaagaaaagtctagcactgttggcaagcttaacactggggtttgggttagggccttctttagggcctggaaagccacttctgcttcaggtatccatcttactaaatgggtattggctttctgagtttycttaattagtgtatataatggcctggctatttcgctgtacctgggaatccatattcggcagaagccttttatgccaaggaaccctcttagttgctttagtgttttgggatgaggataagccagtataggctagataggtttcttactgaaggccctggtgcctttggataattttagccctaagtatttaacctgctgtgagcagagctgagcctttggtatggaaaccttgtagccacaggtggtgaggaaatttaagag

SEQ ID NO: 296723 - DNA, 606 bp, Homo sapiens
gtctggtatagcaggccaaaaacactgaaggcctaataaccctcactgatatggtttggctgtatcaccacccaaatttcaccttgaattgtaataatacccaagtgtcaaggagagggccaggtgagataactgagtcatgggggcagtttcccccatactgttctcatggtattgaataagtctcagaatatctgatggttttacaaatgggagttcctctgcataagggtgacaccagtctggggttggacgggtagttgctgggtaggtgtccttgaagaattattactttgtgtttaagattatcatgacctttgtataaggttgcggttttgcagagtcttttgtaatagtttttatcaagcatttatgcatgagaaccgtaccttcatggcgctcctcagctctatttgtcagattgtttsttttgttttgtttttaacacaaggaattcattccatttttattctaataaccttcacgtgtaactcacacacaggaaaaaaaaggcagacagcaaaaaaaatgcctgtgacaaaattcagatatatagataaggacttcatatgagccattataaatatgttcaaagaactaaagaaa

SEQ ID NO: 296724 - DNA, 594 bp, Homo sapiens
tttaataaggatcatatatcccacaaaaccatcttttaaaaataaaagcaaaagaggccaggcatggtggctcacacctgtaatcccagcactttgggaggctggggcgggcrgatcacctgaggtcaggagtttgagaccagcctgaccaacatggagaaaccctgtctctactaaaaatacaaaaaaattagccgggtgtggtggcacatgcctgtattcccagctacctgggaggctgaggcaggagaatcgcttgaacccgggatgtggagcttgcggtgagccaagattgcatgccattgcactccagcctgggtaacaagagtgaaactccatctcaaaaaataaataaataaataaaataaaataaaaataaataaaggcaaaagaaagacattccgaagaaaacaaaaactgaaataacttgttgctagtagactctctttacaagaaacactaaaggaagctcttcaggctgaaagcaagtgatctcagacaataattagaatgcacagaaataaacaaaaagcaccagtaaaggtaattatgtaattatagaagatagcaaaaatgcattttttctcctttcat

SEQ ID NO: 296725 - DNA, 570 bp, Homo sapiens
aaacatggaaggaaagaacttttcataaaaactcatttctcagaataagtaccagaacaatgcaagtattattccagaatatttacaaacaaaaccaaaatccccaattacccaaccacaaagaaatagcaacaagacaaaatactttaaattacattaaccattaactgtatctactattataaatgcttactctcctcaaagaaatgaatttctaaacaaaatctccattatttccatactatcttcctartatacttaaaaatgtgcttctagtctaaaatgtaagtttaatgatcacacacttgagcaacactccaaaactaccagtgatcacattaggagaagcacaacggcctgagtaccactgaggctgaaatattgaaagagtatcagttacaaaaacaataatgctaccagtgcacacgtctaccctcagctcctaaattggaaatttaagaaagttttattttaaaatgaattttgaattacattcataatgaaataaacaaacaaaaaaccatggtcagtttattagtcatggaaaacataaacagaaagtaatagcta

SEQ ID NO: 296726 - DNA, 472 bp, Homo sapiens
gattcctgccctggaggggagagagatcagaaaatgcaattagaataacgtgggagataaaataaaataaagatccaggtaacaagaagaaaagaaggagaatatacttttctgtgacttcagactttccatctgcagcagcataagctggagaaacgaagatgatttcacttaaaaccaagatgaaatatttgactatgacatggaactggaaagcatctttggttatctgaaaatgatgagaaaagctaggggaatggcattaaattttatacaaggacaaagaaaggactagctgctgactgggtacagtggctcatgtctgtaattccatcactttgtgaggccatagggggaggattgtttgaggccaggagttccagataggcctggtcaacataatgagaccctgtctttacttaaaaataaaaattaaaagaactagtgccacrgaataataaaaggggaatag

SEQ ID NO: 296727 - DNA, 594 bp, Homo sapiens
tactaaaatccgtatcatttctatatgccaacagtgaacgatctgaaaaagaatcaaaaaagcaatcttatttaaaataaccacaaataaaattaatacctaggaagcaagcaaagaaatgaaagatttctacaatgaaattcttaaaacattgatgaaagaaattgaagaggacacaaaaaaatgaaagatattctatgttcatggattggaagaatcaatattgttaaaatgtccataccacccaaagaaatctacagattcaatacaatccctatcaaaataccaatgacattctccacagaaatagaaaaaacaatccttaactctagccagggacccscccttctccttccagcacttcccgccccctcctgtatcatttttaccataaaaaaaaaaaatgcaaaaagaaaatgtgaacaaattcagattactattataacatatgaatataataatctaatttttaaaagcatatcataaaaggaaatcacatagaaactactctaacagtagtctacgtgtagtgaagtataagcaagtagagctagtatggaatcacggaaaaaacacagacatggggagttctgg

SEQ ID NO: 296728 - DNA, 497 bp, Homo sapiens
acttcccaggcacctctttctacactggggattacaattcaacatgagatttgggtggggacagagagccaaagcatatcaatagggaaacactaacctaaaataatttctaagataaacattctaagattcyttcattatacaagactccacagcaatacccatacaatggcccttggatcaaacagtgatagatttgggaaatgcatatatttacatcatttatttccatgattccttttttcagtgctacgaaataacttcacaagaagtcatttaatattagatcatgaatgtcatttcagaaataaaattctcataaaatgaaatgatagtttcaaagcacagcttggatctagaattatttccacttagaaataattctaaaatagaattattatatctacaactttttctatgacataaactacataacagataaatgtcttatcttcttataaaatgaataaacacacacagagagagacactgactca

SEQ ID NO: 296729 - DNA, 561 bp, Homo sapiens
ggtgtgtggagatgaaaatatgaagtgatttttccccgaagctggtgaaacaggccatatcaaatacacaaagaaaatcatttaagtcattagagctaataaaagtatatctcacaattgtttatttaaatgagattgttaatcatttttaaatgatgaagtctagcagtcatacaactcccccctccattcacaccagaaggggaaaaggttaactgatttaagaaaaacaactcataaatatatkttttctttttaggaatatagagatgtcaatttcaacattattatcagaacaaaaaaaacaagtaagaaaactaatcagaattacatgtttctctttgaaggttattttcatgggatacagcaccattttctaaagtctctgcaattttacaagttctctttgtttaaattttgctttcaagggcagattaacataagcaagaaacaagttagaaacagttataaatattcacaggaatctcttttattgcacagaaaagcaagattaggagtctaatgaatgtttctagtgctttatcaaattacattattcaa

SEQ ID NO: 296730 - DNA, 513 bp, Homo sapiens
agaaattcttattcaagaggaagtcaagggatataagtcagcatggaaagatgaagattaatgaagtgagccagatagacttgataaataatgctggataatkttaggacccaatgtcatggaataacttgtactctgacccaatagagcctcttgactattttagtacaggtggaggctggaagtagccattgggctgtagctctgtcttccaggcgatgaaactcaaggggcacattaaaaggaatctcataggcctctaaacttacaaaagtctcgaaagcatttgcaatatacattgataaactatgactgtccttaccttaagactatataagacacaaaatgtttcagtctcagatttttaaagacatcaagtaccactataaatgtttttaagtataaagggctggttgtggtggtttatgattgcaatcccagcacttttggaggacaacgctggaagattgcttgaggccaggagtttaagacctgtcttgataacatagtgag

SEQ ID NO: 296731 - DNA, 513 bp, Homo sapiens
agaaattcttattcaagaggaagtcaagggatataagtcagcatggaaagatgaagattaatgaagtgagccagatagacttgataaataatgctggataatgttaggacccaatgtcatggaataacttgtactctgacccaatagagcctcttgactattttagtacaggtggaggctggaagtagccattgggctgtagctctgtcttccaggcgatgaaactcaaggggcacattaaaaggaatctcataggcctctaaacttacaaaagtctcgaaagcatttgcaatatacattgataaactatgactgtccttaccttaagactatataagacacaaaatgtttcmgtctcagatttttaaagacatcaagtaccactataaatgtttttaagtataaagggctggttgtggtggtttatgattgcaatcccagcacttttggaggacaacgctggaagattgcttgaggccaggagtttaagacctgtcttgataacatagtgag

SEQ ID NO: 296732 - DNA, 611 bp, Homo sapiens
ctggttgtggtggtttatgattgcaatcccagcacttttggaggacaacgctggaagattgcttgaggccaggagtttaagacctgtcttgataacatagtgagaccccttctctacaaaaatgtgaaaattagctggctgtgatggcacatgctcacaaccttagctactcaggaggctgaggcaggaggatcacttgaactcaggatttaagaccccaatgacccatgattgcatgactgtactccagcttggatgacagagtgagtcactgtctcaaattataaggctcataatgagaaggattgctacattttttgagaaagcgttgatatggtttggccatatctccatccaaatctcatattcaattgtagttcccataatacccatgtgttgtgaaagagaaccagtgggaggtaattgcatcatgggggtggttacttctatgcagttcttgaaacagtaagcragctcttatgagatcttatggttttataaggggattcccccaccactttgctctgcacttctccttgctattgccaggtgatgaaggacatgtttgcttccccttccaccataatagtaagtttcctgaggcctccaca

SEQ ID NO: 296733 - DNA, 558 bp, Homo sapiens
cagagccaaaccctatcacctgcagtttcagaaaatatattatttcagatcaaacaatgggtatatgaagtcctgcaaacttgatccatacaaaacatatcagtgtattctttcataaaagtcaaaatgctgttgagaaaactgattttyaggattggcaaatcaatatatatctttctaagagttagacttatagttaaaccacataataataaaaaatgtccatgtgtcaaaagccagaataagtgttgatatatgattcatgttttttatgtatctgccacatggatggaagaacttcaatctgtggagagtttttaaatggatatttacaactactttcattttgccattatgttgatgtgattttcttaaatgatttttctctaagcaaggtagaatttgatgaagtttctgctttgcaaattaaagtcatgtctatttttatcttgttgccattatactgatgattacgtgagtataatatttcaaaattttccaaaatgtttagtgatatccttttccacaatttcttgatttatttttaagcaactaaat

SEQ ID NO: 296734 - DNA, 545 bp, Homo sapiens
ttagacttatagttaaaccacataataataaaaartgtccatgtgtcaaaagccagaataagtgttgatatatgattcatgttttttatgtatctgccacatggatggaagaacttcaatctgtggagagtttttaaatggatatttacaactactttcattttgccattatgttgatgtgattttcttaaatgatttttctctaagcaaggtagaatttgatgaagtttctgctttgcaaattaaagtcatgtctatttttatcttgttgccattatactgatgattacgtgagtataatatttcaaaattttccaaaatgtttagtgatatccttttccacaatttcttgatttatttttaagcaactaaatttatatgaggattctattttttaaactaattcttagaatgacatcttactattataatttttaatcacaaattacactagtggattggtaagagatgaagaaatatttcaaaagctggttggtaaaagatatttccaataaaaatggttttccttagatttatcgtaagaa

SEQ ID NO: 296735 - DNA, 558 bp, Homo sapiens
cagagccaaaccctatcacctgcagtttcagaaaatatattatttcagatcaaacaatgggtatatgaagtcctgcaaacttgatccatacaaaacatatcagtgtattctttcataaaagtcaaaatgctgttgagaaaactgattttcaggattggcaaatcaatatatatctttctaagagttagacttatagttaaaccacataataataaaaaatgtccrtgtgtcaaaagccagaataagtgttgatatatgattcatgttttttatgtatctgccacatggatggaagaacttcaatctgtggagagtttttaaatggatatttacaactactttcattttgccattatgttgatgtgattttcttaaatgatttttctctaagcaaggtagaatttgatgaagtttctgctttgcaaattaaagtcatgtctatttttatcttgttgccattatactgatgattacgtgagtataatatttcaaaattttccaaaatgtttagtgatatccttttccacaatttcttgatttatttttaagcaactaaat

SEQ ID NO: 296736 - DNA, 670 bp, Homo sapiens
tactaaatactaatttcccaaggtaggtagtcaataatcaatgccagaagctgaaaatataagaaatgtcatatatatttcttagatatatgaacacaaatatggaagtaagcagcttaaataattgaatttgatcatttttggtaatagagaaatggtacctagtgctgggaggaggatgagctacagaatatagtagactatatacaatgcaattttatcttctagatgttctgagctattttccaactaagacgtctctttaacctgtaacagttaactactttaaggtggagcttttaagagtatgttttcagaatctaagtgaaaatgtcaggttaattttttgctaactatatggtccttaaaaatctacttcatgattctacaaccattgttattattgtgattgttatttaacctgcaaaacagggatagtccatcttgcatcactactgtaagcagcgagtgagattattcacttaaaaacactgtgtaaagtggttgcataatagaygctcaattgattctggtaagtattacatttattatcatggatctgtttgctggtgggttttttccctcagacgaataattaatacctgctacactgctttttattagaatatcacttgggggaaatttgtaattcttatgatagtttccaaac

SEQ ID NO: 296737 - DNA, 650 bp, Homo sapiens
aatagagaacaattattattttatagctaagttgtctcacaaataaacatgaaaaatgtttaactggggtttatttatttacagtttttattattataaatttctgtgatgattcaagttaatgcccttagttatccaaaagtaaatatagggtcttttcatgcaatagccaacacattcaaggatgacacaacttatgtcatcttaaagtactaaaactgagaaaaagctttaaaacataatggacatagtaactccaatatcacattattccctgtaatacagataaacctgtaagtttattcttaaaagtttctaagtagtgtgctatgattttctactaaatgacattacaaaatattagacaatttttctcagtataacctttggcttaaagcagaaaaaaaagcctgcattatttaatgcaagtgactatatactagtttgaaaatactttcaaactgtcaaaaaaagcctttatagtcatacaaccagatctttattaataatatcaacacagtggactgaagagcaaactataacagctcagtaactttacccatcttatgatgggtrtaagacattatcataaatctgcagttgccaaatatatcccatagactttaaatttattgtcatatgaatattcc

SEQ ID NO: 296738 - DNA, 567 bp, Homo sapiens
aggggcacaagcagacacaagcagaggaaagaccaggtaagacacgagaagataaccatctacaacccaagaagaggaccttagaaataattgaccctgctcacatcttsatctcagacttttaccttccagaaatgtaagaaaacaaatttctgttgtttttaaactactcagtctgttgtctttgttatgtcagttctagcaaacgaatatcagcagaaatattcttccatcactttttaaattggtaaaatacttgaagtagattttaaatggaatctaaatgaatggataaatggaacttcattagttacaaaagtactaactaatggaagtccattagtccaaaagtagtaggtttatttatcctcatagtaatcttcagataaatgttagcaaatgatgtttagatctttgcctgcttggaggattcttgttattcctctagtcaaacaaatacaagtgaaacatttttctttcattaatcatctctaaaatggccttaactattgaggattattttatctatatcatgactatttcatcatccatttctttttaagtcag

SEQ ID NO: 296739 - DNA, 541 bp, Homo sapiens
cacctttgctccagttcccaacaagtcttttatctccatctgagaccaastcaacctgaatttcattgtccatatgattatcagcattttggtcaaagccattccacaagtctctagggagttccaaccattcccacactttcctgttgtcttctgagccctccaaactgttccaaccactccttgttacccagtttcaaagttattttcacattttcagatatcttttcatcttttccctaatgccccactccactggtaccaattaaatgtattagtccattttcatgctgcttcataaagaaatacccaatactaggctatttacaaaagtaagaggtttattggacttacagttccacatggctacggaggcctcacaatgatggcagaaggtgaaaggcacatctcactcacatggcagaagacaagagaagagaacttgtgctggaaagctacttatttttaaaaccatcagatctcatgagacttatttactataatgagaatagcacagaggagatccacccctatgattcaa

SEQ ID NO: 296740 - DNA, 584 bp, Homo sapiens
tcttagatacttttttgtccttttagtcattgcagatgacattttacccaattttttttcatcacaacataatatgtgttataattttcccaacttttctaacagttttcttactgcccactgcctgtttccacaacaaatgctacatatttcagatttctttctttctttgacaatatcccatttctggtaccaatttctatatcaatcagctatattcatataatgctgtgtatcaactacctccaattcagtgacatattcttacattgttttatttttcctattacaggtttgcaagtcagttggagaggctcaktttttggctgtgggtctgaagttcagcttgtgtgactttgtttcaggatgcagttcggttaggcttggctccaacttctaaatctgttccatgtgtgtcattggtctattgcctctgtggtttagcccaaatgatagcaatgacccagtatatgtttttctcatggaaacgctaggagctcaaaaagaaagaccaaatcaccttccaagtttctgcctacattgcatctattaatattatagcaaccaaagcaagtcacagagcc

SEQ ID NO: 296741 - DNA, 367 bp, Homo sapiens
atctcactatcactaagctgtaacatcagtagtgtacacayacttttcagacacatatttcttgcttagaaattaattactactgttttgttttttaaaaatcagagtacaatttgattagtttaatattagtaaaaataaaggatatctctcttagatgaagttgagttgacagatgcatgattatcacatgtatttgaaagtaaaatatttacattatctgagcattaaacaagtcatcatggccttctctttttaaggaaatggaaaaatgtaacagtgattagtggcattaattctggattaattaatccattataatggcattaattctggattaattaatgccattataatggcattaatc

SEQ ID NO: 296742 - DNA, 604 bp, Homo sapiens
taggtcccctaattttccccaatatttttacctaatgtatgctttcaacaaacatattgagctccttaacttccatgaaactgagaaaaacttctttatcacacagatagcactagataacatattamagaaatgttcactacacaaaacgtctaaggatattacattaaattaattaagtgtaattaatcaaacattaaataaacagtttaccaaacatcttttgtctcaggaaaaggggtcttatcacatttaccatatatttacataagtagaaatagatatgaaaagccattgatgatttaatattgtattacaatgagtctggagaaacagcaatattgcagttacaaagataatatttcatcaatattgtttttcaagtttccaagtatccttgcatacctctgaaatgacaaggtacatgtcttctgtctgttctatctactctgattgcatcattaggataactagctccatgggccaactataaggaaagaacagtaaacaacacattttctagtgctatgctgtagaaatatgatcagctctcggtgttcccttaagagtgctactctgttttattttttttaatcaatcaatc

SEQ ID NO: 296743 - DNA, 634 bp, Homo sapiens
aatataccataatttttgtttgtttgtttgtttgtttgtttggagatggaatctcgctcttgttgcccaggctggagtgcagcggcgcaatctccgcttactgcaacctctgtctcctgggttccagcaattctcctgcctcagcctcccaaatagctgggattagaggcacctgccaacacgtttggctcatttttttttttgtatttttagtagagacggggtttcaccatgtgggccaggctggtttcaaactcctaacctcaagtgatctgcccgcctyggcctcccaaagtgccaggattacaggtgagccactgcgcctggcctaccataattttttaacccaatacatatttttaaaaaataatcttaaaatgtcttcttccccaataatacatgatcttttttccagtactctggtgatttcttatttgctgcaatatttcttccatggtgtttgcatgtgactaaataagcttacttacataaggaaagtatatgtttcttgatattaatgaggtaaagaaagatggctagttaaggtaaccatcttaaggactttatttttaacttatgttgaacctcattttttgaaaagctaaagcttattttgctctttaaaatagtgttt

SEQ ID NO: 296744 - DNA, 604 bp, Homo sapiens
acccagtattctcagtcttttgattttatcatctgcagaaaatattgctggagggagtacatacatagtttactttggagttgtgaaaatgtaatcatgtgttccttctctacttccttataatcagaacgactcagtctatatcattgctgtttgattttatttactatccaagtggtttacaaacccacatcatatacactatccctactattcatgtagttaaaatttattttattagacatagagggcactcagaattgcttctttgttctgtaacacaattgatatttcactaagctttctataatatagtgccactcactgtataactactatatgtaatattgtaaatcaccatatatatatatccataaatatgaaaactatatatctaactttaaaaagccacaatgtgacatcacattggttacattttaagtatttaatacaatttattttcatacattgacttttacaacaggaatcctcttattatagtttgtaaccagatcatttattaagatatgtgtaaaatgtatgcttcaagtagaccyagatctatagaagataagttgaatataaatcataaaatacaggccaa

SEQ ID NO: 296745 - DNA, 444 bp, Homo sapiens
tgcaattccatgcaatattaactcacaccaaagaacagttgggacaataggttattgacatgatatcatgtcatattaccatgaaccttgaattcaaatgcacttgattatgatggaatggcctaataaaggcccagataagatgccaattcaggcacaacaacctgaattgttgggctttcacattacaagatgttggatatttgctgaacacttgcaaatggttctacatatggtgctagaatatgtaggtacgggaatcaggacggaaagatagtactgactgcccatcattattcccactgacacatttcttggatttgaaattcttaagcccacaaccttacattctagcagcttgtgtttatgatttctacaaartaaaacattctttccaacacttaataaatatttgactaaacttgaagatgaggctgtgtacta

SEQ ID NO: 296746 - DNA, 631 bp, Homo sapiens
gtttatgtctgagcgccagccacagtgaacccctgagagcgctcagtgctagtgtttcagaggactcacgcggtacatgcagcattagttcttgaggggcttggtcctgcaaaggggctcattgctctctcagcctgaagtactttaagtctcaattcagtgttatttccgttcccaattccctaaaagscttttgtcccagtccatcggttctcctagagccccctgcatgcctcagcattgggccagtctgcacactgcgctgagatgaactaactgcatgactttatcctcaccagacagaaaggcagggactatgccatctttatgtttacattcttggagctctgcacaaggtacaagattagtaaatacttggttgttgaataaataagtattaatcactgagaaataaattcttaacaatggtattaggtgactgaactagagtcaggtcaaccattaaatggtgaaactgaatggttattggtaagattctttaagaaaacaaaattacagtgcagctactcagtccaatcacttaattgtactgagtggtttcatcaagaccatgaagacagagctgggtgcttattgagcacactttctacttgcacaccaggcttcactt

SEQ ID NO: 296747 - DNA, 585 bp, Homo sapiens
tcactcaggggtctcccgatcctatctagtgctgatcttccatggatttcccggaagactgaataggcttaattttgcaactgctctagaatacaagtgtgctggtctcctggacgcttcatgggggaaaaaaagacaaccctctagttctgctcagatttttttttcagctctgcctccygcaaagatagtccatctcatccagccagttctgaggaagtatgtgagtcatgtccctttttctgatgaaaacttccagtattgactactagaagttttctagatcaacaactatcaagcctttggaaatataactaatatgtaccaatatgtaaaaaataatttctatttttttaatgaaatagtttcctaaggcccaaatgtaactttcaaaatgatatgtgtggcacaaattctctctactaccggggcgacgaagggagcacagtgcacaggctggaggtcagagcctccctggacatagtttggccccaaaaagaatcagggaagaagaaacttgacaaagagcctcatagatgtttcctaaagcagagaccctctgaaggtgatgcatgactattagag

SEQ ID NO: 296748 - DNA, 525 bp, Homo sapiens
taaagaaactgaggcttgaaaaaggaatgtgagatatcaaagtttccagagctaagttcagaaaacttcagtagttctcaagatgcaagttgctcaatgaaatgtattaggtgaattagtaagcgtgcctgtatcaatttggatcatctgttaatgcctgcatgtatctgctttgttccaggcaccgtgcagcgggtgctgtgttctagctgctctgttaactgccagttacctcatttgatcctgatgacaacccttgggtaggtattgtggttacctccattctatctctggaagaactaagaatggaggttaagtaactttcctgaggctccttagctaagtctctaggactggaatggagccaggcagcctgactcaagagccccactgagtgctcctccayagaggacacagcttctgcacccctgcagggagaggccccaaccacaggattgatatggggaaaagtggccttatttggcttttaatgaattactctacctcccttgatttcaaaataaa

SEQ ID NO: 296749 - DNA, 564 bp, Homo sapiens
atctttcagtgctgtctgaagttgttcttcattcatcagatgggttttgaaggatgtttttattgcagtttcttcaaattggatgtatcctgatgcatcttgtacagactgaaacttccttgcaatgtcaaccatcggtcaacttgctctcaatattgtgttttatctaccttcttttacttcttttcaaaggtgtctacgtaaacatcaagtgaaaagttggagatttctagttctttattggtgtttcatgtgtttttaatcatttgttttctgatctggtttgcactgaagtggactaagacctctaagtatgaattttttaaattagtgcactttatttcgtggaggagttttgaagcaaaattgmacagaaagtacagagagttctcatatactccttctcccctcattcacagttttcccctattattaacactttgcattggtgcaatacgttagttatagccaatattcgtacattattactaaagttcatagttcattgggtttgcatcttggtgtgaattccataggttttgtcaaatgcactcatgtgtcttc

SEQ ID NO: 296750 - DNA, 600 bp, Homo sapiens
agtttaatatttccaaaactgcatcctacttgtattaatctgttttcacactattgataaagacatacctaagacaatttacaaaagaaagacatttaatgaaytcagagttccacatggccagggaggcctcacaatcatggaggaaggtgaaaggcacatctcacatggtggcagacaagagaaaagtgtttgtgcagggaaactcccctttttaaaaccatcagatctcatgagactcattcactatcatgagaaaagcacaggaaagacctgccctcctaattcaatcacctcccaccaggtacctcccaagacacctgggaattgtgggagttacaactcaagatgagatttgggtggggacacagccaaaccatatgattctgtccctggcccctcccaaatctcatgtcctcacatgttaaaaccaatcatgccttcctaacagtcccccaaagtcttaattcatttcagaatgaacttagaagtccatagtccaatgtctcatctgtgataaggcaagtgccttctgcctatgaacctgtaaaatcaaaagcaagttaattacttcctagctacaatgggggtacaggcact

SEQ ID NO: 296751 - DNA, 600 bp, Homo sapiens
agtttaatatttccaaaactgcatcctacttgtattaatctgttttcacactattgataaagacatacctaagacaatttacaaaagaaagacatttaatgaactcagagttccacatggccagggaggcctcacaatcatggaggaaggtgaaaggcacatctcacatggtggcagacaagagaaragtgtttgtgcagggaaactcccctttttaaaaccatcagatctcatgagactcattcactatcatgagaaaagcacaggaaagacctgccctcctaattcaatcacctcccaccaggtacctcccaagacacctgggaattgtgggagttacaactcaagatgagatttgggtggggacacagccaaaccatatgattctgtccctggcccctcccaaatctcatgtcctcacatgttaaaaccaatcatgccttcctaacagtcccccaaagtcttaattcatttcagaatgaacttagaagtccatagtccaatgtctcatctgtgataaggcaagtgccttctgcctatgaacctgtaaaatcaaaagcaagttaattacttcctagctacaatgggggtacaggcact

SEQ ID NO: 296752 - DNA, 600 bp, Homo sapiens
agtttaatatttccaaaactgcatcctacttgtattaatctgttttcacactattgataaagacatacctaagacaatttacaaaagaaagacatttaatgaactcagagttccacatggccagggaggcctcacaatcatggaggaaggtgaaaggcacatctcacatggtggcagacaagagaaaagtgtttgtgcagggaaactcccctttttaaaaccatcagatctcatgagactcattcactatcatgagaaaagcacaggaaagacctgccctcctaattcaatcacctcccaccaggtacctcccaagacacctgggaattgtgggagttacaactcaagatgagatttgggtggggacacagccaaaccatatgattctgtccctggcccctcccaaatctcatgtcctcacatgttaaaaccaatcatgccttcctaacagtcccccaaagtcttaattcatttcagaatgaacttagaagtccatagtccaatgtctcatctgtgataaggcaagtgccttctgcctatgarcctgtaaaatcaaaagcaagttaattacttcctagctacaatgggggtacaggcact

SEQ ID NO: 296753 - DNA, 580 bp, Homo sapiens
gtattcatagaatactccttcagatcttactcatagtctattgcttttatcagatgattttggttgctttccaatccatagcaaacaagaagcagaaaaamtatggaagtagaagggaagctctgtggactatcattacctaggcccactgttgatgatgacggccttcagcatcgtcatggacccagagagaaaatagtcattataaaaatgcttccaatttaggaagacagaataatgatttctactctattctccttgcagcccaatgaaattaactaaaagtttgacaaataggaaaaaaagtatttcatgaggaggaaaaccagcatatattccaaaatacaaacaaccaactataaagaatattggctcattatgttgaaaattggaaaacctcaggaatgattagtaaaattactatgcaatacacagaattctctaaaagtacatagcaccacgctgaattgctgaaccaatttattcttgtgcagaactatttcaaatatttgaggtgattcttctgtattttaattctacatccctaaataagatgattcagttgctatttcttaacttt

SEQ ID NO: 296754 - DNA, 263 bp, Homo sapiens
tttctcctaattttccctaaatattgttattctcaaataagcttttgacaaatatgaaatggggcattgattctgtaaaaagtaaagtggaggtacctcttcaaagactttcctccctgtctaattaggaataaatagtaacttctcttagaagcaaaatttattcaaagacctgtgctaacattcttaaatatctgctagccgtaatgaagaaatcaatgtactttatgttcttagytcccacagtttagcctaaatatttg

SEQ ID NO: 296755 - DNA, 577 bp, Homo sapiens
atttgtgtcaatttttgtgaaaggtctatgttacttgaaataagcattttatctattttargacacaggttttgatatatctgttaggtttaacttttatttggatcttccacatttttattgacaaaaaaactgatataaatacaaatctccatcttctagtgtgtttccagttctctttttatctcctgtatttttgcagaataaatattaattttgaatgtattgttgcataaacactcatagtgttatactctatcgggaactgtaaacttcacttaataaataaaatattcttatttatgatttatataaccctctcttaataaagaaaatatttattcttatttatgatttatatattatatattttgcatctgcattgaaagctatttgacagtaacataatctgcttcattttatttgaattttccttatgtttccctattttttatactttcaaatattgataattacttgctttggtagtatttaataaatgcagaaaatagtgcagttttgcttagtgatatgatctggagtttgttttttttttttgtattttgtaatagatgca

SEQ ID NO: 296756 - DNA, 640 bp, Homo sapiens
ctaagtttaatcaacatcaaatgtaaatattatacatagagccaatataaaatatgttgaataaataaacataccaaagacttctgagatgccaaaccttcagaattcattcattcacaggtaaactttgttgtctagaacatagtacgattttttggtttctctcaacttaaaaatgctaaaatttcatttacttgtgctgattcacaattcaacgaataaaagaagtacacaatttcactggcttaacaatgaaagcaacattcacragtattaaggctagacaaaaacatgtttctgatctccctcaacataatatattttggggaaaacatataacctggcaagtgcacctagttgcctatcatattcactccctatgattccagactatcatttgctgatttttctaatagagagggagcttcattttcacttattggaggtcactctggctttactttcttttaattttactacggaatttcttcattcactctctctgtttattttcttctagtattgcttaggcttctcttccaacattgacataaaaaacaaggacaatagacacggatcctaccaaaaaaaaaaaaaaaagaagaagaagaacaacaacaacaacaacaaagacaacaaa

SEQ ID NO: 296757 - DNA, 640 bp, Homo sapiens
ctaagtttaatcaacatcaaatgtaaatattatacatagagccaatataaaatatgttgaataaataaacataccaaagacttctgagatgccaaaccttcagaattcattcattcacaggtaaactttgttgtctagaacatagtacgattttttggtttctctcaacttaaaaatgctaaaatttcatttacttgtgctgattcacaattcaacgaataaaagaagtacacaatttcactggcttaacaatgaaagcaacattcacgagtattaaggctagacaaaaacatgtttctgatctccctcaacataatatattttggggaaaacatataacctggcaagtgcacctagttgcctatcatattyactccctatgattccagactatcatttgctgatttttctaatagagagggagcttcattttcacttattggaggtcactctggctttactttcttttaattttactacggaatttcttcattcactctctctgtttattttcttctagtattgcttaggcttctcttccaacattgacataaaaaacaaggacaatagacacggatcctaccaaaaaaaaaaaaaaaagaagaagaagaacaacaacaacaacaacaaagacaacaaa

SEQ ID NO: 296758 - DNA, 521 bp, Homo sapiens
ttaaatagattaaggattttcttccatgggtgactaaaatgtaacagcttccgctaactcagaaaattacactgtaagaattgtttgagttcatttcagtgttatattttccgtacttgtcacagatgggcaattcaaagccttttctactgattcaaatataaatgcataatgttaaaatattctcctttctaaacaagacctcataattcaattgtaagtattgtatgaacactttagtgaactctggctagagtcctaactcagttcactgtccacctgtatttcattatgttgaatgtgaaaaaatcatgtcctaacccctcaatattttcycatcaagatttccaaatatgtttctaataaataaataataaataactttcaaaatgtagccactgatgtacttcagatcttctatgtaactactatgcaactattctttctttctctttttttttgagactggagtctctctcttattgcccaggctggagtgcaaaggcacaatctcagctcac

SEQ ID NO: 296759 - DNA, 407 bp, Homo sapiens
gggagatggaggttgcagtgagccaagattgcgccaccgtactccagcctgggcgacaaagcaagactctgtctcaaaaaaaaaaaaagaaaaataaataagggtccactacatggtgatgcaggaggaaagtgtacaggaagatagaatggcagatgaaagaccatgagattgggatgatttggcatttttctgtaactgaaaaaagagctagtatgattgaaaaggtgatgagattgaggagggctatgtgtatttagccatagaagaagtttttcaattagattttattatgctatcaaaaagggcaatgagaaggcatcacaagtttttagayagaggagtgatgaaatctaaactatttgtaaaagccgttattgatgaggtaagacaattttaggagggta

SEQ ID NO: 296760 - DNA, 589 bp, Homo sapiens
acagtctaagtgtgcaataacatgtctaaaaatgtacatatattaattaaaaaygctttattgctaataaatgctaatgatcacctgaatcttcagtgagttgtacatttgtttgctggtacagggtagtgcctcagtgatgatgactcctgactaatggggtggtttctgaaggttggagtagttgtgataatttcttaaaataagaaaacaatgaagtttgcaacaatgattgactcttcctttcacaaaggattcctctgcagcatgtgatgctgtttgatagaaatttcacctatggtagaactttaaaaattggagtcagtcctctaaaccctgctgtgcctttactgactaggtttatatggcattcttaattatttgttgtcatttcaacaatgttcacagcatcttcaccaggagtagatttcatcccaagaaaccatttactttgctgttgcgtaagaaacaacttctcgaggccgggcacggtggctcacacctgtaatcccagcactttggaaggctgaagtgggtggatcacctgaggtcagaagttcgagactagcctaattaacatggtgaaacc

SEQ ID NO: 296761 - DNA, 589 bp, Homo sapiens
acagtctaagtgtgcaataacatgtctaaaaatgtacatatattaattaaaaacgctttattgctaataaatgctaatgatcacctgaatcttcagtgagttgtacatttgtttgctggtacagggtagtgcctcagtgatgatgrctcctgactaatggggtggtttctgaaggttggagtagttgtgataatttcttaaaataagaaaacaatgaagtttgcaacaatgattgactcttcctttcacaaaggattcctctgcagcatgtgatgctgtttgatagaaatttcacctatggtagaactttaaaaattggagtcagtcctctaaaccctgctgtgcctttactgactaggtttatatggcattcttaattatttgttgtcatttcaacaatgttcacagcatcttcaccaggagtagatttcatcccaagaaaccatttactttgctgttgcgtaagaaacaacttctcgaggccgggcacggtggctcacacctgtaatcccagcactttggaaggctgaagtgggtggatcacctgaggtcagaagttcgagactagcctaattaacatggtgaaacc

SEQ ID NO: 296762 - DNA, 556 bp, Homo sapiens
acatgctaaggcaggctttctggaccatacttgtccttttgtaagctagtgcaagatttattcatcaaaatggttaaaggaggcttggctgtctggccaacaaaagattttaggaacaatcagaaactcaggkgtggaaccaattgcttccccaaagtactaataatatgattttacaatcatgtaagataatttagaagattttctgtgttactaaagccaagcagatttaactgttagaaagtcgttccttattttgagatggaatctgtctccctgtcaccatttctacatcttttcctcttagaaagtttcctaaactctgttttactacatgcaccccaagaccagcactgtacattccttggatattctcgtgggaatataggtttctgcctcttttgctcatagacataaggctaaataaaatgatggtatgctttaagaaaaaaaaagcaaatttactcagaacaaatatggtcaatgttgaagagatttggaattgttcccaaacaatttggattcccctgagttcactgacattattgttaatgtt

SEQ ID NO: 296763 - DNA, 558 bp, Homo sapiens
atgtgggtgagttataaatgcatttgactaagtgaaaaaggccagacccaaaggccacatatgcatgattcaatttatatgacattctggaaaagataaagctataggaaagaacatcacatcagttaattgtcatgggttaggattggggaagtggttgattgcaaaaaaagacagcaagaggaaatttttctggtgatagaatagttctatataatattgtgtatatatagatacacaattctgtgcatctatatataataccataaagagtgatttctaccatatgtaattttaataaatagccaagacagaatgcagaatgaatctaactatattaacagtgagtaatattacctcatttaaggaggtagaaaaagaacaaacaaattaaagtctgagagaataacattgtaaaacactgtttgaccagatatcatcagctaataaacaaaagaaatagacacgagcatggtactctagttggtaaacgttttctctcaagagcatgaaayagcaactctgaactactttactagtatcagcatatatattgta

SEQ ID NO: 296764 - DNA, 639 bp, Homo sapiens
caagttaaccctggaatttcatgtggttccaggaggtaaataagtgataaaattttaaaggagaggagaaaaaaaatgaaaaaaagatgagacatgtcaaaatgaggttcaagagatcagtaggacttgttttctgagaaccagtcaccagaccccactgaacaaaacagaagctgatgagaacaggatgcagcaaagaaatcagcccaaaccagctaaaascaagatgccaatgaaagcagcttctggttaccctcactgcttatttcatactaattataatgcatttggatgctaaaagacactcccactacaaacatgacaattaacaaatgccatgacaacccccagaagttaccttatatagtttaaaagaagaaggacctttggttccaagaaccctttacccccttttcagaacattcatgaataatccaccccttatctagcatataatcaaggaacagttctctaaaaatagctagccagccattcacgagggctgctgctgctgctgctactactctctctatggagcagccatattcctgtactcagttgctttaataaacttgctttccctttgctctgttggctcacttatgttctttcttggacaaagccaaaaaccatcctggc

SEQ ID NO: 296765 - DNA, 639 bp, Homo sapiens
caagttaaccctggaatttcatgtggttccaggaggtaaataagtgataaaattttaaaggagaggagaaaaaaaatgaaaaaaagatgagacatgtcaaaatgaggttcaagagatcagtaggacttgttttctgagaaccagtcaccagaccccactgaacaaaacagaagctgatgagaacaggatgcagcaaagaaatcagcccaaaccagctaaaaccaagatgccaatgaaagcagcttctggttaccctcactgcttatttcatactaattataatgcatttggatgctaaaagacactcccactacaaacatgacaattaacaaatgccatgacaacccccagaagttaccttatatagtttaaaagaagaaggacctttggttccaagaaccctttacccccttttcagaacattcatkaataatccaccccttatctagcatataatcaaggaacagttctctaaaaatagctagccagccattcacgagggctgctgctgctgctgctactactctctctatggagcagccatattcctgtactcagttgctttaataaacttgctttccctttgctctgttggctcacttatgttctttcttggacaaagccaaaaaccatcctggc

SEQ ID NO: 296766 - DNA, 557 bp, Homo sapiens
ataataaagtaaatattaatgagttcatagtaatataaataaataaataaataagtaaactgggcaggagagacaactctttcttacacaagaattccaattaatacatttctaaaaatgagggagatagaaaataatcattagaatgccatataataatcattgtaggcaaaaaattgtgagcaaaagtacacgaataaataacatatttgtacaatctcaaattttttgcccctatttattatagtaactgtactatgaagaaacctagtagatatcactgtaatcaagggatcaaggttcatatcactctaatgagccatactaacatcattgaactgttgacataatccactcattcagcaaagcctattgcctstttggtatttttcccccaaatccaaatctttaatataattatgacaaaatatcagagagacttcagatccaaattgagagacattctacaaaatacttgcaaaattgtcaagatcatgagggacaaacaaaaactattgaactgtctcaaaccagagacaactaagaagtcaggacaa

SEQ ID NO: 296767 - DNA, 443 bp, Homo sapiens
agaagtatctgacccaaaaactaaaactgaccatgttgataaactgattgaagttaaaacatgtcaacaaaacaaaacaaacattataaccagaatctagagttcagaacagtggaggcttaaggtagatatatatagttttagtaaaaatttctgggaaagtttatattttcaaagactgtgaaattggtgagttattagagtggctaccagatatttccatgcaagatcaaagtaaatataatattacactaaaatgatgtctgtgatataatgaaaggttcgacttggaaaaaagactacagagaaagaaggagagaacagaggctggagagatgggtgtgaatagagaaaacaattggcaagatagtgaaggggaakgttcaccttccttttgtgtcctatgtctaattctcaagaacactttgtggttgtttcaaaat

SEQ ID NO: 296768 - DNA, 1045 bp, Homo sapiens
gaatcatcatttctgaaaatctccagttttctgatgtgtgaktctcagaacaatgtagttttggttttgattcagcatagactctagaagattccatttggtctttcttacaatcatgagatcccccacgataagaatgcaggtataaatgtgtatttagctgagaaggtgtatctctagtattcacttagaaatgctgtaagtttacccatcataagcctcttccacaattcctggtgggtcagggatgttacaattacaatctgccacagcacatatccaatattatgcaaagtaatcttcatattttcctttatgctgcacactgttacttggatgaataggtacaagtcactttggagcaaggtaagagagtcatagaaagtatatatgaattaatttttcatttatatatactttctatgactctcttatcttgctccaaattaattcaagatggattaaagacttaaatgttagacctaaaaccataaaaaccctagaagaaaacctaggcattacwgaatcatcatttctgaaaatctccagttttctgatgtgtgagtctcagaacaatgtagttttggttttgattcagcatagactctagaagattccatttggtctttcttacaatcatgagatcccccacgataagaatgcaggtataaatgtgtatttagctgagaaggtgtatctctagtattcacttagaaatgctgtaagtttacccatcataagcctcttccacaattcctggtgggtcagggatgttacaattacaatctgccacagcacatatccaatattwtgcaaagtaatcttcatattttcctttatgctgcacactgttacttggatgaataggtacaagtcactttggagcaaggtaagagagtcatagaaagtatatatgaattaatttttcatttatatatactttctatgactctcttatcttgctccaaattaattcaagatggattaaagacttaaatgttagacctaaaaccataaaaaccctagaagaaaacctaggcattac

SEQ ID NO: 296769 - DNA, 557 bp, Homo sapiens
tatgcttgtgttctctgactcacttgtttggttcaattgtttttagggatttatccatattaaaacacgtttttgtatttccttttatgaattatgacaatgtatattttcttctggaaatggtcatatagaatgttctcaaacgttaagctgttaagatcaatgctactctgaatatttatgtacatgccatcctgaacatgtgaacaggaactcattccatgaataaaactaggtgtgccatttttggttaatgggatatttgaatattcagtttcctaaggtgactccaaattattttccaatgtagttgtatcagtttacattccaacatgggaactttttggttggccatatcttcaacaactggtaacatcaggttattttttatcatgatgatgagtaagcaaaagtaacttacaatggtttagaggcgcrgtggctcatgcctgtaatcccagcactttgggaggccgaggcaggcggatctcaaggtcaggagttcgagaccagcctggccaatatggtgaaaccccgtctctgctaaaaatacaaaa

SEQ ID NO: 296770 - DNA, 571 bp, Homo sapiens
gtggcacatacctgtgatcctagctattcagggaggttgaagtgggaggatcasttgagcccaggagttccaggctgtagagagctatgatcatgccactccactctagcctgagtgacagagtaagactgtctcaaataaataaatacaaaagatatgcttcaaccaattgaaataaaaaaggcctttgctaaaataatatatttaatcattgcatttcaatatttaacaagtaaaaggattttaaaagcaagtcctttctaacacattaaagtttaaaattctttcaagattttgaatagatttgttctcatatgccctataccattaagagaaaaatattcataagatcagtattttccagtaatatgagataatgtatgttataataacagaggcaatttaacagaccaaattcccttagagtgaaggttgagctctacagtactgacttcataattcatttgggaatttaaaataaaataacatgccatgttttaatattgacaatagcaggttatatgtaggtagctgtgttattgataaaatggtggttgttatattactagga

SEQ ID NO: 296771 - DNA, 571 bp, Homo sapiens
gtggcacatacctgtgatcctagctattcagggaggttgaagtgggaggatcagttgagcccaggagttccaggctgtagagagctatgatcatgccactccactctagcctgagtgacagagtaagactgtctcaaataaataaatacaaaagatatgcttcaaccaattgaaataaaaaaggcctttgctaaaataatatatttaatmattgcatttcaatatttaacaagtaaaaggattttaaaagcaagtcctttctaacacattaaagtttaaaattctttcaagattttgaatagatttgttctcatatgccctataccattaagagaaaaatattcataagatcagtattttccagtaatatgagataatgtatgttataataacagaggcaatttaacagaccaaattcccttagagtgaaggttgagctctacagtactgacttcataattcatttgggaatttaaaataaaataacatgccatgttttaatattgacaatagcaggttatatgtaggtagctgtgttattgataaaatggtggttgttatattactagga

SEQ ID NO: 296772 - DNA, 480 bp, Homo sapiens
gttaccctggctggagtgcagtggcacaatctcggctcactgccagctctgcctcccgggttcatgccagtctccctcytcagcctcccaagtagctgggtctacaggcacctgccaccacgcccggctaattatttttttgtatttttttttagtagagacggggtttcaccgtgttagccaggatggtcttgatctcctgacctcatgatccacctgcctcagcctcccaaagtgctggcattacaggtgtgagccacactgcccggcttatagtgcttttaataagaaaatacactgaatactttttgttgttacaggtttgtggtattttcaatatttcgtgctagaaaatttcattggttgtatttttcacttacaattctaattaaaataaatatttcctgggttctttttaaagttacttggttaaaaaaatagacatatgatcaatctttgagtaaagctagtttttcaaag

SEQ ID NO: 296773 - DNA, 480 bp, Homo sapiens
gttaccctggctggagtgcagtggcacaatctcggctcactgccagctctgcctcccgggttcatgccagtctccctcctcagcctcccaagtagctgggtctacaggcacctgccaccacgcccggctaattatttttttgtatttttttttagtagagacggggtttcaccgtgttagccaggatggtcttgatctcctgacctcrtgatccacctgcctcagcctcccaaagtgctggcattacaggtgtgagccacactgcccggcttatagtgcttttaataagaaaatacactgaatactttttgttgttacaggtttgtggtattttcaatatttcgtgctagaaaatttcattggttgtatttttcacttacaattctaattaaaataaatatttcctgggttctttttaaagttacttggttaaaaaaatagacatatgatcaatctttgagtaaagctagtttttcaaag

SEQ ID NO: 296774 - DNA, 576 bp, Homo sapiens
cattcttctgtagcagagttaattgaatatacaaaatgtagtatatcaaatcaaaggtttatgcaatagtattaatgtataataacttgcatctttcaaccttgacacgtcacaaaaatatttagcaaacaagcaaattacagaatacatatattaaaagataaatataaaaataatgatacatttacaactgagcactatgttgacttgtaaataggtacagtggattgccattaatcacagtatttaatattctatgaattttcctataatgaattggcaattagtgaaacactgctcctagttggcctatagagttaggctctgtgaacctctggtcacagcatttcgtcaactaatcaatayatagcctcgttttatgtgtttgatttaattgtttaacattgaactcacagtcaacaacactataactcatgcaggaaggaaacttgcctaacacccatatgcttaggaacactaaacagcactttaacattatacgtggggcccttttaaacagcacaatcaccaatagtaaagccccacacaaatatgtaaaacttggcacgaaatagg

SEQ ID NO: 296775 - DNA, 523 bp, Homo sapiens
cttgttttacgtccttgggagtaagacctataaccatgtggcaatattttgttctagcttctggcagtttacaataatggcctgggattcaatcctagcttagggaatgagttctttctggtttttcttttcttggatcctgttttgctggaaaaaggttttttctcagttgactgaattatttttgttgattttgccttgccacttttaatgcatgcatgagaggggcagacctctattttcctcatggaaccccataaattaaaagcaccaaaggctattaatccaaaaaggagatgaacaaatgaaaattcttatggggactgggttttcttctgcctgtgtagttatttatgtgttgtgtgcgtgatatctgtaaaaagagctctaatcamttgatctaaaggtagataaacactttgatcaaatattttttaaagagaagataaaggctgtggtacctttccattcatgtgactttaatctttgggaaataaaaacagccttaaaaattattggtaaa

SEQ ID NO: 296776 - DNA, 549 bp, Homo sapiens
ctggaccccttttgaatgcatcctgaacccctggactcctttgaaaaaaaaattccttcttttttcctttcttctcttctatctcctcttcactgacaggtaattgtgtttccatactataagacactcctctcagatgcatcatccaaaatgagaagaattaatttcccaaactttaaactggttggcttaggattgggctcaggggaagggaacccagaagcccaacataccagcaaaagggtaaaggttttttttacaagttgggyctaaagcccccctctccctgtgcaaactagtaaaaagccttgggatttttgagctcttcttaccctacccctgtccttctttcattctgatacatattttctaataatctcaccttcaagccatcagactcaaaattgtcatgtaactggagcctcagaagatgttctcttctgctgagaacctgtagataggcctctgagggagatctgccgttttccccaaaacagcaccccctgtcagcaggaagcagttaagatcaatctttagccttgtctttaa

SEQ ID NO: 296777 - DNA, 549 bp, Homo sapiens
ctggaccccttttgaatgcatcctgaacccctggactcctttgaaaaaaaaattccttcttttttcctttcttctcttctatctcctcttcactgacaggtaattgtgtttccatactataagacactcctctcagatgcatcatccaaaatgagaagaattaatttcccaaactttaaactggttggcttaggattgggctcaggggaagggaacccagaagcccaacataccagcaaaagggtaaaggttttttttacaagttgggtctaaagcccccctctccctgtgcaaactagtaaaaagccttgggatttttgagctcttcttaccctacccctgtccttctttcattctgatacatattttctaataatctcaccttcaagccatcagactcaaaattgtcatgtaactggagcctcagaagatgttcycttctgctgagaacctgtagataggcctctgagggagatctgccgttttccccaaaacagcaccccctgtcagcaggaagcagttaagatcaatctttagccttgtctttaa

SEQ ID NO: 296778 - DNA, 580 bp, Homo sapiens
acagtgcaagagagtgtttgttgggaagggagggaaacaaggtttaaaagtacatttcaaggctaagaccagagacaagaaaaaaagttttaaaatgcattctgaagctaggccagttggtaacaccaggaaagaacaaaagaatgaagaattagtcataatcataatcctaactaaagattacatgttcttggtctgaaattgcttttgctatttagactcataggcatatttagacatagaaggattttcattcttagtccttttaaaagtatacatttttttaaagtacggaatttttagccatctaaaagcatattggttattttaaatctgcaaagtttacataagtgacattaatttttgttcttctacctatgaatacaaatggtcttgctgtcaagctggagagcagaaaatattctggcaattttatgttacgcagctaacaaaatcttctcatgacattttagattttagataataccatcaatcattcattcagtcaatatatttatggaaggcttattaakctccaagcctaggttaataatgaagaaacaaatttataagacatata

SEQ ID NO: 296779 - DNA, 553 bp, Homo sapiens
tcttttgtcttttagtaggttacctttgatgcaacacatactgatttaatgcttatttaataataaaagtgttttcttcactgcctttgtggagaggatttatgggttgacaaaaaatgtttatgtttccccaacaatatgcatatacacatgcatttaccaacatgtgagtatatgtacatatatatgtttatgtatgggcatatatatgtatataagtatktgcatgtatatttatatgtgcgtgtgcatgcttatcacccaaattttgctgtcatcacaactatttaatacagatatttctatttcctaaacatttaaagattctggttaaattatgagaatgaattctagcaaaattttacttttgtcttacaaaaactgtgattaagaacaatattttttgtattcctgaagcattatataaattaccgaaaactaaatatatagggtgtgcaatgctatcttaaagtcagagattctttcctcacctttgttctgtctggtgataagttcatcataggcattcttcatttccattagagtgttttta

SEQ ID NO: 296780 - DNA, 606 bp, Homo sapiens
gaatgagagaaaacagcacttcaaaacgacaattttttgattttcactcacctgacgaaacacacttatggaactttttcacctttctaatttgcttcaaatgccgaatgaccatagactgstcaacgttgagttctgaggcaacttctcgtgtaatcataagaggatcaacttcgataattgctctcaactggttgttgtcaacttccaatggcagccactacactcctcatcttcaaggctctcgtcttccttgtaaaacttcttgaaccaccactgcactatatgttcattagcagatcctgggccaaatgcattgtccatgttgcaatttgtccctgctgctttacgacccattttgaactcaaatcagaaaatcactggaatttgcttttcatctaacatcatttccatagtctaaagtaaatataaacagcaagtaataagtcatttgcaaaagaacataaagtgagaagtgcacattaaaatatgtttaacataaccacatttatttaagaatgtattctagtattaaatggcaaatttcaacaatgcaaaaaccacaattatgtttgcaccaacctaatgttttgagttaattgaagt

SEQ ID NO: 296781 - DNA, 650 bp, Homo sapiens
tgtaataatccccacaggtcaagggcgagaccaggtggagataattgaatcaagggggcggtctccccatgctgtttttgtgatagtgagtgagttctcgtgagatttaatggtttttatcaggggcttcccacttcgctcagcactcattcgctttcctgccatcctgtgaagaggagacttttgccataattgtaagttccctgaggcctcttcagccacgaagaactgtaagtcaattaagcctcttttctttgtaaattacccagtctcgggtattttttcatagcagtgtgagaacagactaacatgcatgctgtcttaagaaatgatacggattgataacatttttacctagtttcactcaattgtaataccttgcaaaactgtggtacaatatcacaacctagatattgaccttgatacagtcaagacacagaacatttcaatcaacatgtaattcttctctgctkcttttttgtctcaggagtttttacactgactgatacatgagtaatacttgtttcataaaatgaatttggaagtgtctctcctcttccattttctggaatagattgtgtagaatttctattattaaaaaaaaactttgatagaattctctagtgaaataatcgtggctgggagatttt

SEQ ID NO: 296782 - DNA, 622 bp, Homo sapiens
ctttcttatctacactttggtgtcttttttattcaactcgcaattttctttgtttctagtatgatagataattttttattctggatattatgttacaaaactctgcaacatatccaaaatacttggtattatttgtttttctctgacactgttgtagcaaaggaagtgggagagtgccactttmttattgctaggtgtggaataaaagtccaggtttcccactcagcctctgttgacaccagtgggggtaaggtttcttcattattcagtgccagagtgggagctctggcttcccactagacctccatggataatatcttgactgtgatgggtaggaataccttgttacttctcttcatatgatcttgttgagaccatgggtattgtccttgttactgcttgattgtagaaagctctgactctactaggtctcctctgaaacccacccagcatgaaagtagaggggcaccttcttactgctggatgagggtagaaatccaggttccccacatagtcttcactgcatagccttgttactgcccagtaaagctgaaaattgaagcttcctaattaggccctctcctaccccaccctagcaagaaagtaggcaacatatagcctg

SEQ ID NO: 296783 - DNA, 622 bp, Homo sapiens
ctttcttatctacactttggtgtcttttttattcaactcgcaattttctttgtttctagtatgatagataattttttattctggatattatgttacaaaactctgcaacatatccaaaatacttggtattatttgtttttctctgacactgttgtagcaaaggaagtgggagagtgccactttcttattgctaggtgtggaataaaagtccaggtttcccactcagcctctgttgacaccagtgggggtaaggkttcttcattattcagtgccagagtgggagctctggcttcccactagacctccatggataatatcttgactgtgatgggtaggaataccttgttacttctcttcatatgatcttgttgagaccatgggtattgtccttgttactgcttgattgtagaaagctctgactctactaggtctcctctgaaacccacccagcatgaaagtagaggggcaccttcttactgctggatgagggtagaaatccaggttccccacatagtcttcactgcatagccttgttactgcccagtaaagctgaaaattgaagcttcctaattaggccctctcctaccccaccctagcaagaaagtaggcaacatatagcctg

SEQ ID NO: 296784 - DNA, 596 bp, Homo sapiens
tactgactgggatatgaatattagctggagattgaacaggtcccctaaatcacagattggaaggttcttaatgagaatcatagaacaacgaactataagaaattgaatatctgcagcaagacagcagaataagaggtaactcacttatatctccccataacaacaagaattttgcacccatccacaaacaaaagtctctctgtgggagccttggaattcaggctggaggttgtgaaaccctagtggaacccaagaccaaggagacttgttttgagagtgcaaatacccaggtgggagatctgctgattgtgccattggattcaagcctggaaatggccccattccccagaagacatggctatagcagcagttgtccttgactctgcaaccaaaactgtctaccaaagggaccaggaggagttgcactcattaatgcctcagtgcagaggctccttagcctggtagcattggttttagcaacatacctgaaagttgccctgtgttacctccagctcccttctgctgaggttccagctcaatatacctggaaaaaggactcasaggcagacttaccatatttcccaacctgtgactct

SEQ ID NO: 296785 - DNA, 627 bp, Homo sapiens
gggcctggttttagctccagtctyttccactgcatttgggaaactatcccatctgtgctgggacctgctaagagataccctgctttttcaatgagacacgttcaccagccttcatcccacaaaagatccttagggggcttgtctcagtttcagcccttcctgctgccattgagtaactatcccaactgtacaggaacctgctgggagatgcacagtcatcttagccaatgaaatgaattttccagcttcatcccacagcagatacagagttgggtgtcagggaaagtgggggtgctgtctcaaccccagctcatcttgctgcagtctagaacctattccacttgtgcggaaacctgcacagaagcacatttgtatgacaccaggacagtcttctgggctcaaatgtctagccatctttctcaaacagccccagaactctctctgggtcttcccgaggtatatcccatcctgaaagttttatcagctgttgagacttatgtgatttgtggcaagctttattttagagctccctcttgtgcttagatgactgcagtggttgtaggcttagggaacacaacagttaatctgcttagaatctctgaaaggctctctgaagagcaggcacaa

SEQ ID NO: 296786 - DNA, 627 bp, Homo sapiens
gggcctggttttagctccagtctcttccactgcatttgggaaactatcccatctgtgctgggacctgctaagagataccctgctttttcaatgagacacgttcaccagccttcatcccacaaaagatccttagggggcktgtctcagtttcagcccttcctgctgccattgagtaactatcccaactgtacaggaacctgctgggagatgcacagtcatcttagccaatgaaatgaattttccagcttcatcccacagcagatacagagttgggtgtcagggaaagtgggggtgctgtctcaaccccagctcatcttgctgcagtctagaacctattccacttgtgcggaaacctgcacagaagcacatttgtatgacaccaggacagtcttctgggctcaaatgtctagccatctttctcaaacagccccagaactctctctgggtcttcccgaggtatatcccatcctgaaagttttatcagctgttgagacttatgtgatttgtggcaagctttattttagagctccctcttgtgcttagatgactgcagtggttgtaggcttagggaacacaacagttaatctgcttagaatctctgaaaggctctctgaagagcaggcacaa

SEQ ID NO: 296787 - DNA, 561 bp, Homo sapiens
cagataaacccgtcagatttcatgagtcttattcactatcacaagaatagcatgggaaaaactggccccatgattcaattacctccccctgggtccctctcacagcacatgggaattctgagagagaaaagtccagttgagatttgggtggggacacagccaaaccatatcagatagacaatgtaaaaaatgtaaagtgtgatattaaaggcctcatattaactacaaagcaaaaacctataaatgatacactaaaaagaaaaagaaaaaaaaacatactactagagaaaatcacataactacaaaggaagactgaaagagaaaatgaaaggagaaaagcatttctaaaactagacaacaaataasaaaatggcagtagttaagcccttgcctgtaaataattaccttgaatataaattgattaagtcatacaattaaaagacatagcgtggcttaaagaattaaaaaaacacaacagcacgactccactaaatcctagctacaatagattcattttaatgtaaggatacacatagactgatagagaagagatgggaaaag

SEQ ID NO: 296788 - DNA, 563 bp, Homo sapiens
tcttttatctgtatctttataacatttgttatgctttacttggccttttaatatctttctttrccaccaagtagattttatttcactaaagttttaagtattttgtaattattacacacacattcactcctgtacattttcatggacattcccacattaaggttttattatagttgtttcttactgcttattccagtttttacaataacctaggtcaaaattaacagttagattctacccattataaataaaatgattccttgccaaaatgcaaactgcttttctgctatgtttaatgagatcagctcacacttatctgttaactcgtttgcctgaaggaactggtaaacattctgatgttatttttcattattattgctttggctcattcttttttcttttgtaaggtatatttttgtctattttcttgtctttagactcatttgtattggaagaaatatgtaatttacctactgataattacagtagtcatttgctatgcttattaaaattgggatagtaccagaattttaggcattatttgttacttaagtctccaaata

SEQ ID NO: 296789 - DNA, 581 bp, Homo sapiens
ttcagcagccaagtggcagtccatctcttccaacaccataagtggagggctcttctgggtgtattaggctgacaaacactggcagattccatttaccacaaccctttaatgcacacaacctctatgaagtgtgcggtggcagtggggcaatgatgccattcttctacccccagttcccaatttctaatgagaaccctagtggggcagctgttgaagagtggagttcttatctcctacagagctctgtgttgcaggacagttgttccagtgagctagagagtcagatgtcagctctaatttcttccagcttcctatggcagaagtattattcctagtaaatttggcagtcactaaacaagatatatcccatattcccagttctggtctggggaaggtccatattggacagttcccactgtctcyccacccatacacacagctattctccatatgggaggtatctatgaggcagtgggggcagatcaagctctcacaaaatgtcctcaacccacagcttctccgtgtggctcacggtgtgttttcagaggagggtatgagcaagcctcagacactaacaacat

SEQ ID NO: 296790 - DNA, 591 bp, Homo sapiens
tctaattccattcttatagttaatttgaaatatacaataaattcttgtyagctatagtcaccctatagtgctacagagcacttatccttttaaatggttagaaaaaattgaacatatataaaccagcaattttattacaagataaataaaaacatccagccatacaaaaaagtatatttgtatgttaatagcagtattattaataaaagaaaaaaggtaaaaacaactcaactgattaatggataaacaaaatatgtatctacaaaatgtaattgtatttgacaataaaaaatgaagtactgatatgtgctacaacataaatgattcttgaaaacatgctaagtggaagcatcaggttacaaggacaacatactgtataataccattcatttaaaatatatagtataggtaaatctacagaaacagaaagtagattagcggttgttgagggcttacatggaaattggggatggggaaatgaggagtgactgctaatgagtatgggttttttttcagcttattaaaatattacaattgattgtggtaatggttataaaaattcagaatatatttaaaaaatggaattatata

SEQ ID NO: 296791 - DNA, 591 bp, Homo sapiens
tctaattccattcttatagttaatttgaaatatacaataaattcttgttagctatagtcaccctatagtgctacagagcacttatccttttaaatggttagaaaaaattgaacatatataaaccagcaattttattacaagataaataaaaacatccagccatacaaaaaagtatatttgtatgttaatagcagtattattaataaaagaaaaaaggtaaaaacaactcaactgattaatggataaacaaaatatgtatctacaaaatgtaattgtatttgacaataaaaaatgaagtactgatatgtgctacaacataartgattcttgaaaacatgctaagtggaagcatcaggttacaaggacaacatactgtataataccattcatttaaaatatatagtataggtaaatctacagaaacagaaagtagattagcggttgttgagggcttacatggaaattggggatggggaaatgaggagtgactgctaatgagtatgggttttttttcagcttattaaaatattacaattgattgtggtaatggttataaaaattcagaatatatttaaaaaatggaattatata

SEQ ID NO: 296792 - DNA, 613 bp, Homo sapiens
agggcttacatggaaattggggatggggaaatgaggagtgactgctaatgagtatgggttttttttcagcttattaaaatattacaattgattgtggtaatggttataaaaattcagaatatatttaaaaaatggaattatatactttaataataaataagtgaattgcaaggtatataaattatatctcaataaacttaaagtagaaacactactattgtattttgctttatgacttatcttagctcaaattttccataattagaatacattttaatattttagatccatttatatagtataatcactacatacctttaattatgagagtatgaataattctatttgcattttcattatcaacttttactttattacctatagttttaattaaaactaatattagagacattatgtacttttgtttacacttatctgttttctcagaagttgtcattttatatcccattttgcaaagtagttgttttatgtcttccaataagagtgcattttttatgatttttgatttctgaaataaaatatkaattttaaaagctatctgaaaaagtgttcaatatcactaatcagagaaatactaatcaaaaccacaatg

SEQ ID NO: 296793 - DNA, 627 bp, Homo sapiens
ttaaagtattgtaagaagaaagaaaccagctgaacattttataaccagtgaaattatcctttaaatgaacccaaactaagaattaattgacagcagattttccttacatgatagatgatatggtttgcctgtgtctccacccaaatctcatcttgaattgtagctcccataattcccatgtgtcatggttgagactcagtggaaggtaactgaatcatggaagtgggtctttcctgtgctgttctcgtggtagttaataagtctcatgagatctgatagttttataaaggtgagttcccctatgtaagtgctctcttgcctgctgccatgtaagatgtaactttgctcgtcattcgtcttccaccatggttgtaaggcctccccagccatgtggaactatcagccaatttaacctcttttctttataaattacccagtcttgggtatgtctttattagcagcgtgagaacagactcatacaatagattaagcaattttctttagacagaggggaaatgacrctggttaaaaagttggaattacacaaataaaggaagtgtgttcgggaagtaataatataagataaaataaaatattaatttttgtattaataatctaaaatataca

SEQ ID NO: 296794 - DNA, 1220 bp, Homo sapiens
aaactgtttctgtttctttttgctcctgattttcttttgctttattaaagtcttcaaggaaaaatatgattatcttagcttacgttagatgtgtacatgcatgctgtatctcactttctcagactttccaagagtgttccagcatgtgcaagttccgtgctcatgaaaaacgtatactatgatggctttccaaaatatactgcccatgatctgaattccattcctacttccggtgtttataaatttcattatttcaaccccaggaatttgatacatttgagtggtattacactttagaaacaaaatattaaaggtaaagaaagataatcaccacttaattaaaartagtttaagaatgaatcagatttgcattattggttttggcttaatggcaaaatgcttcaaatagtatacggaaattattttgggatgctttggataagaatggaaagtgacataaatataaagaattgcagcaagttggtaaaatctgtaagcaagacatattattgcaaattaaacacaaatcatacattaatgatggtgttgttgacaacacatcttgagaaaatgattcctattaaatattgctttctttawgtaacgcaacaaaacacacaaacaacagtgtaatatggtgtcactagttcgaagttgacatttttcactgacatttacagaaaaagatagatagcagtttagcctgcttaaatgccaagataaattgttaaaaacaaatttttgtttaaattttaaactaaaacccatgtttagaaataggttaatacattgatttaactcattaacttaattcttggttttggaagcattggtgacgttttcaacttaaaagccaagttgaaaaatattcagtgtttgaaaagtttataacatgtgtttagagatctgagttatttggggcctaaattttcactaacgataataaacagattttattactaatttcctagttctcactgactaaaagagaatattattggggtaataaatactgagataattttacatgaaaattaatcattgtatcaggcaaaagcctagagagagggctgtggttttttttttwaaaaaagcaaagaaataaacaatctgtttaacaaacccataatctgaactgtcccacacatacaacctttttaaaaaatattcttccacgtgcaacctttgtgtatatttcaggcaggtcactcttaccccac

SEQ ID NO: 296795 - DNA, 593 bp, Homo sapiens
ggggaaaatccatatgtaagaggagaataatttttcagaatttaaagtagactccaattaacttcttttttcttaggccttttgaatgtgaagttttgtgtgtcaccactggacttctaagcctgttaaactcaaaaatggcagaaggttatgtagaacaaattctagttaaatgtcccagcatgtggagttcaggaaaatacataatgaaggcccacagaacttataattaggagccaaatcctgtatgtatattacagattgaggaatcatgatggaaacaatagatttgcaggaatacattctcaacagatgatctacatacttttattaaaattgtctatacagtgtgtattgtcatgttcatttacccagtctactcactataagcattcaatatcacatataggacagcaatcctcatcattyactaatgtgaacttgaacaaggtatgccatgtctctgtgctttaaatctctaataagagaaagacagtaacagtacctgacttgtagaattacaatgaaaatgttaatgaatcaatgtacataaagcacttgggagagagtcccaagtcatcacatacaaaacg

SEQ ID NO: 296796 - DNA, 593 bp, Homo sapiens
ggggaaaatccatatgtaagaggagaataatttttcagaatttaaagtagactccaattaacttcttttttcttaggccttttgaatgtgaagttttgtgtgtcaccactggacttctaagcctgttaaactcaaaaatggcagaaggttatgtagaacaaattctagttaaatgtcccagcatgtggagttcaggaaaatacataatgaaggcccacagaacttataattaggagccaaatcctgtatgtatattacagattgaggaatcatgatggaaacaatagatttgcaggaatacattctcaacagatgatctacatacttttattaaaattgtctatacagtgtgtattgtcatgttcatttacccagtctactcactataagcattcaatatcacatataggacagcaatcctcatcatttactaatgtgaacttgaacaaggtatgccatgtctctgtgctttaaatctctaataagagaaagacagtaacagtacctgacttgtagaattacaatgaaaatgttaatgaatcaatgtacataaagcacttgggagaragtcccaagtcatcacatacaaaacg

SEQ ID NO: 296797 - DNA, 560 bp, Homo sapiens
ctatttctagaatgccagcttttagatattattttcaaagcgaatgtcttaaatctcaacaatcatgtaatcattattcagtgctcaaataaaaattaacataattattctgactttgcttaagaattaagataatgcagagcccttagctatctaaattgagatatatatggttcaaaggagaatcagtatttcaatttgctgagtttgttaagtaatagtcatacataatattatcacataaatgatttattcataggagaatattataaatctgctataaagccaaaatatgacatttggaatcccaggctacccatcatatgaaaaattttggaggttaattgaaaggcatgtaagaggctgaagttgagacattgcttcaaactattttgagatttttatcttaagtcaggtgcctatattttaatttgtatcatgtagtatttcttrtatattaagacttacattttgtagtcagacaggaatatgttgaatctttgttttgcaactcgctagatttgagcacctggacaaattttcattaaagttcacacaac

SEQ ID NO: 296798 - DNA, 599 bp, Homo sapiens
tgggtgatttctgcatttccaacagaggtacccagttcatctcaatgggactggttagacagtgggtgcagcccatggagggcgagcagaagtagggtggygtgtcacttcacccaggaagtgcaaggggtcagggaactccctcccctaaataagagaagccatgaggtcctgtgctgtaagggatggtgctatctggcccagatactatgcttttcccatggtctttgcaacccacagaccaggagattacctcgggtgcctataccacaagggccctaagtctcaagcacaaaactgggcagccatttgggcagacactgagctagctgcaggagttttgtttgtttgtttgtttgtttgtttttggtatcccagtagtgcctggaactccagcaagacagaactgttcactccaatggaaagacggctgaagccagggagccaagaggtcttctcagtggatcccaccaccatggagcccagcaagctaaaatccactggcttgaaattcttgctgccagcagagcagtctgaagtcaacctgggatactcgagcttcgtagagggaggggtgtctgctattactgaggcttgag

SEQ ID NO: 296799 - DNA, 599 bp, Homo sapiens
tgggtgatttctgcatttccaacagaggtacccagttcatctcaatgggactggttagacagtgggtgcagcccatggagggcgagcagaagtagggtggtgtgtcacttcacccaggaagtgcaaggggtcagggaactccctcccctaaataagagaagccatgaggtcctgtgctgtaagggatggtgctatctggcccagatactatgcttttcccatggtctttgcaacccacagaccaggagattacctcgggtgcctataccacaagggccctaagtctcaagcacaaaactgggcrgccatttgggcagacactgagctagctgcaggagttttgtttgtttgtttgtttgtttgtttttggtatcccagtagtgcctggaactccagcaagacagaactgttcactccaatggaaagacggctgaagccagggagccaagaggtcttctcagtggatcccaccaccatggagcccagcaagctaaaatccactggcttgaaattcttgctgccagcagagcagtctgaagtcaacctgggatactcgagcttcgtagagggaggggtgtctgctattactgaggcttgag

SEQ ID NO: 296800 - DNA, 594 bp, Homo sapiens
acaaaactgggcagccatttgggcagacactgagctagctgcaggagttttgtttgtttgtttgtttgtttgtttttggtatcccagtagtgcctggaactccagcaagacagaactgttcactccaatggaaagacggctgaagccagggagccaagaggtcttctcagtggatcccaccaccatggagcccagcaagctaaaatccactggcttgaaattcttgctgccagcagagcagtctgaagtcaacctgggatactcgagcttcgtagagggaggggtgtctgctattactgaggcttgagtaggcagtttgcccctcacaatgtaaacaaagcctccaggaagttcagactaggtggagcccactgcagcgacaaaaatcctctgtttccasactgcctctctagattcctcctctctgagcagggcatccctaaaagaaaggcagcagccgtagtcaggggcttatagatgaaacttccatcttcctgagacagagcccttggggaaagggacggctgtgggtgcagcttcaacagacttaaatgttcctgcctgctagctctgaagatagcagctgatcttcca

SEQ ID NO: 296801 - DNA, 617 bp, Homo sapiens
ggggtacatgtgcaggcttgttacatggatgaattgcatgctgctcaggcttggtttacaaatgatcccatctcccaagttgtgagcatagacctgataagtagcttttcaaccctcgctccctgcaaccctcccacttctagtggtccccgttgtctcgtgttcccatcgttatgttcatgcgtactcagtgtttaactctcacttataagagagaacctgtggtatttggttttctgttcctgtgttaattcgcttaggataatggtctccagctgcatccatgctgctgcaaaggacacaggttgattctctttatggktgtttatcattccgtgaggtacatgtaccacattttctttatccagtccatgggcatctaggttgatttcatgtctttagtattgtgactagtgctgcaatgaacatattaatacatatgacttttggtagaatgatttattttccttcagatacatacccagtaatgggattgctggatagaatggcagttctgttttaacttctttaaaaaatctccaaactgctttccccagcaactgaactaatctacattcccacaaacagtttgtaacggttcccttttctctgcaacc

SEQ ID NO: 296802 - DNA, 561 bp, Homo sapiens
tattactagcacccagggagtgcagactgtttaagaattcgggttcggtagccaggctttacggatcggtcccagcaccacttcttcatagccgcatctcatctgataggggactgaagctttctaagctttagttttctcagctctccaatacagataataattttaataatatcttccttayagagttcttgagaagaatatgtgagataatccagctatcagagatttctgatctacagagaaccttttttcaatattatagaataatagataattagaaaagatcaccaaatttgtcatcatgaagaacaggttgggctcgatggactaagtttagagttctctatattttaccatactttgaattttttgttataatatttttttatttagttcttttggaataaaaacaaacccttttttaaaatgtgtttttaaaatatgtttaaatttccgtaggaaatatataaggcatatttgctgctgtagctttaaggggattgatacaggcacaatatatacccctaaaatgaagaaagaaacaatgaaaaggagagt

SEQ ID NO: 296803 - DNA, 515 bp, Homo sapiens
ctatgttcaatccagatcacttaccagatgtttctttcatgaaggaagtttaagctattcctgtaaagttatgctttaagattcatgaagctttaagattgttcattcatgaacaatctctgtgctgaggtggcctcctcygtagggcaaccaaagtttttaggtctcattgtcataaagacatggtaatcccaggccagagttggaataccccaagttagattatgtcagattatatcatgtgctaagtggcacaggatgtaggcccagcgggatgtttgagtgggcctcaaggctatcattaatcctatatccacaatacgtgccttatagaatactacaacactatatgtaaatgagagatgataaaacaaatcttaagaaactctattaattttaacatggtgtttagaaatctgaatggaatatttggttttcttcagggaagctttggtggtggtggctctgagatttggtgctgtcctggtattgggctacactggtggccttgggtt

SEQ ID NO: 296804 - DNA, 587 bp, Homo sapiens
aatgaaacattcagttcactgtagaggttgaggtcaaagatgggtcaaaataaacaagctaagggaccacatgccagggagtcaagatactagtcaaaatgtcccaatagccctaggaaatacctagggaatcttgggtttaacagggaaggtttagagaatacttatggcagagtcctccgtgcctaccataaactctttttatcctctttgtgtatttgtttatttatttagagatagagtctcactctgttgctcaggctggagtgcagtggtgccgtcatagctcactgtatcctggaacacctgggctcaagtgatcctcccacctcagcctcccaaagtgttgggtaactcccaggctcactgtgtaggtgttcttggttcatttaaagggacaggcagaacaaattggtggtaagagagtgcagttggttcttataatagctgtttccacaaacttagatcttagcacttaacactatttttatgagaagctgttggtgtcattgtttyctttatcattaaaatagttcaaatttaattgaattgaatttttaccaccatcagcagtgcagattaaaaag

SEQ ID NO: 296805 - DNA, 539 bp, Homo sapiens
tttcttattgtgcaaatacaggctatttgtggctcaataaataaaatgcttgataagygctgttcccccactggaaaaaaaaatcttattacccagaagtgtgttgattggcaccataagagacagaagattctgaaggggaaaatttctttccacacctaaatgacacaagcatagaggttcgtgatcaccttacaaaattaagcctatcaagtaaaaaatctgatatcagaggctttgtctcctcaatgccaacctctcagagttgccatcgccctgtaatttttagggtggagtttttaaattgaggttagaaaatgtctggaataaattcctggatagttgacttgaaagtcaacaggagccacagtgggatgtgttttgccttcagctcagaggtgacctctagcaaggcgacatggagaactatcaatcttgtgaagtgaggtgaggcgaaaaaccacatcagagaaaacatgatgtaagacagaaagaagaaataattaccagagattaggagctcagaaatatgaagctcc

SEQ ID NO: 296806 - DNA, 539 bp, Homo sapiens
tttcttattgtgcaaatacaggctatttgtggctcaataaataaaatgcttgataagcgctgttcccccactggaaaaaaaaatcttattacccagaagtgtgttgattggcaccataagagacagaagattctgaaggggaaaatttctttccacacctaaatgacacaagcatagaggttcgtgatcaccttacaaaattaagcctatcaagtaaaaaatctgatatcagaggctttgtctcctcaatgccaacctctcagagttgccatcgccctgtaatttttagggtggagtttttaaattgaggttagaaaatgtctggaataaattcctggatagttgacttgaaagtcaacaggagccacagtgggatgtgttttgccttcagctcagaggtgacctctagcaaggygacatggagaactatcaatcttgtgaagtgaggtgaggcgaaaaaccacatcagagaaaacatgatgtaagacagaaagaagaaataattaccagagattaggagctcagaaatatgaagctcc

SEQ ID NO: 296807 - DNA, 616 bp, Homo sapiens
atcttgttgccctcccattgcccgggctctgttttcatttgcttgtctgaagttggttatggacaattccatgttttagtttatgaaaagaataagaggcagaatagagaagtacacattggttacctcaatgcccagttccagaagtggtgcatattacttctaggccacagtagctgcaagtgaagttgggaaacacagcttaggtgggcaggtaccacttaccatttattacaatgcaagaagaggaaaattgaggttagtaaacaattattagaccctgacgtgctatccaagcttcttgtaggtttggcagagattttaaagggcaatttagaaactgtttgaactttcatatttgccataatcccaaacacgggtaaagcagttgtaatatataatatcagtcgcttctttgtacttatatatggctcataggraaggtaagcatctgtgttctaaacaaaaatagatttttaaaataggaattttaaaacaggaataatctttgaactgtagattaagaaagaacaccatatgggagaaaagagaaaaaagacttctaggcagttcatagattatacagttataattttcaatgacacatatattacgt

SEQ ID NO: 296808 - DNA, 562 bp, Homo sapiens
gtatttgctaaaattgcagaatggtgactttctaattcttttatttcctctttgtttagtagctggagtatttctattaagagttatttccatccatccaatatttggctatgtaactccatagcaartgtttctttctaaaacattttaaaccatttttacacttttttcctagtatgatatttgtgtgattaagaaaaaataaaaactagtgaaataaattaaattctcactttttcaagtctttgaattctaatgaggcttagaagaaaatctagtacttagacaatgttaggtgatagttaagaaagatgctattttaataagtttcatgtgattagtgaaaaaatgtgtttaactttgtgtttgatgattaaagaaagaaaacaaaaagaggagaaaaggtaggcagttatctagccctctacagcagatattttaatttctgtgtcttaaaagacagtaataatgtactatctgataaattagatgtagtagaatttccccttttcaaatcagtgttatttcaatcataaaggaataaaaatcattggtttgttga

SEQ ID NO: 296809 - DNA, 594 bp, Homo sapiens
gatagatagatcaattgatcgatatttattttaataaattggctcaagtaattttggggtctggcaagtttgaaaaatgcagggcaggctggtaggctggagacccaaagagattctgttgcagctcatgtccagaggcagtgtcagggagaatttcttcttccttagggtacttagaggacttcagactttctcataaggccttccactgattgagtgtctcctgtccacattatggagaataatctgctttactcaaagtctactattttaaatgttaaactcatctaaaaaaataccttcacagaaacatctagatgattgtttaaccaaacatctgggaacagtggcccagtcatattgacatttaatataaaattattgacatattgacakttaatataaaatttactgtcatggacagttaatacctaatactcaagtagaactttattatttagaaagagatttaatttgcagtttcagttttctttccaacaaatgaagttctactagttaaaaaaattaaatgcatacacaaagtcactcatagagattaaacaatctctttttgcttttcgtattaattggtta

SEQ ID NO: 296810 - DNA, 449 bp, Homo sapiens
gtttaaaatagaatgaaaaatttggaaatttatgaacatttagaatctcattagtttcataaataaccacagtctcaatgagatcatcaaaactgctagcataatcaggtttatactgatttactttttaatattactcattttgacaatgaggagcagtttctgaatgaattatgtgctgtaggatgacactgtatggaaaggagaactagagtgggcctcatatgaggaggcgtactaaytgatacagtaaaactttttgatataaaggagtttcctctataagctgctatggcatttaatgcaaagaaatatggttcatttttaacattttattataatataaaacatcctttcaatatgtttttaaaaatgcatgtgtgtgaaattgttttataaattgagaacttttccccctgttgaaccataatctccattagtagaaaaag

SEQ ID NO: 296811 - DNA, 422 bp, Homo sapiens
tatgactggctgagaagggatagatgtatgaaaatatgtaaattgacatctcttttctcccaacctctgttctcttgtcaattccttctgggctgatcccagatgaaaaccataggtcaagggatcctgagtagcttagtcttctaaggtaaagagtgtggatctggaagatgaacagaaaggaaagagtatagcatatcatgcatacacagagatttctayatacccaattttcagttaagataattccattgaaaatcttgggttattttatgcttatgcttgcaactaccttcagttgcattgcttctctgggagagatatttaaaacatatgttaaagtatatgcccaaagaaactcggttttttttttctctgtttttcgtggagactaagtctcacttcgtcacacaggctggagt

SEQ ID NO: 296812 - DNA, 546 bp, Homo sapiens
atctattctaacttccacttgatttgtaattgcagtgatatttcttcaaaagtgattgctgttttcaagtagaggcccgattctgcaaataggttaaacagagctctccgtttaacaaaaataaaacttttaatatacattttgaggtgggctaatagtctttttcattaggaaaagggagcacacactgagaatatctgtctgccatctgagtaaycaatgaaccaatatggttgtaaatcttccagaaattccccatggttaaattcaaagaaaaatgtttattcttctccaacccttatccttcatttccccactatcatttgctaacggtagggggaatcttttcatcttgcaagtgagagaaagaggaagtatttcacactttctcttaacttctgcctattaaaacaatctctgtcatttgcatctatgctaaccataaaaaaagtgataaaaattcattttaagaaaaacaactataaaaaccctactaccaggaaaataattcattactgttattttaatgattgaaatgtgaatgtc

SEQ ID NO: 296813 - DNA, 645 bp, Homo sapiens
ataagtgcatttgttcattaaataatacagtgggcagctttacacaaaaattaaagagtaacagatgccagtaattgcacatatgccatgattaactcattggtatcgcagaatgctccaagtaaagtgattgataatgtacttgacacatatataataaatgagtcatatcagaatgataaagttgttttcaaaattatgctgaatttctataaaagyatgtgatgatataaaaggtcaacaattatactgtcatgatacaattacaaaactaatctccttgctagattattttactttcagagatattactgaaattgtaaaacataacaattattaaatgaaatagtttatactcaaaattattttcaatacaatctacatttatggagaacaaagaaaacatctaaaaaggattaaagcattaacagtaagaattcatccctgacctagtatttgaaaacatttatacacacagctcagatgacaggtactaaaatctcagaattcaccaatatataattcatccatgtaaacaaaaaacatttgtaacccaaaagctaccgaaatttttaaaaagtggctgtcataacatttttaaaaaatcggtacacagtgactaaaaaacaaagttaatttagaaaa

SEQ ID NO: 296814 - DNA, 645 bp, Homo sapiens
ataagtgcatttgttcattaaataatacagtgggcagctttacacaaaaattaaagagtaacagatgccagtaattgcacatatgccatgattaactcattggtatcgcagaatgctccaagtaaagtgattgataatgtacttgacacatatataataaatgagtcatatcagaatgataaagttgttttcaaaattatgctgaatttctataaaagcatgtgatgatataaaaggtcaacaattatactgtcatgatacaattacaaaactaatctccttgctagattattttactttcagagatattactgaaattgtaaaacataacaattattaaatgaaatagtttatactcaaaattattttcaatacaatctacatttatggagaacaaagaaaacatctaaaaaggattaaagcattaacagtaagaattcatccctgacctagtatttgaaaacatttatacacacagctcagatgacaggtactaaaatctcagaattcaccaatatataattcatccatgtaaacaaaaamcatttgtaacccaaaagctaccgaaatttttaaaaagtggctgtcataacatttttaaaaaatcggtacacagtgactaaaaaacaaagttaatttagaaaa

SEQ ID NO: 296815 - DNA, 542 bp, Homo sapiens
tgtgatctgactacacactctcacggtaattgtactttaaatgcttatcagttttatgctgttctcagatgcttagatcaactgtacctcaatttatataatacatgcatttgtgtatgcatattattatttttcaatataaattacttttcctttccaaaattcattattctctgtttttatcattttaacccttctcctcacatttatctcctccacccgaagtccttcattccattttgggcatcacattcacagagctttgagaactaagtcatcattggttatcattaacccctactcaagtcttccctgattatacaataaaccagtttattgccaatataaatttaaaaattttagttttttcacagctgccttttatttccttcttctccacttcttagtttgcatccttactgcttctcatatgamgtacctgaccttgctccatacaggatagactgccactccactcagcaagcaaataaacacccagaaagtgaaatgacatatgggatgtacttctcatgcttgggggc

SEQ ID NO: 296816 - DNA, 652 bp, Homo sapiens
aatttgttagtttttcttgcaggagatactctattatacttacatacctgtatctttatatatcraaatgttgacgcatagctataaacagacagataaatttctctacaaggtcatccactttttcagttcagatacagtctgttacttattctctttgtactatagatttgcttaaaatgaaaaataattgtacaatgcaaattaatagctctcgtaaattaaatgtctgtgataatatttgatagacactttgtgaagattatggataatcttaacaacaactctgcaaagtagacattatctctactttccacataacagtgctcctcaaactgccagtccacaacagtttattactcaccagcaaagagataaatacacacattgagaaaaatgcttagaaatcagtaatgtggtttgtggtttgtttttgtttgtttgttttctagaagtagattggcaagctaccatggcagggaaatattttgatgtagtctgattaaggagttcatatagaccataaaccaaggtactgcttccttcgtcaagaaaaccttagtgcacaatagaagtatcagctaaatatcagggttcttagctatttcgtaaaatttgtgatttatgtatgtaaaagctaattcattaaata

SEQ ID NO: 296817 - DNA, 595 bp, Homo sapiens
acattcatatgatacattaaaatactttctccaacctaataatcttttttagtcttctgagttaacaaataccgtgaccctaagccctggacctcctgtgctggatgatgagtcagccctggctggtctggatcctggggaaacagtctgaataaatcgaaatggacaagtggcttttaataacttacccgtttcccataataaaaataacagtgtccataacaaaagagtaatgttgatgtatcaaggaataaattaccttgtctgccaataggacttayggtgctttgccatgatgtttttcccaagtttaaaatagaaatggttggtggtgagttgtatgatgccatctgacattcatcaacactgaatggcttctctattttcctgaccccaacatgtatcccagtgagagaaacagactgccctgattatccactgaattccaaaaagtgatcatccgaggctcacctggtgttttcagtgagaagtttctttggaagaaggcttgtgtgtggtttctcactctgtgtgtgccgcagaggtctggatccaagtgccaggaagcctaggtcatttgtcatgggctagtgac

SEQ ID NO: 296818 - DNA, 1700 bp, Homo sapiens
ccagggtaaacactatatcagacttctctttagaaacatagtttctaaatgcaagcaagaagmgtgtggataacatatttaaagagctgaaagaaaaacataccaacctcagttctgtgtgcagtgaaattatccttcaaaagtgaagtagaaatagcttcttagacaaacagaaattgagggaatttgtctccagttgacctactttgtaagaaatgttaaaagaagttcttcagagaggaggaaaatgatataggctagaaactcagatataataagaaaggaggagtcttaaagaggaaataaatgcaggtaaaaataaaccatttgttttgtaaaaattcttaattgacttaactgataacagttttgtcaaaataataatatcaataatatattgattataacttatagacagtgaattgagtatcagcaaaataataattgaagaggggaagaatcaggtgtgctctgttgtaaggcacctacactactcatcaggtagcatagagttatttgaaagcagggttatattagttgtaaatgtacactgtaaactttagggcwccagggtaaacactatatcagacttctctttagaaacatagtttctaaatgcaagcaagaagagtgtggataacatatttaaagagctgaaagaaaaacataccaacctcagttctgtgtgcagtgaaattwtccttcaaaagtgaagtagaaatagcttcttagacaaacagaaattgagggaatttgtctccagttgacctactttgtaagaaatgttaaaagaagttcttcagagaggaggaaaatgatataggctagaaactcagatataataagaaaggaggagtcttaaagaggaaataaatgcaggtaaaaataaaccatttgttttgtaaaaattcttaattgacttaactgataacagttttgtcaaaataataatatcaataatatattgattataacttatagacagtgaattgagtatcagcaaaataataattgaagaggggaagaatcaggtgtgctctgttgtaaggcacctacactactcatcaggtagcatagagttatttgaaagcagggttatattagttgtaaatgtacactgtaaactttagggcwccagggtaaacactatatcagacttctctttagaaacatagtttctaaatgcaagcaagaagagtgtggataacatatttaaagagctgaaagaaaaacataccaacctcagttctgtgtgcagtgaaattatccttcaaaagtgaagtagaaatagcttcttagacaaacagaaattgagggaatttgtctccagttgacctactttgtaagaaatgttaaaagaagttcttcagagaggaggaaaatgatataggctagaaactcagatataataagaaaggaggagtcttaaagaggaaataaatgcaggtaaaaataaaccatttgttttgtaaaaattcttaattgacttaactgataacagttttgtcaaaataataatatcaataatatattgattataacttatagacagtgaattgagtatcagcaaaataataattgaagaggggaagaatcaggwgtgctctgttgtaaggcacctacactactcatcaggtagcatagagttatttgaaagcagggttatattagttgtaaatgtacactgtaaactttagggc

SEQ ID NO: 296819 - DNA, 1090 bp, Homo sapiens
attttatcaataaccaccttaaatgtgaatggtttaaatataccaattaaaagacagatactgactgaactatacattcaatacaagacatttactttaaatataacaragatagattaaaagtaaagacacggagaaagatatatcatgccaacactaatcaaaagaaagctggagtaactactttaattccaaccaaagtagaccacagagcaagaaacactatcagagctgaagagaggcattgtataatgataaagaggcaattctccaagaagacataacaatctttagtgtgtatgcacctaaagacagagcatcaaaatacacgagggaaaaacttatagaactgcaaggagaaataaataaatccattatcatagttggagacttcaacacccttctattagaaatggacagatccaacaggcagaaaatcagaaaggagatagttgaactgaaacagctccatcaattgatattgatagaatgaaattgatatttatagaatatttcatccaacaacagcagagtataagttcttttcaggttcacatggaaggttcaccaagawacagaaattaattttcctacaattctgaagttcagaagtctgagatgaagatgttgatagggctgatattttctgaggcctcgctccctggcttgatggcagatgactgggccatcttcttcctgtgtcttcacacgggcttccctctgtacatgtctgtgtccaaatttactctccttatattggattagggcccaccatagtgacctcactttaacttaattaccttttaaaagagcctatcaccaaatatagtcacattctaaagtactggatattaggacttcaacatatgaatcttaagagatgacataattcagtccataacagaaggaaacttcctcgacctaaaagaacaaaagaacatctataaaaaccaaccgacaaaatcaactacawctgctctgatgaaagagatcaaagaatagctaaataaataaaatggatattaatgtacaaaacgactaaacgttgttaaaatgtcagtttccccagcatggtccatggattcgatgc

SEQ ID NO: 296820 - DNA, 562 bp, Homo sapiens
ctcttggtgggaatgtaaattagcctagccactgtggaaagcggtttggggattccccaaagaactgaaaacagagctaccatttggcccagcaatcccattactgggtatatacctgaacagcaatcccattactgrgtatatacctgaaagaaaataaattattctaccaaaaagacacatgaactcatacattcatcactggactattcacaatagcaaagacatggaatcaactcaggtgcccatcaatggtagacttgataaagaaaaccaccatggaataatatgcagccataaaagagaatgaagtcgtgttctttgcagggacatggatggagctggaggtcataatcctaagcaaattaacacaggaacagaaaatcaaataccgcatgttctcacgtgggagctaagcattgagcacacatggacataaacaagggaacaatagatactgtggacaaccggggtgggaggtaagaaacttcctatcaggtatgatgctcactaccatggtgatgggatccatattccgaacctcaacatcacgcaatatttt

SEQ ID NO: 296821 - DNA, 618 bp, Homo sapiens
acctataattaatatgagtggttaattctaaggctttcactgcacaatctcagtgacattttgcagcactgagggtggccattaggagaaaatgtgctcaccaatgagtgcatactgaaattagcaataaaacatttgtctctccatttcacatacaatttggcctaagaagaataagacaaacagaccctctatggcagggcagtccctgaaaattcctccacaacccaagagtatccaggmtttgaggaaaatacatgtttcacctgtcttttgaaaaactcagtacattaattatcccaaaatagagaaactaagagaaattaagcatgcatggttcatatgacaatgaatttcattatacaaagattccaaacagcacgttactaatttccaaattttaaaaagaaaaaaaaagacactctgagatatatatatatttttttatgaggccatgcacgtgataaaaacatagattaggctatgaatatatattcctttacttttaaaattaattgtgcatacagacaaaatttttacatttcaagggttgagttacataaccatacaacccagggcatatttttttaactttctaaataagaaattaaaaatatt

SEQ ID NO: 296822 - DNA, 600 bp, Homo sapiens
gagggaatttggcagtaagaaaattaatcctctcgtctttcatagccagaagttgaagacatctaaaattaaaacatgggattagaaatataataattccaatctcattgaatgtttcrtagtttctgtagccttagaatactatgttaggatatttaggatactaagcaagatttgtggatatcatttctgttctcttctaggttgcttgattctttttctaatatgtatgcttttttgtttgtttacctttaagctctgttggacttaatgtatgtattatttatataagagcggtaaagtattaaaatttttaaatagaaatgtaacttctatgttagtctgggttctccagaaaaagcaaccaataggagataaatatacatattcatatatacatatacatatacacacacacactaacaggcatatgtgtatgcatgtctatgtgtgtgtgcgtgaagggggggaagcgagatgtactatgaggaatttatacatgattatggaagccgagaagaccaagatctgcagtcagcaggctagagaccaggagagccaatggtgtatgttccagttcaatctgggtcctaagacagg

SEQ ID NO: 296823 - DNA, 600 bp, Homo sapiens
gagggaatttggcagtaagaaaattaatcctctcgtctttcatagccagaagttgaagacatctaaaattaaaacatgggattagaaatataataattccaatctcattgaatgtttcgtagtttctgtagccttagaatactatgttaggatatttaggatactaagcaagatttgtggatatcatttctgttctcttctaggttgcttgattctttttctaatatgtatgcttttttgtttgtttacctttaagctctgttggacttaaygtatgtattatttatataagagcggtaaagtattaaaatttttaaatagaaatgtaacttctatgttagtctgggttctccagaaaaagcaaccaataggagataaatatacatattcatatatacatatacatatacacacacacactaacaggcatatgtgtatgcatgtctatgtgtgtgtgcgtgaagggggggaagcgagatgtactatgaggaatttatacatgattatggaagccgagaagaccaagatctgcagtcagcaggctagagaccaggagagccaatggtgtatgttccagttcaatctgggtcctaagacagg

SEQ ID NO: 296824 - DNA, 600 bp, Homo sapiens
gagggaatttggcagtaagaaaattaatcctctcgtctttcatagccagaagttgaagacatctaaaattaaaacatgggattagaaatataataattccaatctcattgaatgtttcgtagtttctgtagccttagaatactatgttaggatatttaggatactaagcaagatttgtggatatcatttctgttctcttctaggttgcttgattctttttctaatatgtatgcttttttgtttgtttacctttaagctctgttggacttaatgtatgtattatttatataagagcggtaaagtattaaaatttttaaatagaaatgtaacttctatgttagtctgggttctccagaaaaagcaaccaataggagataaatatacatattcatatatacatatacatatacacacacacactaacaggcataygtgtatgcatgtctatgtgtgtgtgcgtgaagggggggaagcgagatgtactatgaggaatttatacatgattatggaagccgagaagaccaagatctgcagtcagcaggctagagaccaggagagccaatggtgtatgttccagttcaatctgggtcctaagacagg

SEQ ID NO: 296825 - DNA, 476 bp, Homo sapiens
aaacccacacatatattagtagtgtatatcttgacaaggccaccaagaaaacagaatggtgaaacgatagtctcttcaataaatgatggtgagaaagttgactatccatatgcagaaaaaaaaaaactgggtccttatcttacactatttacaaaaatcaactyataattgattaaagacctaacctaagacttggaattataaacctactagaagaaaacatggagaagaaaactccttgataccggctttggcaatttttttttaatatcacaccaaaagctcaggcaacaaaatagaaaaaaaagtggagctacatcaaattaaaaagcttctgtagagcaaatgaaacaaacaacaaaataagaaagtagccaacatagtgagagaaaatatttgtgaaccctgtactagacaaggggttaatattccaaatatgtaaggaactcacactactcaacagcaaaacatcaaat

SEQ ID NO: 296826 - DNA, 632 bp, Homo sapiens
cgaagtgccatgcatctcccattcaaattctccagaaaatgacctaggttcctagctaggggtcagtatcacattgctaccctaggacaaggcagtggggcttagacttccaatgagcccctgattgccaccctgtttggtgtgagtgtccttttagagtcatgaggctcccatagtgtctctagggacactttgagagtgtctcccttcctgctggtgtcacagcatttccttctgtggctttcttccttctgctaaaccactcttcttcgtgcgacctgcctgtcaaacgtcagctggaattgcttgtctgctgattccccttttccatttgactcygaggatttatgcccctttattcctttaacttttttgaggggaggtcacaggaaggagaagatataaatttatgttctcagcccagtaaatttaacagaagtccacaagatttcattttgcagaaaggttgttgaatgattgggtttcagttgatagagcttatgggaaattgaggacagaacacctttaggtatgaggtttggagacttaagcttttatctctgctagaaaagtaaatcctacccttaatcggatacaattgcattagcattggcccacagatttaagcaagg

SEQ ID NO: 296827 - DNA, 597 bp, Homo sapiens
agccctttaggagaaatgaagctctcctttccaaatttataaacctcagtgttcttcagtgacagggtaatctggtacctcaatgtgaaggcacactatttcatcacagaaaaaaaatrcagtagaaaaatagagactagtctttatgttgaatgtataaaactgtttatatgtagacaagtaagaaaggtaggttacaaacagtaggtatgggatgaatcacttcagtcataaacaaacaaatgcacacaaacacatatgcccatagaataataaccatgaatttatttcctcaaacacctatctctatggaaggagtgttttagttttattgtggggctccttgtttcttctcattttctacagttcatattagtaatttgcagtcctactgacaaatattattaaatacaaatagatcaacccaagtgaatttgataactagtaatgaatcgagtcaggctttattgttcattctttcctgcctcactttacatgagccccttaggaaatgccaatgagagaatacacaagtggcatagaatatgcatgctgaaatgactccttttgtgaataagttaatcccagagaaggcaa

SEQ ID NO: 296828 - DNA, 651 bp, Homo sapiens
tccaatgagaagtagattatactctgctactccttttacacctatctttcatggtatctctgtaaaagaaatcacaacgtatctgttactgttgcatgtttataacagatgaggactatgagggccaatgtgggttgagtccatattgtttctaagtgtcaccttttttaaaacactacttacaagtttgcattgactagtgaagagcaacaatgcttctgtagttcaatgtgcaccagtgctaatacagcacttagtagcaggaccagttaatggaagagcatccaacaaaatcccacattttaagccaacctagagagctctctaaygtcattctccagagcagtgcatctcaaactacccatggtaaaggactcgtttttttagatttccaaactcctgcaaactgatatgtgaccttacttcacaggactaatgtgcaacacaactcccaccagatgtgatttgccatttgagtttgtcactcaaactgacccacagcttcttcaacaagaagagaccactaatcataagcttagatatggtggcaatactgaattgctactgaggtttatttttcttcctttttttttttttttttaaaagatagggtctcactctgttgcccagcctgagtacagtggtgtgatc

SEQ ID NO: 296829 - DNA, 651 bp, Homo sapiens
tccaatgagaagtagattatactctgctactccttttacacctatctttcatggtatctctgtaaaagaaatcacaacgtatctgttactgttgcatgtttataacagatgaggactatgagggccaatgtgggttgagtccatattgtttctaagtgtcaccttttttaaaacactacttacaagtttgcattgactagtgaagagcaacaatgcttctgtagttcaatgtgcaccagtgctaatacagcacttagtagcaggaccagttaatggaagagcatccaacaaaatcccacattttaagccaacctagagagctctctaatgtcattctccagagcagtgcatctcaaactacccatggtaaaggactcgtttttttagatttccaaactcctgcaaactgatatgtgaccttacttcacaggactaatgtgcaacacaactcccaccagatgtgatttgccatttgagtttgtcactcaaactgacccacagcttcttcaacaagaagagaccactaatcataagcttagatatggtggcaatactgaattgctactgaggtttatttttcttmctttttttttttttttttaaaagatagggtctcactctgttgcccagcctgagtacagtggtgtgatc

SEQ ID NO: 296830 - DNA, 518 bp, Homo sapiens
taccacacccaacgagagctcttttactaagtggaaatatcaggtagctttaggagctggcaaagataatttttagtagaaaatgaactttaaaactttcttttttctttttaagacacggtctcaggcactcacaggctggagagcagttgcgagattacagctctctgcagccttgacctccctgggctcaggcaatcctcccacctcagcctcctgagcagctgggactacaggtgtrtgccaccatgcctggctaatttttgtattttctttagagacggggtttcgccatattgcccaggctggtctcaaactcctggactcaagccatctgcccaccttggcctccctcccaaagtgttaggattacaaatgcgagccactgtgcccagccaaaaatcttttttttaaagttcaactactcctgactaaaagcgttaatgcacttacctttaatgtaaagagtattttctgaagctcaaattttaactaaacatgaaaagttgttgaatttt

SEQ ID NO: 296831 - DNA, 518 bp, Homo sapiens
taccacacccaacgagagctcttttactaagtggaaatatcaggtagctttaggagctggcaaagataatttttagtagaaaatgaactttaaaactttcttttttctttttaagacacggtctcaggcactcacaggctggagagcagttgcgagattacagctctctgcagccttgacctccctgggctcaggcaatcctcccacctcagcctcctgagcagctgggactacaggtgtatgccaccatgcctggctaatttttgtattttctttagagacggggtttcgccatattgcccaggctggtctcaaactcctggactcaagccatctgcccaccttggcctccctcccaaagtgttaggattacaaatgcgagccactgtgcccagccaaaamtcttttttttaaagttcaactactcctgactaaaagcgttaatgcacttacctttaatgtaaagagtattttctgaagctcaaattttaactaaacatgaaaagttgttgaatttt

SEQ ID NO: 296832 - DNA, 584 bp, Homo sapiens
aaactttctaaagtaactgctatacaacatagatatgtattgaaacttcaaattgtactccataaatacgtacaatttaaatgtgtcaatttgaaaaattaaaaaaaaaaataaagttactgctccaagggacctgtctacctattgccaggttttggctaaaacaaatactaaattctcctggcagcattgagctttctcaggcaggcacttcaagggaggytgaggtcattctagggatgcaaactttagctgctagaaacgatgctagtgtttgttcaagtctcttagtgtgagggactggacaaagtcattcatgctgagagtctgcagtttttataggtcaagcttcaggccttgtcaagaagaggactcagaagagctcaactagaggttagtcaagaggagagtctttgtcactaatcatcgggaaaatgcaaattagcactaagatgtcattacacatggagaggtgctaaaaatatgacagtgacaagtgttaacatttgaggattgctgtagggaatgtagtggtacaaatacttgggaaaacagtttggcagtttctgcataattaagcaata

SEQ ID NO: 296833 - DNA, 586 bp, Homo sapiens
caatgtgttacttgaaattataaattctcaccagaagtactggtgtggttttatatagttgctgccctgataccatacggttgtgaatgttttacagattttttatgtagtccaaagaaaacaaattacaacaattccctcctgcactgtcaattaggtgagcagatgtgactgctaagaggyaagttctttggggagccattgctgtgttactgaaattaaaattgcaccggatgttaggggctcccagtccaaaccccctaattacatttaccaaagcaaatcatttttaaaaaatgactgctgctttactggtaaagatttagaagatatcatctaacagtccattaaggatgaaggcaaaatgatcaaatgtcagttactatgatttttacacttccttaaaggtgtcaaggttctttggaggtgctcctattttaattttctcagttcggtgaaaatgaacttgcccccactaaggctggctttgctatttggctcatcctctgacatttttatagctcccacgtgtctgaatctttcagattcaatttaagtggagaagaaataaaataacttgaaaaca

SEQ ID NO: 296834 - DNA, 492 bp, Homo sapiens
ataaggaaagtgatagcatagactgttrctacattttaaaaaaataaaatatttggcattgtattaagaaatggaaaatagttggtgaagaaaacaatgctagatcatgaaaagatgaaaacccatgctgtacagtgagaaatcatttggcatgagatcaagtaaacaaggcatatagcaattatcagaattatgtcctgaaaagaattgtggctacacctattggcacatggagcttactgaaatctaataggaaataagcaatccatgtctttaagtgatttgtacggcaaaagtaccaacaatttggactgaaaatgattataactattctatatttaagacaaccatagactccaatcttctattgacagaaaacagactgataaagccaattgccccaataaaagccatagtccccaatattcattgcagatgtcactgaagacaataatcaaaaaaaggaagcatttcttagagatagaagctagg

SEQ ID NO: 296835 - DNA, 492 bp, Homo sapiens
ataaggaaagtgatagcatagactgttactacattttaaaaaaataaaatatttggcattgtattaagaaatggaaaatagttggtgaagaaaacaatgctagatcatgaaaagatgaaaacccatgctgtacagtgagaaatcatttgrcatgagatcaagtaaacaaggcatatagcaattatcagaattatgtcctgaaaagaattgtggctacacctattggcacatggagcttactgaaatctaataggaaataagcaatccatgtctttaagtgatttgtacggcaaaagtaccaacaatttggactgaaaatgattataactattctatatttaagacaaccatagactccaatcttctattgacagaaaacagactgataaagccaattgccccaataaaagccatagtccccaatattcattgcagatgtcactgaagacaataatcaaaaaaaggaagcatttcttagagatagaagctagg

SEQ ID NO: 296836 - DNA, 585 bp, Homo sapiens
ttacagctagtcagtggcagagccggggcttcagccaagtttgtctgaaatgaaagagcatgcccttggctccttgttctattgcctsttacatacgtttccctcctggaggtgggatattgggccatcactgattgatcccactagcatttcacaccattcaactcacatatttggctttttactctgcacttgtcagctgtattggttggggcagatcaaactgctgtaccaaataaacccaaaagcttaatgcctcaaacacaacagaagatgtcacacgtttagtacagtgcccaccccaataaatattagctatttattattacatacctggcacactttcctaaagatacctctgtgacacaaacattatcctcattgtacagaggagaaaactgaggtcccacagcaagtaaatggcagagccctggaatcccaaacccatgctcctaaccactaaacaatcccttctcatgttaagtgggggaaataattggcttctggcatgagagaactgagctctttacactctgtttaaatgttttccatgttaattagatctaaaatgtaactgtcagaatt

SEQ ID NO: 296837 - DNA, 440 bp, Homo sapiens
caagcttgacttgtagagccaataaaagccccttgggaaaactgacctcataccttgtctgcagtccttgtacagggttcctaacctgtggtgagtaaagaatgtcactttctaataggtccaggatccccaagttatcttgggaccttaagaagagaaaagtgcacccaactcataggtatctaagggtacaagaccacggctaggctcagcttcaaaaagtcttatctgagattccttatsgaatagaattccattagagccaattttaaaagcctatgtgaaaatgattattcttgctgctctttatgcaaataatcaggccaagtataagactaaagtttattttgcaaacaactcagttctaccatgatttgcttaaaaataagaactagaaaagcaaaaattatgctttaaaacttatcatacacttgtcattg

SEQ ID NO: 296838 - DNA, 456 bp, Homo sapiens
caaccagtgatctatggctgcagctcagaagaaacagaaaggatgggtaacgtaaaaatctggatcaaaaccctaaatctgggcaattatcctgcaaatcatgccagttgatggggataaatggggtgcccataacccagaggcttcttttctgggaaaataagaccaagggagctaaccaaagccaagccccatgcacccaagtcttaccaggcataactacagccccagataggtgtgtcagcaggcttaggatttttgagctgtcctttacccccttrtttctttttgatccatgtcttctaataacccagtttgcctcttctcaccttcagaccatcaaactccaactggtcatgcaaatagaaccccggacaatggctccctcttactggggatgcttaggtaggcatctgagagagatctgactgctgttctcccaaaacaatgcctcct

SEQ ID NO: 296839 - DNA, 1138 bp, Homo sapiens
attaacccaccaggttcttgaatctcagcacctcctctgttgactccacaaagataagggtgtatttatgaactgagccttccttatggaccagacatcacattagatactatctatgcactggggcaggggtgtctttctgcggagtgtggttagggaaggtctctcagaaaaggtgacccgtgagcaggaatctgaaggagaaaactgcacagtacctctgcactacagtttcacacatttcacggatgagcaagctgaggtctggggagatcaagcaatttgctcaagatggcagaactagagmgaaaaaggtgaaattcaaatccaaacctgtctgacttcaaaaccaataatcttgccacgacaaaaaaagatgtgaacataaaatgattcccagcaaaacaggcatgttgaaaagatgctaacacatatatgtgacttgagactcttggaaagataataggttacctttttcttttagtttctaatgcaccaaggctgcttttagctcagaaaaatttgtctcttaccagccaagtataagagggactattcagagcgaccaaagacatcaacagccaaaagaawtacctttttcttttagtttctaatgcaccaaggctgcttttagctcagaaaaatttgtctcttaccagccaagtataagagggactattcagagcgaccaaagacatcaacagccaaaagaaagctggaaaagctgctcttctctagcaaattggctctggttcttctaatatacacataaacagaatgacaaaaaaggaagaatttagacaaatatttatacatatggtgggtgaggacacctggcagagcaggtgaatcagctccagaatgagatgttgcctgcagatctaactaggaggaaaagtgacacatattgcagttaaacttaatgcaaatctgttctccagtttatccctcaaactcaataaaatcaaggaatccctttgttttctttttatgtgcacacggagattttacaattaggtactcgtatgagttgactctccactctgcacatactaatttatgagawcagaatttcacatttcagcatctctctcagacttgggatggcacctatatcatcccagaataaaattcagcc

SEQ ID NO: 296840 - DNA, 547 bp, Homo sapiens
tacctttttcttttagtttctaatgcaccaaggctgcttttagctcagaaaaatttgtctcttaccagccaagtataagagggactattcagagcgaccaaagacatcaacagccaaaagaaagctggaaaagctgctcttctctagcaaattggctctggttcttctaatatacacataaacagaatgacaaaaaaggaagaatttagacaaatatttatacatatggtgggtgaggacacctggcagagcaggtgaatcagctccagaatgagatgttgcctgcagatctaactaggaggaaaagtgacacatattgcagttaaacttaatgcaaatctgttctccagtttatccctcaaactcaataaaatcaaggaatccctttgttttctttttatgtgcacacggagattttacaattaggtactcgtatgagttgactctccactctgcacatactaatttatgagatcagaatttcacatttcmgcatctctctcagacttgggatggcacctatatcatcccagaataaaattcagcc

SEQ ID NO: 296841 - DNA, 547 bp, Homo sapiens
tacctttttcttttagtttctaatgcaccaaggctgcttttagctcagaaaaatttgtctcttaccagccaagtataagagggactattcagagcgaccaaagacatcaacagccaaaagaaagctggaaaagctgctcttctctagcaaattggctctggttcttctaatatacacataaacagaatgacaaaaaaggaagaatttagacaaatatttatacatatggtgggtgaggacacctggcagagcaggtgaatcagctccagaatgagatgttgcctgcagatctaactaggaggaaaagtgacacatattgcagttaaacttaatgcaaatctgttctccagtttatccctcaaactcaataaaatcaaggaatccctttgttttctttttatgtgcacacggagattttacaattaggtactcgtatgagttgactctccactctgcacatactaatttatgagatcagaatttcacatttcascatctctctcagacttgggatggcacctatatcatcccagaataaaattcagcc

SEQ ID NO: 296842 - DNA, 1799 bp, Homo sapiens
tatggctattttgacacgccgtatcacaaacaagggttctcacctaaatgatcactgttttcagtaaccttagacctagaaagctttccagccaagaagaaaagttgagtgagttgtcatgaggtcaaataaaatatcccccatcactactactatcagccaaaaataagtgtgacacatagaaataaatatagctaatcattcacatactattttagtgttacattgaagattttgcaagttattaaattactatgaatagcataatttgctagataagttmttctagttgcctagctcaaggtataaaaggatgaaactttggtattaatatatctgtgtgtgcacacagaaacaagtattgtgatgcatacattttaaaaattattgttgtacctacctttcactacaatagctgtattggcacaacacagttaataattttcttacctttaaattctggtttgattattttgtactacttatttgctctacaatattttttctagcaatgatttgcatagcaagcatgcactcatgagatgtgcagctgaagttatgataacataacttatgttatgttgggtaggagtgtcatatggaaacattttttttcttccaggtataaacttagcgaagcttawtatggctattttgacacgccgtatcacaaacaagggttctcacctaaatgatcactgttttcagtaaccttagacctagaaagctttccagccaagaagaaaagttgagtgagttgtcatgaggtcaaataaaatatcccccatcactactactatcagccaaaaataagtgtgacacatagaaataaatatagctaatcattcacatactattttagtgttacattgaagattttgcaagttattaaattactatgaatagcataatttgctagataagttcttctagttgcctagctcaaggtataaaaggatgaaactttggtattaatatatctgtgtgtgcacacagaaacaagtattgtgatgcatacattttaaaaattattgttgwacctacctttcactacaatagctgtattggcacaacacagttaataattttcttacctttaaattctggtttgattattttgtactacttatttgctctacaatattttttctagcaatgatttgcatagcaagcatgcactcatgagatgtgcagctgaagttatgataacataacttatgttatgttgggtaggagtgtcatatggaaacattttttttcttccaggtataaacttagcgaagcttawttgtcctgcttctttcatttgatataattattctgagatcctttcatgttggtatatttatctctttttattgcagagtaacatttcatcatatataccacaatattacttatccttgatgggttatggattatttcccactttggctattataaataaaggtgctatgaatatttgaatacaagtctttgaattattttatactatgttgtggatatctttggggcaaatacatagaaatagaattggtgagtaatttggaaagtgtgtgattaatttttagaaaaccactaatcttttgaaaagtggttgcaawtttttacattcccatgggaactttacaagagttctagttgtggcatagacttgacaaaacttctacggtaagcctttttaattttaggcactctgataggtgtatggaggtatcccattctggctttaatttgtactttgctaatggctaatggtgttgagaatctattaaggtgctcgtttgcccattaggtat

SEQ ID NO: 296843 - DNA, 511 bp, Homo sapiens
ttgtcctgcttctttcatttgatataattattctgagatcctttcatgttggtatatttatctctttttattgcagagtaacatttcatcatatataccacaatattacttatccttgatgggttatggattatttcccactttggctattataaataaaggtgctatgaatatttgaatacaagtctttgaattattttatactatgttgtggatatctttggggcaaatacatagaaatagaattggtgagtaatttggaaagtgtgtgattaatttttagaaaaccactaatcttttgaaaagtggttgcaaatttttacattcccatgggaastttacaagagttctagttgtggcatagacttgacaaaacttctacggtaagcctttttaattttaggcactctgataggtgtatggaggtatcccattctggctttaatttgtactttgctaatggctaatggtgttgagaatctattaaggtgctcgtttgcccattaggtat

SEQ ID NO: 296844 - DNA, 571 bp, Homo sapiens
gcaccatggcactccagccttgttgacagagtgagactctgtctcacaaaaaaaaaaaaaaaaaaaaaaagacttttgttacatacactgacatcatctccaaaagatttcttctgatttttaaattgttagaacaatttccttagagatcatttaggttttatgtttctcttaragtgatgttatatttttctaggaatatttacgttgcatctatgctctccaatttatccatataaacttgttcataataacttcttatattcaaatgtctgcaacaaagagatgtgatttttctgatagcagtcctttgcaactcattaagacttgttttacagtctaatacgtatttaatttccacaggtgttcagtatttccatgagaggacagcatattctacagtcattgggtatagtattttcatatatgcccattggatgaagtttttttatttgtgctgtttaaattgtttttatacatagcagttttttaaacatcaaatctcccaataaaaagatgaatgagtttattattccctatggtacatggaacatatgttatagaatcattt

SEQ ID NO: 296845 - DNA, 529 bp, Homo sapiens
gacatcccttgcatcacaaacaaaaatggatcatatatgataaagctagtaagtatataaagaaaaacagacaaaaaccctataatcttggcttaggtgaagayttcttaaataggacacaaaaagcacaacccctcaaaatgatgaaaataatattatcattattattaaaatgactttaaaattaaaactttttctcttttgaagatgaagggatgaaaacaaaaaggaggtagaaaaatcatcaaagatggtggattagaggctgattaaagctagtgtatatataacaaaaaaatttttttaaacctataatattgcattaggtcaaggtttcttaaatagggcaaaaacaaaacaaaacaaaaaacaaaaaaacccacaaccctaagaatgttttctttttaaaaaatgaaggtaagtaaacaaaaagagagagagaacatcaccaaagaaggtggattagaggcttttagcatacctcagccacttggaaatagcaaaatactacataaagatcaagtttgta

SEQ ID NO: 296846 - DNA, 589 bp, Homo sapiens
aatcttggcttaggtgaagatttcttaaataggacacaaaaagcacaacccctcraaatgatgaaaataatattatcattattattaaaatgactttaaaattaaaactttttctcttttgaagatgaagggatgaaaacaaaaaggaggtagaaaaatcatcaaagatggtggattagaggctgattaaagctagtgtatatataacaaaaaaatttttttaaacctataatattgcattaggtcaaggtttcttaaatagggcaaaaacaaaacaaaacaaaaaacaaaaaaacccacaaccctaagaatgttttctttttaaaaaatgaaggtaagtaaacaaaaagagagagagaacatcaccaaagaaggtggattagaggcttttagcatacctcagccacttggaaatagcaaaatactacataaagatcaagtttgtaagctttaattcaagaagacagaagtcactggaatcataaaggagaccccacatcccaggaaggcgattgctaacaaaaaagatcctgtgatgccatccaactgataaaagtaagtgaagccccagtacatgagaaaggcaaag

SEQ ID NO: 296847 - DNA, 589 bp, Homo sapiens
aatcttggcttaggtgaagatttcttaaataggacacaaaaagcacaacccctcaaaatgatgaaaataatattatcattattattaaaatgactttaaaattaaaactttttctcttttgaagatgaagggatgaaaacaaaaaggaggtagaaaaatcatcaaagatggtggattagaggctgattaaagctagtgtatatataacaaaaaaatttttttaaacctataatattgcattaggtcaaggtttctyaaatagggcaaaaacaaaacaaaacaaaaaacaaaaaaacccacaaccctaagaatgttttctttttaaaaaatgaaggtaagtaaacaaaaagagagagagaacatcaccaaagaaggtggattagaggcttttagcatacctcagccacttggaaatagcaaaatactacataaagatcaagtttgtaagctttaattcaagaagacagaagtcactggaatcataaaggagaccccacatcccaggaaggcgattgctaacaaaaaagatcctgtgatgccatccaactgataaaagtaagtgaagccccagtacatgagaaaggcaaag

SEQ ID NO: 296848 - DNA, 589 bp, Homo sapiens
aatcttggcttaggtgaagatttcttaaataggacacaaaaagcacaacccctcaaaatgatgaaaataatattatcattattattaaaatgactttaaaattaaaactttttctcttttgaagatgaagggatgaaaacaaaaaggaggtagaaaaatcatcaaagatggtggattagaggctgattaaagctagtgtatatataacaaaaaaatttttttaaacctataatattgcattaggtcaaggtttcttaaatagggcaaaaacaaaacaaaacaaaaaacaaaaaaacccacaaccctaagaatgttttctttttaaaaaatgaaggtaagtaaacaaaaagagagagagaacatcaccaaagaaggtggattagasgcttttagcatacctcagccacttggaaatagcaaaatactacataaagatcaagtttgtaagctttaattcaagaagacagaagtcactggaatcataaaggagaccccacatcccaggaaggcgattgctaacaaaaaagatcctgtgatgccatccaactgataaaagtaagtgaagccccagtacatgagaaaggcaaag

SEQ ID NO: 296849 - DNA, 644 bp, Homo sapiens
tctaatttgaaagtcaactaagaagaagttcatttctttctcttctggaaataaaagtgatttagaatctgaatgtgcttgtaattttaggtgttctgtgacagaaaaataaagagatagccaaaaacaaagaacaacaataataacaaccccacagatcattgaggtcattttagacaaaccctaaactgaaatgccacctgctgtcttggatcctggagatgttctgtccctcatgaaggagaaagaaaagttgccccaaatggggactctttaccttcagcatcttgaaactccttcaccatttgaagtattaaaatatttaatcaacatcaaatgctgctgcccctatttatacaagtgctttattatcctgtacattataccacaacctgcctggctcttaatgtgacctgaagagctagtsggcatttattacaaatgcgaggcagtaagcttctggctgagcaattaatcactgacaccaaggaatttcttctcttcaggtggggaacccatccaaaaactaagaaaaataatcgggctaattaattcttatctgcaaagagcaattagataaatgacctcaaaaaagacttgtcacccctagtgagacactcactttctaaatagaatgtgtcgag

SEQ ID NO: 296850 - DNA, 553 bp, Homo sapiens
gcactttgttactcccaagtcccagagctaacttgtggagaggtttggagacactgtgaggaaaagacaccaggaaaagctgcagatattttcycagaccccggggccagcagcaggatgccattttaatccaggtacatacaaagtcagtcattcttgtggtggcccagtagtgtggccatgcaggcattttagtcttgggtcagagatcaaaacacctgctctggagtgcatcaggggccttcgcagctagaactgtggaaggcacctcagcagaaggagatggaattgtgcagccccccaccaaaagcctggagttggaggaaagctgccacagctgcagtttctttggggtagcaagacttgcagccaggaccagcttggtgacatggtactgtatgtgctgggtgctccagccagctcccctgagatcatagtgccacagggtcctctccactttagcctcaggcagacatccagacatttagaacacttgtttgcctggaccagcaggctgagtcatctcatccttcacagacataaactgtgatgc

SEQ ID NO: 296851 - DNA, 571 bp, Homo sapiens
ttcatggctggtttctatatttgcttctttttttcttttttactttttttttacttttattttagattcagggagtgcatgtgcagatttgttgcctgcatctrttgcgtgttgctgatgtttgagttacaattgatcccgccacccaggtactgattgtagtacccaatagtccatttctgaacccttgccttcctcccttccttccctagtttctattgttgccctctttatgctcatgagtacccaatgtttagctcccacttataagtgagaacatgcagtatttgattttctgttcctgtgtaaattagcaaaggataatggcttccagctccatctatgttgctgcaaaggacgtgatttcacttttttatgaccgtatagtattccatgctgtatatgtaccacattttctttatccagtctgtcattgatgagaatctagttgattccatgcccttgctatttgtaaatagtgctacaatgaacatatgagtgtgtatgtctttttggtagaatgatttattgtcttttggatatatacccagtgatgagattgctgggttga

SEQ ID NO: 296852 - DNA, 571 bp, Homo sapiens
ttcatggctggtttctatatttgcttctttttttcttttttactttttttttacttttattttagattcagggagtgcatgtgcagatttgttgcctgcatctattgcgtgttgctgatgtttgagttacaattgatcccgccacccaggtactgattgtagtacccaatagtccatttctgaacccttgccttcctcccttccttccctagtttctattgttgccctctttatgctcatgagtacccaatgtttagctcccacttataagtgagaacatgcagtatttgattttctgttcctgtgtaaattagcaaaggataatggcttccagctccatctatgttgctgcaaaggacgtgatttcacttttttatgaccgtatagtattccatgctgtatatgtaccacattttctttatccagtytgtcattgatgagaatctagttgattccatgcccttgctatttgtaaatagtgctacaatgaacatatgagtgtgtatgtctttttggtagaatgatttattgtcttttggatatatacccagtgatgagattgctgggttga

SEQ ID NO: 296853 - DNA, 571 bp, Homo sapiens
ttcatggctggtttctatatttgcttctttttttcttttttactttttttttacttttattttagattcagggagtgcatgtgcagatttgttgcctgcatctattgcgtgttgctgatgtttgagttacaattgatcccgccacccaggtactgattgtagtacccaatagtccatttctgaacccttgccttcctcccttccttccctagtttctattgttgccctctttatgctcatgagtacccaatgtttagctcccacttataagtgagaacatgcagtatttgattttctgttcctgtgtaaattagcaaaggataatggcttccagctccatctatgttgctgcaaaggacgtgatttcacttttttatgaccgtatagtattccatgctgtatatgtaccacattttctttatccagtctgtcattgatgagaatctagttgattccatgccmttgctatttgtaaatagtgctacaatgaacatatgagtgtgtatgtctttttggtagaatgatttattgtcttttggatatatacccagtgatgagattgctgggttga

SEQ ID NO: 296854 - DNA, 530 bp, Homo sapiens
gtaccccatctgcctctggaaggctgtcaccccagctgaccactgagccaacggggagtatggccagttctcctgtgggactggggcacatctgttctgaaaaccyttctgcctgctggtccatctcaaggcccatgcccagccaccctgtaggagcgggtgcatagagcagcctcacagcccagtctggacgcatagctccaccagagtactttttgggtaaccagggaacacattggttttcccagtgcaattggagcctgattccaagtcacaggacatcctgttgcccacaggattgtgattcatagctcaggagtactgagcccaaatctgtggccagcatttgagcagaggaggagcctctcagagcactgaaggggtgagatgtgcaggttcctgggccaggatgttcatggagcatgcctccctccacagggctggtccacaaagggtgtggcctgtctccctgccacagcctcagccctagggaaccctgcagcctgggacttctcacaaaagaaatgcag

SEQ ID NO: 296855 - DNA, 543 bp, Homo sapiens
atttccactcaataaaaccttgcactcattctccaagcctaaatgtaatctgattcttcaggtacaccaaggcaagaaatgctgggatacagaaagccctctgtccttgtgacaaggtagaggggctaactgagctggttaacacaagccacctatagatggcaaactaaaagagcaccctgtaacacacgcccactggggcttgaggagctgtaaatattcaccccagacactgccgtggggtcagaaccccacagcctgcccatctgtatgctcccctagaggtttgagcagtggagcactgaagaagcgagtcacacccccatcrcacgccctgcgaggaggacaagggaacctctcccatttcagtatccttgacagcgtattggacttagcatcagaaagtccgagtttcagtattagggctcctaacacatccttgtgattttggataagtcgtttagactctctgggtagcagtttttgattcataaagcaggaaacatactatctgtcttgcctgctttataggtttgttggaaa

SEQ ID NO: 296856 - DNA, 583 bp, Homo sapiens
tgacaccctaacaggcggctggggactggaatcagtccagggacctttgaataacaccaacatgaatcttagccagatacccttagctgccccaggacctccagccattcccacataatggctagagctacatacagggagactgaattggaacaaagctaacattctcaacacccaagagtgatgggggtgggttaacaaagtcctcctgggcaagcatgtcctctgaagccacaccattcgctcttaactggctracagaggctcagtgcatcatctgcctgcagaaaatagtctgagagcaagaagacttggaaactaaagtcaaagagttttaggtccacacttattcacccttctgcagatcccaaacaagcccccagtaatgacacaggatgttttcgggtgccacttcaccaaccagtaatttccatggcctgtggtgttccagcctgggcttcgctatgctccaggctcactgctggacttggcctgcccacgtggcctggcagggtgcgctcagctcacactaccagtctggataccatgctcacttcaggatccacacccagcccatggctgg

SEQ ID NO: 296857 - DNA, 636 bp, Homo sapiens
gcagagtaaggaaaccctaccacagagtgttgcaaaagaataagcatctgacagcttcagtgagtcagctttctgtgtgatactaacctgagtgacttaagcagccagatttcaaaaagaaatagatttgcctctaattattctaaatgcatctgtttaaattggctataatacagcaaatrtcatgtagctttaatggtacacattaggacatgtaactttatgactggaaataggtatgttattaatttaaaaatccagtttcccatatcccctttgatacagtaatgggctcttggagtgagagactcatattccaaaagatccacgtgcaatccaactacaggttagaaatcaaataatacgcagccactttcatttttcaaaaatctcaaacagggcatatataggttgttactttatgatgacttgctaagatgcattgtttataattctttagtttctgttttcagatttcagtgtcttcctttgccaagtttcaaaaggaaaaaaataaattaatcctctggagctgaaacagaaacatttggtctcctgtaatcctcagttcttaacctaatgtggcagctcatagggaaactgtcagatctgcaatcctaattgctataagttgcc

SEQ ID NO: 296858 - DNA, 636 bp, Homo sapiens
gcagagtaaggaaaccctaccacagagtgttgcaaaagaataagcatctgacagcttcagtgagtcagctttctgtgtgatactaacctgagtgacttaagcagccagatttcaaaaagaaatagatttgcctctaattattctaaatgcatctgtttaaattggctataatacagcaaatgtcatgtagctttaatggtacacattaggacatgtaactttatgactggaaataggtaygttattaatttaaaaatccagtttcccatatcccctttgatacagtaatgggctcttggagtgagagactcatattccaaaagatccacgtgcaatccaactacaggttagaaatcaaataatacgcagccactttcatttttcaaaaatctcaaacagggcatatataggttgttactttatgatgacttgctaagatgcattgtttataattctttagtttctgttttcagatttcagtgtcttcctttgccaagtttcaaaaggaaaaaaataaattaatcctctggagctgaaacagaaacatttggtctcctgtaatcctcagttcttaacctaatgtggcagctcatagggaaactgtcagatctgcaatcctaattgctataagttgcc

SEQ ID NO: 296859 - DNA, 636 bp, Homo sapiens
gcagagtaaggaaaccctaccacagagtgttgcaaaagaataagcatctgacagcttcagtgagtcagctttctgtgtgatactaacctgagtgacttaagcagccagatttcaaaaagaaatagatttgcctctaattattctaaatgcatctgtttaaattggctataatacagcaaatgtcatgtagctttaatggtacacattaggacatgtaactttatgactggaaataggtatgttattaatttaaaaatccagtttcccatatcccctttgatacagtaatgggctcttggagtgagagactcatattccaaaagatccacgtgcaatccaactacaggttagaaatcaaataatacgcagccactttcatttttcaaaaatctcaaacagggcatatataggttgttactttatgatgacttgctaagatgcattgtttataattctttagtttctgttttcagatttcagtgtcttcctttgccaagtttmaaaaggaaaaaaataaattaatcctctggagctgaaacagaaacatttggtctcctgtaatcctcagttcttaacctaatgtggcagctcatagggaaactgtcagatctgcaatcctaattgctataagttgcc

SEQ ID NO: 296860 - DNA, 509 bp, Homo sapiens
ctatacagacagcaattgtttttctatgttccagcaatgagtaagtggaatttgaaattaaaaacacaatagcacttacactggcaccaaaaaaatgcaacaggtataagtctaacaaaagatgtacaagatccatatgaggaaaaataccaaactctgatgaaaaaaattgaagaactaaataaacgtagagatattgcatgttcatggataggaaggctaaatattgtcaagatatctgttctttccaacttgatctatagattcaatgcatccccaataaaaatgctagcaagctattttgcagatgtagacaaaccaattytaaagtttatatggagaggcaaaagactcagaatagtcaaaacaatattaaaggagaagaacaaaactggaggacttacaatacctcagtttgcaactaattctaaagctacaataatcaagacaatagtgttgaaaaatagacaaacagatcaatggaacagaacagagagctcaaaagttga

SEQ ID NO: 296861 - DNA, 1125 bp, Homo sapiens
cagcataaatgttgccttttacaggccatgactggatgagcagaaactgctgmagtctctctcaccaaaatctctctcacacacgcccccctgctaccatcatacttcctgggctatagaagctgaacctgttccaagatgtaacaattagataaaatgatgaactcctcaaaagtggcccggattcccagtgttggaagactatagaagaccactgggattgagtaaccttgaaagaagttcactcagacaagctgttcgcacatctgagtgatcccagtgcaagtcaaactgtggggtggcaggtataacaacaacaggcaaaaagagcagaaggaaatgggttcaccagaaagtgcaactcctgcagcaaggaaatgaccaggaaacccacgatagtgccctattaaagaaagagcctgccatgacagagagcccatgacagccaagtaagctctacaaacagtaccagctaagtacatgagactctttttgccttctaggtcttaataggtcttaatcctctgtcccatctagccctggaagatccagaggcacatcawcagcataaatgttgccttttacaggccatgactggatgagcagaaactgctgaagtctctctcaccaaaatctctctcacacacgcccccctgctaccatcatacttcctgggctatagaagctgaacctgttccaagatgtaacaattagataaaatgatgaactcctcaaaagtggcccggattcccagtgttggaagactatagaagaccactgggattgagtaaccttgaaagaagttcactcagacaagctgttcgcacatctgagtgatcccagtgcaagtcaaactgtggggtggcaggtataacwacaacaggcaaaaagagcagaaggaaatgggttcaccagaaagtgcaactcctgcagcaaggaaatgaccaggaaacccacgatagtgccctattaaagaaagagcctgccatgacagagagcccatgacagccaagtaagctctacaaacagtaccagctaagtacatgagactctttttgccttctaggtcttaataggtcttaatcctctgtcccatctagccctggaagatccagaggcacatca

SEQ ID NO: 296862 - DNA, 1211 bp, Homo sapiens
aagtgcaactcctgcagcaaggaaatgaccaggaaacccacgatagtgccctattaaagaaagagcctgccatgacagagagcccatgacagccaagtaagctctacaaacagtaccagctaagtacatgagactctttttgccttctaggtcttaataggtcttaatcctctgtcccatctagccctggaagatccagaggcacatcaccaccatgacatctttcatgtcagaaggatatggaacaagaaagagaggagagactcaccacacctcttgcccaaccttctaggtcaggcccaaaagaaagggaaaagctttaaacttgatatcacaagtttagtttagaccagactgcgcttttaatacctgaaaaaaatgaaactgaaagtgaccataaaatatcatgaggaaaaaggaaggaatatctaacagagaggtttgcaaaastggtaggagaaaaatgaagctattttctaattttatactgcggagtctagcccattaggttgttgatccagttgggattttactttctaatatctttttagtgaacaaagcaggtaatattaggcattgctcaagtgaaaaatatattgcgwtcgtgccttgggtaacatgagcttaaagggagcwgcaatacagcatcttaggggtataatcattaaaagaaaaaaatatgttgtattacttcattttctgttgcttagcatatgaaaaactgggtaatttatacagaaaatgaatttatttcttagttattccttacctgaaaaatccaaggtcaaggggccatatctggtgagaaccttcttgctggtgggcattttctgaggaatcccaaggccacacagggcatcgcatggtgagggggccgagtgtgctatctcagggctctttttctcttgtgaagccaccagttccattcccatgataacccattaaaacccactacccattaatccactaatccattcaggagggccaagacctcatgatccaattacctcccaaagacctcatctctcagttggaggtgaggtaatcaccactatattggagattaaatttcagcatgagttttggaagggaaactattcaaaccataaaaggtgtttattggaaaaagcagaattattaaatcaaaaataaaatttgagagtaagcatataaaatgttctcatacagcagatactagaaacaaaaacaag

SEQ ID NO: 296863 - DNA, 515 bp, Homo sapiens
cctattcttatgagtctggtgcctaggaagaaagatgactgaaataaactccaggaaggaatccccagtgccacttaagaaccaactgagtttgaaaagatacttaatctctttgagcctgaacataataagacagtggatcttgcaagggtgttgggattaaacaatatctatctgtgtctgatccagtgcttgttgaaayaggtgctcaataaatgctattaatacttaatatcaatcgactccaaagtgtattgtacatcataattaacctgaggatattgttagaattcacatgctcaggccccatccccagaggttctgattttctatgccaggaatgtttgtctagcatctgcattttgtagaagacaccaggtggttctgatctacctaatccatggatcacataggacaaacgctgttgcccaggggttggcactgaacttccccaaatattctgaaacagacacactggttccttaacctccagaaaggtggcaacactgggacat

SEQ ID NO: 296864 - DNA, 617 bp, Homo sapiens
agacacattgctaaatgaataaaatataagtcccttttcatctgatactgttatatagaatgagatttgacatgtttaaggaaacatctttgctagtgttaaaggctcattcctcaaaaatgaaacacaatggacagttttaagagtttgaaatattcattttttaaaatatcaggcacataaatcaatttgaacatgtttgaatttatatactcttttggtttggagggaaataatttgtaccaggactatgtccaagtcctacatatagcctcaatactggtttgaaatgccttaacaggcagggtctcacaacctcagccccaccacccaggtactgcaggtgttgtcacgagtagctgttggaattacaaaaatatttttccggaaactacagaatgtcaagttatgcctttgaaattgtggcatcagatacaatacatagcaggaattctcaaataaaaaatgtcrtattcatttcattcacagaagtttattaaacacttccatgggccaggcacattttatataggaaacatgcccatagtcattaaaataatttatttggaagaaagattttaaaggaggaaaatctcatacttcagttgttttaaaat

SEQ ID NO: 296865 - DNA, 617 bp, Homo sapiens
agacacattgctaaatgaataaaatataagtcccttttcatctgatactgttatatagaatgagatttgacatgtttaaggaaacatctttgctagtgttaaaggctcattcctcaaaaatgaaacacaatggacagttttaagagtttgaaatattcattttttaaaatatcaggcacataaatcaatttgaacatgtttgaatttatatactcttttggtttggagggaaataatttgtaccaggactatgtccaagtcctacatatagcctcaatactggtttgaaatgccttaacaggcagggtctcacaacctcagccccaccacccaggtactgcaggtgttgtcacgagtagctgttggaattacaaaaatatttttccggaaactacagaatgtcaagttatgcctttgaaattgtggcatcagatacaatacatagcaggaattctcaaataaaaaatgtcgtattcatttcattcacagaagtttattaaacacttccatgggccaggcacattttatataggaaacatgcccatagtcattaaaataatttattkggaagaaagattttaaaggaggaaaatctcatacttcagttgttttaaaat

SEQ ID NO: 296866 - DNA, 425 bp, Homo sapiens
taatcaaatgcccaaaggctgatttttaaagaatagaaaattttttaaaatcacatcatcatctcaatagatgcagaaaaagcatgtgacaaaatcaagcattcctttaagattcagaccctcagcaaaattggcatagaaaagacataccttaaggtgataaaagccatctatgacaaacccacagccaacattacactgaacatagaaaagttgaaagcattccccctgagaactggaacaagacaaggatgcccactgtcaccacttctattcaacaytgtactagaagtcctggccagagcacccagacaagagaaataaataaagggcacccatactggtaaagaagaagtcaaactgttgctttgctgatggtatgatcatatacttagaaaaccctaaaatctcattccaaaagctcc

SEQ ID NO: 296867 - DNA, 425 bp, Homo sapiens
taatcaaatgcccaaaggctgatttttaaagaatagaaaattttttaaaatcacatcatcatctcaatagatgcagaaaaagcatgtgacaaaatcaagcattcctttaagattcagaccctcagcaaaattggcatagaaaagacataccttaaggtgataaaagccatctatgacaaacccacagccaacattacactgaacatagaaaagttgaaagcattccccctgagaactggaacaagacaaggatgcccactgtcaccacttctattcaacactgtactagaagtcctggccagagcacccagacaagagaaataaataaagggcacccatactggtaaagaagaagtcaaactgtygctttgctgatggtatgatcatatacttagaaaaccctaaaatctcattccaaaagctcc

SEQ ID NO: 296868 - DNA, 613 bp, Homo sapiens
ggttaaaataaagacgaacaaaaggctttttcccattttaattactctaaaagaaaattgacttttgaaagcaactgtaatacacatttattgtgtatgtagaggacatataaaagtaaaatctatagcaacatgagctcaaagtctgggaggtggagttggaaatatactgttgtaaagttcttacactattcacgaagaggtagactacatgaatgtagactgaaattaattagagatatatatatggcaaatgctagccaatgagatgaaaaacattttagaaagccaatagtggaaataatataatgaaacaaataataagtcaatagtggaaataaaatggaaatgaaaaatacttaattcaatatataataaaagaaaaagagaagatagagtagaaaacagcaagattgtatgttttaatccaaccataatggtaattatattacaattatattgaaatggtcaatacaaactaattataaaataaagatagatttaaaaagaaaaagaacaagatgcaaatgcattcaattgacaataagytcattttaattctaatgacaaaaaggtaaaaataagtatatggggaaagatatactatgcaaaa

SEQ ID NO: 296869 - DNA, 1027 bp, Homo sapiens
atgggatatcctacatggtcattaactgctgtttgcacaaacacatcactcaacgtgacttccastggatctaccttgtatgcagagtagaaagctgcttgtatggagtgacttctctgttgcctgaccaaccacatgcaaaaataacctttccactcactgatactgaattctaccaaagaagacaagccatccaatcaacaactctcatagtaaagcacatggcaaacattataactgtattactgtattataaaactgtattattaaagtctactcttacagaatactcgaggaaattaaaaaatgacaaattctcatttatgtacacaccacttatatcaggttcttctggagaatatattctgtttgacggaagaggaaggaagagaggataaattatgtttattggagaactacctaacccagactttgtactaggtgctttttgaaaattatctctttaatttctgcaaccacaataagccacagataaccctgtctttgcttcagwatgggatatcctacatggtcattaactgctgtttgcacaaacacatcactcaacgtgacttccactggatctaccttgtatgcagagtagaaagctgcttgtatggagtgacttctctgttgcctgaccwaccacatgcaaaaataacctttccactcactgatactgaattctaccaaagaagacaagccatccaatcaacaactctcatagtaaagcacatggcaaacattataactgtattactgtattataaaactgtattattaaagtctactcttacagaatactcgaggaaattaaaaaatgacaaattctcatttatgtacacaccacttatatcaggttcttctggagaatatattctgtttgacggaagaggaaggaagagaggataaattatgtttattggagaactacctaacccagactttgtactaggtgctttttgaaaattatctctttaatttctgcaaccacaataagccacagataaccctgtctttgcttcag

SEQ ID NO: 296870 - DNA, 601 bp, Homo sapiens
tgtcgtctaagtagtttttaaaaactttattggaggatgtcgtattttaggaagtatttgaataatagagagtgttttcaaactggaagaccaaagaaggacataaagaaaaaaatggttccaagaacagatgtaacttgaaaaaagcatctgaagctggagtcgaattatcaggcaaggactgtaaatatatttatctaagacaagtggtctttgatgaagatgaggaatttataaattaatagagataaaaaattagttaaaacactctaaacccttagtactttgaataagctatatgcattccttttagttttgttatgcatarcattgaaaagaatggaatgaaaggagacatttgaatgtatttaagtatcatgaaatgatacttgtagtgcttctaaaatagataattgttttatagtataagtgacagaaaacaaactccccaaatagaagcatgaaatccatttgaaatagctaaatcagccaaaatttgtattactaacttgaaatacgttcaatcattttgtcaagcacatattctctttattttcttgacttggatatttgaaggaagatgtaatccatatggttttta

SEQ ID NO: 296871 - DNA, 494 bp, Homo sapiens
ggctcagtctttagatcagagtttctcaatgagaggcagaggtacaataggggatctgtcacattgctttttcccttgccaggtattttagaatcttgagattgaaaagagtagggcatataaatttttcaaattatattgagcattttaatagattttcgaaaacaaaaatattcttataacaatacagactaaaaattggtagaacctcaattgttggcaatattcatagattttatgatttcaactagggggtagaagacataacatgtccaggaggccattccatttttattttcactagccatggacatacatggacttactttttttaagaaacacaactttagatggcttttaaatcagctstaaacattctcatgctctgtgacttacggtttaggcactacaccttgattcctgaatatactattggattataactgagctgttttgcttttcaccctgagttttacaggaatttgagaatgctg

SEQ ID NO: 296872 - DNA, 525 bp, Homo sapiens
taatccatatggtttttattcttttacacttgaggtattaaaatggggctcaaactaagtattcacatatcaagagccagttatttctcttaaaacatctmttttcttggtgaaagtaattcacactatattatagcccaaagttgttaattcatacatcaactcctagtccagaatacacatattctcttaacatatcagaagatgtttcaagttttacaaacagccatccagcacaattaaagataagttcttgccttgtctgtcactattaatgaccactacaagccatgacaaaaatcataaacaatcattcctatttagctctgaatttcaaggctcagtacattttattatatatatcctaggatatttcagatttagaagttcctttatgcctcttattcagtttttataattttatttttatcaaatatagaggatgctgccatatgctctaaaaggcaaacaaaataaaaaacaacacaaaaccaaaacacataactatttatgagtataaagcct

SEQ ID NO: 296873 - DNA, 506 bp, Homo sapiens
ttggtccttagaacagaaaacatattcttcttgtactctgtttagtgagttcagttaaggctattagtttctgagctgttttataagccaggagtcggcccactgctgtctcccttgactatacattcaataaatagaatgtgattatacaaaactaaattttccagaaccattattgaaagtgccataggaacgtctaattaataagaatactatagaggaataatcaggatattacgaattaaatcctgtccctccaaaagatacattcaagtactaagtcctggtacctgtgaatgtaacctaatttggaaatacagcctttgcaaaggtatttcgtttaaggctgtactaaattgggggaagatgctaatccactaygactagtgtctttatcaaaggaaaaaatttgtacatagacgtggaaacagggacacagaagaaagaacattatgcgaagacagaagtggagatcggggttgatgctgccacaggtgaaggaacac

SEQ ID NO: 296874 - DNA, 545 bp, Homo sapiens
agatggtgtacagatgacaaataagcatctggaaagatgctcaacatcattaaycgttagggaaatccaaattaataccacagtataattacaaagctctcagaatggctaaaataaaaaatagttgactacaccaaatgctggtgagaatgtggaaaaattggatcactcatatgtttctggtggtaagataaaatagcctggacactgtggaaaactgttttgcagtttcttaaaaagctaagcatgcaaacaccatacaactgcactcctgggcatttgtcccagaaaaattaaaatattcacaaagaaacatgtacatgaatgtttatagcagtttcattcataatagccacatacagaaaaaaaaccatgtgtttcttaatgggtgaataaaccatggtacatctataccttggactactacttgtcaataaaaaacaaacaattgctaaataaaacaacctgagaaaatctccagagaactatactgagtgaaggaagaaaaatccccaaagattacacactgtatgtcatttatataa

SEQ ID NO: 296875 - DNA, 597 bp, Homo sapiens
aaaatcatgaagaataattttgctgcagatggtgtacagatgacaaataagcatctggaaagatgctcaacatcattaatcgttagggaaatccaaattaataccacagtataattacaaagctctcagaatggctaaaataaaaaatagttgactacaccaaatgctggtgagaatgtggaaaaattggatcactcatatgtttctggtggtaagataaaatagcctggacactgtggaaaactgttttgcagtttcttaaaaagctaagcatgcaaacaccatacaactgcactcctgggcatttgtcccagaaaaattaaaatattcacaaagaaacatgtacatgaatgtttatagcagtttcattcataatagccacatacagaaaaaaaaccatgtgtttcttaatgggtgaataaaccatggtacatctataccttggamtactacttgtcaataaaaaacaaacaattgctaaataaaacaacctgagaaaatctccagagaactatactgagtgaaggaagaaaaatccccaaagattacacactgtatgtcatttatataacattcttgaaatgacacaatcacaga

SEQ ID NO: 296876 - DNA, 453 bp, Homo sapiens
aaagtcatcctggagttggggatccagcctggaattgctgggcatcagggacagtgaagttgtgcaagcatgtacattgtctaacgcatgctcgaagttatatttatcttcaggacatccgatttgactcacgttcattggtcctatatttttatcggttttaattaactatgtcctttagcaatccttacctctatctttcccttttgcatgtgtcagggtaatctcaagtataagtcacccagaraggaagaaaatattttttgtttgatcttatgtttgtggctactaatagcagtattaaaaattaaagtacaacaaaatatataagattacagaatcctaggaaaataaaataggaatgtgaaaacagatctaatgaggtattaaacctctagcagagagcccccaatctcttatcatgtttctttaagtcattagaattgtcctgca

SEQ ID NO: 296877 - DNA, 555 bp, Homo sapiens
tctggcctgggaaaatgtctacagcttttcccaatgtctttctctcacagtatgtccaagcttctccccattttagctccagagcttaggagaaacaaaatgctctccctggcctgggttgctcagatccttaggggaaaggtgagtcatagagggaggctctctgcctctctcacatactagggcttcagtcaattttatcagctgtacctatataggggccatttgcctatattctcctcctcaggaggtagtgtccttcatgattctggtagatttcctttttccttcctgaattaaagtkcacaaagttgatatgtgtgcactgtctttctatttccaagtggctgaggaatgctaaaagccccccatccaccaacttggggaaaaaaccccaaaggacgaaagctgactttaacagacttggatgcaatttctattcctcatttagcagcaaggtaggaatctctggacaagaaattatgagcggattggtagctccatgtggtgtgctttctgaagcatgaaggaaaattctgccttaattacacattt

SEQ ID NO: 296878 - DNA, 615 bp, Homo sapiens
gctacctaaacagccttgaagcaatgggcataatgactcatggtcatgtaacattcttttcagacacatatcagcatatttgttattacattactgcccaaacacccacagaatcccgggaggtaaaataggattagtgttgaagaatttagtcccacccatttctcttttattcaaatcaaacttttgaaatgatcactgttgagggttcatttttgcttctaataagggatatggtaaagatgtgtgatcaggctggtctcagtctttggagtcaagccatattctggaactatattatttggaaaccacacctaaatcatagcaaggaagtcatccgatatgaaccacatgatccaacttgctggtgtgaaggtgctggcattacatagcacagcacagaatgggaaacaagaagatatcctataaamtgtccattagctattcaacatagataagtggtttgcttacagctgaagctggtaatttatgtcgaataaaatggtcagattcacctgtctcagccataaatctcgtgccatacatcctggctaatgaccagattcttctgcgtgatttcctaaaccgacctgtagatagcataaagtacacgta

SEQ ID NO: 296879 - DNA, 479 bp, Homo sapiens
gaataccaggatttgtggatcactgggagccatgtgaaaagctgcctatcatgatggtgaacaacataaacatgaagattatgtttgttaggggagacagatataaaatacaaatacaatatccattacaaattttgataaatactatggattagaaatataatgtttgatgacaaattacaatactggtacttgatttgagttggagtatttcaaatgaagccatctcttacaaaataatatttaatttcagatttgaaggatgagtggaactactgagatgtagagcaggaaaacagacgagtctctttggaagagtaaatagatgacacataggccctgagatgggtgagcacctatgcatggtcactccatgtagcktgggttctcagagcatggtggctagtttctgagatagagtgctgcttcctggagcactccaagaaaagcagaagctgccaggtcaaggtatatagcag

SEQ ID NO: 296880 - DNA, 1164 bp, Homo sapiens
agagtgtagattttgaagtcatatttctcaaagccacattttttatctgtaaaatgaaataattttggaacctatcttataaggttattttaaagactaaatgagttcatacctgtgaagtacttggcatattacttggtatttgattgttagctctgttggtcttaattgtgccctttaatttgggtggctgatttgcaaatgtggaacttcccagttctctaggctcacatttcttctttctttctttctttctttcttttctttcttttttgagayggagtcttgctctgtcgctcaggctgcagtcgcccaggctgcagttcagtggtgtgatcttggctcactgcaagctccacctcctgggttcacgccattctcctgcctcagcctcccgagtagctgggactacaggcacccaccaccacgcctggctaattttttgtatttttagtagagacggggtttcaccatgttagccaggatggtctcgatctcctgacctcatgatctgcccacctcggcctcccaaagtgctgggattacaagcatgagccaccgtgcccggccttggctcacatttctataagtaggtccagttttawgatttaatgaattatactcttacattggtaagaaaatatcataatttgtctaggcatagcctttattttatgatccttttwtacctcattcccagacatgagtctcattcacaaaatatcctattttcaggcaaccattttggcaattcttcgactcatcagatacttcagtgtccttggagcatgtctgtcttttttggaaagagggaatttcctcacatttcccacattcatttgattgtgctggtgtcagtgataaatacagtagaacagtggttcccaaatgtcagtgtgcttgctatcacctcgagagctcattaaaacagattgctgggcaccagcgtcagaatctccactaggtctttggtggaatgctgcaatttgcgtttccaggtgatgctggtaatgattagggcccacgtttgagaactacctcattcgaggatttccatctttttatcaaagtacaggtgagagagattggcaattatttaaggaagagtgatttgccttaggtcagaaacccaagaatttactctgcatatataaaaccccagca

SEQ ID NO: 296881 - DNA, 613 bp, Homo sapiens
gatataaatattcccatcatggcctatttcaagctayttatgtggcgtcagtcaacacagagttgtgaagagatgcagacaactggctctcttgagagggcttcagcataccacgggggtcatggaaaacaaaaccaccccagatatctcctgtgtcatttcatttatttcaggctcaaaatgtattgatgtaaggaaatgagcctaacaagtatgacgtggctactgtgtgccagacccatttaaaatgatctaattttataatgttatgtataccactgaattgtacatttaaagggtgaattttatggtatgtgaattatatctcaatttaaacaaatgttctgtataattcctcatcacacaattgactatatttcaggaaagatttttttccatattaaacaaaaatccttttaagttcgcccaaatgaaagattgcagacagtgaaaagtcattatctttttcatcatgggcactgttgttacctgaatgcttacctaaattgcatgctgtagcagtttatagtgttcacctctggggcacaagtaacaagagggtaacttggaagtttctcctggtagcttaatgttagggtgcagtctgtaaacc

SEQ ID NO: 296882 - DNA, 449 bp, Homo sapiens
agagtaccaaaattgtataaaatgtggggttcttttatttccagcaagagcaagagccatactgagtyaacccctaggatagggatgtacagcagccagtggcttcatatccaaatatgttaatagcagtaaattatctggggtgcttcactgtaacattggctttagaggaagagtgcttttctgacaagtgataaggaggaaagaacatttccacaattgcctcctcgagtagacacacctttagcctccacaatctatcaggccattgtagaagacagtaaaattgtagaggccgtcactgttactattattatttttagtctgccaagagagcactcccactgtccttcctctagtcacaagcccaccatctctggctgtgtatgggtaccaggtgtagctactaacactccttcatccgcgggacgtaagttgagcatgtgata

SEQ ID NO: 296883 - DNA, 549 bp, Homo sapiens
aaggtggagacgtggatctggcagagagacaagggcagaacatcacagtgttaaatgaagagccaataaagcttcactttattagtagttaactagaaattgaagctgggtaccaatttagttgtgagataatgggctttycttgcatttactttcttatctatataatgggagtaacaaggaatttttcagaacataaaaggatataaatacatttttaaaatgccttgaaagatggggacaccgttcaatacaaataaacactgggattcgtgtagtctatcaaacctttctttctcaatggtgacgacagacttgatattgaaatgaattctgcctctgccatgtactcgagttataagctaacatgtgtcatgtttcccaaacacttcccagtgcctttatttatttttgtcttatatttccataaatgcaagctttgtggtacaattggataaacacagaattctaagtcagaattgcatgtgttgagacatagaatgaaggcaagtcaacgatcctgttttttcaatgttttcttccctcatt

SEQ ID NO: 296884 - DNA, 613 bp, Homo sapiens
gatataaatattcccatcatggcctatttcaagctatttatgtggcgtcagtcaacacagagttgtgaagagatgcagacaactggctctcttgagagggcttcagcataccacgggggtcatggaaaacaaaaccaccccagatatctcctgtgtcatttcatttatttcaggctcaaaatgtattgatgtaaggaaatgagcctaacaagtatgacgtggctactgtgtgccagacccatttaaaatgatctaattttataatgttatgtataccactgaattgtacatttaaagggtgaattttatggtatgtgaattatatctcaatttaaacaaatgttctgtataattcctcatcayacaattgactatatttcaggaaagatttttttccatattaaacaaaaatccttttaagttcgcccaaatgaaagattgcagacagtgaaaagtcattatctttttcatcatgggcactgttgttacctgaatgcttacctaaattgcatgctgtagcagtttatagtgttcacctctggggcacaagtaacaagagggtaacttggaagtttctcctggtagcttaatgttagggtgcagtctgtaaacc

SEQ ID NO: 296885 - DNA, 613 bp, Homo sapiens
gatataaatattcccatcatggcctatttcaagctatttatgtggcgtcagtcaacacagagttgtgaagagatgcagacaactggctctcttgagagggcttcagcataccacgggggtcatggaaaacaaaaccaccccagatatctcctgtgtcatttcatttatttcaggctcaaaatgtattgatgtaaggaaatgagcctaacaagtatgacgtggctactgtgtgccagacccatttaaaatgatctaattttataatgttatgtataccactgaattgtacatttaaagggtgaattttatggtatgtgaattatatctcaatttaaacaaatgttctgtataattcctcatcacacaattgactatatttcaggaaagatttttttccatattaaamaaaaatccttttaagttcgcccaaatgaaagattgcagacagtgaaaagtcattatctttttcatcatgggcactgttgttacctgaatgcttacctaaattgcatgctgtagcagtttatagtgttcacctctggggcacaagtaacaagagggtaacttggaagtttctcctggtagcttaatgttagggtgcagtctgtaaacc

SEQ ID NO: 296886 - DNA, 613 bp, Homo sapiens
gatataaatattcccatcatggcctatttcaagctatttatgtggcgtcagtcaacacagagttgtgaagagatgcagacaactggctctcttgagagggcttcagcataccacgggggtcatggaaaacaaaaccaccccagatatctcctgtgtcatttcatttatttcaggctcaaaatgtattgatgtaaggaaatgagcctaacaagtatgacgtggctactgtgtgccagacccatttaaaatgatctaattttataatgttatgtataccactgaattgtacatttaaagggtgaattttatggtatgtgaattatatctcaatttaaacaaatgttctgtataattcctcatcacacaattgactatatttcaggaaagatttttttccatattaaacaaaaatccttttaagttcgcccaaatgaaagattgcagacagtgaaaagtcattatctttttcatcatgkgcactgttgttacctgaatgcttacctaaattgcatgctgtagcagtttatagtgttcacctctggggcacaagtaacaagagggtaacttggaagtttctcctggtagcttaatgttagggtgcagtctgtaaacc

SEQ ID NO: 296887 - DNA, 576 bp, Homo sapiens
tcccacttataagtgagaacatgcagtatttgattttcagtttgagctatttcacttaggataatggcctccagctctatccatgttgctgcaaaggacatgatttcrtgatttttcatggctgcatagttttccatgttgcctatataccacattttctttatccaatccaccactgatggacacttaggctgattccatgattttgctatcaagaatagtgctgcaataaacatatgggtgcaggtgtctttaaaaatatagaatgatttcttttcctttgagtagatagccagcagtggggttgctgggtcaaatgggagttctattagttctttgagaaattggcatactgttttccacaggtgttgtactgatttacattcctatcaacagtgtataagggttgccttttccctgcactcacaggttttcttctggtaaggataaactggaatccaagatggaaagcaaggtgcatttgactttgctttttcatacaattatttatgaagaaaatgatatgtatattgatgagctgcttttgtcttataatttagtgtcaaagaaatggat

SEQ ID NO: 296888 - DNA, 597 bp, Homo sapiens
attatatgtacacacatatatgtacatcatatatatttcaataatttcaggtaaagaatgatttttacatactcatctcatttttcttcagaattagaaaatgaattatatttgtgcttggggcaggatgttgtgtaaatttctgtgttatgtttatatatctaactaaaatatggtgttaccagattagttttgtaatttcaatccagttttttcaaaatgcccaagagatgtccgtttcaatcatgcaagaaactttttgttttaagtcagacaccaggatgaagttactgggtggcttgttaatttttaatgatcartagagttctatcacaagggagaataaatggagatggtaaaaagctttctcaattctgaaaaaaagcatagacatttctgtgctgctgtaattatttgcagatccttgtggaagcagggggaaagttccatgtgaagattatttcccaatgttgagtctgcaaatagttccagtcttaggtgtgagcattcagtttctggttgtgaagaatcatctacctgcacagaagcaagagattgctgattatttttccttcagcaattcatcgttgtgaagat

SEQ ID NO: 296889 - DNA, 618 bp, Homo sapiens
attaattatagactcctagaaagtaggtagtatacatttcctttctcaacacaggacatactagaaaattgcttttataagtgatctctttggcttttctgtttttccaattaattggttataaccataccacttaaatcttatctttctgagcaccatgaaaatgctcatgattgtaatacttttcataagcacatgtctaaaaatggtttgtatttgtatgttttttagaatatgatgttttaaaaatattttatgcagatatctttgtggtttttttatggataaactgtcatataccatagtcttattgttttcttgtggattaatgcagactggacagattgagactctgggtacattttttagaatagtttaaacatattatataacatattgaaactgtagaatatttttccagaactttaaggaaatttataattttactgcttggctctttgtccatcagattgttacttggttaaatgacttttgattaaacaaaatactaaggctaataaccttgtgtttcayccaagtaaaaatataaggatgagatgttttatgtgctctaaaataagctagttattttattgtctggctgatagtaccctgtta

SEQ ID NO: 296890 - DNA, 368 bp, Homo sapiens
tccatctagctcaagtgtgcagacctagtcaataaaatctcccaccttttcttatgaatactcccacatctgatgaaaaacaaaaacacaactactctacaactccttacacttgtgtattttaataatatcatgcttccaatcatccgactgtatgactattgttttattgagctcatatttcttagacaaatatgaaaccagaggagtcaaattgtstatccctagcagttctgactttcataatgtctagcatcagaggctagtttcttcttgaagtgtctgagaactgaaaagattatggttctgccttcaaccatgtaattccaaataaagatgattctaaattccagtgaatttctgatata

SEQ ID NO: 296891 - DNA, 657 bp, Homo sapiens
ttctctaatttgctcatggttattttgttagatccatctagctcaagtgtgcagacctagtcaataaaatctcccaccttttcttatgaatactcccacatctgatgaaaaacaaaaacacaactactctacaactccttacacttgtgtattttaataatatcatgcttccaatcatccgactgtatgactattgttttattgagctcatatttcttagacaaatatgaaaccagaggagtcaaattgtctatccctagcagttctgactttcataatgtctagcatcagaggctagtttcttcttgaagtgtctgagaactgaaaagattatggttctgccttcaaccatgtaattccaaataaagatgattctaaattccagtgaatttytgatatattacacaaaacttagatagacatttcctgaacatatgattagtttgtctgtggagtaatgtgtacttggctcatctctctgctctccattcctgctctgtctagtttaggtgactttttcctttttcctttactattcctgttataccaacactttaaatggccattctatcatgagatcaatcctaccaaagcacagctctcatgtttgagccagtgtgcaccatagttcttggcaagatcagatgtttaatgaat

SEQ ID NO: 296892 - DNA, 529 bp, Homo sapiens
gtaagttagttccaacttatgacattaactcttacaggccatgaggatgaaattagcatattactgaggtatgatgaaaaccagagttgaattttcatttcagctaaatgtagaatacaagtaatccaaatctttgaagtggcaaaaccagtgtgcatacatggaatttatgcatacttggaatgttggaaagtttgcatcagtatgccaagtaatcttgaggccttgtatagaccatcatcattttaccttctgttttccacttgtttcctaaattccagtgcctactgagagggttaaatgatttgccctgcctgggaaaaaaaggttacctaaccttaagtgtcacctaccataccacttcaagctaaaccaccatcttctagtagcagcttctttgtcatttccacaatttaacagttacaaacamaagagtccagaagaagttcaagatataaaaagaattcaaccatttcaagtattaaaaaacatgggaacctaccttgcaacacaaatgagaaaagatgaa

SEQ ID NO: 296893 - DNA, 1029 bp, Homo sapiens
aattatgatagttaaaaatataactttttaattagtataaacttccagtggtacatatgtgatcacaatatatgtggcaaactacatgcaacaaatcaatagaacaaaagaaaatctctttggattcagcattcagacaaaagcatagcatggtacctagaactacagttcactgtagaatcatggcatttggacacctcttttccattactgagttgcataaagtaatcaaactaaactgatagtctattctgaattaaatcatggaggaagataggaaataggaaagggaatgaagcaaatttggttcatggtattgtttttttttttttttttctkaactcagtcaatgagactgtatgttagcagagggtaattcagtccaatggctacagaatgccaatagaattggtttcttacacagtgggtacctttttaaggacacaacttgtataaacagttttgctctgctcatgcttaggaaagccaattgattatgtcttaattgtagtttwaattatgatagttaaaaatataactttttaattagtataaacttccagtggtacatatgtgatcacaatatatgtggcaaactacatgcaacaaatcaatagaacaaaagaaaatctctttggattcagcattcagacaaaagcatagcatggtacctagaactacagttcactgtagaatcatggcatttggacacctcttttccattactgagttgcataaagtaatcaaactaaactgatagtctattctgaattaaatcatggaggaagataggaaataggaaagggaatgaagcaaatttggttcatggtattgtttttttttttttttttcttaactcwgtcaatgagactgtatgttagcagagggtaattcagtccaatggctacagaatgccaatagaattggtttcttacacagtgggtacctttttaaggacacaacttgtataaacagttttgctctgctcatgcttaggaaagccaattgattatgtcttaattgtagttt

SEQ ID NO: 296894 - DNA, 526 bp, Homo sapiens
cacttgatgatatcagcaaggtaggatcaatggtttgattagaatgtcatactacatgtagccttatatcatgacaataaaacatgtatcaagtaaataataatacatcacacgagtatttcgagacctctcccttcagcaaaacctatgattatttgattattttagttaatttttaggtaatcactctcttgttcattcttcatttattcagtatatatttaatggacatrtgttgcaggtactacagcactaaaaagaataaataagacaaatgatccaatttaatggatctcttaaccaacctccaaaggatttttttttttttgagatggagtctcgctgtgtcacccaggctggagtgcagtggtgccatctcggctcactgcaagctccgcctcccgggttcacgccattcttctgcctcagcctcctgagtagctgggaccacaggtacccgccaccacgctcggctaatttgtttgtatttttagtggagacggggtttcatggtgttagccaggat

SEQ ID NO: 296895 - DNA, 497 bp, Homo sapiens
ccattttggggtatacatgcaaataaacattgaaagcaagatctcaaaracatatgtttacactgatatttatagcagcattattcagagtaactataatggataaccaagtgtccatcagtggatgaatggataaacaaaatgtagtatataaatacaataaaatattattgaaccttataaaggaaggaaattccaaaaatgtaacaacatggatgagccttgaggacattatgctaaataaaataagccagtctcaaaatggcaaatactgtatgattccactgacatgaaatacttagtcaaaatcacagagacataaagtagaatgatggtttccaagggctagaggaagtgaggaacggcagttattatctaatgagtatagagtttcagttttacaagttgaaaaaagttatggagacatatgtgtgaaagaaaaataaaaatttgggacctcaatacaataagccaaaaggaaaagaaataagctgaaa

SEQ ID NO: 296896 - DNA, 559 bp, Homo sapiens
atttggcatagttgctcatttcttcctccctaaagtctccttcacttggcttctaggatgtccctgatttcctcctacctccctggccatcacattttaatgccttttgtggttctttcccatctaaccaattgcaaatattggaggactgcttctcttctctatctacatataagctactcaaatacacattgacaactctaaaatttttatctacaacttggaccattcttctgaatgtcagactgtatacccaatctgctactcagtatctccctytggatggctaacagatatctccaacttcctaaattgggctacagctttctaccacccaacctggttctcccatgttcttccctatttgaagttccaattgcttagattgaaagctttagggttattcttgatttttctgctccttcttttcccgaatggcacccatatccaatccagaatccatatacttccatctcatccatcactacatcatggtccaagtcatcaaatatcacttggattattgcaaattccccttaacagtatttttgcatctgct

SEQ ID NO: 296897 - DNA, 441 bp, Homo sapiens
aacatacttaaaaattcctacgccaattaataaattataattgttcataatcatcatgaaacatctatactaggtcagaaaatattgagagctataaagaaaatatgccatagctactagatactggattcttattgaaaatggaagtatgcagggtatttgatacacagttaatattaaaattaagtgctctaactcactgaattagcctttcagtgttttacctcctccctgtatttctttaccaaaattaaactttccttatcagttgagtaattggtccttcttcaatattaattcaatatgcgtgtataaggccaatactgcccttagacctgggcaagggggggattgcaccccaggtgtgactagtgctttagagcagcagtccccaacctttttggcaccggggatcagcyttgtggaagacaattttttcac

SEQ ID NO: 296898 - DNA, 596 bp, Homo sapiens
tttttaattttaggtgggtgagtctttttgcttttcagttttgtcaataatttctagtgttatttcattgcagtcagggagtattgtttataatagtttatgttacctaatttactaacattttccttctaacctactgtataatcatttttttgtgagtgtttcatgagcacttgagaaaaaatatatagccttgattatcagagtgtaaagatcagtatatagctattaggttcttccttgttgattatgattattcacttttttgcctttttgattttttttgcactgactgagaaaggtgtgttcattactgtaggctgccttaactagaataatggaattgtagtggtttaattatcttttargtaagctatatatgtttgtgtcataaacataagaccatccaatgtctctcactcattggccttcagacaaaataaataatttctgtttctcttctctgttaccatttgatttatattgctagtataaacaaagtgcacttatacaaccataataatgtaatgtgatagtttctgtgttgtacattagaatacaggctttttaacaacagcattattgaggtataattg

SEQ ID NO: 296899 - DNA, 562 bp, Homo sapiens
tattcacttttttgcctttttgattttttttgcactgactgagaaaggtgtgttcattactgtaggctgccttaactagaataatggaattgtagtggtttaattatcttttaggtaagctatatatgtttgtgtcataaacataagaccatccaatgtctctcactcattggccttcagacaaaataaataatttctgtttctcttctctgttaccatttgatttatattgctagtataaacaaagtgcacttatacaaccataataatgtaatgtgatagtttctgtgttgtacattagaatacrggctttttaacaacagcattattgaggtataattgccatgcaataaattttacatatttagaatgtacaatttgatcttttgacagatgtatatattcatgaacccatcatcaagacaataaaaatatctgtaatttcacaaaattttttcttgaccattgtaatcccactccgttagctcccctcctcacacactgatctgctttttgtcactatgagttagtttgcattttctagaattttataaaaatgaat

SEQ ID NO: 296900 - DNA, 521 bp, Homo sapiens
atctgcgtggctttttggacatttctcagaagggctgagagagggaaagactccagttataaatatttccatgaaggtaattactggtagaaattcaggcaagatgtacagatgcaagtgttttacaagcaacttcattttttgatctgcgctcattgtgtgttattttgtttcatgtcactccacattctgggctactcagagagaaatacccatcaggtttatggggtaagctgattttgatttgagtatccactgtgccattttatagtaygtgtcactgaagaggctgctgcagcatttgagcctcagttttctcagaaaatgaggagcaaaattacctcataagggacttgagtattgaagtagactctaaaataaaaggaatgacacagtgcctggtacagtaggaggtaccaacaaaaatctccctgtaactagtgtcaccactctggaaattttaaagcagcttgtcatttactcataattttcagaagacaataataaggaaaccagaattc

SEQ ID NO: 296901 - DNA, 525 bp, Homo sapiens
gactctgttatttgatattatatcacactggacatgccccagtattctcaactacaaaattgaattaataaaagatatctcatggttttgctgaaaggatgtggtggcatgaagaacgtacagctcctgacattgcatacagctcaacacgtgttagatctattccccttgttccctgacacttacccaaaagaaatagaggtggattatattaaatgatagattgagagattggttgatgggtattgaacacaatggcaattcaatgaaaaggaaaatagcatgctgcccatcagggattatatatgtgctataaccaagcacccaattaagakagccattaggacagtatttgaggtagataaataggctctggtattgtccttaaggttataacatctaggagtcaacttgaacttcacattagcctgatcctgaatccttttcaacatcaccaccatcatgatgaacatcatctcctatatcatcactgcccagatctaaaggattttaacccactgcaaa

SEQ ID NO: 296902 - DNA, 530 bp, Homo sapiens
ctctaaatggaagtgcagagaagtgtagttcttccatgtgtctgaaggggggagagatggaaatatctagtgaacagcatttcccatgtgccaaagtttgtcctaaacaacatatgtatatatgkgcatgtgtacatatacgctcatatgtatatacacatagatacatagattcatttatatatataaaatagatatgcacatatgtaatctgaataatacaaaaatatttgtgtagtagtttcagagatcttggtgtctgtcatcttagtaggtgccagcattatcctttcttagctgtgtgtcctgggcatgtaaatgagctctttgtttctccatttttcatttgtgaaatttcctacctcatgggtccaggataaatgtataacacatatgacattatttcataaacgatcaataagtgctagttagaattatcggcaagaaggcttaaacaccttctcttaataaaaacaaataaatggaaacagatcaaaatgaaactttctactctggtcagaaaaggtaac

SEQ ID NO: 296903 - DNA, 631 bp, Homo sapiens
gtgctgaaatacgtctcagggtctcctattaaatcaattagcaagcaggagggaagacagaggcctgcaaagttcctgacagcctttcttaacaaagagcctgtcattcttgagtctgaatcctcctccttgtcttyattttttgggcacagaaactgttgggagtttggagaaatgaatctttttataggagagaaaaaaaaaaaagaagccagctgtcatttggttcattagaaagtctctgtgaatggtgatttgttcttagaccaagatttaaacccgtatctcttctatggtctgccatgaagatggtgggattcctcatcagaagattatttgtgcgtttctttcctggcaatgaataatttgtgtcaaaccatctaccttctttattctgggcctcttaatgtttaggatcctcaacaagtatggtttacaaacatgccttaacatccacataacagtgtagtgtttgcaaagaccattcaggttgattctcacagtaataagatgggtgactagataatattatccctattttataaatgacgaaatgaactaaggatgtgacttgaccttagccactcaaagtggcagtagagggattaaaatgcaggtatgtaaggagttt

SEQ ID NO: 296904 - DNA, 631 bp, Homo sapiens
gtgctgaaatacgtctcagggtctcctattaaatcaattagcaagcaggagggaagacagaggcctgcaaagttcctgacagcctttcttaacaaagagcctgtcattcttgagtctgaatcctcctccttgtcttcattttttgggcacagaaactgttgggagtttggagaaatgaatctttttataggagagaaaaaaaaaaaagaagccagctgtcatttggttcattagaaagtctctgtgaatggtgatttgttcttagaccaagatttaaacccgtatctcttctatggtctgccatgaagatggtgggattcctcatcaraagattatttgtgcgtttctttcctggcaatgaataatttgtgtcaaaccatctaccttctttattctgggcctcttaatgtttaggatcctcaacaagtatggtttacaaacatgccttaacatccacataacagtgtagtgtttgcaaagaccattcaggttgattctcacagtaataagatgggtgactagataatattatccctattttataaatgacgaaatgaactaaggatgtgacttgaccttagccactcaaagtggcagtagagggattaaaatgcaggtatgtaaggagttt

SEQ ID NO: 296905 - DNA, 631 bp, Homo sapiens
gtgctgaaatacgtctcagggtctcctattaaatcaattagcaagcaggagggaagacagaggcctgcaaagttcctgacagcctttcttaacaaagagcctgtcattcttgagtctgaatcctcctccttgtcttcattttttgggcacagaaactgttgggagtttggagaaatgaatctttttataggagagaaaaaaaaaaaagaagccagctgtcatttggttcattagaaagtctctgtgaatggtgatttgttcttagaccaagatttaaacccgtatctcttctatggtctgccatgaagatggtgggattcctcatcagaakattatttgtgcgtttctttcctggcaatgaataatttgtgtcaaaccatctaccttctttattctgggcctcttaatgtttaggatcctcaacaagtatggtttacaaacatgccttaacatccacataacagtgtagtgtttgcaaagaccattcaggttgattctcacagtaataagatgggtgactagataatattatccctattttataaatgacgaaatgaactaaggatgtgacttgaccttagccactcaaagtggcagtagagggattaaaatgcaggtatgtaaggagttt

SEQ ID NO: 296906 - DNA, 608 bp, Homo sapiens
ctttaacaaatgctgatgccttggtacccagagattgtgacaaaacccaagaggttacaacctgagtatcagagttttgatcctaacgttcaatcaggtttgggaatcactacaccagatatttactacattgcagcttgggtaaacgggccatggacttctaggaattattgcagtggaacgatcaagacttragtcccaaagcatctgacatcaaagctcatattctttccaattggctcaggaataatctctagcgcctgtcaggcacccttttatggccaacatcccttttgattctcaggagcactgtgcaaggtgagcagggcaagatcattgttattgttatgttacagttaagaaagtctcagtgtttttacttttcagaaagaggtactggatttaaatcctattcttttcattctttgcccctgaacttcaaacaccatgctgttaattagacaatgctctgaggcctgaccatgagcataataaaaccacagtctgatcttcgtggctttgggaagaggtgggaggataggcatctgttttctttgttctctgggagcacgtggctggtggtaatcagatgaggtagactgggtata

SEQ ID NO: 296907 - DNA, 547 bp, Homo sapiens
aaggcaccatttttttcagcttttgccctaggacagagaagcacttgtttttcagagatttgagcaattcagcttctacttctgttgagaaaaataaagaagaattgactgtactaaactcagcatacagaactagattttaaaaatagtaatagaatatcatgacatttgtctaatcatccccaatataaaacacactgcaaaatcagatgatctcctgtctgtatttcctgtaaaaaaatctgttgcataccttggataattttagaaacagaattagctttcaatttgttggcacattactgaggagaaaaaagtaaagaaaaatgagacattcaaattaaattagcccccatattgatattcaacctcactgtcragcacatagtgtccgtacacccacagatccaagagttaatcaaattcccaataataaaacatgtttcttcaggttgaactgattattcattagaaaataaaagtgggtggcagaaccacccagaatcctaaatacacttatgcaaatagacatataccagctgccaca

SEQ ID NO: 296908 - DNA, 547 bp, Homo sapiens
aaggcaccatttttttcagcttttgccctaggacagagaagcacttgtttttcagagatttgagcaattcagcttctacttctgttgagaaaaataaagaagaattgactgtactaaactcagcatacagaactagattttaaaaatagtaatagaatatcatgacatttgtctaatcatccccaatataaaacacactgcaaaatcagatgatctcctgtctgtatttcctgtaaaaaaatctgttgcataccttggataattttagaaacagaattagctttcaatttgttggcacattactgaggagaaaaaagtaaagaaaaatgagacattcaaattaaattagcccccatattgatattcaacctcactgtcgagcacatagtgtccgtacacccacagatccaagagttaatcaaattyccaataataaaacatgtttcttcaggttgaactgattattcattagaaaataaaagtgggtggcagaaccacccagaatcctaaatacacttatgcaaatagacatataccagctgccaca

SEQ ID NO: 296909 - DNA, 1085 bp, Homo sapiens
agggatgccctctttcaccactcgtattcaacatagtgttggaagttctggccagggcaatcaggcaggagaaggaaataaagggtattgaattaggaaaagaggaagtcaaattgtccctgtttgcagatgacatgattgtatatctagaaaaccccatmgtctcagcccaaaatctccttaagctgataagcaacttcagcaaagtctcaggatacaaaatcaatgtgagacccctcctttcatggcttactaaagtgaggcagggagggtaaggaaaaaaaaatatgaggtatcagaataaagtctcaaacacgtattttccatttgttcaacaaccacagcagaactaggatagccacatagttgaaggcagcaggaggttgtgggaaaagcacaggtttgaagtcagaattgtgatgagttctggatccaccatcactgggcaggagaccaaggacaagtgtaatagttagggtgctcctgacaacagaaccaatcagatatatacaggtgtagaaaaaaatagaagacttgttatgwagggatgccctctttcaccactcgtattcaacatagtgttggaagttctggccagggcaatcaggcaggagaaggaaataaagggtattgaattaggaaaagaggaagtcaaattgtccctgtttgcagatgacatgattgtatatctagaaaaccccatcgtctcagcccaaaatctccttaagctgataagcaacttcagcaaagtctcaggatacaaaatcaatgtgagacccctcctttcatggcttactaaagtgaggcagggagggtaaggaaaaaaaaatatgaggtatcagaataaagtctcaaacacgtattttccatttgttcaacaaccacagcagaactaggatagccacatagttgaaggcagcaggaggttgtgggaaaagcacaggtttgaagtcagaattgtgatgagttctggatccaccatcactgggcaggagaccaaggacaagtgtaatagttagggtgctcctgacaacwgaaccaatcagatatatacaggtgtagaaaaaaatagaagacttgttatg

SEQ ID NO: 296910 - DNA, 623 bp, Homo sapiens
atggaaacaagataggatgcaaaaatagaagtacagttaatgaagcatgaggaagccaggccatgctctcrggcttctgtgtgatgagaactctactgtttgcacgatacaggcagagtccagcccagcctgccaggaggggcattgctggggctctggaaaggtctccgatggctcatacagggagctaatgttgtcagccacttcatctcctgttgcctaccaagaccttgaggccacagagcaagaagatgctcctacaaagtcaagtaagggagaggcagggtgttttgcaaatctgactgtctctgagccttagagatccttcttcacaccctcccccaggcacttagcactggctttttgtttttaacatatcccaggataactagacatgggacagaagaactgatatagttggaagttccagttgacttgaatggattgacttttggctaaaaaccatgaaattagaagtgtcttttagaccctgactgccacttcaaaactatgtgatcttgggaaatgcccttcagctccctgagctccctgaaaacaacagtttttaaaatatgctatgtcctgcctatcttataagaatgtagtgaggatccggttaatgg

SEQ ID NO: 296911 - DNA, 622 bp, Homo sapiens
actcaattcatcaggctctgatgaggactgaaggtcttttgactaagagattgtcatggaagtcagaggaaaatcaatgactaaaaatgagagtgtgayctacttgtggcacaggtgtgtgacaccaaggaggtttccatcaggaaaggcgtggctagtgagaagttctctttttagatgttttgatgggaggagaaagagagtgagaagtgtcattcaatacataggaatggggggcccaagtggatatgtttgtttcaaaacaagaaaaacctgaatatttcctaaaactgatgagaaaatttctaacaagggagaaagtccaggcacagatgagagagagatagattggttttaagtgccacatgaagcttaaagacttgcattaaggttacaggtagaggtaacttttgttaccaaagttagctttggtaactaaaagggccaggagtgagggaagctgatgaacagaaacatttttggaggaggcaataaaagtttaactttctcatctcagagccttcatctactaacagaaggaaagatcaagcatttctgccagtagtgctttttgagtaagagattgtcatggaagtcaaaggaaaatcaatgactaggaatg

SEQ ID NO: 296912 - DNA, 575 bp, Homo sapiens
ttccacttagcttaagtatgcaatggagtatagtgtctgcctttattaattctaataactagtctcactgtcccaagcctactaaatatttgattatatgatccatctagtttctgttcctagaaccgtgagaagtggagtgagaggagagcattttgtttatcatttaactctcagagacaggaataggtgtatccttgtaagtgagaatgaaatcctgaaggcagggagtaggaaatatggtgtgattcagttcctcatcttgaagaatatctcctaagttggctctgaaaagctgtaggtgtaattctagccccttgataattagtattgccctatcagcagagggtggacattatgcaaaaaaaaaaaaaaaaaaaaaaaaaactggagaaaattaaattggatgtggagtgcctccttttcttaaaaaaacaactttattgaggtgttattgatagacaaagaactgcacatatttcatatataccatttgatragttttaacctttgcaaagactcatgataccattgccacaacctaggtcatcgatatgtccaacacatccctaagt

SEQ ID NO: 296913 - DNA, 552 bp, Homo sapiens
gaatgaacattttaaccatattatatcttccaatccatgaacataagcattctttttatttatttcagtctcttttcttttatcattgtcttgtaatattcaggttacaaatatttcgcttcctgggttaagtttattcctatttgattctttttgatgccattataaatgggattttcttaattcataggggttgatctgttgttagagtgtaaaaatacaactaacttttgtatattgattttgtatcctgcaattatactgaatttatttattagytcttgcagctttttagtagagtctttatggttttttatgcatatgttcttgtcatctgcaaacagggacatgttgaggtacactccttttctacctgatttattgagcattttttgtcataaaagggtgtcaaattctgttaaatactgcatctactgagagatcatgtgatttttttatcattcattctgttaatctagtgtatcacatttattgatctgcatttgttgaaacatgcttgcatctcagagatatttattaagctgttgaatt

SEQ ID NO: 296914 - DNA, 611 bp, Homo sapiens
ttataccttttaaactgtgaccttgtaaacttattcattaattcaagaagccatttggtagattccttgggatttttctacatagacgattatgacttccataaacaaagacaatttgatttctgccccttccccacaatttgtatgcttttcattttttgtaatcttactgtactaggtagattacatagtgtgatattaaatagcacatcccttattctcrtgtataggagaagaaaattatgcagtatttcaccgttaggtatgatattagttgtagaatgatattagttgtaaagctcatttggttgtgctggattattcactttatatattgttgaactcaacttactaatattttgttgagaattttgcatgaatgctcatgaaatgttttggtctgtatttttcttttcttgtaatcttttcatgcaggttcagtatcactatgtagctgccctcctagaatgagttggaatgtattccctcctattgtcttttctggaacaaattgtctgtaatagattctatttcttttctgatgtttggttgaatttaccagtaaaattatctggacctgaagttttgtgttgttgttgttgttgttagaa

SEQ ID NO: 296915 - DNA, 611 bp, Homo sapiens
ttataccttttaaactgtgaccttgtaaacttattcattaattcaagaagccatttggtagattccttgggatttttctacatagacgattatgacttccataaacaaagacaatttgatttctgccccttccccacaatttgtatgcttttcattttttgtaatcttactgtactaggtagattacatagtgtgatattaaatagcacatcccttattctcgtgtataggagaagaaaattatgcagtatttcaccgttaggtatgatattagttgtagaatgatattagttgtaaagctcatttggttgtgctggattattcactttatatattgttgaactcaacttactaatattttgttgagaattttgcatgaatgctcatgaaatgttttggtctgtatttttcttttcttgtaatcttttcatgcaggttcagtatcactatgtagctgccctcctagaatgagttggaatgtattccctcytattgtcttttctggaacaaattgtctgtaatagattctatttcttttctgatgtttggttgaatttaccagtaaaattatctggacctgaagttttgtgttgttgttgttgttgttagaa

SEQ ID NO: 296916 - DNA, 559 bp, Homo sapiens
attgccaagccattaccattaccactactcaggattatttcattaccaagtggcaacgttgccttcagaaaagtcaygtgcattgttagagaagtcatgaacaaatgaagtttctaggtcaaaacagggcctcagaagtctcatccctttttgagagtggcctacaatgaatttaccttggattcaggatgtcaaccattttgcctggtacccctatcaaagttgtatccccaatatggtaatgcaacctaagccaggagtatagaagagagtgccttattcataggccagaacatcaggtatcaagcgagtaacaaggggctcaactcttgttcataggagacaatttgtgctggggatcagttaatgagactcttgagtgtctgtcatacttacagacaccttcctagcccagatctccttgggaatcacttgaggatatgccttgtgttctgtgactcttgtcctggccacctcttactaaactatgaatctgaatgcacatacaagctttacataaaagggacactagcattccatgcagtggcctcctgtagga

SEQ ID NO: 296917 - DNA, 487 bp, Homo sapiens
ccagcagcacatcaaaaagcttacaatgggttcagaaccatgagacctgtaggtctaaccatgtgtcttattattcagaagtaggcagtctggaggaatcatggcttaaagcttaaaggctcrctaagacaccttccaacctaacaatagtgagtttaaacactgactttcagaacatctcactaaaccaagagtcagcaaactacaaactacatggcaagtaaggcctaaagtctatttttgtaaataaaagtatattggaacacagctatgtccatttgtttacatattatcaatggctactttaccactaaatgggcagagttctgtagctccaacagagatggtatggttcatgaagctcaaactatctagtatcagtatcatgccctttacagaaaaaatatatatatttatttctgcatccatttaatggctgttacatgatgctatgtcctcaataactagaataaattagaataaatgg

SEQ ID NO: 296918 - DNA, 487 bp, Homo sapiens
ccagcagcacatcaaaaagcttacaatgggttcagaaccatgagacctgtaggtctaaccatgtgtcttattattcagaagtaggcagtctggaggaatcatggcttaaagcttaaaggctcgctaagacaccttccaacctaacaatagtgagtttaaacactgactttcagaacatctcactaaaccaagagtcagcaaactacaaactacatggcaagtaaggcctaaagtctatttttgtaaataaaagtatattggaacacagctatgtccatttgtttacatattatcaatggctactttaccactaartgggcagagttctgtagctccaacagagatggtatggttcatgaagctcaaactatctagtatcagtatcatgccctttacagaaaaaatatatatatttatttctgcatccatttaatggctgttacatgatgctatgtcctcaataactagaataaattagaataaatgg

SEQ ID NO: 296919 - DNA, 621 bp, Homo sapiens
catatgacctaatttgatgggaacagataaatataatataaacaatgatcttggagtcatccttgactcctctgtctctcattttccattttcaatttatgagaaaatcctttcagctctaccttcaatgtrtttctacattctgaccactgttcactactttcactgttattgctctggtccaagtcaccatcctctctctctagatctgcagtagcctcctaattggtctctctgcttccactcttgctcctctttaaactcttctcaacacagcaggcagatccagcctgtgaaaatctaaggcagttcagactattctgcacagatccctccaatggcttcctgtctcacccagagtaaaatcagtcctcaaaatgaccgaaagttctgtgcaaaatctaacctccatatttctattttctatttttctgtcctttcgttgcttttcttcagatacactggcctcctctttgtcccatgaatagaccagacacacccctccctcggagcccttgcatggcttgttccccttcccaggaatgttccacccacaaacatgcctaagctttgctgccttccagtcttttccagaaagtcctctaccagtgaggctctctc

SEQ ID NO: 296920 - DNA, 580 bp, Homo sapiens
ccctttccttggggagctgggtttggtcacacgagttatagctatttcttctgatccaacccagcctcccagcactgggattccctatagagattacacaccaaagcgaaatagtcataaatggtgattttcttttcttcagaaagtcccctgcagttactttscatatgatagtttacataaattggcagctgcatggagagaaggcagtttgacattgcttgaatatatttttctctcattccaaggaaactctacaaactcaatatttataaaggagcagtaatgtaattgtgtgtctaaagagctcctatcatctagatttctgtatcttcaaaatttattatggtgctacacaaataattgatactcaaaaaatttgcaagagaaagtaaactttaataataggtaagccaatactcaccgagagtttgccttgaggttttttccccaccactttaaatcaaaaaattaataagcataacatggttctgtttaacagtgggcaagtcacttctccttctagacttctgttctcccatctataagaatgaagcatgagccatacgatccttaatac

SEQ ID NO: 296921 - DNA, 544 bp, Homo sapiens
ttgtgtctccaagacttgttcatgatagcccctgttttcagtttttcttattcctcctattctctaaaatcctttaagaatttacacaaacactactgcctttaagaagccttccctgatttttccagacagaattgtgccttttcctctgggatcccatactcttggcctgtgcctttgttaaacgcacatttcgttatgtktcacatgaaactaatttttatatgttttcagtattgtggggtctttgagagtacaaaccttgatttttcatctttggggagcctagcatagtgtctagatactagaattgtcaaagaagtgcttttaaaggtgatgtaagtgctgacaataaaactttaaccagctccaagagtttcagtttgagctcaacagcaataccaacaatgaaaatccaaagcctaagaatatcgtttgaactttctgggttgggagatagttataaatctttaacttccaaagcttttcattaaaactggaagaaaatgtgagaccagtcgtgctcacagtatttcagcttgac

SEQ ID NO: 296922 - DNA, 544 bp, Homo sapiens
ttgtgtctccaagacttgttcatgatagcccctgttttcagtttttcttattcctcctattctctaaaatcctttaagaatttacacaaacactactgcctttaagaagccttccctgatttttccagacagaattgtgccttttcctctgggatcccatactcttggcctgtgcctttgttaaacgcacatttcgttatgtttcacatgaaactaatttttatatgttttcagtattgtggggtctttgagagtacaaaccttgatttttcatctttggggagcctagcatagtgtctagatactagaattgtcaaagaagtgcttttaaaggtgatgtaagtgctgacaataaaactttaaccagctccaagagtttcagtttgagctcaacagcaataccaacaatgaaaatccaaagcctaagaatatcgtttgaactttctgggttgggagatagttataaatctttaacttccaaagcttttcattaaaactggaagaaaatgtgagaccagtygtgctcacagtatttcagcttgac

SEQ ID NO: 296923 - DNA, 624 bp, Homo sapiens
gaaaaaatccactcatcctattccagatttgcaaataatacatgttgttatggcatcataaggacaatcatttgaaaaattggtgattttttatcttttatacagatgtcttagtgtcaggcagattcaacttatgggaggtctttctgccaatatggctcgtttactgaccattcagcaggtggaaagcatgaaacagatttcttggttgtaaaggagtctgaaaatacacgtacttaagcctgaaagattagaagatttgtcctgtgtcccttttctgcaagatgcaaaatcatacagattcattgagcaccttgataatcaacmagtccttcagggtggtccaaagggtagatacccctgagctgtagaaactgtgctcaccaggcccacccttgtgggcaacttccagagctaagctagagaggccagagcatcaaactttatgaagtgaaactcagaatttacaaataaggtccataaaactttaacacaaatataagccatgcttatgttgcaaagttaagtttaaagaaatgactcaagtgcacttagcataagaaaccacctacacacacaaacacatatattcatgtgtgcagatatgtgcctgtgtgtgtgtgt

SEQ ID NO: 296924 - DNA, 588 bp, Homo sapiens
gcagatatgtgcctgtgtgtgtgtgtgtgtgtgtgtgtgtrtatatatatatatatttgcatattttgtgggtgcaggctgtggccactgtcactagagaaagactcttggcacatttactgcagcctaggagctagaccacagccttgctgatccagaagaaaaatattctcaatctactcagagatggccaaacctgagggttagcctgacactaactaaattaacagggaaataacagtgcattattccacagtaaacattttattttagcaggcagaatccttatgtatcctaccaagacattctgctttcccaagcttgagatacatggaaagccactataataatcagaaggttgctgagtatctcagttaggactcttagttgcaaatggcagaattcctgatccaaaaggactaaagcaattgtctcgtgtaactaaatattaatacttcagaagagtatcttcaggcacaacttgatcaggtcagggcccagtcacttgctttccgtcgctcagctctgcctcccgctacgttggctccttcctcagacaagatctcttcctgggacatgagaagcatg

SEQ ID NO: 296925 - DNA, 544 bp, Homo sapiens
ttaaagcacatggaaaccaacaccagcattctcctacttgcctgtctctccttggggtttcacagtgccgccactagccatggtgattaatgagttaataataaagatgagtttttggatgcttgagcagagggtagctgtccaccaaaatggattagcctggtccaccrggtgtggccctggagggacagctgctctatgttcctccaggaaccttgtttagcaccaatcaccttgtcataaggatatattaaggggaaagcaattctggctgcctgctcagaaacactgaccgctccggctgcttgatgattctgaatttacagagctggtcctgccccaggggaaacagcacagaaggggagccgaaggtctggcttcttagcctgctctagggttaatttaatatgtgactttggagaagtcacttccctttgagcctcagtttcctcacctagaagattgtaggatgaggtgattcccaagactctttaaaagagaatccataatcctattacttaacttactaagtacaccatcagta

SEQ ID NO: 296926 - DNA, 544 bp, Homo sapiens
ttaaagcacatggaaaccaacaccagcattctcctacttgcctgtctctccttggggtttcacagtgccgccactagccatggtgattaatgagttaataataaagatgagtttttggatgcttgagcagagggtagctgtccaccaaaatggattagcctggtccaccaggtgtggccctggagggacagctgctctatgttcctccaggaaccttgtttagcaccaatcaccttgtcataaggatatattaaggggaaagcaattctggctgcctgctcagaaayactgaccgctccggctgcttgatgattctgaatttacagagctggtcctgccccaggggaaacagcacagaaggggagccgaaggtctggcttcttagcctgctctagggttaatttaatatgtgactttggagaagtcacttccctttgagcctcagtttcctcacctagaagattgtaggatgaggtgattcccaagactctttaaaagagaatccataatcctattacttaacttactaagtacaccatcagta

SEQ ID NO: 296927 - DNA, 544 bp, Homo sapiens
ttaaagcacatggaaaccaacaccagcattctcctacttgcctgtctctccttggggtttcacagtgccgccactagccatggtgattaatgagttaataataaagatgagtttttggatgcttgagcagagggtagctgtccaccaaaatggattagcctggtccaccaggtgtggccctggagggacagctgctctatgttcctccaggaaccttgtttagcaccaatcaccttgtcataaggatatattaaggggaaagcaattctggctgcctgctcagaaacrctgaccgctccggctgcttgatgattctgaatttacagagctggtcctgccccaggggaaacagcacagaaggggagccgaaggtctggcttcttagcctgctctagggttaatttaatatgtgactttggagaagtcacttccctttgagcctcagtttcctcacctagaagattgtaggatgaggtgattcccaagactctttaaaagagaatccataatcctattacttaacttactaagtacaccatcagta

SEQ ID NO: 296928 - DNA, 571 bp, Homo sapiens
tcaccctttttgcccaggctggagtgcaatgcgcgatctcggtacaacgcaacctccacctcccaggttcaagcgattctcctacctcagcctcccgaatagctgggattataggcatgcaccaccatgtccagctaattttgtatttttagtagagatggggtttctccaygttggtcaggttggtctcgaaccccaacctcaggtgatccacccgcctcggcctcccaaagttctgggattacaggcatgagccaccatgcctggccaacactcatcctttgttacctgaaaataaggttattccaggtctgattctctgcagggatgcagattcctccacacaaccacacctaggatgtcccttctgggtgtgctttgctattaaatatgattcattctgcaacccaactggattctcagcttctcactgaagtactccctgaccagcacaggaatcccatttctcaatgcttacagttctatagtaatattgaacactgtctaattttgtttgccagtctttaaggtaatatttctaactctgaaatcaacccataacttcctcaag

SEQ ID NO: 296929 - DNA, 571 bp, Homo sapiens
tcaccctttttgcccaggctggagtgcaatgcgcgatctcggtacaacgcaacctccacctcccaggttcaagcgattctcctacctcagcctcccgaatagctgggattataggcatgcaccaccatgtccagctaattttgtatttttagtagagatggggtttctccacgttggtcaggttggtctcgaaccccaacctcaggtgatccacccgcctcggcctcccaaagttctgggattacaggcatgagccaccaygcctggccaacactcatcctttgttacctgaaaataaggttattccaggtctgattctctgcagggatgcagattcctccacacaaccacacctaggatgtcccttctgggtgtgctttgctattaaatatgattcattctgcaacccaactggattctcagcttctcactgaagtactccctgaccagcacaggaatcccatttctcaatgcttacagttctatagtaatattgaacactgtctaattttgtttgccagtctttaaggtaatatttctaactctgaaatcaacccataacttcctcaag

SEQ ID NO: 296930 - DNA, 571 bp, Homo sapiens
tcaccctttttgcccaggctggagtgcaatgcgcgatctcggtacaacgcaacctccacctcccaggttcaagcgattctcctacctcagcctcccgaatagctgggattataggcatgcaccaccatgtccagctaattttgtatttttagtagagatggggtttctccacgttggtcaggttggtctcgaaccccaacctcaggtgatccacccgcctcggcctcccaaagttctgggattacaggcatgagccaccatgcctggccaacactcatcctttgttacctgaaaataaggttattccaggtctgattctctgcagggatgcagattcctccacacaaccacacctaggatgtccctyctgggtgtgctttgctattaaatatgattcattctgcaacccaactggattctcagcttctcactgaagtactccctgaccagcacaggaatcccatttctcaatgcttacagttctatagtaatattgaacactgtctaattttgtttgccagtctttaaggtaatatttctaactctgaaatcaacccataacttcctcaag

SEQ ID NO: 296931 - DNA, 533 bp, Homo sapiens
ccttctgggtgtgctttgctattaaatatgattcattctgcaacccaactggattctcagcttctcactgaagtactccctgaccagcacaggaatcccatttctcaatgcttacagttctatagtaatattgaacactgtctaattttgtttgccagtctttaaggtaatatttctaactctgaaatcaacccataacttcctcaaggatgactactgcacctcattatttatctagacagtctaagttataayaaaaagagtaggtgcatttatttcagagaatcttgaattcaaatcctgcttctgtcacttgttagtggtcatatttggggccagttactttagatttctgagtatcaatctcttcatcataaacttgtgtataaagagaaagcacgagaagagaacttcaaaaataactccggttgcctgtctgtgcaggtagaggcagcaaagcaatatataggagatatcacctgagaggggacctatattcaagtagattgccactggcagggaaaaaggatgac

SEQ ID NO: 296932 - DNA, 477 bp, Homo sapiens
acaacaagtggcctcattcatagatgcgctgtcactctacaacatcacatggcctcttctcactcttcttatacctaacacacacaacctttagcttctaacgccttgcaccagcacagagtgctagcacctagttttctacctgttggtccatgcctattcgaatacattaaattgccgtcttcactgagttattcccaggaacagttgtgtgggccagtgagtggagagagagttcttatragaactaagctggggtaaagatacattttacaatttatcaaagtcatgaccactgacatctcatatttcacaataaaaatgctgtttatataaactacaaatatgtatgtatgtttgaaaatggggaaaaaagataaaatatctcaggtttctgtagccatggagacacatatgcacctcaacttacaatggggttacatcccaatcatcccatcataaatagaagtaccataa

SEQ ID NO: 296933 - DNA, 602 bp, Homo sapiens
agagagttcttatgagaactaagctggggtaaagatacattttacaatttatcaaagtcatgaccactgacatctcatatttcacaataaaaatgctgtttatataaactacaaatatgtatgtatgtttgaaaatggggaaaaaagataaaatatctcaggtttctgtagccatggagacacatatgcacctcaacttacaatggggttacatcccaatcatcccatcataaatagaagtaccataagttgaaaaagcatttaatacacttcatctacagaatatcatagcttagcctggcctascttaaacgtgctcagaacacttatactagtctgcagttgggcaaaatcatctaacccaaagcctactttataataaagtgttgatatttcatgtaacttatcgaatgctatactgaccatgaaaaagagaatgcttgtatgggtactcaaagtgctatttccattgaatgcatattgcttttgcaccatcgtgaagtcaacaaaattataagtcaaaccatcgtaagtcggggacaaatgaataccaatctcaggtcattccaaatgtctttttttgaccccttcacacagagtgc

SEQ ID NO: 296934 - DNA, 602 bp, Homo sapiens
agagagttcttatgagaactaagctggggtaaagatacattttacaatttatcaaagtcatgaccactgacatctcatatttcacaataaaaatgctgtttatataaactacaaatatgtatgtatgtttgaaaatggggaaaaaagataaaatatctcaggtttctgtagccatggagacacatatgcacctcaacttacaatggggttacatcccaatcatcccatcataaatagaagtaccataagttgaaaaagcatttaatacacttcatctacagaatatcatagcttagcctggcctaccttaaacgtgctcagaacacttatactagtctgcagttgggcaaaatcatctaacccaaagcctactttataataaagtgttgatatttcatgtaacttatcgaatgctatactgaccatgamaaagagaatgcttgtatgggtactcaaagtgctatttccattgaatgcatattgcttttgcaccatcgtgaagtcaacaaaattataagtcaaaccatcgtaagtcggggacaaatgaataccaatctcaggtcattccaaatgtctttttttgaccccttcacacagagtgc

SEQ ID NO: 296935 - DNA, 602 bp, Homo sapiens
agagagttcttatgagaactaagctggggtaaagatacattttacaatttatcaaagtcatgaccactgacatctcatatttcacaataaaaatgctgtttatataaactacaaatatgtatgtatgtttgaaaatggggaaaaaagataaaatatctcaggtttctgtagccatggagacacatatgcacctcaacttacaatggggttacatcccaatcatcccatcataaatagaagtaccataagttgaaaaagcatttaatacacttcatctacagaatatcatagcttagcctggcctaccttaaacgtgctcagaacacttatactagtctgcagttgggcaaaatcatctaacccaaagcctactttataataaagtgttgatatttcatgtaacttatcgaatgctatactgaccatgaaaaagagaatgcttgtatgggtactcaaagtgctatttccattgaatgcatattgcttttgcaccatcgtgaagtcaacaaaattataagtcaaaccatygtaagtcggggacaaatgaataccaatctcaggtcattccaaatgtctttttttgaccccttcacacagagtgc

SEQ ID NO: 296936 - DNA, 602 bp, Homo sapiens
agagagttcttatgagaactaagctggggtaaagatacattttacaatttatcaaagtcatgaccactgacatctcatatttcacaataaaaatgctgtttatataaactacaaatatgtatgtatgtttgaaaatggggaaaaaagataaaatatctcaggtttctgtagccatggagacacatatgcacctcaacttacaatggggttacatcccaatcatcccatcataaatagaagtaccataagttgaaaaagcatttaatacacttcatctacagaatatcatagcttagcctggcctaccttaaacgtgctcagaacacttatactagtctgcagttgggcaaaatcatctaacccaaagcctactttataataaagtgttgatatttcatgtaacttatcgaatgctatactgaccatgaaaaagagaatgcttgtatgggtactcaaagtgctatttccattgaatgcatattgcttttgcaccatcgtgaagtcaacaaaattataagtcaaaccatcgtaagtcggggacaaatgaataccaatctcaggtcattccaaatgtcttttkttgaccccttcacacagagtgc

SEQ ID NO: 296937 - DNA, 497 bp, Homo sapiens
caacaatcaaataattgctcaaattatcttttgacttcatggaacaccaatttcattcgtttagtgagacctctgggttgactaagcgttttggatgactgggtctgtacacttgcatttttatgcccagttctgcaactaacagcctagaagatttcagacaagttaattaaaaaatcagagcttcagtttgcaactgtgaaatmaacatttaactaaataacttttcctttcctttccagcccattaccaaaaacagtgacacagtcaccaagtgtaaagggcatgctggaggggatgaagatgtggcctggagtagtaacggaacaattcctgttggagacgagtattcagacatcactactgtaccattgatgggtactaactcccgaaaatttaacagctacttgtgaaagtcaagcattttgacaaaaagtaatctttaaaagtgcatgtgcaaatttatcacctacaaggatatactcaaagtgtactga

SEQ ID NO: 296938 - DNA, 1369 bp, Homo sapiens
tacgttgcctgtgactattctattctttgcttttctcttatcttttcaagcaagttacttctacttctttcccactgctcttcttacctgtatcgccctcctcttgttgtggtctggatttgtttcacttcttcctgttcagtttacagcactctacttccttcttctggtgatttttctctaaaaaataattgggtttttttttycccctagatctgtattttactgtcttcttttttcctggacgctactcagatgaagcaacagaaccctaaccctcatcgatgctgttaccagagaggatgtgatcctctgaaatggcccttctccattctgaggagtccagtgggactagccaagcccttccccttcttcccagaatctcctggtccatgagtctcaacttgaacaccccaagggttcttgttgaaatccttatcatgcagatcctatgtgtgagcagctgacattctatctactcacagattaggattttgccttactctatactctatctagaatgacagcctggtgtttctccaaaatagctgcagtttgttatatattcctgcaattttctctcatwatgtgaaggtggtatttgtttctccagtagaccagtttcacaccaatctttcaggatgaatgtcatatcatggatttagccaggacctgtggtgtcttcactcagttctgagttcttctattaacaacttaccccttaggttttctcactcatcaagtagaaaaaaaaaagtgtgatgttgtctgcctactgcccagaactcttcagagaactgtacaaaaataataaagcatttataaaggtaaagacaaaacttaatttttttttwaaaaacagaggtaatgatgcatgttccttatgatttttaaagaagtattgcaaggcaatgtttgtaatcactttattccaccccaaagcatattgtgcatacaaatttaagacttcctagcacwatgtgaaggtggtatttgtttctccagtagaccagtttcacaccaatctttcaggatgaatgtcatatcatggatttagccaggacctgtggtgtcttcactcagttctgagttcttctattaacaacttaccccttaggttttctcactcatcaagtagaaaaaaaaaagtgtgatgttgtctgcctactgcccagaactcttcagagaactgtacaaaaataataaagcatttataaaggtaaagacaaaacttaatttttttttaaaaaacagaggtaatgawgcatgttccttatgatttttaaagaagtattgcaaggcaatgtttgtaatcactttattccaccccaaagcatattgtgcatacaaatttaagacttcctagcac

SEQ ID NO: 296939 - DNA, 440 bp, Homo sapiens
agatgtgttttcctattctcccattaatgtgcatttgggttgatttcagtttggagctattacagatcgagctgttctaaatattctcacataagcgtctgtgtagatgtgtattttcttctttctttggtaaatacctagtagcataatctctacatcagagggtargtatactgttaactttaaaagaaactaccagctgttccattttaccctctcagtggtgtaaggaattaaccagatgctcaaaacttcaccaacatttggcattgtcagttttttctttaaaaccattctagtgcctttaaagtggtgtctcctgaagtttttaattgtatgtccatggtgacaaatgatgttgagcgtcttctttatgtgtttattagtcatttctatattttccttagtgttgcatctcttaaagtctttatagtttttgg

SEQ ID NO: 296940 - DNA, 584 bp, Homo sapiens
tgtacctcatcagtgttttcagaaattgaaaatcacatttaagtcatgacttttcaaagaggcttgtactgttgggattggaagccctctggtacccacctttatcagagggaggtgtcaacgtgtctctccacattacatccgaggtaaaatctgcgtccaaaagccacttcttcttttggcagacagcacagctcaaacacagctaataactctgaaaattgctcccttgttcctattgaccagtggggtgctggagacaaagcaaacctacgaacayagcaccagcatctgtcaatcaaagtgacattttatttagttaacctgggaacttcccactagcactggttgttagtttggggcagggggaggagggtgacgctaatggtacactgtaataaatacacctttagcataggctaaaactgtttattttttctgaagactcaagctgtagctttgggctttcaaatgtaatctttcaaaagccaggattatttgtctatgaaaagcttcagatgtagctcatctgaagaggccaaggttaaacacactaagagaaatagtttatttatcaaacagaa

SEQ ID NO: 296941 - DNA, 584 bp, Homo sapiens
tgtacctcatcagtgttttcagaaattgaaaatcacatttaagtcatgacttttcaaagaggcttgtactgttgggattggaagccctctggtacccacctttatcagagggaggtgtcaacgtgtctctccacattacatccgaggtaaaatctgcgtccaaaagccacttcttcttttggcagacagcacagctcaaacacagctaataactctgaaaattgctcccttgttcctattgaccagtggggtgctggagacaaagcaaacctacgaacacagcaccagcatctgtcaatcaaagtgacattttatttagttaacctgggaacttcccactagcactggttgttagtttggggcagggggaggagggtgacgctaatggtacactstaataaatacacctttagcataggctaaaactgtttattttttctgaagactcaagctgtagctttgggctttcaaatgtaatctttcaaaagccaggattatttgtctatgaaaagcttcagatgtagctcatctgaagaggccaaggttaaacacactaagagaaatagtttatttatcaaacagaa

SEQ ID NO: 296942 - DNA, 584 bp, Homo sapiens
tgtacctcatcagtgttttcagaaattgaaaatcacatttaagtcatgacttttcaaagaggcttgtactgttgggattggaagccctctggtacccacctttatcagagggaggtgtcaacgtgtctctccacattacatccgaggtaaaatctgcgtccaaaagccacttcttcttttggcagacagcacagctcaaacacagctaataactctgaaaattgctcccttgttcctattgaccagtggggtgctggagacaaagcaaacctacgaacacagcaccagcatctgtcaatcaaagtgacattttatttagttaacctgggaacttcccactagcactggttgttagtttggggcagggggaggagggtgacgctaatggtacactgtaataaatacacctttagcataggctaaaactgtttattttttctgaagmctcaagctgtagctttgggctttcaaatgtaatctttcaaaagccaggattatttgtctatgaaaagcttcagatgtagctcatctgaagaggccaaggttaaacacactaagagaaatagtttatttatcaaacagaa

SEQ ID NO: 296943 - DNA, 539 bp, Homo sapiens
cctgtgctccaacagttagagctgtgagagtcactttatatctgttatctcatagggctgttgagaagattaaacacaataatgaactttgcaaactagaaagtattttatggcggggtgcagtggctcatccctgtaatcccagcactttggaaggccgaggcaggcagatcatttgagatcaggagttcaagaccagcctggccaacatggtgaaaccccctctctactaaatacaaaattmactgtgtaaggtggcaggcacctgtaatctcagctacttgggaggctgaggcaggagaatggcttgaacccaggaggcggaggttgcagtgagctgagttcattccactgtactccagcctgggcgagagagcgagactccttctcaagaaaaaaaaaaaaaaagaaagaaagaaagaaagtattttaaaatatgtgatggtattccatctttattgtctagaaggccctgtgccctaggcctgtggagaataaacaaaagaaaatctaaacctaaacagattttgcatcaaaac

SEQ ID NO: 296944 - DNA, 592 bp, Homo sapiens
acttccttgcccccagcctctcccataggggctagctgtaatagatgttcaaaaaagtcatattgattcaatgaattaaacgagaatggcctttggactaaagcaactggatggaagcctgatatggtttggctgtaccctcacccaaatctcatcttgaattgtagttcccataattcccacacgttgtgggagggatctggtgggaggtaattgaatcatggtggcagttacccccatactgctgttctcatgatagtgagtgacatctcatgakatctgatgggcttttccttcttttgcttggcacttctccttgcctgctgccatgtaagatgtgacttgcttcttctttgccttctgctatgattgtgacgcctcctcagacaggtggaactgtgaatccattaaacctctttcctttataaattacccagtctcaggtatgtctttattagcagtatgagaacagactaatacaaagcccacgtcctgccacttgcagctattggaaccaggcaagctatttaatccacattactgagcctctgtttccatctgaaaaaatgagtgattacacatcatatttata

SEQ ID NO: 296945 - DNA, 560 bp, Homo sapiens
tttctaatggactaagattatcatgaaggtattgattgctgtaatcaatttctgcatataaccccccaaccttggctccccgcatacctttaactgggccagcttcaataaatgtatgttaattaaagactcaaaaatgatgagccagatacaaacctctgcctttatgacttcagaactcagactttttctaatacatgatggggccttgctgaattarttgaagtctaacttctgatgggtttgaaaacaaagcataaaggtcaaacatgcctttaccaggcatgtgtgatgcaccttatttaaaaagagcttgttgtacatttctcaaagtagatgacaatctattgatgggcattatattcccaagggaatgggcacccttcaggaaccaactagtctttaattggcagggaactagagactattaagacaaacctgtacccaactagactcttatcctactctctcccagtttcttaattcccagagtccaggctcccacaatgaatgaactcgaaaatgagtgattgcttgagcatttcccatgctccaggcaa

SEQ ID NO: 296946 - DNA, 1122 bp, Homo sapiens
gctgggcctgtctgactccaaagccagtctcctaaccactgtgctgcatgctgcgtcagctccctgcttctccctcacactctgtgactgggttcagcaaagctgtctccaaagcgtggcccaccgaagtcagggatgacagtagcagtgttttgtgcacaccacttccaaggccagtcattcacatggtcatgccactgatgatactagcgacctctgcccctcaaagcagcgctgcccctcctcctactactacttacaacttttctgggcctctttttttttttttaaaccggattcagcacaatcaaattttcctattatagtagccagctacaggtcaccacctctctcaaattgaaaattattatagatagctttttttcttcctctgtgtatatatgtttcagaaaatagagatgttttatttctctaatgtctcatcttcttggtcagctttggtggacaagttgaagctcagctataacttytcctgcattttcttcgaagaagcattgtttcctactgtgacttttattcaattgaatttaaaaccccwggtgtggtcttcccatgttctgaagaaacccataatgtgggcatctgtgtgctcctcagcttggaagagaacawtgggctctgcttccccatcccattgccataccagcctgtgttccttttgtccattcttgttgcccaacaccaggtagctgatgtgtgaactgtgcaataatctctcagggataaggctacagacatttctcctgagcctcttggcccttcttttgattctctgaggctgggacactgaggtccttagtttccccaactctttttggagagtgagactgagtagaatggtttccagcctaggcttaccccagggtatctgccaagtaggttggattctgtagctagtaccatttcctctgctagtgagtgttgcaggaagtcagggaccccaaacagagggacttgctggagccacagcagaggaacataaattgtgaagatttcattttaatatggacacatcagttcccaaaattaatactttcataatttcttacgcctgtctttactgcaatctctgaacataaattgtgaagatttcatggacat

SEQ ID NO: 296947 - DNA, 552 bp, Homo sapiens
aggtcacctttattcccattttagagagaagactcatggtatttaggtcgttttcttacgatcacacccaggaagagaggattcaaacctaactatctgctataacccaacaaagacaatgaaaaccaccagtaatctggagcagcatactctagtacatctttcctgtctttattccacccacagagagccatggttttcttcatctaataggaatcatactgtatgtgcatactgtgtaaaggtggtgccattccgtgaacgtgattctgatcaatgtaatcttttccctgttaatagacatctaggcagtttcctacttgtttgccaacataaatkatactgtggaaaacattctaaaaaatagatatttgtgcaatctttttttttcttaaaataaattcctgagaacagaattatctctcaaaagtacctgtaggtgagcacaatcctcccgataggggtactatttcatgtaatataaaaacaaccatgcccaaaaagttctttacctctttcccagtaattctatgaaggcagtaaccttgattg

SEQ ID NO: 296948 - DNA, 579 bp, Homo sapiens
gttccagtaattcatatataactatgttatagttatactaaatctctccatgctacctcctaattcactaattctcctttcaactgcatactaaactagaggactcccccctcctttactttctctttgtcttctttcttttgtcccttgccaccatcagacaatgtttcagatatttcagcgtgcttttaccacattttgtcatcaaggatcccagtaggaaacaaatgacacattcaaaatgttaaaggggtttaataaagggtctatttccagaggtgagggcagggtatgagcagaccacaagaatagtgaaatacactgggctataaacagaggggctataacttacccataggcycataccataggataggactagggaaaggagagatgatcagaatctggaagtcttatggagactaccttggccttctgtttgaaggtacagcccaaatgagttgcgagcctacagcaagagcgtaaatactataaacaccttgatctcactttcactcctcctgtagcaatcaaattggagagcaaacctggaaaggtcaacaaactttattcagcacg

SEQ ID NO: 296949 - DNA, 581 bp, Homo sapiens
gaacgttgaaaacatcctttgttattcagaggcctgggtattccggttgacctccaaatactataacagaaactagagtctttggacaaagttaacaagtgagcccagattctccactgtctaaatascctcacagttgaatagcttattcatgttgttgtttattcatgactcccttatcccatctgtcctgctgtggcctccaaggacaaatttccagctattcagaaagccacagctgcctcggctgcatgactacaatgacttcttgagaagccaaggatattataagagaaagacttttggatttatctcatctcatgctttattggcacaaaaggtattctgtgcacacacctaatatagagaaaagaactagcattcgcgccagcctgttcttttacttcattggatccttacaagagtcccatgtaagaaggagacaggattgcctggtctgtacatgaagctctaagcagctaattcattgccaatgttacctaacaaatgagcggcagagcagagaaggagaaaaaaattccagctttcttgagcccaatctagcattgtttctgaaagtg

SEQ ID NO: 296950 - DNA, 1140 bp, Homo sapiens
ggagaattgatttgcctttgaaggtaggatttgggaaacaaagaagaaaaaggatctgacattcctcaaggaagaagctaaaagttcagctagttgatcttctgacttccatttctatagcactttagcgtgtatatacaacttcttcaccaacgagtggtaacataacctcacaagagacgttgttacttctcttttacatattagacagtttctgaaattcatttccttaactaaccaaggatcacataggtagtaagtgacagtgtgagaaggtgaagttgtgctttggaaaaccaaggtggcattctctctactatcccactctgctgaccctgctgcctgcctccctaactcaatttccccatccaatagctcaccctttacttcctatgtccctgaggtctccagtcacatgtggacattctcagacccatcaaaggtctcaggycacctctctgcatgatgagctcctaccctccacctcagggaccatgcccacggagaagaaaggcacaggttaggttttgagtctgtccccaccatagcaagtagaaacawtgcagttgtaatcaaggttatgcaccacacagcataaaattattctggattattttgggaaactcaatctaatcacatgagtacctaaatgcagagaattttttccagctgtaataaaagagatacataagaaatcagagaaattcaaagcctgagaaggactcaacccccattgctggaggggggcatgtggaaggtatgagaagggatgcaggcaacttctaggagcaaagactggccttggctggcagccagcaaggaaataggacctcagtcctgaaaccacaaggaactgaattgggccaataacctgaataagattggaagtagattgatcatcagagcctccaggaagggaaacagccctggtgacatgttgattttcaccttttgagaccctaagcagaagtcttagctgggccatgctgtatccagacctctaaagaactgtgaaatcatcagtggatgttgttttagacactgcatttatgataatttgttatggcagtaatagaaaactagcawgctgccttgcaataggacaatttgctccaacatctgcaggctactgtaccagtt

SEQ ID NO: 296951 - DNA, 593 bp, Homo sapiens
aggatcatcatctttagaggatgtttaaggaaggagggtttgtctccaaaaggtgttattacaactgggaaagttccattactgtcatcattatcggggcactcaggccccatcttcctacaggagaggtggtgtgggatcaattgctttggctaaagcgcatgtcaacacttgagtagcagaaggtgttcattttgttttcgtttctccaaggtaaagagaaggaaaagcagaagagaaaaacaagaaaacagatcttgaatcaccctccatctcctcaccccaaagggatgcttttcattcttgtagattcatttmttggcttatccaactgcctaaattaattgtatgctcttacagtcatactgtacgcaattttccatctcactttgggaacacaacatgctaactttttcatgttgctgtagcaccactgaaagatcgtttctaatgcctacctaatattcccctgcatagatgctcaattgttttaataaattgttctctttctgttggacattatgttcctcccagagtttttgctcttgtttataagtaacaccttcaggacatagcatgtactattttggggg

SEQ ID NO: 296952 - DNA, 1255 bp, Homo sapiens
cctaaattaattgtatgctcttacagtcatactgtacgcaattttccatctcactttgggaacacaacatgctaactttttcatgttgctgtagcaccactgaaagatcgtttctaatgcctacctaatattcccctgcatagatgctcaattgttttaataaattgttctctttctgttggacattatgttcctcccagagtttttgctcttgtttataagtaacaccttcaggacatagcatgtactattttgggggctatttctttagactagatttcttccagtgttattcctgggttgcaaactagaaatgcttttagctccagatgcctattgctaaattgcctagaagaggcttattgcaaaagtcactctcgtggtycatcactggggatcacagggcaatcaggaaaatgaattaactgttactgagcactcaccatctaccaggctttgtggtccttagttcaatgcatgtttacaaaaacaccctgagttgttttatttattgaggttttacttcatgcaggaagctttaagtgttttaagttctttagctcatgtaatcatcaatggagctcaatgaagaagacgctcagtttttcctacagattaggaaaactgagaccaagaagttaawgggtttcactctgtcatctaggctggagtgcattggcatwatcacagctcactgcagcctgtagctcctgggctcaagtgatccttctgcttcagtcttctaagtagctgggactgtgggtgcacatcactatgcctggctaactttttaattatttctaaagacagagtctccctatgttacccaggctggtcttaaattcctgggctcaagcggtcctcctgcttcagcctcccaaagtgctgagattacaggcatgagccaccatgcctggctgagaaagtttactatataaataattttaataagttgaattattccagaaaagtaaattgattaatgcattgagtaacatgttatttcctaagttcctggtatgatcgatcatctttgagttcttaaggcagcagtaagggggaggaagacagaaattgatagatggcaccaagcccagccttaacttagtgtctggcatttaattattggttaaatgagtaagtaaatgggaccctaccaagtacaagttcaaatccatctgggtcttaaagtaaattctgattaaaacaggaaagaccttcacattgcctgttgagacactgatccatatggtag

SEQ ID NO: 296953 - DNA, 612 bp, Homo sapiens
gggtttcactctgtcatctaggctggagtgcattggcattatcacagctcactgcagcctgtagctcctgggctcaagtgatccttctgcttcagtcttctaagtagctgggactrtgggtgcacatcactatgcctggctaactttttaattatttctaaagacagagtctccctatgttacccaggctggtcttaaattcctgggctcaagcggtcctcctgcttcagcctcccaaagtgctgagattacaggcatgagccaccatgcctggctgagaaagtttactatataaataattttaataagttgaattattccagaaaagtaaattgattaatgcattgagtaacatgttatttcctaagttcctggtatgatcgatcatctttgagttcttaaggcagcagtaagggggaggaagacagaaattgatagatggcaccaagcccagccttaacttagtgtctggcatttaattattggttaaatgagtaagtaaatgggaccctaccaagtacaagttcaaatccatctgggtcttaaagtaaattctgattaaaacaggaaagaccttcacattgcctgttgagacactgatccatatggtag

SEQ ID NO: 296954 - DNA, 465 bp, Homo sapiens
ttcgttcattaaaaaaagtggaagatgaagcagtaattgctgatctataagctgcaacaagttatccagaacatttagctaagattattgatgaaggtcgctacctgaaacaactgattttcaatgtagatgaaacaaccttctattggaaaaacatgtcatctagggctttcatagctaaagaggagaagtcaatgcttggcttcaaaattcaaaggacaggctgactctcccagtagggaataatgcagctggtgactataagttgaagacagtgcttatttaccaccccaaaaatcctaggtcccttaaggattatgctaaatctctgcccatgctcatgctctataaatggaagaacaaagcctacatgacaacacattacagcatggkttactcaatattttaagcccactgttgagacctactgctaaataaaaagattcatttcaaagtattactgct

SEQ ID NO: 296955 - DNA, 474 bp, Homo sapiens
ttcagacgcacactgcatctttccacgggttagtggcgagttacattacaaaagagtatgtcagatggcagatattcttgcaggaggcttttgaaaatacaatctcctatagaattttaaaattatgaattgtgataattacaaatcatgggcagaatattgagaaagaaaggatataaatccaattaggtaagaaattgtagcttagcaaaatgaaagcattttttaaaaattatcaattataattatcataatgatcaataatggcaggtttctgtgaaatatccaacccccttgtgggtaatattgcagcatgcattgcatactggttgttactgcattctaataacctggaagacygaaagcatttgggattttttcacagtgaaattatatgttaccataacatgctaaaatccctcttgctaattctgttgataaaattctagtccttgcattgaaattataacttcc

SEQ ID NO: 296956 - DNA, 1111 bp, Homo sapiens
gattcacagaattgtaggggctggcaaatctgaaatctgtagagcagcctgtcaggctgaagactyagggaggagttgatgctgcagctttgaatctggtgtttgcgggctggaaactcaggtagggttgcagttctgaagcagctttgaatctggtgtttgcaggctggaaactcagacagggttgcagttttgaagcagaatcaccccttctttggaaaacctcagggttttctataaagggccttttcaagagattgaagtccacccacattatggaaggtaatcaactttgctcaaattctgtgtatttaaatgtcaatttcatcttacaaataccctcacagcaacatctagactggtgtttgccctcataactgggtaccattgcctcatcagttgacacataaaatgaagcatcacagatacaaacaggaaattttataaaaggaaatataaacttaagccaaaaaattattcaaccttgctaatggtaaaatacagaaattaaagtaaaagctcaatataacaactcaacaawaagttaccttcattgtaaaggttaaagctaagggcacttgctgaaactgacctgtctcggattatctctctcgtgttttcttggaaagtcagaaaaacagcttagcgttgctcgtcgatgctgcagtgtcggtatgagtaaggccattctggtttggtttgttggacctagtgcgggagtttagcccaaacggctctcactgagagtgtcaccaaaacttagggcatcagcgctactctcggtcgccaccattttggcttacggtgtccttgttatcatgcagttcttggaagtttcatcatttcagccggagagagaccacttgacatwtagcagatggctgcatgtaggtatttaagactttttaagtgaatacagaataccaggaagactaccattatgatctcagaaggtaaaattaaaactctggagtatgtcccttagtcaaggttcccatgaacccaaccaactgaaatcagttaagccaaagaatgagccggacggcgaatctactcattttaaccaaggagcttgttcattcatttttgccgtggagtctctgtgataccc

SEQ ID NO: 296957 - DNA, 546 bp, Homo sapiens
tatcctggttttcagtttgagggtccctggcaatgggaccctcaatttggtgaaatctctgtgtagcccacacatcaggcttgagatttgttcctaaaaatttacatcaagttgtccagctccagctcagaggccttcagaaacaaagcagttcttcttcttacttggagagttgtagccagatattggaggaaactagaattcagaatccagtccagtctaccagtagacaataaaaacctaaaaacaatgaatagggctaaaatataatgagaggtgtactacagttttcttcataaacattcttctttttayagttacacccatttctacccaaaataatcagagtaagacaaatttgtttgcaaaacaggtctagtcttgttaaactttgcctgattatataagtgcagcaagaattgtgattgaccacataggtgctttgtaaagtttgcttttgctagaacttttgattaggaatctcagataagactttcagaaccctcataactaggaagtcaaactacagcagacctcagacttcat

SEQ ID NO: 296958 - DNA, 546 bp, Homo sapiens
tatcctggttttcagtttgagggtccctggcaatgggaccctcaatttggtgaaatctctgtgtagcccacacatcaggcttgagatttgttcctaaaaatttacatcaagttgtccagctccagctcagaggccttcagaaacaaagcagttcttcttcttacttggagagttgtagccagatattggaggaaactagaattcagaatccagtccagtctaccagtagacaataaaaacctaaaaacaatgaatagggctaaaatataatgagaggtgtactacagttttcttcataaacattcttctttttatagttacacccatttctacccaaaataatcagagtaagacaaatttgtttgcaaaacaggtctagtcttgttaaactttgcctgattatataagtgcagcaagaattgtgrttgaccacataggtgctttgtaaagtttgcttttgctagaacttttgattaggaatctcagataagactttcagaaccctcataactaggaagtcaaactacagcagacctcagacttcat

SEQ ID NO: 296959 - DNA, 536 bp, Homo sapiens
ttatttcagtggcatacaacattttaacaagataacagaaattatggttgataacgtattgggtttctaggaatttcatacactttttgaaacacattattagcagcacatccatatacatgtaactcaaacatcatttcttacttgacaatgcctctcctgcaattcaatgtatcaaataagcttaattgctttaaattgtcttcttcagacattcaaagtccttccgaattgtcccaaagttagttcaaagtaaaaaagacttaacttctratttgattttggaaagtttgtcaaaaatatcaaaggtttaagacacttcatcaaaataggatcacaggtcacagcggagtcatacttattaatttaaccagaaatcattctggtttaaaacttcaaattgaaaaacttcaaaagacaaagacagaaagttatgtagatgtacaaaaaccctggactgttcaatggagaggactcagttttcctaagtaatcaaagactaataaagacaacatgaagcacaggaaatcatctca

SEQ ID NO: 296960 - DNA, 536 bp, Homo sapiens
ttatttcagtggcatacaacattttaacaagataacagaaattatggttgataacgtattgggtttctaggaatttcatacactttttgaaacacattattagcagcacatccatatacatgtaactcaaacatcatttcttacttgacaatgcctctcctgcaattcaatgtatcaaataagcttaattgctttaaattgtcttcttcagacattcaaagtccttccgaattgtcccaaagttagttcaaagtaaaaaagacttaacttctgatttgattttggaaagtttgtcaaaaatatcaaaggtttaagacacttcatcaaaataggatcacaggtcacagcggagtcatacttattaatttaaccagaaatcatyctggtttaaaacttcaaattgaaaaacttcaaaagacaaagacagaaagttatgtagatgtacaaaaaccctggactgttcaatggagaggactcagttttcctaagtaatcaaagactaataaagacaacatgaagcacaggaaatcatctca

SEQ ID NO: 296961 - DNA, 554 bp, Homo sapiens
ttttgcgtcagtgcgcttttgatattaacgcttgatttaaaaaaaaaaacccacagttctcttttaatcttacgcagctaattgcacgcacaattcctttcacaaggttcatctttcacaaaacttctagaaccttctgagatatcagcagctcgccgtcgagtacttttcctttttccatattggaacaactattcattgtactttagaacacaaattaggcttttttaagaaaaacacatccttcatataagtttttcataccaaaaacatgtcttatattccctgaataagagttttttcccttatttctattttcaattacaatatgataattagaatttttaacttttaataatcttatcttctagtgaaaacccaggaagtgttgtgggctgtcctatatgagcattcaccagttcttaatttctagaaccgtgttttctcaactttttatatctattaatagactcaaatacatatagctttttatamaatacaaaaacaagatgccaaacatgtatatattctttaaacttatgttcagcaattaa

SEQ ID NO: 296962 - DNA, 517 bp, Homo sapiens
atacacgcagactcacatggaacttagcaaataggaagaactcattaatgttataattattctggtgattaccaaaagtgtaatttgaaatgcagtttcatttcaggagcaaagctaaagtccagctcccctcactgggattcatgtctgtcaatcattttcttggtcctaagccacctaatctggagccttttaaattgctcatgctaatttgagatgtgtaaggtggggtgaagcttgtgcagagagaaatagatgcttgaggtatgggttaaaaagagatgtagaaggtagaaaataatactcttaatcactctgatgcatgcccttgatagcatttgtcttctagggaatctggtctattcacaggatatgtgtgttaycctaaattatcaggtttgtaagaaagctgagagataaagaagggcatctttaaacattctagaatggctattttctttcccagaagcataatctatgtgacaaatttatctattttagtaatgtgactaattta

SEQ ID NO: 296963 - DNA, 544 bp, Homo sapiens
ttgtgtggtggttcattcactagtctcccattgcatctcatcttctgttaaagtaagctccagacaggagtcaaaaaaaaaaaaaaaaaacaaataataggtttaaacatttttcttattgtaaagctttcaatcctattccaataagatttttaaaaattagcggccgggtgcggtggctcagggctgggcgtggtggctcatgcctgtaatcccagcactttgggaggccraggcaggtggatcacgaggtcaggagttcgagaccagcctggccaagatggtgaacattgtctctactaaaaatacaaaaattagcctggcatggtggtggcgcctgtagtcccagctactcgggaggctgaggcaggagaatctcttgaacccgggaggcagaggttgcagtgagtcgagatcacaccactgcactccaggctgggtgacagagcgacactccgtctcaaaaaaaaaaaaaaaaaaattagaatcttgacttcttcccatgacttgcaatgccttctgttctttgctgtatctctccagc

SEQ ID NO: 296964 - DNA, 524 bp, Homo sapiens
tgtttgtatgtttgtttcctgaagctctctctgtggatagatattaagtgccattcacttttgtatgtttcactgaatggcgtctggactacaaggactatatatagtcacacatatttgttgaataaatggatgaatgaatgaatgagagtcctgaaaaactgagagcttaattacaaagttcatttgttacttaaaaagctgtctttaaacattttacacataaaacatctgttgcaaacacattttatttcatagttaaatgtyttcatattggttttcttatagtgggctcctatatttcctttacctttctcatgcagtagcattttgttatacacattttcttgaaaactaggcccaagcagggggtcagaagaagaattatgttctttactacaatagaagtgggagaaataattcctagttctgttttctgatagaaccttcagggcagagtaaaattcctcccgttaatttgtaaactgagcataataaagcacacaattcatgatggttctaag

SEQ ID NO: 296965 - DNA, 538 bp, Homo sapiens
ttcctcccgttaatttgtaaactgagcataataaagcacacaattcatgatggttctaagattattttgcttgtgaaacaaacatatcaactcttgtacatttcacgtgaacattacagcacggcccaggacagggtctacagcactaaacagctgtcactagagtcaggagacacgtcttgtgaccctgcaggaaaataaccagcacgttgcaactgtggccaaacctggcctgaatctctgttgtgcaattagtctgcccaccaatagcaggcccaaacagttttattgagcctaacctcagtaaaccagtcttattgttaaactactccagttacttgccctcttttgcttccytccctgcaaagagcctgctctgggactcccacgacctctgaggccggtgaagcacttccttgcttagtggtccataatcatacacacttgcgtttctacgtctcctgggttcagtaaggagaccagaacttttcttaacctttaactagtacttatacatttgccttgccaaggtctgctt

SEQ ID NO: 296966 - DNA, 590 bp, Homo sapiens
agaaaaaaataaaggaattgattatggttgataataaaatcaataaaacatttgaaatatttaatctgggagaaaaagaaaagcacaaacatccaacatcaaataaaaaaactgtaaaaagattggctaccagtttaagagaaaggcatttattcatttactcagtgaatatttaccaaatatacactatatattcagcgcccttccctgaaatccaaactcaaaaatataaataaagagtatattccctttaactctttttttagatttaagttttattttttaaaaacctacatattatttgtccatttgtatggcatacatgtggtattttgctatatgcatagaatgtgtaatgatcacaycagggtatttagggtgtatatcaccttgaatatttatcacttctatgtgtcaggaacatttcaaatcctcttttctagctattttcaaatatacagtacattgctgttattgataatcattctactatgctatcaaacattggaacttatttcttctattcaactgtatgtttatacccattaatcaagcactcttcatctcccttcccccagaacaacccttcc

SEQ ID NO: 296967 - DNA, 590 bp, Homo sapiens
agaaaaaaataaaggaattgattatggttgataataaaatcaataaaacatttgaaatatttaatctgggagaaaaagaaaagcacaaacatccaacatcaaataaaaaaactgtaaaaagattggctaccagtttaagagaaaggcatttattcatttactcagtgaatatttaccaaatatacactatatattcagcgcccttccctgaaatccaaactcaaaaatataaataaagagtatattccctttaactctttttttagatttaagttttattttttaaaaacctacatattatttgtccatttgtatggcatacatgtggtattttgctatatgcatagaatgtgtaatgatcacatcagggtatttagggtgtatatcaccttgaatatttatcayttctatgtgtcaggaacatttcaaatcctcttttctagctattttcaaatatacagtacattgctgttattgataatcattctactatgctatcaaacattggaacttatttcttctattcaactgtatgtttatacccattaatcaagcactcttcatctcccttcccccagaacaacccttcc

SEQ ID NO: 296968 - DNA, 603 bp, Homo sapiens
gttcactttactgtgctgaagctttttaaattgatgtgacgtcatttctctatttttgctttggttgcctatgcttttgaggtcttacacaaaaactattttccmagaccaatgtcctggaacatttccccatgctttctgctggtagtttcatgtttcagatttaagtctttaatctactttcatttgatttttgtgcatggtgagagaggatctagtttcgtgttctgaatatgggtgtccagttttcccacaacatttattgaagaggctgccctttcctctattctatgtgtttggtgcctttgtcaaaaataagttggctgtaaatgtgtggatttatatctgggtcctctattctattccactggtctatgcatctgttgttatgtttgtaccatgctgatttagttactatagctttgtagcatattttgaagtcaggcaatgtagtgccttcagctttgttctttttgctcaggattgctttggctcttcagggtcttttgtggttccacataaattttaggatttaaaaaatatctgtctgtgaagaatgtcattggtaatttgatagggattgtattgattctataagttgct

SEQ ID NO: 296969 - DNA, 522 bp, Homo sapiens
cccacatggcatcttcggcactcaccttgttcacacaaagagctcccttgacattgagccactgatgagaaaaggtctccctggatgaagaacaccagggtttgccaggaggctaatataggagagcctgggcagggctgggccagcctcggcagctgcacagcagaacccgcttcgatatctgtattcgttatcacacacagaacttggatcttttgatcaggttccccaggttattttgaggcatccgtgttcactgctggagctttgtgtcggcagcccctgcccgaggttgcttacaggctgggcttcatcttacctcccagctgaggaacagacagcagccttgttctgaggaggtgcatgttgagaacacatttattttttgctgtgacttgttcagaaccacattttgcaaaatgcccagtgacatggtttggttmtatgtcttcacccaaatctcatattgaattgtaatttgcaactctggaggaggggcctggtgggaggggattggatcaa

SEQ ID NO: 296970 - DNA, 615 bp, Homo sapiens
aggttttcagtataaagactctattttccaccatcccttgccatatgtttggaccctgtacttaagttgaggccaatgggttgtgaaagtattgagaaggagcttgtggaaagccttaaaaaagaaatctcagctggtgtgcaccctctgcatgtctaagtaattctgatttaactgctggagctgctgtcttgacccatggccatgaaagttatttctagggacagcagagtgctgatctggaaggaamctggggcctagcaactttgaagccagcatgccctgtacgcttacatctgtactttgtataagagggaaataggcttctgtcataattaaacaggtatttttggttttctgtaaatgtagtcaaatctaatggatatattatgctctgtgcttcacatattttatttagtctttatgcatgctcatgaggtaggaattactatgcctattatgtttattttacaaattaggaaatagatatttcaattttcattttaatttcctggagttagtaagcagaagagctgagttttgaatctaggtcagtctggctcctgccttatgttttcatgggctaatctgtgaggttttatataatcatgcatt

SEQ ID NO: 296971 - DNA, 416 bp, Homo sapiens
agcagagtgctgatctggaaggaacctggggcctagmaactttgaagccagcatgccctgtacgcttacatctgtactttgtataagagggaaataggcttctgtcataattaaacaggtatttttggttttctgtaaatgtagtcaaatctaatggatatattatgctctgtgcttcacatattttatttagtctttatgcatgctcatgaggtaggaattactatgcctattatgtttattttacaaattaggaaatagatatttcaattttcattttaatttcctggagttagtaagcagaagagctgagttttgaatctaggtcagtctggctcctgccttatgttttcatgggctaatctgtgaggttttatataatcatgcattctggggaccttatcagtgcctgaaac

SEQ ID NO: 296972 - DNA, 589 bp, Homo sapiens
atttcccttgcttttcttctttgacctaagtaattcagaaattcattaatttcaaagtatttggggattttgtagctatttccttttttgatatctattttcatactgttgtagtaagagaatcagaacacagcctttttaaggattttgatcctatagaggttattaaggtttgatttattgatcaatctatcatctatcttgatgaaagttccatgttccttaaaaaatgtgtgttctgaagttagggcataatgttctagaaatgtcaatcaggtcagtttgmgtgctaggattgattaaatcttctctattattacttatatttttctctgtttttctatcaattactaaaagagagggattaaaatctctatctgcctgttcctctccttacttctgccagttttgacctcacaattttttgaaacactgttattagacgcatttaagattgtttttgcttcctgtttaattgactttacatgatcatgagacttcctttatttttggtttaccgatggtcttgaagtctgcctttttaaaaccataatactgacacacctgtttcctcacgctcagtgctttc

SEQ ID NO: 296973 - DNA, 636 bp, Homo sapiens
taattgtgaaaggcttgtcacataagtgtcctattctaaacactctggtctctatcacaggcattgtaaaagacaagcagtccagccaaagggatttggcacttggataaatacatgagctttggtctaaaatgtttctttgttctagccacatctgtagttttgttcagtatattaaaatgacttattaatatgggcttagaacagaaatcgcatttgaaactttgaaagtacttatcaccstttaatcagcttcctctaaaatccgcgtaaaagccacggaagctcagtgcaatcactttgaagtttcctctcacctcttacagatcaagtgactgggggaaaagtgggattttcactacgaatatcagatcgataagcgtgaatggaatgctggagtactggaacaatgctggccatttatattgcttcaggacatcgctagataggctgatataaagaaaaaaaaaagcaaaaggcaaaaagccttctctggtatttccagggtcgaaagccatttttagttactcctttgttaagggcctgacttcaagaaatgattgtataatcttatgtgagtagaaagataaatatgaaataaggaacaagaacatggatttttctatgaaaaagaca

SEQ ID NO: 296974 - DNA, 636 bp, Homo sapiens
taattgtgaaaggcttgtcacataagtgtcctattctaaacactctggtctctatcacaggcattgtaaaagacaagcagtccagccaaagggatttggcacttggataaatacatgagctttggtctaaaatgtttctttgttctagccacatctgtagttttgttcagtatattaaaatgacttattaatatgggcttagaacagaaatcgcatttgaaactttgaaagtacttatcaccgtttaatcagcttcctctaaaatccgcgtaaaagccacggaagctcagtgcaatcactttgaagtttcctctcacctcttacagatcaagtgactgggggaaaagtgggattttcactacgaatatcagatcgataagcgtgaatggaatgctggagtactggaacaatgctggccatttatattgcttcaggacatcgctagataggctgatataaagaaaaaaaaaagcaaaaggcaaaaagccttctytggtatttccagggtcgaaagccatttttagttactcctttgttaagggcctgacttcaagaaatgattgtataatcttatgtgagtagaaagataaatatgaaataaggaacaagaacatggatttttctatgaaaaagaca

SEQ ID NO: 296975 - DNA, 616 bp, Homo sapiens
aataaagtaagcaagagaaaataaaatatttttgagaaactcataaggaagagagaatgtatttactacttatgaaatggaagtgtatcaccataaaggtttgcatccttgtcttgatcaccttgagtaggctgaggaggaggaagaagaagggttggtcttgctgtctcagggctggcagaggcagaagaaaactcacaaataagtggacccatgcagttcaagcccatgtcaagggtcaactayatatctttcttcacctttgtgacattaagttgtaatatttgagaagtatatcatgcaggcagtctgtatattcctgcagtttcttcctcttggctccaaactgtgtttgataggcaccacagcctagccagagaaatggaaatttggtctccagttctaattgtgaatgtaaaaagagtgaggccacaagagtattcaacaatcagaatgcaaatctaagccaaacttaggcagaagctatgcccccagatcagtggatggtgtttcttagggggtaataggtactaaagcgctcctctaagctctagaatctttactctattagtaaatatgacttggaggacaaaatagatagcagttggggccctac

SEQ ID NO: 296976 - DNA, 596 bp, Homo sapiens
gttaaaagtagattgtaggttttagtcagtaaaatctagtagtggtttctgattacatgaaagtcacagtcactgcagttgagaatatttaatatatttgtgaatgtaatccattggcttaaccagtaayaaaaactagccttatcactaatctgaatctcaacatgaccaaaacccaattttttatctcaatttaccccacgttaaccctcttctaatattgaaaacctccaccctccacatctctcttttccattcaaacaccaagtcctctactgtcttccttggtaacaacatcttctaggtaaaatatttgggaatacagtagtatccaattaacatggaatatctacattaataaaaaatgaaaggcgaaactttggggtaatcatgtaatgcatgatctcatttggtttatttattaagatctatgatttttctcaggatgtaaaatccccaataagccaaggcaatacccagaattttaaaaactaactggtgcaacaagggcacccagaggccagactgcaatgggatggcctcacactccagtgtggtctgcacctgagtgctagctcaacattccaactcatgag

SEQ ID NO: 296977 - DNA, 538 bp, Homo sapiens
aactcttccttgaagcacactaacatagctgagttctttgccttcatttgttagcatgtgaaacaagcacttctacctttaacatcaaaccaattatttggagcaagagacccttcccatatctctagcttgtcattgtttcagggattctgtgtctaattttctttgttttaaaaaaaataagattttcttctttgtttctctcacrttttacctctatctttctctccagattgtataggagcctatcttgggttattataaattattataataaatctaaccactttttatcatttttatttatttttaaaaaattaaatgccacttttgaaagtaaatgtccagagaaaaacataatctgattgcttcagagttttaatccaggttgttcatttctatcctgggaaaaataaagcaatagtttataaaatgcaacattgaatataaaaatagttgaataaataaatcacaaatgtattttggcttgaatttcttacataattgactctattccctatttccttgaagtgaatgc

SEQ ID NO: 296978 - DNA, 572 bp, Homo sapiens
ccatgacatatatgtctttgaagtagtattgtttgaacactggcataagaatgaacattaatgtcttttaaattaaatagaagcttaaaagtggttatcaattgaggacatatctccaaaaaatatgaaaatcaaaggattagaatctttaatatrtgacgagtacattccagtggatgaaataacatcaaaggcgatggacagacaatttgggaatgagggaaaagtgaaagcctccgagtaacaaggaggggtactgggcaggttcagactcactcaacatccaaaaaaggtatgatattcatctagtcaactagcaaaataatacaatcataaaaacataaaaatcaaaatgaaaaagtcgaaataataaaattttcaacctaagaaatttaaaccgaaattgatattcccagccactgcaaggcagagtgggaaaattttccattttggcgaaatctatttggtaaaatctgccactaccacctgctgggcaccaaggaaggtcagaaaagaagacacacacttcccagagacacttctgggaagacagaaaacaaggtgattgttaa

SEQ ID NO: 296979 - DNA, 968 bp, Homo sapiens
gagttaaatcattgttttaatgagagttgtttccttatttaggttttctgtttttataaatcaattatggaaattgatgttttctagaaagtgttattgttaactgaaattttaaagtttactggcatctgcattcataatattttcttatagtttaaagaaatctattgtttgtggtttttgtattctgattcaaattattcgtgtcttttttttttccttaggcagtctttgtagaagtttgtctactttataagcaattccaaagatacagcggtacttctgttaattttcacctttartcaacagcatacattgatgatagacgctatgtatgccaagataatttaataatggaggaggtaataagatgtctatttattcatattttatgccctcctttataattaaaggaaattatatttatgtttatgcattggtgaaattgatttgttgttataaattaggtctaaaatcaattctagaagatgaattatggtggcattctataataaatgattgtgtaattcacagtgatcactgtgaaggawgttcggatacatgggtctagattctcacactgtatgcctgtgcttttatttttatgttcaacctatggaaaaaaaaaatgaggcccttcagatcttagccaacttgctcataaccacagaagtttctttacaagaccaactcttcacaaacccttttcaacttgcttaaaccttcagttttgtcccattactcttttagtttaacacaatctttaaaaccctctgaactacacaaaattacattccctataacaaaagccatattcccataccttcttataatcttttaccaaaaatgtgttctatttccttacatacctcgtawgtaaaattgtttctccagttgtctcaattgcatgttacaacattaattcttagcaacttatttttggtgaaaatcctgataagtaagtgatt

SEQ ID NO: 296980 - DNA, 611 bp, Homo sapiens
taaggaatatgctctatgaaacaacagtgaattttgaaagtaagatccaatttgtatctattttcctcactattttacagatgagatgagttatggatttgtagaaaaactttaaagaaatcaaatctatgtaaaatattataaaatatgaaattatttttgttgaagttcataaacttcacagactgagacaaatatctttaaaccatttatattaacaagcattgaatgcagcaattctgtaccataacatgatattccaaattaaacttttgcatctcaagtgacctttatagcagttttacagttcataaattctgtacaacgtggctctgtggagtggttttaataaatctttattgtgctataaaccttagtgcgtacacttgaaatggcatttccagtcttaacaacacaaatgaaggaatggatctttgctgccatatggagtatttgccayagatagagtctatcaaatattaagcatgatttcagtaataagaagaaagcataacaagttacttatcattgacacaggacaaacaaattgagacctattatttacaaatatttacaacaggttcaagagtcttaaagaaagcttgcctacc

SEQ ID NO: 296981 - DNA, 535 bp, Homo sapiens
gggacatcagtaaacttgacacttataatagcattccatctgggctttgttgcagtagaattacatcctttttaattgtctctgatttgaatcctgctggtttattcttccaagcacgtggccagccyccagcaatttcctgccctgctaataggtatgcaggctcagaggaggacgagaggccccattattcactgatggctgccgcgtcagcagcagacacaattttgggggttaaggttgcctttattttattctctttgagatagttattcctaagaggaagttgctcactacattgatgtaggattttacaaattctctttgtctccttgtagaggaaatcagaatagttgccagcaaagttcgtcaaaatagaatactgaccaacagtgctgaaataaattatgggaagctgaaaataataacaaaatgcctagatggctttctcccttcatgtgcagccttccacttgagaataaaattgcccatgtaaatcagttttgtttaatattctcaagtagaactaagattc

SEQ ID NO: 296982 - DNA, 535 bp, Homo sapiens
gggacatcagtaaacttgacacttataatagcattccatctgggctttgttgcagtagaattacatcctttttaattgtctctgatttgaatcctgctggtttattcttccaagcacgtggccagcccccagcaatttcctgccctgctaataggtatgcaggctcagaggaggacgagaggccccattattcactgatggctgccgcgtcagcagcagacacaattttgggggttaaggttgcctttattttattctctttgagatagttattcctaagaggaagttgctcactacattgatgtaggattttacaaattctctttgtctccttgtagaggaaatcagaatagttgccagcaaagttcgtcaaaatagaatactgaccaacagtgctgaaataaattatgggaagctgaaaataataacaaaatgcctagatggctttctcccttcatgtgcagccttccacttgagaataaaattgcycatgtaaatcagttttgtttaatattctcaagtagaactaagattc

SEQ ID NO: 296983 - DNA, 536 bp, Homo sapiens
acctatttttaaagaaatcattctgataataaaccagaatgaattaccataacttttatagtttcaaatatcaacacttcaattccaacaaaaaccaagttcatgttatgatttgtgtttaaatccttacctcattaatgactttatgaaaaaaagtcatttagattttaaaaaattcctttgcatatataaaaatatatcacatattttggaattagcagtataaatagaaaataacaaatttctagtgagaacaaacagaacaagtaagataaatcacaaaatagactaaataatttgagctggctgggcaaactcatgttaagtctattgaaaggtgacttcatgtatgaggtcacaagggagsctaccactgagattgcctgtgaccaagatgtttttgatcttctacctttgaaaaggtgtgaagcacagaaaaatgttgatataatttctgtgttagtttatttgcattcagtagcaaaacaaacagagagggaaataatttgtattaagggctagctatgttgctttat

SEQ ID NO: 296984 - DNA, 581 bp, Homo sapiens
gattccgtaaagtaagcgtgaggctgagaatctgtaaagctatttccaatgcttcaaatgatgcgaatatgtaacctcctttcaaaagatatatagataaccctccatttggatttttratacattatcttaatttccatttttgttaagagcagcaaaaagtatttgcgactatcaagaatggtttacatcacaagactttagtaactaaaatatatgagctatatttccatttatgtgtctcagactttaaatgtggcaaaatgtgttgtaattgaagctccgattttgcctccttgtcaaccgtgatttaacagtaaggggcctgctagctgtgggttagcatggaaattaactcaccttgcaggcactttccagtgaaaagaattacaacgcaagtagtagactgaatatttagttcattaggagcaatactgtttgaaattcctattctttagttttcatgatgacatgacttatttaaaatatggtttaagaaaaagtgacaaaaatattttaattttttcagttcacttaattcatgttaatcttatagcaaacaaaccacttgattcctggag

SEQ ID NO: 296985 - DNA, 581 bp, Homo sapiens
gattccgtaaagtaagcgtgaggctgagaatctgtaaagctatttccaatgcttcaaatgatgcgaatatgtaacctcctttcaaaagatatatagataaccctccatttggatttttgatacattatcttaatttccatttttgttaagagcagcaaaaagtatttgcgactatcaagaatggtttacatcacaagactttagtaactaaaatatatgagctatatttccatttatgtgtctcagactttaaatgtggcaaaatgtgttgtaattgaagctccgattttgcctccttgtcaaccgtgatttaacagtaaggggcctgctagctgtgggttagcatggaaattaactcaccttgcaggcactttccagtgaaaagaattacaacgcaagtagtagactgaatatttagttcattakgagcaatactgtttgaaattcctattctttagttttcatgatgacatgacttatttaaaatatggtttaagaaaaagtgacaaaaatattttaattttttcagttcacttaattcatgttaatcttatagcaaacaaaccacttgattcctggag

SEQ ID NO: 296986 - DNA, 595 bp, Homo sapiens
tcttctgctgtccatagatcagggagtaatttcaaatcttaatatttaagaaatatatttcataaggctacagctgtcatagacagtgattyccttggtggatgtgagcaaaataaattataaaccttgtggaacagattcaccattctagacgccatgaacgcttgtgattcataggaggaggtcaaagtatcaacattgatgggagtttgggagaagttaatttcaactctcatggatgactttgaggggtttaagacttcagtggaggaaataactccacatctggtagaaacagcaagagaactagatttagaagcggagcctgaagatgtgaccgaattgttgcaatctcattagaaaacctgaacagaaaaatagttgtttcttgtggatgagcaaagaagatggtgtcttgagatggaatctcctcctggtgaagatgctgtgaacatacctttaaaatgacagcaaatgatttagaatatttcagaaacttagttgacaagacagcatcagggtttaagaggattgacactaattttgaaagaagttctattgtgggttaaatgctctctagcagcatggcatgtta

SEQ ID NO: 296987 - DNA, 595 bp, Homo sapiens
tcttctgctgtccatagatcagggagtaatttcaaatcttaatatttaagaaatatatttcataaggctacagctgtcatagacagtgatttccttggtggatgtgagcaaaataaattataaaccttgtggaacagattcaccattctagacgccatgaacgcttgtgattcataggaggaggtcaaagtatcaacattgatgggagtttgggagaagttaatttcaactctcatggatgactttgaggggtttaagacttcagtggaggaaataactccacatctggtagaaacagcaagagaactagatttagaagyggagcctgaagatgtgaccgaattgttgcaatctcattagaaaacctgaacagaaaaatagttgtttcttgtggatgagcaaagaagatggtgtcttgagatggaatctcctcctggtgaagatgctgtgaacatacctttaaaatgacagcaaatgatttagaatatttcagaaacttagttgacaagacagcatcagggtttaagaggattgacactaattttgaaagaagttctattgtgggttaaatgctctctagcagcatggcatgtta

SEQ ID NO: 296988 - DNA, 590 bp, Homo sapiens
atttgtcaatatgaaagggtcctaagggttttttttctgcctcaagtgttcaaattattttattttgctatataaaataattcaaaggtttcatggtcatttgattgacatgcataaaagattattccatcaggaaatctaattattcttaggagaatgtgctcttaaaaatctgttctcctatactgcattgtaaaagacaaattgaattgacataagattatgtgcgtgtcaaatgtggttcatttcctgacagaaacatgttggctgacaaaagtatcaaaagtcttactcaaaatcycattttttatttttaattatttgtgaagaccaaagtcgaaggatatgtctcatattaatttaatctttctgtttttggaaagattttataataaaatataaaattaagctgaattgacatacctttcttcagaagacatttggcatcaatggaaataattattatactcttctagaatgcctggataaattgtgaattgagcataatttatcagaatgttattttccttcaagaaatgaaacaaggaaacactgtaacccattcaccttccatgatgccatttgcttca

SEQ ID NO: 296989 - DNA, 590 bp, Homo sapiens
atttgtcaatatgaaagggtcctaagggttttttttctgcctcaagtgttcaaattattttattttgctatataaaataattcaaaggtttcatggtcatttgattgacatgcataaaagattattccatcaggaaatctaattattcttaggagaatgtgctcttaaaaatctgttctcctatactgcattgtaaaagacaaattgaattgacataagattatgtgcgtgtcaaatgtggttcatttcctgacagaaacatgttggctgacaaaagtatcaaaagtcttactcaaaatcccattttttatttttaattatttgtgaagaccaaagtcgaaggatatgtctcatattaatttaatctttctgtttttggaaagattttrtaataaaatataaaattaagctgaattgacatacctttcttcagaagacatttggcatcaatggaaataattattatactcttctagaatgcctggataaattgtgaattgagcataatttatcagaatgttattttccttcaagaaatgaaacaaggaaacactgtaacccattcaccttccatgatgccatttgcttca

SEQ ID NO: 296990 - DNA, 607 bp, Homo sapiens
ttggctatgcagcttatggaaaggaggactgccataggaatttgcagggtgtttttgacttgacttccagaaaactcctagctctgtttttcttcttcatgctgggctgcaaaatgccagaaaatgagttatgtgcaccattgcatttgggaagctcccttattctgggaaaagctgaagaatgcataatsttgttgaatagtacaagtctgcttattgccataagcagatccaaagctgaaaaacaatctctcgttttctatgtctacttttggtatagttctagattaattgacacaaaactacctgaactgttttttactgcttttctttcagaaaacataaagcaaagtagtctaaccatcaggatatattttatttgccagaaactcttttaacctgagctttgtcttccctatattttcactacctttaaaaatatgtaaacttagtaatatagtggctaaataataaagtggctaagtggtagaatcctaatagcctttataagaaaactgttttaaaaagcactcttgaataatttacatctcaattttagatttttaaggaaagattttattttttagatcctaataattttaagggt

SEQ ID NO: 296991 - DNA, 469 bp, Homo sapiens
ataaaaatgtttttatttattctgtaagccaataagtggccatttatccattcaaatttattaattaaaaagttatgacgttagtattagctatttgttaggcaacatgttaaacaatccacaatgaatcaaaaatgacacttgctctcatgaaaaaatacaatttagaattcaaattcaaagcaggttaaatatagtttttaatatacagttaatcaaaaaacatctattgyagggatcaaaaatttaaatgcctaacaggacaaggctaataaagaataaatggacttgaagtatttaaatagtcacacgatcttccttggctgtctttcattttcccatttgacagcaatataaatagcaaagggtgtttctttcccatgaggaaagcaacagcacaatgaaaactagccacccaaatttagcttcagtgtcaggaagaaaagcattggtggaggctgtggcttcc

SEQ ID NO: 296992 - DNA, 508 bp, Homo sapiens
acttacacagacccttaaaggttctggcatattccatgtatgttcatattccattggccaaaacacatcacatgcccaaggccaaaagtcaatgagatagataatgtataatccacaaaaagggaaagtagatggaatatttgtaaataatcatacaacttactatagtggcaattcacactagtttctttccttctaaagtgattgtgaaaatgatgagcagaaatagaagatgtagtagaagggatggatttgggaagggagaagatgaattcagtaagaaacatattgcgtgtgggctgaacattcaggaggagatgtcaggcaggcagtttgaaatggaaaactggcacttaggaaaaaggacaggctaaaaattttgagtacagccaagaacagattatttgggaacacagcattttggcaaaggaggatgaggagatataactacaagacagagagtagctggttmgcaaactcaaatgttgagtaaaatgcatcttgataa

SEQ ID NO: 296993 - DNA, 492 bp, Homo sapiens
tcacttctccaagcttgtatccttttctacaaaataattaacactggcgtttacccgtgcaggattgttgagaggattaaattagattatgcctataaaatgttcagatagttcctggttcattttaagcaattaattggtataagtagtattactaccaaaattgcataaaagaaaacactaaatctgcctttgtttacatttgttttaataggagtctcttcttcaagtatatgttytctatttactagttttgaaaattttattgacaacttaataagaaagtctgggatatgtattgttaggcaattatgtgaaaaatgcaaataatattaatttcaattataaaacatatgcagcattttaagtaataacatgtttattttttgattcattatgccaaaatgctcaggtcttgttccttgcaagagtatggctgcacagtacacatacttattgctaccaatatttttatcacagtgaatttatgag

SEQ ID NO: 296994 - DNA, 492 bp, Homo sapiens
tcacttctccaagcttgtatccttttctacaaaataattaacactggcgtttacccgtgcaggattgttgagaggattaaattagattatgcctataaaatgttcagatagttcctggttcattttaagcaattaattggtataagtagtattactaccaaaattgcataaaagaaaacactaaatctgcctttgtttacatttgttttaataggagtctcttcttcaagtatatgttctctatttactagttttgaaaattttattgacaacttaataagaaagtctgggatatgtattgttaggcaattatgtgaaaaatgcaaataatattaatttcaattataaaacatatgcagcattttaagtaataacatgtttattttttgattcattatgccaaaatgctcaggtcttgttccttgcaagagtatggctrcacagtacacatacttattgctaccaatatttttatcacagtgaatttatgag

SEQ ID NO: 296995 - DNA, 580 bp, Homo sapiens
agatgggctgcttacccagaatccgagagtatgagctggaaaatcactgtgtgtcccacatcactgtataatgggaccaaaaatagacatgtcatactagcaaagacaggatccaagaaaacactgacacatgtaaacatttactgaaaccccaaacatcttctcttatcagcatttggattagtaattttagctttggacctttcactaggaactacacagtttattgctaatagttgctcattgatctcttagcatttgggattatgaagggattctattctccacatgtgaaatcaacataataggaatgtttgtgccttgcactgtctttgcaaatatsgcaggtcaggtaatttatatttgttatttagtcaatcactttaccatttttttccataccaccattcccttccccttttcccaaaaaaaagtcaatttatggaattcaaccaatttgtaagttcagatttcttttttctgaggttttaattcaagtagagaaaataagtgaatgcaggtggaagaaacaaggaaaaaatacatgctaaaccataaagtaatgttagaattattatga

SEQ ID NO: 296996 - DNA, 580 bp, Homo sapiens
agatgggctgcttacccagaatccgagagtatgagctggaaaatcactgtgtgtcccacatcactgtataatgggaccaaaaatagacatgtcatactagcaaagacaggatccaagaaaacactgacacatgtaaacatttactgaaaccccaaacatcttctcttatcagcatttggattagtaattttagctttggacctttcactaggaactacacagtttattgctaatagttgctcattgatctcttagcatttgggattatgaagggattctattctccacatgtgaaatcaacataataggaatgtttgtgccttgcactgtctttgcaaatatggcaggtcaggtaatttatatttgttatttagtcaatcactttaccatttttttccataccaccattcccttccccttttcccaaaaaaaagtcaatttatggaattcaaccaatttgtaagttcagatttcttttttctgaggttttaattcaagtagagaaaataagtgaatgcaggtggaagaaacaaggaaaaaatacatgmtaaaccataaagtaatgttagaattattatga

SEQ ID NO: 296997 - DNA, 1059 bp, Homo sapiens
ttaaatgattccaagttcttagattaatgtaaagtatatgatgagctttttggaatattttctcaatgatcttggtgccatcaattctaaatagaaccttattgccagtattgtgtacctcattacagagtaaccctgggcacttcctttgtaggttctggttgtaattgacaccatatatattttttaaaaatattttaagtttttcaggaacaaaaactgttacrgttgacacatcacaccactgtctttatgacctatctttaaagtgatacaaagagctactacaatagttgctttcatatttctaaaattcattgacttcaaagataaaagtcaaaaagatgtgaaaattccgtaacagtcttttcatgggatctattttttcactttcaaactcttaacagtaaaagtgaaagatgaatggtgttttgcaaggtgtcagaagtacttctgtgctgtgctgtattctctctgtgtgtgtgtgtgtgtgtwtttagttttctgcataaatacccagatatttttttttgcttttaaagtaattttttttgctttttttttttwaaaaaaaatagcaatgaaaattgagtactatacctgaagaccctctctcactgcctccagaatataaggtactaaagaatagttccagagatccatgaaccatactctagaaccttctacatccatggggcaaggaaggaatagtcggggacctgataagaaataaataacaaaatattttaagagttatatttaataatctaaacacatatctagacaccattttggaatataatatatttcttgcaaaattcctagaaaattgtattattggccagcttgattattattaaagcatgtttactgaagacccaatatcctagcctattctatctttttacaataaatattaatctagggcacaatatactagagtcaggagaaatgataaaagtcataatgcagttatcctgtttcattttacaagcaacaaagctgtgctgaaatgaattgccaaatataaaacacgtcattatttgcagaattgggacc

SEQ ID NO: 296998 - DNA, 466 bp, Homo sapiens
agttgataagcagagaagctggtgagcaagtgattcacaatacagtgtgctaagtgaaatgcacaaaacattatagggagacataagagaggcatctaatccagacttaaggttcacagaaaaacagagtacagtggttaaaagggaaaaaaaagcaaataataataataataataaaaaggattgaaatctaaagaataaaaagtgaaacytgaaaagtgtaagtgtatgatgtgttttgggaaataagtgttctgttgttatagaaaaatatagtacatgctactggtggtggcaataaaaaagaaaaaaagactttgaatccatgcagaagaagttgcattttattatataaagaagtgtggaacattgatatgtttgtttgcttctttgttttcagtagaggaaagcaatttatttatccaaggaaacagaaatgtgaaagatagaagaattaattagaaaa

SEQ ID NO: 296999 - DNA, 586 bp, Homo sapiens
atagccctactatttccctcattttacaggtgagaaaattaatactttttgttcattaagctatatgcctggcttatttcaagaatctaatgggtttgggctgctcttgggagtcacatttatttctgaaaatttgcagacttcaggtttctgagaaactgggacagtttagatcattgaaccaggttatccttgaaagagtaatatgacccagtataattgggattccctcaaggtattgcttataatagttgcattttcccgacagaaacttttaggtttcattgattcagactttaataaataattacaggtaaaactaggttagtgttaaaaatatgttagccatcaactatttcctttttaggattttttgttttactcagaaaataagaaagtacaggctacgccgtataggccctcatgmctttttaatatctgagtgttcaggctgattactatggcacattagaccgtagacggtggtgaaattgaatgttgttaactttcctaaggttcctaaacaaaaattttagggagatgtgacataagcaaattgctgctcccagaatatctgcttggaata

SEQ ID NO: 297000 - DNA, 1173 bp, Homo sapiens
atagccctactatttccctcattttacaggtgagaaaattaatactttttgttcattaagctatatgcctggcttatttcaagaatctaatgggtttgggctgctcttgggagtcacatttatttctgaaaatttgcagacttcaggtttctgagaaactgggacagtttagatcattgaaccaggttatccttgaaagagtaatatgacccagtataattgggattccctcaaggtattgcttataatagttgcattttcccgacagaaacttttaggtttcattgattcagactttaataaataattacaggtaaaactaggttagtgttaaaaatatgttagccatcaactatttcctttttaggattttttgttttactcagaaaataagaaagtacaggctacgccgtataggccctcatgcctttttaatatctgagtgttcaggctgattactatggcacattagaccgtagayggtggtgaaattgaatgttgttaactttcctaaggttcctaaacaaaaattttagggagatgtgacataagcaaattgctgctcccagaatatctgcttggaatawatagccctactatttccctcattttacaggtgagaaaattaatactttttgttcattaagctatatgcctggcttatttcaagaatctaatgggtttgggctgctcttgggagtcacatttatttctgaaaatttgcagacttcaggtttctgagaaactgggacagtttagatcattgaaccaggttatccttgaaagagtaatatgacccagtataattgggattccctcaaggtattgcttataatagttgcattttcccgacagaaacttttaggtttcattgattcagactttaataaataattacaggtaaaactaggttagtgttaaaaatatgttagccatcaactatttcctttttaggattttttgttttactcagaaaataagaaagtacaggctacgccgtataggccctcatgcctttttaatatctgagtgttcaggctgattactatggcacattagaccgtagacggtggtgaaattgaatgttgttaactttcctaaggttcctaaacaaaaattttagggagatgtgacataagcaaatwgctgctcccagaatatctgcttggaata

SEQ ID NO: 297001 - DNA, 612 bp, Homo sapiens
tgacctattattctattattgttagctgaaagtagaaaacgtcatgggagggaatatctgctagtttttggtaaaggatgttgtgatggcagaaccaagaaatgaacacaaggtgactttggtttggggacagtgggataatcaactctccttgctccatcagggccccagactgggctctggcagaggaactcagaacaacgtaaagacctagataggtatctaataaattgggacctgtgaaaacagtgcctcttaaagtgtggtacctggaccagcagcagcagcagcagcagccattgaaacttcatagaaagacagattctcagcttcatccaagacttactgaattagaatatctcaaggtaaggcctggtaatctgagctttaactagccctcaaggtgattcttaagttcaagcatcactatattaagttgaacaaatagatgccaggcctataaayacatgtaacgcctagcataaatatttcaacattaaaaatgacatttcatagttcttatttaccctattagctgtgttctgtcaagataatgagaatattgatatgttagaatacactgatggcactaatttttaaattagatcaaat

SEQ ID NO: 297002 - DNA, 576 bp, Homo sapiens
ggcttgcaataattcactgacaagaaagcttaaaagtcaaaagaaaaaaaaatccacagcatttttttttcttagttattctttctaaaagctgtgtaagtgcaaaagcagagtcatagcacaatggcagccagccagctacytagcatagcaatggacttgaattgtttgtattgttatagtgaaggctatagtttccctttgatcaacttctggttaaaatgtgatggacattagagaacaactgaattcctcttaccagcacattaaaaaggccccaaaggaaaaatgaggactttcagcagccatctgtagtatattttaaatattttattgcttaaagatattgcagttcatttactttccatatcaatccaacaccaaccccatttctgtatttacttgactaaaaaaaagattgcagaatgggtataatccttgcagatatgttggagactctccagcaacttcacagatacatttatagctggcagttaaatatgtgggttttatacattgtgttgggctatgtttaaagggtacatttttggggactgcaggatgattgtggttttg

SEQ ID NO: 297003 - DNA, 547 bp, Homo sapiens
agatatgttggagactctccagcaacttcacagatacatttatagctggcagttaaatatgtgggttttatacattgtgttgggctatgtttaaagggtacatttttggggactgcaggatgattgtggttttgacctttattaactcctattagtgttcttactctagattctatgctaacaatcacaaatattttataaacaaatatatgattacttcctaagtgcctgtcatcatagtagcaccttgggtaaaaataaaacaaaacagtatgggtgaaagttcctcagtttaatggtaagrgagagtaatgtaaacaaaggcccctcttaatagatgtctatacaatgtgccttagaagcaccaaagagaaacagttactcctacctgggagtataaaggaaagacttcaaaacacagtagcatttaagcagggtcttaaagaaagcatacaactttttgacatccagcctgggagaaatcagaaggaatgtggggagtgagagcataaaggcatagaagagtttggtgtgaggaaccagtaat

SEQ ID NO: 297004 - DNA, 638 bp, Homo sapiens
atgcatatgagttctgcctgcattcatttgtctagaacagctgcatgaccacatctgactgtaaaagagactaggttatatggttcagctgtgtgcccaggaggagagggaaattggtttgatgacatctggctagtctctgctgaactcactaattttttaaaaaatgctgttatagactttgtccttcttatttgtttctgcttcatttaaaacatgattcagacttcttgttycctctatttttgttccctaacatctttcaaaaaagtcttggatagtctcacaaatgagtccatttaaatatgcattgatggtctacatgtcttatgttgacaagtaaaaatacctcaaatcctacatgaaacttcccctgtttactcacatacatttgttctttcctatgttagagtacaagacactgaaatttaagtcatgcctcagttctcttacctgtgcggaagatgctaagatctgatcagcagatgatgaggctggtcttagctcaaggatgattgtgcgaggatacccaggatgtgctggacttattgctcatcagcttatgcagtgtgcccttgttggcttacgtaggaggcagccccaaaatctcagcctagaattaaaacgtgagaagacaa

SEQ ID NO: 297005 - DNA, 638 bp, Homo sapiens
atgcatatgagttctgcctgcattcatttgtctagaacagctgcatgaccacatctgactgtaaaagagactaggttatatggttcagctgtgtgcccaggaggagagggaaattggtttgatgacatctggctagtctctgctgaactcactaattttttaaaaaatgctgttatagactttgtccttcttatttgtttctgcttcatttaaaacatgattcagacttcttgttccctctatttttgttccctaacatctttcaaaaaagtcttggatagtctcacaaatgagtccatttaaatatgcattgatggtctacatgtcttatgttgacaagtaaaaatacctcaaatcctacatgaaacttcccctgtttactcacatacatttgttctttcctatgttagagtacaagacactgaaatttaagtcatgmctcagttctcttacctgtgcggaagatgctaagatctgatcagcagatgatgaggctggtcttagctcaaggatgattgtgcgaggatacccaggatgtgctggacttattgctcatcagcttatgcagtgtgcccttgttggcttacgtaggaggcagccccaaaatctcagcctagaattaaaacgtgagaagacaa

SEQ ID NO: 297006 - DNA, 1161 bp, Homo sapiens
ttattctgaaattctctaatatctgcaagtgggaattatgtggctaaaattaataaaatgtaagtgaaggtaaatcaaaatagaatctttggatttatccagttatctgaaagtacayttcattgccttaattcacactttataaatttttctacataaagtttttctgtaatatttgtctttatagctgaggacagattcagagaaacgctccaccacagacgagacctgggatagtcctgaggaactgaaaaaaccagaagaagattttgacagccatggggatgctggtggcaagtggaagactgtgtcctctggacttcctgaagaccccgagaaggcagggcagaaagcttccctgtctgtttcacagacaggttcctggagaagaggcatgtctgcccaaggaggggcgccatctaggcagaaagctggaacaagtgcactcaaaacacccggtaggcttgtcgtttgccagctgttatgcaaaagtgctttactttattgtttccattcaatctttgttttctctaacaatagcatttctaaaataccaaattcttatccatattaaacatggagtcaawtattgaaagtataaaagcataatacatcatagaaattatttttgtattgtactacttgatggattgttttgatttgtgaaactataatccagatgctgaaatcacagtttccaaaaggcattaaagattgtcatgtttttatgtgactctgaggttgccattgtaactcatcatatattgaagcaggcctaagttcaaatctaaatacatagttaacactaaatatctaagtctgcaattgttagcaatgtgcagaaaattacattgccatgwcaaagggcaccatgccagttctcatgaaatcatgggggcatcagttataagggtgggagacctttatgatttccaagccttttccaactaggaaaagtaaaggcaacagagatttttcctaagccgccaagcaaatatctctgggatcaggttcatgatgcttgtcactagtgtgtgtaaactaatcattcattttatccatgttgatttgttccagtacaatcacagaattagtatactcccatgtcttaactatttccttcattagcttactggctctccatagtaattaaaagcaaac

SEQ ID NO: 297007 - DNA, 560 bp, Homo sapiens
agtcttatattagaagagcattagaatagggattgttaaacctcaattgccattgaaattcaaaagatccttcaacactacaactggcccaagttgtagattgtagctctaaatgctattttttcrtaagactcaccttgacattaaacttgatcaatttttaactttaccattatagaatgattctcccaatacaagagatggttcccaggactcttattgatgtataatttttatcttatctgcttataatagaatttactaatgaatcttatgaggatggtaaacatattgagaagaagaaaagaggaagaagaaaaggaggaaaggaggagaaaagaggaggaggaagaggaggaatgaggaggaaaaggaggagaacgaagaggaggaagagtagtcaaatttgttataataacaatagctataatagacataagtattgaggacctagtgtgtgtagctaacataccatattacttaaatatattattttactttatctttacaatagccctataaagtaggttttattactaccattgaggcaaataattctt

SEQ ID NO: 297008 - DNA, 593 bp, Homo sapiens
taagcgggttttgcagggtgatgttcacagtgtagaagctggaccaaactcccttataggctctttgtggtagagtggccatttgcctaacattagcaactctttgagggggcaggggatccctacttcccaggcaaaaatctttcctgataagctacttacattcctggttcagcccttcctctggttgcrgcagaatgtaggcctagagattctcttcagcctcttactggtggggctagggactcagcgatgaagcaatgctacacagaagccagattttggtggaacttctgaggctgaaagccagcactatgaagagctagagtcaggtgcatggtggttggagataaagtctccaatttggctaccacataaaagctagagaagagtcttttccaatattagtggtttctcaagggagggaaattcacctgaactatataccccaatcataaggctttatgattttagactagagcagcattttcaagagaaatatgagtgctacatatgcaactcattttattttttaaagccagggtctcactctgttgtgcaggctggagtgcagtggttcagtcagagttcac

SEQ ID NO: 297009 - DNA, 595 bp, Homo sapiens
ttccttttttgggaaatcagtccaagtattaattttaaaaacaaaaacatgaaagactgtggttargcaattgtaacttctagcatgtcataatgttaataagaccatagaggcatagctactaaatattgtagccaagttccagaaaatacacaaaagtatctattaaataaccttatattattcttcaaatagaacatggcatgtaaagtgaagaaaagttgtctgtaatcccagcgtaaatacaccgtgcaatcaaagttaaatgcatgcattatttagtatatataggaagttaataggaaaattccaaaaaataaaacagagttagttatattttgacataagctttgggatttccagattttaataatcatctgtagcctctaaagataaggaatttgtttgatttactgaacgtacattattttaaatttcattaaatagataaatggttgatttttaaagaccaaataagtactcatgaaagagaaacattttggctctgggccataggaaatagaaatttcatcaggaaagaaccatggagggattgtctgtccctctctagtgccaaagcaaggggattgtacaa

SEQ ID NO: 297010 - DNA, 595 bp, Homo sapiens
ttccttttttgggaaatcagtccaagtattaattttaaaaacaaaaacatgaaagactgtggttaggcaattgtaacttctagcatgtcataatgttaataagaccatagaggcatagctactaaatattgtagccaagttccagaaaatacacaaaagtatctattaaataaccttatattattcttcaaatagaacatggcatgtaaagtgaagaaaagttgtctgtaatcccagcrtaaatacaccgtgcaatcaaagttaaatgcatgcattatttagtatatataggaagttaataggaaaattccaaaaaataaaacagagttagttatattttgacataagctttgggatttccagattttaataatcatctgtagcctctaaagataaggaatttgtttgatttactgaacgtacattattttaaatttcattaaatagataaatggttgatttttaaagaccaaataagtactcatgaaagagaaacattttggctctgggccataggaaatagaaatttcatcaggaaagaaccatggagggattgtctgtccctctctagtgccaaagcaaggggattgtacaa

SEQ ID NO: 297011 - DNA, 518 bp, Homo sapiens
tgaattccttaaaatagagatgataaaatttatagccttttaaatacctaatttatgatttctaaaagatggtatagcttaatttcattaaaatattcaaataaatgatactagaatcaattaagttttaagcaaacattcatatatctttcttcacatgtgtaaatgggaaataaacatgcctttttattaaaaataatttgaagacaaaagataagtattaaacaaygttttataccatctctgtcaattggaagttgtcactctaacttagccagagcagatctatctcattttgcatgtgatatcatagcaaaagtctaatcagttgcatagggaaggaaaaactaagatagtatttaatcaataggattcagaggaaaattatgctaatgtgatttaatctattttctagtaatcctatcactaaactgtcattgaattgtactgcattagaaaggaattcaaatatgtgtgacggcaatggacatcttgtcacctttagttggcctttttca

SEQ ID NO: 297012 - DNA, 518 bp, Homo sapiens
tgaattccttaaaatagagatgataaaatttatagccttttaaatacctaatttatgatttctaaaagatggtatagcttaatttcattaaaatattcaaataaatgatactagaatcaattaagttttaagcaaacattcatatatctttcttcacatgtgtaaatgggaaataaacatgcctttttattaaaaataatttgaagacaaaagataagtattaaacaatgttttataccatctctgtcaattggaagttgtcactctaacttagccagagcagatctatctcattttgcatgtgatatcatagcaaaagtctaatcagttgcatagggaaggaaaaactaagatagtatttaatcaataggattcagaggaaaattatgctaatgtgatttaatctattttctagtaatcctatcactaaactgtcattgaattgtactgcattagaaaggaaytcaaatatgtgtgacggcaatggacatcttgtcacctttagttggcctttttca

SEQ ID NO: 297013 - DNA, 526 bp, Homo sapiens
tactgagaataagataaatgcaggtttctaactccttagggacacaagtggggacaacacattccatgaacacaggtgaatgaatgcccctagtttctctgagttggacaatttcatgcgatcatttttttctctgaggccaaagtctctggtttgatcttcctagcagcttccagaacagaaagtgagtttactttgtctccatattctttttctscatgctcgggaatcccctgctttcctgatcccaccacaaaaactcccctgaggatgaagccttggctttccaggcttccagggaagcctcgattcctggctggaggtagttgtaccacactcccagagggctaaatcccataaacatcatcttctgtctttgtagatcatagaactttttattatcatccaggaagatttctcttttgaaacaaggctggaaaaactttacgtcagtcctgacctgctctttaatgactgcgtagagggagatgcccagcttatccaacttgggttgcagggaggacag

SEQ ID NO: 297014 - DNA, 526 bp, Homo sapiens
tactgagaataagataaatgcaggtttctaactccttagggacacaagtggggacaacacattccatgaacacaggtgaatgaatgcccctagtttctctgagttggacaatttcatgcgatcatttttttctctgaggccaaagtctctggtttgatcttcctagcagcttccagaacagaaagtgagtttactttgtctccatattctttttctgcatgctcgggaatcccctgctttcctgatcccaccacaaaaactcccctgaggatgaagccttggctttccaggcttccagggaagcctcgattcctggctggaggtagttgtaccacactcccagagggctaaatcccataaacatcatcttctgtctttgtagatcatagaactttttattatcatccaggaagatttctcttttgaaacaaggctggaaaaactttaygtcagtcctgacctgctctttaatgactgcgtagagggagatgcccagcttatccaacttgggttgcagggaggacag

SEQ ID NO: 297015 - DNA, 567 bp, Homo sapiens
tcatgaacttacatcaattaagagcttgaagtgactgagagtatttgcctggaagcatttaaagcccttcttgggaaatttagatgttttatattttactttctttttgattttgctttttccattaaagtgattactatttttaaagagaaaaccgaaaactctagaaagaccatcttttcttcataacaggtagcagaaaacaccatgttattacatttctagcaagagcagtagaggtgacttgttggttttgtgtactgttgctttagaaattgaygtaaggcttcccataaacgtgccagaggaaaagagggacgcaatgggatctgttattgaacatttcagaggcagactcttaccttaaatagggactcactatacattcatgttttcataagtattgggatcatgttcttactttctatcaacctgctattttcatctttcaagcttaagagtaataggctctgtgtgttttgtttttcagtgagcccaacaaatttgtctcagtttaaccttcccgggcccagcatgatgcgctcaaacagcatcccagcccaagac

SEQ ID NO: 297016 - DNA, 520 bp, Homo sapiens
ttcagcccatttaaaaaaaatagatgtttctactctccttcagatatcattaaaacataaacttgtgcctgactgcataaatcccttttaaactaatatcacttattacgtttaactaagtctacctagggcttccttgtataaagaacaagagctttccattttttgtttacctagccctttctgatgccasgacagaatagctgtaaatcttcattatttatattctagagaaaataaaagcaaataaaaaggtcagtgtataaagtttattggttgttctctttactcaaaacccacatggtattaatgttagtctctatgaatatttcatggataaaatcagagcattaagtgcatactaaaaacaataagaatggaaagactttaaccttatgtttatatgaatttctaggttatcaagaagtttataggctataggctataaagtcttaggctatgatatagtaacctattgtagacttcccttgatacatgaaaataatggtactaagtacaa

SEQ ID NO: 297017 - DNA, 548 bp, Homo sapiens
tcattgccttttgcaatattaaccaaaccactmagttcactgtgacagacagtgaattatatccaatgactccactgattttttccatgtagatagacaaaatataactactctcaaatgtaaggaccctgctttctgaaatggttctgttgctctcttcacagataggcttcttataatacttttaaaataatttgctaagcatacagatggctttctagagtgtggcattgacaaataaagtgatttttatatactgggaaattctggccttcaatgtatcaggattaaataatctgaatttctgaaagctagcctaagtgggcaagatggcttttttgtgctcacgcattgaatactgaactattctagttcttaaatggcgatctagattcaagacttattgaactaggttgaagggactttattgatatcctacctaatgctcacactgacagatgaagagactgagccacatgttctaaggtcataaacagaaagaatgagaatgagatggtctaattaattgtccacctttcctatggtac

SEQ ID NO: 297018 - DNA, 548 bp, Homo sapiens
tcattgccttttgcaatattaaccaaaccactaagttcactgtgacagacagtgaattatatccaatgactccactgattttttccatgtagatagacaaaatataactactctcaaatgtaaggaccctgctttctgaaatggttctgttgctctcttcacagataggcttcttataatacttttaaaataatttgctaagcatacagatggctttctagagtgtggcattgacaaataaagtgatttttatatactgggaaattctggccttcaatgtatcaggattaaataatctgaatttctgaaagctagcctaagtgggcaagatggcttttttgtgctcacgcattgaatactgaactattctagttcttaaatggcgatctagattcaagacttattgaactagrttgaagggactttattgatatcctacctaatgctcacactgacagatgaagagactgagccacatgttctaaggtcataaacagaaagaatgagaatgagatggtctaattaattgtccacctttcctatggtac

SEQ ID NO: 297019 - DNA, 603 bp, Homo sapiens
gatatcctacctaatgctcacactgacagatgaagagactgagccacatgttctaaggtcataaacagaaagaatgagaatgagatggtctaattaattgtccacctttcctatggtacatcagggtaacactttagtttacgagggtattattagagatagaaagaattttttttttaaataattgactcaaataccaacattttgcacattacatagagtaatagctttgcccaagttagaaaactgggggttcttctttattcctcttttgaccacatctatatactcagttttaaaaaggttcttcctggtatccttcaattccatccccatgttttcatctacaagcctagtgcagctattccagccgtctcctsatcaggtcttaagcacctcccatatgtccttgtagtacccaccatattgatctcagtagcaatcacagtactctattgtaaatatcttttaaattattatcttctctttgagcttttgggattttatcttatttatttttgtagttccaggatctagcaacagcttgtcacatcgttcatactcaactaatgtttgtttaatgcacaatgagcagaaataaac

SEQ ID NO: 297020 - DNA, 555 bp, Homo sapiens
cctcttttgaccacatctatatactcagttttaaaaaggttcttcctggtatccttcaattccatccccatgttttcatctacaagcctagtgcagctattccagccgtctcctcatcaggtcttaagcacctcccatatgtccttgtagtacccaccatattgatctcagtagcaatcacagtactctattgtaaatatcttttaaattattatcttctctttgagcttttgggattttatcttatttatttttgtagttccaggatctagcaacagcttgtcacatcgttcatactcaactaatgtttgtttaatgcacaatgagcagaaataaacatactactccatagtaaaaagaggatgaacttttctgcaaatattaatcagcaccattttatccaccttttgggtttagtacattggaagtataggagtataaagcagaatgtccaatgtttacagtgatattttgaaatagataaaagccagtgcgacatttccattctcaatttctctgagacaycaccttgaaaaaaaaaagtatttttctctt

SEQ ID NO: 297021 - DNA, 498 bp, Homo sapiens
ataaagtgaggaatgtgtaaacacacatgaaaaaaacacataaaagaaatatattaagacttagtgttcctcctgttgggccagcactgccatttgttggggaattgtattctgatttaaaccattgccatttacatctatgtgtaacatcaaaagatgtagsatcattattattctaaatacatacaataattaatatttggataaagctaccttcatgaaacctaagaaaaactaaattaaaaagaaagaaagaaagaaaaatacacttagatagaagaaataaggtctagtgattggtagcacaatagagtgactatagttaacaataatttattgtacatttcaaaatagctagaaaagaagatttggaatgttcctaacaggaagaaatgatattcttcctaaatgaagaatgggatattccactttcccagatttgatcgttacacagcatatgtttgtataataccacatgcaccccataaatacatacaa

SEQ ID NO: 297022 - DNA, 585 bp, Homo sapiens
gatggtctggaccattcagcgctccctgaatagccgcctgggcagcagaattctgagccttcagcatttcaatggtttctcttagttctataagttcagattcctgtggaataaacagagtttggaagctttagtacccgaaagaaaaataaaatctccctgctcatagttgaattaaaaaggtttgattttatgtagtaacaacctcctggaagatttggatgcttagctgaacttgtcaagctgtacctaataacttctttctcagctaaagtaaaggaggtggttttttgtttgtttgttkgtttgtttttcttattgtcttataaaagagatatgaatagtctttattcctttcaaaggtggcacccagaactcaccagtacaaagtaaagcaggatatcacaccactcatttcagataacacacttactaatattacctatgattacattagatatttagatatcactattgcactgttgcattgtattgtatttattgtcaactgcaaacctgaagttttgtcaaatgaatgatttcagattttgtttgaagtattttgtgcctgcaaaattgattatt

SEQ ID NO: 297023 - DNA, 572 bp, Homo sapiens
tgaatgactaaatagacaaatgaaacttataacttggggaagggagtttaagaatctctgctctatacttcacaagccttttctcaggattgttgaatcaccagagagcaatatacccttttatctcagctccctgaagaaatgcctttagtgaaatatgattaaatgttatgcccttagcttttagagaaatgtctatttgaacagtgattttgtcttttgttattccatgaccccaatttaaaaaycttggcaataaattcgtccttgaatttagtgccaaagagttttctcctcagtctaaattatgctctcctggtcagaaaatgagagtaaaacacacctaacaatctccctttgtaccatagcttccttgaaattcaattcatttcagtgccttgcagtagtaattatctaggctgaggtatattgttatatacattattctactggttttaattagattctgtctttgaattatatcatttcacattgcaaataattttataggcttttaaatatcactttgagaataggcaagttataatctcaaattaataaactagttaacc

SEQ ID NO: 297024 - DNA, 572 bp, Homo sapiens
tgaatgactaaatagacaaatgaaacttataacttggggaagggagtttaagaatctctgctctatacttcacaagccttttctcaggattgttgaatcaccagagagcaatatacccttttatctcagctccctgaagaaatgcctttagtgaaatatgattaaatgttatgcccttagcttttagagaaatgtctatttgaacagtgattttgtcttttgttattccatgaccccaatttaaaaatcttggcaataaattcgtccttgaatttagtgccaaagagttttctcctcagtctaaattatgctctcctggtcagaaaatgagartaaaacacacctaacaatctccctttgtaccatagcttccttgaaattcaattcatttcagtgccttgcagtagtaattatctaggctgaggtatattgttatatacattattctactggttttaattagattctgtctttgaattatatcatttcacattgcaaataattttataggcttttaaatatcactttgagaataggcaagttataatctcaaattaataaactagttaacc

SEQ ID NO: 297025 - DNA, 572 bp, Homo sapiens
tgaatgactaaatagacaaatgaaacttataacttggggaagggagtttaagaatctctgctctatacttcacaagccttttctcaggattgttgaatcaccagagagcaatatacccttttatctcagctccctgaagaaatgcctttagtgaaatatgattaaatgttatgcccttagcttttagagaaatgtctatttgaacagtgattttgtcttttgttattccatgaccccaatttaaaaatcttggcaataaattcgtccttgaatttagtgccaaagagttttctcctcagtctaaattatgctctcctggtcagaaaatgagagtaaaacacacctaacaatctccctttgtaccatagcttccttgaaattcaattcatttcagtgccttgcagtagtaattatctaggctgaggtatattgttatatacattattctactggttttaattagattctgtctttgaattataycatttcacattgcaaataattttataggcttttaaatatcactttgagaataggcaagttataatctcaaattaataaactagttaacc

SEQ ID NO: 297026 - DNA, 581 bp, Homo sapiens
cagtttgcaattcaaaaagaagtgattttattttcagttaaaaaagtgataaggacaatatgagacattctgatatcttctgagaaaattttataattttggcaatgttattttaaggataatgtagacacattataaaatctcttatgttatagaaattatttttaaatattcaggcattaatcataggcattatacattaacatacctctacatttttttctatatgtatatgagaaaattctctgtatgtttctatgagaaaattcacttacagatataacagagttcaagaaaatattgggtggaggacaaaaattctattaattttgacttattaaagatattgagacttaaattctaacactcatttccarcaatatgcttggtatatgcccagtgaggaatttggtgttatcttataattttcaagggaaaaagagaaatgtaaaggaaggtaatattttttggtagcccctagcatgtgacatgataacagtatctgatttactcctcatggtgatcctacaaggtagtcattatcatccccacttttaagaaggtgaatttgaggttcaaga

SEQ ID NO: 297027 - DNA, 601 bp, Homo sapiens
cctgttgcctgggttactctccaactcctagcctcaagtaattcttcccaccttggccccrcaaagtgttggctgggattataggtgtgagccaccacacctgaactttaccttttcaactgtggaaaaatccacacatatataaaagtgaacaaaatgaaaacagccccctgacttatcacatagtgaacattcatgcattcaccagccaagtcaagaaataggacatttcaagaaccaagaagctcttctttgtccctctcttattattccctcttccttccccaaagataacctctacataacttctgtggtaattattttcttgcttttctttatagtttttcctacccaagcttacactttaaagcactatgtttagatatgcctgttttaaaaaccacccaagtgtaatcaaatggcatgattcttttgtggttttcttttgctttacatgggttttgagattcatccatgtggtatgtagcataagttagtttttactgtatagtattcatatatgtgaatttaaatatatatatatgcccatgatggtcacttcagtgtaacctgttacgaatattcccactatgcccataaa

SEQ ID NO: 297028 - DNA, 565 bp, Homo sapiens
atattatatatcaaagccaggaatacaatattgatttacattaatagattgacatatgtggattcatgtgatggccatctcattcaaaatacaaaactaaagatctccctcttcctatagtcacactacctctctctctcctccatccttagcccttagcaatcactmatctgttctctgtttctttaattttgccatttctggaatgttatataaatggaattatacaaaatttgaccttctataactgtcttttttcactcagcataatacccctgggatccacccaagttgatgcacgtatcaatagtcatttctttatattgctgagtagtagtccatgatatagatgtatcagaatttgtttattaactggcctattaagggatatttttggttgtttcctttctttggctattaaaaaataaagctgctatgtacaggtttttgtgtggatctaatgtgatttgagaaggtttctaaattacattataaattgtttaaaggaacataaaacaggatatatatcagtctcccatcagcgtgcaaaagttaatactaatga

SEQ ID NO: 297029 - DNA, 571 bp, Homo sapiens
ccagaatctcagttcattgactttcacaggaatttcctgtcccatttttaactgcaccaatgggcccgcattggagtgtgagccctggccacagtccacaataggggttgtggtacagactagctttgtgtcatcaaaaatgaattaaaataaatggttgatctatggttgaaatgaggrgagtaatgtgctatggaagacaggaggaagaaaatgctttcaaacatatgaagtgttttgtttaaaaacttggagaagagtagaagttgagtgtgcagaggggaggaatccacaaaagcaagccgggctccaaaggaagctgtgggcgtgggtttacactgagagactggagccatctggtggagaatgctgaaagcaacaaagaataatgagaatcagtgcagtctgctagagaaatgagatcccagaagtggggactggaagatactctttacttttacatatgatgaagttgagattcaacaaatttaagtgacttgccgaagctgaaagggtgaaataatgtcattattaaatgggttaccctcagatatggtttcaatctagtatg

SEQ ID NO: 297030 - DNA, 422 bp, Homo sapiens
cacagtggctcattcctgtagttccagcactttgggaagcsaagaagggaggagtgcttgagctcagaagttccagaccggcctgggcaacacagtgagacttgtctctacaaaagataaaataatttagctggctgtggtggtgcatgcctgtggtcccagctacttgggaggctgaggtggggggattgcttgagcctgggaggttggggctgcagttagctatgattgtgccactgtgtgccagcctggccaacacagcaagaccctgtctctaccaaaaaaaaattagctgggtgtggtggtgtgcactcaataaaactaagagctagtatctagctagtatctcatcagaaatcatggaggttaggaggcagtgggataacatattaaaagagctgaaatataaattaaaagtgcta

SEQ ID NO: 297031 - DNA, 568 bp, Homo sapiens
aatttccacagcaatgtctgtgactttagatcagagtcaacacctctgtttggaggcaggtcctccatatttaatacaaagctttcttttctggcctggcataaaattatttggaatgtttctaccctaagaaaacagaacatagaaacaaagcttttttatctccctccaggtcttgtctccagataatgaaactctgtcattaggcttgtaaatactcctcactttaggggtgatgagattcaaactgtgagtctagggaatttcctggtaacagctcagccaggaaaatcaaagctgagttttctatccttgatattgaaacgttcctattcagtgaacaagtggttactgaaaattgtatgggggcactttatgttctccaagggactgtgagcccctgtgatgttcacagtccacaatggggactcagctgaacctaaagcactcaggcacggccacrtgctccatgctccttactctaaatagcaccaagtactccaggaacttggagcaaagtgggcctggccttgaagtactgccaagatttctaaacacagcaacagga

SEQ ID NO: 297032 - DNA, 570 bp, Homo sapiens
tgtacatatatacacacatatatactatagtatatgtccatatactctcccatcagcttagagtgtattgccctccgttgctgcatgacacacttcttcatgatattcagttctcaccccaaatgtcacctcttccaagaagtcccttatgaccactccatctggaatagcaggcttcccatcccatcactgacttcctcttaccctgctttattctctttgtatcattatcactctttgatatcttrtttgtttatgatttttgtctctctctctcccccagtaaaatataaattctgggactgaaccaatgtatccaaatacctagaacagtagttggcagagtagtcgcccaataaacatctgtgaaatggatgtcaaatgaatatgcatagatatgcaaatgaataggcacaaacactttctaggtctgccgtccaatttggtagccagtggtcacatgtggctctcaagcacttaaaatggtgccagtcctttagatcctgaggcagaacttagaaaagaaaaaaagaaaaaaataaaatggtgccagtccaaattggattgtgc

SEQ ID NO: 297033 - DNA, 570 bp, Homo sapiens
tgtacatatatacacacatatatactatagtatatgtccatatactctcccatcagcttagagtgtattgccctccgttgctgcatgacacacttcttcatgatattcagttctcaccccaaatgtcacctcttccaagaagtcccttatgaccactccatctggaatagcaggcttcccatcccatcactgacttcctcttaccctgctttattctctttgtatcattatcactctttgatatcttatttgtttatgatttttgtctctctctctcccccagtaaaatataaattctgggactgaaccaatgtatccaaatacctagaacagtagttggcagagtagtcgcccaataaacatctgtgaaatggatgtcaaatgaatatgcatagatatgcaaatgaataggcacaaacactttctaggtctgccgtccaatttggtagccagtggtcacatgtggctctcaagcacttaaaatggtgccagtcctttagatcctgaggcagaacttagaaaagaaaaaaakaaaaaaataaaatggtgccagtccaaattggattgtgc

SEQ ID NO: 297034 - DNA, 606 bp, Homo sapiens
aaaaactgtcagcaaactgagagcaggaggaaatttcttattctgatcaagggcatctatgaaaaactcacagccaaaatcatagttactgattaaatattgaatgttycttttacggttgggaataagtacagaataaatttaaagattcataagctgcttgtgttttaaaaaggatctgtgtatcccacccaaaaaagtttcattaatttattaatttattaattgaattgaataacatttattgtgcacttactaggtgcaaaacagctgtgaggtgttggggattttttttaaaggataaaaagcagtctgcttgtcaaggaacttttaaataaatttaaaaataagacagataattattaaaagtaactaaagtacactttaatatatgcttgagggccaaatgaagcaacagatgattaacagctcaagcttttggaatccagattgtggaggtcaaggactggcctatttaggagtttagattttattccataggctgtggggctttcttagcccatgttttaggcctttgagcagagaaatggtataataaaaagattccacagtcagcatcaccaacatcacattttaaaaatatgt

SEQ ID NO: 297035 - DNA, 568 bp, Homo sapiens
atatattctgatattaccaattttattgccctttatttctttgtgtgagtcaaaatctccgtcttttrtcattctccttttgcctgcagagctttctttaactccccttttaatgcaggtttactggcaatgaattttctcaactgttgtcttttagacaatatttttactttgcatttatttataaaagatatttttgctgggcgtagaaatctaggttgattttttttctttcagcacttcaaagatgcctctctcgtcttgtcttgtcttgtatagtttctgatgcaaagtctgtcatattatctttgtatctctgtatgtaatgcttcttttttctctggttgccttcaagattttctctttatctttgatttcagcagtgtgagtatgatgggtctttgtgtctgtgtatatttatctagcttgtgtttctctgagctgtttggatttggtgtgttgtctctaattatggaaaatcatctgttattacctcttcaaatatttcttctgcagtattctttctctcttttccatctggaattttaattacatgtatgttaaactg

SEQ ID NO: 297036 - DNA, 453 bp, Homo sapiens
cactgcccactttctgttggactttctccactttgctagttcttcaactggaaatgatgaaaataggctgattcctsgtttagttaccaggtgggagggctacccaaacaatattccaatttcattgttttcatttcagggattattgatggcaactttagggcataccttatatttgaacttccacttggtttcctgttcttgtgggattcatttgaattgctgctaagttgggcattcaaacatttctcttatgttggttctaaactagtgagggaaaaccacgatgtcagaagtaattttatttccactgtcttttcagatgtgtcagggctcttgatcaaaactgattttccaaaggagcagaaaaccaaacactgcatattctcactatacgtgggaccagtaggaccagtaatatagggcagttaagaccagtaaacaaggaggaaa

SEQ ID NO: 297037 - DNA, 1197 bp, Homo sapiens
tccctttgttgtgccccacagcaccctttgattcttgttgaattaataaatagtttgggatgaggagaaagcagaaacaagctcttctacccacttccatttccagcacaggctaataattatcaataacaagtcacagccttaactgttcctaaattccagaaatatatcatcaaagggctgtacatatatatgaagaaccctaaatctgcatttcgatatagacacctattagatttacttcttactacctayaggaaattcacgtctatgagcaaaaagtcatatacaaagattttcagaacagcattataatcaataaaaacaagaaaatggaaaaattagtgtagggatagtactagagaataattcgaagtctacaaaagattatgtttatagagtctttgtaacttttgattatgaaaaaatattgttatgttaaataataaaattaatagagtattatgagccagctattcttgtaacagctttaaacgtattaactaatttaatcctcaaaacaaattttacaaggtaagcactattactatctgcattttacaaatgaaaaaagttcaacacagagagataggaacttwtccctttgttgtgccccacagcaccctttgattcttgttgaattaataaatagtttgggatgaggagaaagcagaaacaagctcttctacccacttccatttccagcacaggctaataattatcaataacaagtcacagccttaactgttcctaaattccagaaatatatcatcaaagggctgtacatatatatgaagaaccctaaatctgcatttcgatatagacacctattagatttacttcttactacctataggaaattcacgtctatgagcaaaaagtcatatacaaagattttcagaacagcatwataatcaataaaaacaagaaaatggaaaaattagtgtagggatagtactagagaataattcgaagtctacaaaagattatgtttatagagtctttgtaacttttgattatgaaaaaatattgttatgttaaataataaaattaatagagtattatgagccagctattcttgtaacagctttaaacgtattaactaatttaatcctcaaaacaaattttacaaggtaagcactattactatctgcattttacaaatgaaaaaagttcaacacagagagataggaactt

SEQ ID NO: 297038 - DNA, 598 bp, Homo sapiens
tccctttgttgtgccccacagcaccctttgattcttgttgaattaataaatagtttgggatgaggagaaagcagaaacaagctcttctacccacttccatttccagcacaggctaataattatcaataacaagtcacagccttaactgttcctaaattccagaaatatatcatcaaagggctgtacatatatatgaagaaccctaaatctgcatttcgatatagacacctattagatttacttcttactacctataggaaattcacgtctatgagcaaaaagtcatatacaaagattttcagaacagcattataatcaataaaaacaagaaaatggaaaaattagtgtagggatagtactagagaataattcgaagtctacaaaagattatgtttatagagtctttgtaacttttgattatgaaaaaatattgttatgttaaataataaaattaatagagtattatgagccagctattcttgtaacagctttaaacgtattaactaatttaatcctcaaaacaaattttacaaggtaagcacyattactatctgcattttacaaatgaaaaaagttcaacacagagagataggaactt

SEQ ID NO: 297039 - DNA, 588 bp, Homo sapiens
ttctctttgtgttaaatggcaattcacgtcaaaaatcttagagtcatttttgatttctcattttctgttgtagaacacatccaattcatcaactaatcttgcccgctctgtgttcaaaatataattagaaccctaccatttcttgctgctrtcattctcatctgggccatcattatcttccacctaccttcctaagtggcctgctcacttctaccctaggacacctatatctattctccatggcaataagaatgatcctttaaaaatgtgagttgattacatgactcctcttctgaaaatccttctatagcttcctgtttcaattagagtaaagccctaagttttataatggtctccaaggccctatatcatctcacccaaggctacctctctgacatcccctcctttaacatccccccgctcactctgctttcactgcagtggcctcctcactcttccctgaatggggtgagcattactttgcctcaagttcttgccagctgtttttaccacatctggtatgtttcttccccatctatctacgtggctcattctctcacttccttcatgtctctgtacaaatttatt

SEQ ID NO: 297040 - DNA, 588 bp, Homo sapiens
ttctctttgtgttaaatggcaattcacgtcaaaaatcttagagtcatttttgatttctcattttctgttgtagaacacatccaattcatcaactaatcttgcccgctctgtgttcaaaatataattagaaccctaccatttcttgctgctatcattctcatctgggccatcattatcttccacctaccttcctaagtggcctgctcacttctaccctaggacacctatatctattctccatggcaataagaatgatcctttaaaaatgtgagttgattacatgactcctcttctgaaaatccttctatagcttcctgtttcaattagagtaaagccctaagttttataatggtctccaaggccctatatcatctcacccaaggctacctctctgacatcccctcctttaacatccccccgctcactctgctttcactgcagtggcctcctcactcttccctgaatggggtgagcattactttgcctcaagttcttgccagytgtttttaccacatctggtatgtttcttccccatctatctacgtggctcattctctcacttccttcatgtctctgtacaaatttatt

SEQ ID NO: 297041 - DNA, 475 bp, Homo sapiens
ggtgtgagtgattgtgctacctgccccaggaaaccacactttttccacagatctgtgcaacccacaggtcaggatatcccccttgtgagtccgtgccaccagggccttgggtcccaagcatagagctgtgaagattcttggtggccacttggctggagactgcctaagactactgagtttccagggggagggttgaccaccatcactgcattctcctgctgcctaagatgactgagcacctgcsgggaggggcaggagccatcactgcagctccagtctgctgttttccccctgccagtgctggggatactgggtgatttggactcaggaggaattccccatggcacagcacagcagctatggcagattgtggccagactgcctctctaggctggaccctgacccatcgctcctcactgtgcagggccttcctgtgggaatttcagcaattccaaccaggggtttacagacagaa

SEQ ID NO: 297042 - DNA, 615 bp, Homo sapiens
tagagaagctggtgccaccccctgtaacaatgtctgaacttcatcagagaacttatcagaatgaatctttttgtaaaaaccctggtgggaaataagtagtcctctttgattactgggcagcccattgcagtaatacctaatcggctggctgaacttaattagctttaggaggtattttgtttcattttgcttttatagatactttgggattttctacactgtcctcacatctgcaaatagaaacatttcacctgtatttttataatttttaaacatgctgaaaatttgaaagaatattacaatgaatacttgcatatccacttayaatacccacacttgttaacacatgttgaatgtgtgtggatatgtgcatacacattggttggacatcatgatgctttacttacaaacacttcatcacatatatgttaattataagtatattctactatagttacattctactatgacacctcaggaaagtaacagttgcctaatatcaactcatatctaattcacactgaaatttcctcagtttttctccatgatgtgtcttacagttatttccttcaaaccatgactctatgaagtttcatgcattatatttggttatta

SEQ ID NO: 297043 - DNA, 513 bp, Homo sapiens
gtatgccagcatgctcagtgaattttaataaratgtttttttttttttagacacgcaaaaaaaaaaaaaaaacaggctttgctaaaaattgctatgttgccaggctggtctcaaacgtctggcctcaagtgatgctcccatctctgcctcccaaagtgctgggattaaaggcatgagtcacaagccattgtatacggccagtttttctttaaatgcttggtagaattaagcagtggtcatcagattctgggcttctctttgatgtgagaatttttattattgattcaatatgtttgctgattattgggctgttcagattttctattttttcatgatttagtcttaagaaatgtatatgtctaggaatgtattcattcttttctaggttatccaatttcttggtgtataattgttcgcagtagtctgttttgatcctttgtatttctgttacacaatttgtaatatctcctatttcattttttattttatttgaatcttttttcttagtctaat

SEQ ID NO: 297044 - DNA, 513 bp, Homo sapiens
gtatgccagcatgctcagtgaattttaataagatgtttttttttttttagacacgcaaaaaaaaaaaaaaaacaggctttgctaaaaattgctatgttgccaggctggtctcaaacgtctggcctcaagtgatgctcccatctctgcctcccaaagtgctgggattaaaggcatgagtcacaagccattgtatacggccagtttttctttaaatgcttggtagaattaagcagtggtcatcagattctgggcttctctttgatrtgagaatttttattattgattcaatatgtttgctgattattgggctgttcagattttctattttttcatgatttagtcttaagaaatgtatatgtctaggaatgtattcattcttttctaggttatccaatttcttggtgtataattgttcgcagtagtctgttttgatcctttgtatttctgttacacaatttgtaatatctcctatttcattttttattttatttgaatcttttttcttagtctaat

SEQ ID NO: 297045 - DNA, 513 bp, Homo sapiens
gtatgccagcatgctcagtgaattttaataagatgtttttttttttttagacacgcaaaaaaaaaaaaaaaacaggctttgctaaaaattgctatgttgccaggctggtctcaaacgtctggcctcaagtgatgctcccatctctgcctcccaaagtgctgggattaaaggcatgagtcacaagccattgtatacggccagtttttctttaaatgcttggtagaattaagcagtggtcatcagattctgggcttctctttgatgtgagaatttttattattgattcaatatgtttgctsattattgggctgttcagattttctattttttcatgatttagtcttaagaaatgtatatgtctaggaatgtattcattcttttctaggttatccaatttcttggtgtataattgttcgcagtagtctgttttgatcctttgtatttctgttacacaatttgtaatatctcctatttcattttttattttatttgaatcttttttcttagtctaat

SEQ ID NO: 297046 - DNA, 593 bp, Homo sapiens
tttcttccaagtgccaaatctggttgcaaggccattggcaaaaatccaagtcagtaaaaatataaaatacctggtctgaaggagtgttgtctaaggtaagggttatggctttcaatgcagaccatkgtactgattggctcttgctatagacattctttcagcgttgttcctaggatcagaaagctgtttctgcccagtggcaacattagcaatcagcttagctgaataatcagtaaattagtcgtgggcataaaggggaacctctgacaggtgagggtcctcactgagccagcaactttgcttcaggtggcagagtggggaacagagtctccccaaagggtgtggcagccacatttttgcataaagctgagatattgccagggtcaggcaggctgtgctcttgagtgtaccattccacttggctggtgatgccttttgggcccttcccaacatattagttctcaagtcctcatcgacccatcccaaaatagggacatcaggccggagagttacaaggccgtatgggtcagccattcagttttttttccacattggtacaaatatttatacatatttctgggtacatgtgatag

SEQ ID NO: 297047 - DNA, 1057 bp, Homo sapiens
ttacatcttggacattttggatattatgagactctggatcttatttaaatctcctgatttagggctcctctggtttcacatcrccaaggggaaggggccttgcctgtaactgccaagtgagggtgaaagtccagctcccccacagcctttagtgacacttgtgggggtgctttgttactcctggggtggatggggggcaggctccacatcaggcttctgctggcaccgcctggctggcagggggtaggggccctcattactggtgtctgcatgccctccactgacactgagggagaggaggggctcactatccctgggaggtggtaaaagtcctggcttctcactcagcctcttctggctccaccctaccaggaagaggtggggcacctgggccattatgggaatagtgtactgccgtaatatgaccggctcttatcattttcaagaaactttttacatatacacaaaagtagagagacaaatataatgaattccatatactcatcatccaacttcaacaatgatattttgccaatctagtttcatctgtctcccccaaacttgtcttgcttatatatgttatagcawtgtgcacatgtaccctaaaacttaaagtataatwaaaaaaaagaaattatatatgtatatatttaaacttatttattgtcttccccatgagaacaggaatcttgtttgttttgttctctggcatatcctcagaaactagaacagtacctggcacataacaggctcttaaaaatatttaataaatggatgctatgaagaggctttcatagtttttttttttaattcttacctcctaaaagataagaacaattgtttcagtccctatccaactccagttgtgcaccagatcttgtcccctttcttctacttaaggactttgctcctgaaatcatccactttctctttttgcatcatcagtcttctctttactcatcatactttctttatgctacaatatgtcccattatacttatcatgttttcctatattatttatatctttattgatttattttctcttgttcccttat

SEQ ID NO: 297048 - DNA, 622 bp, Homo sapiens
aaaaaagaagagaaaataatttttaaaaagtaacttactctctttcacttagaaaaatgggggtactcggttatacttccaccccctctccattagaaatacaacttaatccaaacaaaaaaatcaccacatatacagcaagtaaattccatgtgaaggtcctcatgctttattcatgcttttggaatgggaagagcaattgtaacatttttcatgttatagggaagaaatgctagtagggataaaagatatggaaagasgttggatgaacaggagttaagaaaaggagataaaagctgtgatactgttggcaaggggactttgatttagaatctacattctttttacattcaaagagttactttgatcttcattgctccaagtggacccatttatatttttctttttctcatctcttcccctcccttcccacctattttgtgtcaaagcaaccttgtttaaaaaatatttacttttccaaaaggagttctcatagaacaagtctaataattaccttctaaatattagcatttagaataattgtaaaaaataaaaccattataatccagaggaaggaaggccgctcagcagctgatattcaattcagcagctgagggaacat

SEQ ID NO: 297049 - DNA, 440 bp, Homo sapiens
ttccaaactgcatagaatgtacttatactaaaaccaattatttgttgtttgtctgaaatttaaatttaagtaggcaccctgtgtttttattttttaaatgtaacaacctgacatattctaggcagaaagaaggaggaaggaaggagggcagaaggtcccaggattgtccctcctgggtgagtaaggccctttcaaacacttctacttacacctcattggttacccttagctgcaagggagrataaatgaatgcctagaagaaaattgacattctgttagtaaggaagaaggaaaaaaaataaatactgggtagacaaatagaagtttctgtgacaggcagaagtttgttccagtgcttctgtcaggtggatgaatggagggatcagactttcacagcactttttaacagtttcttaagtgggacatcttatagtcttcct

SEQ ID NO: 297050 - DNA, 540 bp, Homo sapiens
agtgggacatcttatagtcttcctttcaacctcttcactcctctacaccagtttagcagtgttagatgctacaaagtaacccaaggacattgtccttttttctggaagactttcctatcctttttgtgtgtggaaaaatataaattaattagaaaaactcagcatattaaggtctgttttaggaatgtccataacttaggtattttgggcacatggttttgggctatgtactaattgttgattcattctatatagtttcatcagtatctcctgagatataagtatgaaacacaaacaaccaccttagaatagtttaaaataaatcaacaagctttaatccaacagacrataaatatggagctttccaatctaacatacttcatactctcttggctatagaaagaagtccatttatgctgaaatatttgtcaatgataagaatgaattccttgttaatgagtaatttattgttaacaagtaacaagtaaaggcattttaacatagcacaggaggaggatattcaatatagtcaaaggcaac

SEQ ID NO: 297051 - DNA, 605 bp, Homo sapiens
gaactgatatagtagtatggcatttagaaatccacaaaatagctttgatcttggatcatgctatgcagtggctacaggactaggcagcagcaggggcataaggtatcccaataatacctctgctcaatgacccaaggcctkgcaggagaaatgttgggctgggagacttgaagatcatgtttggtggtgaagccaagcagatggttcacctgaagcattgcttcaagagggctaattagagaaacaaacctaggtacttgccaaggtacccgagtatgcaggttggaatgagagtagaaggcaaagcctcctttgggtttgcacaagatccagagtgcaggggacaaagactttttgtagtgtgtactcaggcttttgtgtaggtgggaaggtgcagttaagagcactgtgctggtctggacaagggtcaaggagacacacagcatagtggtaagaagtatggtgattccttgtttgcctgggactcagttccagatcataggacttacagcataaactgggaaagtcctggtcatactatgaaaaaagaaggtgttgaaatcccaagtggactttgggcccagttggcctatacagtaaggaat

SEQ ID NO: 297052 - DNA, 618 bp, Homo sapiens
attctaatgtccgagggcaggagaagatagatgtccctgctcaaaagaaagtgaatttgcccttcttccaccttcttgatctatcctcagtggattggatgatgcccacccacactggtgagggtggatctttattcagtctactgattcagatattaatctcttctggaaacacacacagagatacacccagaaatagtgttttcacaactatctgggtatcccatcaagttgacacataaaactaaccattatactaactgtccaacaggcaattggrtatagagatctagaacgtcagtaaggtatcaagactgaatacagagatctggtagttttcagtgtatcaacagtcttcaccaaaaacatctagaattattcctattttacagattaaaagcccatactgcatatctattgatgccatatgcccagaaccctttccttcttgatttagtaacagcctccatctttaaaaaatgaaaaccattaaaaaaccacttctcccagaccgtaggtaagtggtttgggtggagccagtgtcatgtcctatgcctcccaaggccagtgacccaagctgaccattatagtaccttacacttctggccacagtctcaa

SEQ ID NO: 297053 - DNA, 620 bp, Homo sapiens
catttaattatgtgtgagtaaaaaattaaaatacctgacaacaatgtcattaaatggaggaagggacagtcagttttcaaaatcctaatgtctttgtaattttataggcactctgtggaaaataaagatataaaatatctttatttagtattgagttaagtatacatggaaaattatctaaggtcaaccctgaataaatataatacagaggatgccttcaaaagtgcaattaaaaaaattcaagagaaggcaacaaagaaaaaataaaaacaaataaaaacaatgacataagcccaaagcccagaatagaatagtagaaatttgtgcagatatatcagttgcaatgatgggcctaagttctccagtgcaaaaggtatttttcagacagtttaaaaaggaaatctgccaatatactatttacattaggtacayttgaaatgtaaggacataaaaatagattttaaaataaaatttggtgtagctatattaattttagaggaagagaacttaaaaatctattactagataagcacgaaactcatttcatagggattatatatttaaacttgaattcatatctaacatgggttgaaaacatatgcaaaattaattataaatgg

SEQ ID NO: 297054 - DNA, 620 bp, Homo sapiens
catttaattatgtgtgagtaaaaaattaaaatacctgacaacaatgtcattaaatggaggaagggacagtcagttttcaaaatcctaatgtctttgtaattttataggcactctgtggaaaataaagatataaaatatctttatttagtattgagttaagtatacatggaaaattatctaaggtcaaccctgaataaatataatacagaggatgccttcaaaagtgcaattaaaaaaattcaagagaaggcaacaaagaaaaaataaaaacaaataaaaacaatgacataagcccaaagcccagaatagaatagtagaaatttgtgcagatatatcagttgcaatgatgggcctaagttctccagtgcaaaaggtatttttcagacagtttaaaaaggaaatctgccaatatactatttacattaggtacacttgaaatgtaaggacataaaaatagattttaaaataaaatttggtgtagctatattaattttagaggragagaacttaaaaatctattactagataagcacgaaactcatttcatagggattatatatttaaacttgaattcatatctaacatgggttgaaaacatatgcaaaattaattataaatgg

SEQ ID NO: 297055 - DNA, 600 bp, Homo sapiens
agtccctgaaataaatacaattatataaaatagtaaaaaataagggttattattgtcccattcatccaaattcttaaactcaggctgatatggcgtaagcaaacatagactacaatataaaacacaacagtgacttataatactcagggcataaggtatgtgccatccagattaccaagatttttttttattcgtracatgataagagcctttgtatatacagaaactaacttcagaattgactatgtcatgagtagttagaaagtaaggccacaaacaagcaaacaaacaaaaaactgctgaacttaataaaaacacagaaattacagaagacggggagcggcacatctgctccagaaggaattttcaatgaacagcaagaaaaagaaaaaagcttcaccctgaagatttttaagcctggcagagaataaacacaaccattacccaagttcacagctgtaaccttggggagctgaactggaacacagaacagttgccacctgcacagctgaagaaagactaatagcaggaacttaacatcagatcggtgatttcttggctgcagaaaatgtggcatctttcataaagcaagctgttttc

SEQ ID NO: 297056 - DNA, 600 bp, Homo sapiens
agtccctgaaataaatacaattatataaaatagtaaaaaataagggttattattgtcccattcatccaaattcttaaactcaggctgatatggcgtaagcaaacatagactacaatataaaacacaacagtgacttataatactcagggcataaggtatgtgccatccagattaccaagatttttttttattcgtaacatgataagagcctttgtatatacagaaactaacttcagaattgactatgtcaygagtagttagaaagtaaggccacaaacaagcaaacaaacaaaaaactgctgaacttaataaaaacacagaaattacagaagacggggagcggcacatctgctccagaaggaattttcaatgaacagcaagaaaaagaaaaaagcttcaccctgaagatttttaagcctggcagagaataaacacaaccattacccaagttcacagctgtaaccttggggagctgaactggaacacagaacagttgccacctgcacagctgaagaaagactaatagcaggaacttaacatcagatcggtgatttcttggctgcagaaaatgtggcatctttcataaagcaagctgttttc

SEQ ID NO: 297057 - DNA, 600 bp, Homo sapiens
agtccctgaaataaatacaattatataaaatagtaaaaaataagggttattattgtcccattcatccaaattcttaaactcaggctgatatggcgtaagcaaacatagactacaatataaaacacaacagtgacttataatactcagggcataaggtatgtgccatccagattaccaagatttttttttattcgtaacatgataagagcctttgtatatacagaaactaacttcagaattgactatgtcatgagtagttagaaagtaaggccacaaacaagcaaacaaacaaaaaactgctgaacttaataaaaacacagaaattacagaagacggggagmggcacatctgctccagaaggaattttcaatgaacagcaagaaaaagaaaaaagcttcaccctgaagatttttaagcctggcagagaataaacacaaccattacccaagttcacagctgtaaccttggggagctgaactggaacacagaacagttgccacctgcacagctgaagaaagactaatagcaggaacttaacatcagatcggtgatttcttggctgcagaaaatgtggcatctttcataaagcaagctgttttc

SEQ ID NO: 297058 - DNA, 600 bp, Homo sapiens
agtccctgaaataaatacaattatataaaatagtaaaaaataagggttattattgtcccattcatccaaattcttaaactcaggctgatatggcgtaagcaaacatagactacaatataaaacacaacagtgacttataatactcagggcataaggtatgtgccatccagattaccaagatttttttttattcgtaacatgataagagcctttgtatatacagaaactaacttcagaattgactatgtcatgagtagttagaaagtaaggccacaaacaagcaaacaaacaaaaaactgctgaacttaataaaaacacagaaattacagaagacggggagcggcacatctgctccagaaggaattttcaatgaacagcaagaaaaagaaaaaagcttcaccctgaagatttttaagcctggcagagaataaacacaaccattacccaagttcacagctgtaaccttggggagctgaactggaacacagaacagttgccacctgcacagctgaagaaagactaatagcaggaacttaacatcagatcggtgatttcttggctgcagaaaakgtggcatctttcataaagcaagctgttttc

SEQ ID NO: 297059 - DNA, 618 bp, Homo sapiens
tgctttcgtgaatagtgcagaaatgaacatatgcatttatattacctgacactttaaatgtttgcttgtgtttctaccacttcattgtcttcttagataaatctatgcatatatgtttatcacattttacacaaatagaagaatgtgctgtccttactgatatctgtattccaagaatcaacaacaaatggacattttatccattgtcttacatctcttattctgtggatgtktcacacagttaattctaacacaatgggaaaacttccaaaatatatgattcatttaatttaaacaaagcttggaaaacacaactgaggaaagaggtttgttttctgatgatagaggtagttcaaagaaggtgttaattattgtaaattttgggacttaaattgcaacctaatccattggttattgaaactcagaacttgagtactcagtaacttgaaatggaatagaggtccttatgtcttatttgtaaaattttcatctcaatcattttattctagtgtcccatggtttaatattcatcttatgtcagaattaagtgttctgtgatgttcaacaaatttgtaatctcactgaaggtataaatccggaattttactgtttctagaa

SEQ ID NO: 297060 - DNA, 549 bp, Homo sapiens
tatatgtttatcacattttacacaaatagaagaatgtgctgtccttactgatatctgtattccaagaatcaacaacaaatggacattttatccattgtcttacatctcttattctgtggatgtgtcacacagttaattctaacacaatgggaaaacttccaaaatatatgattcatttaatttaaacaaagcttggaaaacacaactgaggaaagaggtttgttttctgatgayagaggtagttcaaagaaggtgttaattattgtaaattttgggacttaaattgcaacctaatccattggttattgaaactcagaacttgagtactcagtaacttgaaatggaatagaggtccttatgtcttatttgtaaaattttcatctcaatcattttattctagtgtcccatggtttaatattcatcttatgtcagaattaagtgttctgtgatgttcaacaaatttgtaatctcactgaaggtataaatccggaattttactgtttctagaaacagtttaatcacactgtatatgttgaagaagtttggagt

SEQ ID NO: 297061 - DNA, 608 bp, Homo sapiens
aggtggaacatttaggtttaagtttttttttttcatgttctgtcattttcccctgcatcattagtctcattctccctgctactaaaagagaatgattttcccccaaatctcctgtttcatttattttattcttacattcttcccttctcttctacctctttcttcaacttccctcttcttccttctaaaataccatatatcttctttttctttttctatttgcttctctgctgttctctacagttgtttgatgctagtattgaactttttgcttctttcccctatcaaggttcgatttaatcgacttcgtgagaggatatacaagtaaaatgtgcttcyaaatcttgcttcctattttcagtctgaaggggaaaaacagcttcagttgttaaaagtctaatttccttaaaagcttgaattttactcctttaagttttgtcctaaagcagattcatttgacttgtaattgatatgtccctctgttggtcagacttcagttcttcttagagcccagaataacttttctctacttattgctgttttggttactgtttatgctttctcatgtcaaagtcacaatgcactgacttctactgacaatgggtctc

SEQ ID NO: 297062 - DNA, 608 bp, Homo sapiens
aggtggaacatttaggtttaagtttttttttttcatgttctgtcattttcccctgcatcattagtctcattctccctgctactaaaagagaatgattttcccccaaatctcctgtttcatttattttattcttacattcttcccttctcttctacctctttcttcaacttccctcttcttccttctaaaataccatatatcttctttttctttttctatttgcttctctgctgttctctacagttgtttgatgctagtattgaactttttgcttctttcccctatcaaggttcgatttaatcgacttcgtgagaggatatacaagtaaaatgtgcttctaaatcttgcttcctattttcagtctgaaggggaaaaacagcttcagttgttaaaagtctaatttccttaaaagcttgaattttactcctttaagttttgtcctaaagcagattcatttgacttstaattgatatgtccctctgttggtcagacttcagttcttcttagagcccagaataacttttctctacttattgctgttttggttactgtttatgctttctcatgtcaaagtcacaatgcactgacttctactgacaatgggtctc

SEQ ID NO: 297063 - DNA, 596 bp, Homo sapiens
ggagtgccagtatttctagcacaatcatatttttaatgggtgaacataaagtatttttcataagaacataagatagcagaaaatatatatttgttgaagaaatagaaataaataatataaagttgccaacaaacagaaaaccaaatgacataagtactaggaacttctgactagtatagaagtaatttaatatttatatttggacatacactggctagactaattattgataaagtagtcattgcccatctgcaaaatcaaacaaccataaagtaacattttgaattgtctgccatggggctcaaagtcttttatgtatcaacctttgatttaacacattagagtattaccatagtataatgaaaaatctaaaagcttttgaatcagataactttataacacagtacrtttgtcttttggtgtctgtgtcatcttgaaatttatatatatttctgaatcttagttttctcatgtttataacaactggggataataaatttacctcatttcaaaacatttacctttagtataaaaataaaaataaattatcaatataaaaataccatgcttgatacttaggctctaaaatattagac

SEQ ID NO: 297064 - DNA, 587 bp, Homo sapiens
attaattattattccacagcgacctgtttggataatcatggtgaccttgatttggggaatttaacatttatcgtcattgaattttatgactggtgagaattaagcagtttgattttaggtgtcttgatgtttcccagcaatgacgcccagtttgctgctttacagagcagcacacattttacttctcaagatagcatgggaacatttagactttattaatagaaaagtagtcatagtaattttattcatgcaatattgttacattttagttaggaaaagtgaaaattagggaagtctaaggaaaattacatatagctatttagatagtcttacaatctcacaaatagcaatgtaaataaaaacaaaaggtgaaaatattstttatgcagataatcccaaaatgtatttaactagcacttattatatgtgttatactattactatttgacgatcactgtgcaaggtacaatgaggagagtggcatcaattgtaggggaactccttttagagggagggctttatgagtgtcaccagcgtataggactggtcactctcaagaccctctcagaagtgtgaatgatgataaa

SEQ ID NO: 297065 - DNA, 587 bp, Homo sapiens
attaattattattccacagcgacctgtttggataatcatggtgaccttgatttggggaatttaacatttatcgtcattgaattttatgactggtgagaattaagcagtttgattttaggtgtcttgatgtttcccagcaatgacgcccagtttgctgctttacagagcagcacacattttacttctcaagatagcatgggaacatttagactttattaatagaaaagtagtcatagtaattttattcatgcaatattgttacattttagttaggaaaagtgaaaattagggaagtctaaggaaaattacatatagctatttagatagtcttacaatctcacaaatagcaatgtaaataaaaacaaaaggtgaaaatattgtttatgcagataatcccaaaatgtatttaactagcacttattatatgtgttatactattactatttgacgatcactgtgcaaggtacaatgaggagagtggcatcaattgtaggggaactccttttagagggagggctttatgastgtcaccagcgtataggactggtcactctcaagaccctctcagaagtgtgaatgatgataaa

SEQ ID NO: 297066 - DNA, 630 bp, Homo sapiens
ttttatcatttagtctttatttttgaataatatctagtttcctccaaaacagaccacttcatttataatatcaaatgtgtttttagagagttgttctttattacctaatatttttccgatttgttctctatcagttttaacaacatactgttagtcccaattttagcttatttgattatgagagatttgaattattttaagcactgatataactattaatgttctataagtaccagagatacatattaaaagaggcttagaaacaaggtattgtctcaagaggtggaaagtcaagggtcacatcaaagatatagcctgctttaagaacctctttccatctcttccatctgccatcattattcacttgtcttctccaaatcaaaagaaggctgctttttctttgaaaataatttctgaagaaaggggaagtagaaaaagtaaaagtactgtatctcactggtcagcttgtggcttgyctattcatacccattagtttttaaattttattttgagaaaaaaaaatctgaaatttataaaaaggttgcaaaaccactacaaataatttttcttaagtgtaaatttctaacctaatttcacataacttcctagtaatgtagtgtacattttcta

SEQ ID NO: 297067 - DNA, 461 bp, Homo sapiens
agaattttgataatcatgtttttataaccttgacagttttctagagtacagtcaggtatttcccacaatgagagttgtatgatgctttcctataattagactgggatgatggggatacatggagggaaggcacagaagtaaggcatggaggtaaatcatcgtggaaaagctattttatcacagtatgccaagtgtacataacattgtagatgtaaaccatgattacctggatgaggtagcaattgcagatttycttactgtaaagttattctttttcctcccttgttatatagcaccatttggaagcaagtcactacgcataattcacaattgagtaataaagatttatgcttcacctctttgaaggtagagtatctacatatattatttgacattcatctctatttgttcagtcatttattcatatcaatatggattcatggataattacatgggtactt

SEQ ID NO: 297068 - DNA, 461 bp, Homo sapiens
agaattttgataatcatgtttttataaccttgacagttttctagagtacagtcaggtatttcccacaatgagagttgtatgatgctttcctataattagactgggatgatggggatacatggagggaaggcacagaagtaaggcatggaggtaaatcatcgtggaaaagctattttatcacagtatgccaagtgtacataacattgtagatgtaaaccatgattacctggatgaggtagcaattgcagattttcttactgtaaagttattctttttcctcccttgttatatagcaccatttggaagcaagtcactacgcataattcacaattgagtaataaagatttatgcttcacctctttgaaggtagagtatctacatatattatttgacattcatctctatttgttcagtcatttattcatatcartatggattcatggataattacatgggtactt

SEQ ID NO: 297069 - DNA, 559 bp, Homo sapiens
atagtcccatggtttacttctcccccttctctacctccctccatctctcagaactattcctttatatcattatgttaaacatataaaaagactgtggttttttgaaaatggcacttgattgtgaaacaagagctctaatttgaagacctgcttttgacactagctatgtgacctgcagcaaatttcgttctcatctggaaaatttttgcagaggaaggtggtgagagtaaagtgatttgaacaatatgatttccacagtttaatttagctgtagtgttccataactgtgaatttctggacctcctgagtaacggctaaatataaagttggctctataaaaacttaygtgggtaaaaaatttgcaaagaagtaaatataatattcatatgtattatctgcatgatagtaaattccttggtatttataggtatctgagtacgttcagataccctgtagcagccttaactattggagcttttatttatatggatatatagacaaaattaagtgagaagctgaggaattatctgataatttagtctcgctaatagttttacct

SEQ ID NO: 297070 - DNA, 437 bp, Homo sapiens
acagagaatgtaaaatggtagacaagtccatatcttcttaaatgagattgtataggatagaatctgggctctataattgaataactgaaattttgaacaagtttaactccttgagtctctattttctctaaaatgagaaaccatctaagattatgttcagaattaaataggtttatgtacataaatctgttagaacagtatctggctggaataagcattatgcartgtttccttgtggtggtagtagtggcagtacttgttatagtagtaatatattgagtatgaggattacagttagccatccatacacagactcaaagccttgctcttctgtatactagtgtgaactcctcagaacattatagatccatttttaattttttaatttttttatataacaataatcatatctattgatactttgaaatgattaaatg

SEQ ID NO: 297071 - DNA, 1868 bp, Homo sapiens
aactcttccagaaatctaccatctcactaaaatgcaaactattgaatgaagttatacaaggctccaaaactagatggcccaacattttccttttcactgatatagcttgatccaataactcatagattatctagagagatagaggatctacatgtttttaatataactccccacaactatcacctttccagtgaggctttcagtaacagttggactacagacactttgacgtgtactacctgagatgggcattaatgcctggagtacaaaaagtctgatttgttgtgtttggccaaattcagatgctgtagagttcaaaaagatatataggagtttagaaaatgctacaagattcctaatatgattatatataccttaaaataagtggcttaaaaacaggggataattttataacctacaaacaatataagcatcaaatttatccatgccttggaagtgtcatctactaggaaaccagagttcttacgatacagttgattacttgagagactgagtgaaaattatatgtgtgtatatatatatatatatatatatrtgtgtatatatacacacacacacatatatacacacacattaccaataaatcactcaacaaagggatgtatwaattgcttgattccaaactcccatgggcataaaatatcatcaatcaacttcatataaatgtataaatcttcagaaataagtttaagttgagcatgtgcaagcacaaatgtcacaagatacaaattttcagtcaggtgtttaattttcattttaatgtactgaccactaccctcgtctctctttctaccttcttggtcccttctccattgtttccttattaccagttcatcccacaactgcagcatcttgtaggggtattgtttattgttgttttatgacctacttctcagggttgcattgttttcattttgcaaaagccctttaaaattccacagctctaaaaatttaagtactacaawgttcaaaaatcaatatcttatcttgagtgatacacaagtttccagaagagaaattttggcattcattccatcttagtaaataaaaaggaattcacatattagtaatttaaaatcctaaataatgtaaagcatgtagagatgaagcaatcattattcaattgcaagtgagagaactgccctgaatcagtggttatagatggatatataactttttcttttaggcccttttcataatatggttatttgtggtctgagtaaatcwaattgcttgattccaaactcccatgggcataaaatatcatcaatcaacttcatataaatgtataaatcttcagaaataagtttaagttgagcatgtgcaagcacaaatgtcacaagatacaaattttcagtcaggtgtttaattttcattttaatgtactgaccactaccctcgtctctctttctaccttcttggtcccttctccattgtttccttattaccagttcatcccacaactgcagcatcttgtaggggtattgtttattgttgttttatgacctacttctcagggttgcattgttttcattttgcaaaagccctttaaaattccacagctctaaaaatttaagtactacaaagttcaaaaatcaatatcttatcttgagtgatacacaagtttccagaagagaaattttggcattcattccatctwagtaaataaaaaggaattcacatattagtaatttaaaatcctaaataatgtaaagcatgtagagatgaagcaatcattattcaattgcaagtgagagaactgccctgaatcagtggttatagatggatatataactttttcttttaggcccttttcataatatggttatttgtggtctgagtaaatc

SEQ ID NO: 297072 - DNA, 620 bp, Homo sapiens
aattgcttgattccaaactcccatgggcataaaatatcatcaatcaacttcatataaatgtataaatcttcagaaataagtttaagttgagcatgtgcaagcacaaatgtcacaagatacaaattttcagtcaggtgtttaattttcattttaatgtactgaccactaccctcgtctctctttctaccttcttggtcccttctccattgtttccttattaccagttcatcccacaactgcagcatcttgtaggggtattgtttattgttgttttatgacctacttctcagggttgcattgttttcattttgcaaaagccctttaaaattccacagctctaaaaatttaagtactacaaagttcaaaaatcaatatcttatcttgagtgatacacaagtttccagaagagaaattttggcattcattccatcttagtaaataaaaaggaattcacatmttagtaatttaaaatcctaaataatgtaaagcatgtagagatgaagcaatcattattcaattgcaagtgagagaactgccctgaatcagtggttatagatggatatataactttttcttttaggcccttttcataatatggttatttgtggtctgagtaaatc

SEQ ID NO: 297073 - DNA, 532 bp, Homo sapiens
ctacaattctcttctgcaagaacaatattgtgtattccgaaacaattactcttttcacagtaaataatttggaataattgttcataattgataacaatttctagaagtaatagaagactgtggtaaaagagattggactctgtagacagacaaccttatatttagatccctggtcttaagtctactaacttgtgtggcgcgggaaaattactttcatctctttcagagacgtttatttgttttctttcctccctccctccctcccttctttccctccttccttccttstaaaaaatgaagacaaaattcatcaatttgatgttgccttaaggaaaaaatgtgattaagttttcaaaagcgcagtgttcagccaatgttataaacttttccattagtattcagataggtatcaattaaggaaaaactcaccagtaataatggtaatatttattgaaggcttgctatatactaggcacattttaagacctattttggatgtttccctcttcctaaaatatttaataatatcccc

SEQ ID NO: 297074 - DNA, 578 bp, Homo sapiens
taatccaggtgtgcgtcagaatcatctgaggaactttgctaaaatacaaaaatctggcytaagtagctccagatctaccttcataaaggaatctgaccactcctggatttggtaatttccaagttctgaaaattttacttaggatttaataactattaacatctgtccctacataggttttctttcctacttatataccttatgttctcttcattctaaccttcatcagtaatagggaaatgttttaattttatttttttagttgaagggtaatgtaccaaaaaatatagttcagtgaattaaaatgaacacacatgtgcaaccatcaattcaggtcaagaaatagaagattgtagcacacaaaagcctactcagccattctcccagtcactacttccttccttacccctgggttattttttgaaatgacacttgatgtatttccctctgttgctgttatgagaacattgctacagccaagtgttgtgtttctgtgtgcataggttgatacttaattatctccccactttttaataaacttttaatttggaaataattttagattgacagaaaagttg

SEQ ID NO: 297075 - DNA, 609 bp, Homo sapiens
ttagtggttaaaatgattaattgaacccatcttgtgttactcatactagctcttgcaaaggaggtgattgctattttttcttagtgactcatacgaagatgctagcagttcactggcaataacaaaatgacatttctaaatttagcagttcataaatcttagaagatgccagccacatccagcccccttcccccatgctcctctcccagtcccttctcaaatgtgtaaaagacttaaatgtgcatggagacaaaacagagacttcctcagggcacatgtgtctcttcctccctcagtacctaccaacaccactgtgcactcagataggagcaatgtgtatatttcccaaatgatagcttttattatgccattacgatgctaaatgtgtctggtaaaaatacatgcagaatatgtgaatgtttccaaaggagmccaattcgatgaattattttcagggggcactgtgtaaactagcaaatttcttcctgtcctcctatgttatctattccgtgacaagaagtatgcaataaatcaccagccttaggaaagaaaaaaattgcctctatcattttctgtggtttacataaggcacttaccaaatgtatcatg

SEQ ID NO: 297076 - DNA, 559 bp, Homo sapiens
aaacccagcaggagtagccatttatgcctagtgttccattattggaacattaagcatgtgggaattatttatatcctactgctcaaggccatcgccaaggtctgattgcaaaaattcaaagaattgcaacctcaggcagaaatgggttaactttcagagttaataattatattcatttcactgatacmcaattttgacaagattttgtgagcaaataaataattctctaaagagatccagcattgtgatagaaaaaaaaatatgtttgatacaagtgactaggctaagcaaaactttcatctctctttaatataccatacacctgcattgatagaatttgtcctaaacataagggcttctcaattagtctctctgttttgcccgctgtgcttgctatttatgttacacaaatagaatgttgtatatttggaagcaattgagctaaacaactaattcctgacttagagtatctgtgataacacatttcaaagacccagggtatgacacattatgcccagtaactgactcagttaagtatctctctggaaagcatgtaaac

SEQ ID NO: 297077 - DNA, 572 bp, Homo sapiens
caactgggttcaagataatggtcactctttgattgggaagcaataaggtcagattctatttctacaaagaatcaggtagtttccaggctcccctctgaagacctagtaaggataaatagtgcttccaaatatgtttgaagataggatacagagaagaacacgtccaaaacacatctttgagatgataattttgctgaagtttgctattgactttatgacaataattaaaattggcactacttctttctactcccagttcctttgtcttaaaccatggtgrgggggaaagaaatatcactcagaatttttcagtgttggtcttgcatctcaagatgtacacagctatgcttttctaaaaaacggattttagctactatgaatcatttgtaatatacatggtatattataccaagtataatatatgatggctggggttcctttacaattggttcacccactcctggtctcaaagtgatttgtaaaatgatgggttggatgctaggagtgcaagggattgttaaattctgggtttttgtttgtttgtttgtttgtttctgtttatggtggttact

SEQ ID NO: 297078 - DNA, 1009 bp, Homo sapiens
taatccaggtgtgcgtcagaatcatctgaggaactttgctaaaatacaaaaatctggcctaagtagctccagatctaccttcataaaggaatctgaccactcctggatttggtaatttccaagttctgaaaattttacttaggatttaataactattaacatctgtccctacataggttttctttcctacttatataccttatgttctcttcattctaaccttcatcagtaatagggaaatgttttaattttatttttttagttgaagggtaatgtaccaaaaaatatagttcagtgaattaaaatgaacacacatgtgcaaccatcaattcaggtcaagaaayagaagattgtagcacacaaaagcctactcagccattctcccagtcactacttccttccttacccctgggttattttttgaaatgacacttgatgtatttccctctgttgctgttatgagaacattgctacagccaagtgttgtgtttctgtgtgcataggttgatacttaattatctccccactttttaataaacttttaatttggaaataattttagattgacagaaaagttgwccattcatttctgcaaacagagctcaagtgttttgcaacaaagttattttcctatgcttatgccaactagagacgttttgactcctatcacaacactgtcactaaatcttttcagttaaccatttcttctttctcttggataaaaataagttacagtgcctaaaaagtagaattatcctttgaaatgtaagtctccaaatagtttgaatctttatacatagaaattttcattatgaaatgtaaaggattctgaaattagccatcagagcctatgattgttttccccattttwaagttcagaaattcatgtgactgttccatattttattaaaattttagctgcttaaatcttttttctttaggttttgagaggcaggtgcaatggagcgggcgtgcaggaggttgtataataattgcaaccaaaagaaaa

SEQ ID NO: 297079 - DNA, 430 bp, Homo sapiens
ccattcatttctgcaaacagagctcaagtgttttgcaacaaagttattttcctatgcttatgccaactagagacgttttgactcctatcacaacactgtcactaaatcttttcagttaaccatttcttctttctcttggataaaaataagttacagtgcctaaaaagtagaattatcctttgaaatgtaagtctccaaatagtttgaatctttatacatagaaattttcattatgaaatgtaaaggattctgaaattagccatcagagcctatgattgttttccccattttaaagttcagaaattcatgtgactgttccatattttattaaaattttagctgcttaaatcttttttctttaggttttgagaggcaggtgcaatggagcrggcgtgcaggaggttgtataataattgcaaccaaaagaaaa

SEQ ID NO: 297080 - DNA, 1071 bp, Homo sapiens
aaattctagacggtaaaatttagacaataattagtcttctgatttttcctaatgacagtttgtaggaaatacaggttgagcatctctaatccaaaagttcaaaactggaaatgctccaaaatctaaactttttgattgctgacatgatgccacaagtggaaaattccacacttgatttcatatgacaaatctcagtcaaaacacagacagaactttgtttcaggtacaaagttacgtaaaatattatataarattatcttcagttttgtgtatacagtgtatattaaacataaatgaattttgtgtttagacttgtgtcccatccttaagatgtctcattatgcatatgcaaataaatattcccaaatctgaaaaaaaaaaaatctgaaatctgaaacacttttggttccaagcattttgcatatgcgatagtcaatctatactgtacaatgctaggttatattcacaaaagagttgttcacaacwcctaattacctcccaaaggctccacctataaataccatcattttaatgattaawcttcaacatactaacttgatttgggggtaagggtatgcagatattcaatccatagcatcctgcgacctcctcttctctaaccctccaccaacccttgacaatcatgaggaaactgacacaaactatataactatatgcttatattttttctatccccatctattgctggatcattttctattacatctttgccttattacattccagaatatgagtttatccacagagagctcattgcttcctgagactgttcaattatgatttagacaacactaattacatttctttttaaaaatatttttttctggtgttgaaccaaaatcttcatcccttaattttcctccatgggttctagttctgccacctgttttctacatagcaactctttcaaaatattaaacttcagatttcacatgcttctgagttatttgacttttctccataacaagtatcaacagttgtttatgccatttctcatataaagcactccttgtaactgaggaacactgtggcttctacccaaggaggaga

SEQ ID NO: 297081 - DNA, 585 bp, Homo sapiens
cctaattacctcccaaaggctccacctataaataccatcattttaatgattaaacttcaacatactaacttgatttgggggtaagggtatgcagatattcaatccatagcatcctgcgacctcctcttctctaaccctccaccaacccttgacaatcatgaggaaactgacacaaactatataactatatgcttatattttttctatccccatctatygctggatcattttctattacatctttgccttattacattccagaatatgagtttatccacagagagctcattgcttcctgagactgttcaattatgatttagacaacactaattacatttctttttaaaaatatttttttctggtgttgaaccaaaatcttcatcccttaattttcctccatgggttctagttctgccacctgttttctacatagcaactctttcaaaatattaaacttcagatttcacatgcttctgagttatttgacttttctccataacaagtatcaacagttgtttatgccatttctcatataaagcactccttgtaactgaggaacactgtggcttctacccaaggaggaga

SEQ ID NO: 297082 - DNA, 672 bp, Homo sapiens
aaaaacaaatttgtgagtttatatatataaataaaaagtaaaaatggaataattgagtattagaatatttcatatttactttatgcatatagcaagttataaacaccctgtgtttttaatttatccacttctattagatttttagagagttcatgtgtctgtgaagaattttactcccaatgcactggtttaataattgcatggataaatcctaaatgaactgataaccacatatttgttgtgcaattactatatactatgtgctgtccaatggacattatataaatcatctcatttaaccatctcaaccaccatgagatataattaaaattgcctgttttaacaaatgaggatsaaaagagaaaccacaactctctgagaatgaataatttacccaagacttggagccgaaagggtcaaatttgaattcaggtctgtctgagtctgaaacctatgccttatcataggtttggtatgggtattttaatgagaaggaagtaaaaccatgaatatttgcatgacctagaaaattattatctggttcaggtcccactttttcatgatgtaacaatgtatgactttcaattttgttgggaacattttgaaactcttgtgatatttcaaagttttaccatataaaatattgacaagaatgcattctataggtgcttt

SEQ ID NO: 297083 - DNA, 599 bp, Homo sapiens
ataggtttggtatgggtattttaatgagaaggaagtaaaaccatgaatatttgcatgacctagaaaattattatctggttcaggtcccactttttcatgatgtaacaatgtatgactttcaattttgktgggaacattttgaaactcttgtgatatttcaaagttttaccatataaaatattgacaagaatgcattctataggtgctttccaaagagttcaaagcatcttgctagagcctccttatctgtgtttatatgcgttttgtgtgttctaagaaaaagtgctttctctacaatgcaaaatacataagatccataaaatgactttattaaggagaaaaggagacaataccgtgcctgataccgtcctggttcccctgcttcactacaaactttattttatttttaccagatggtgctgtattttctttttctttataaaagaggctacttgaagaattatatttcagaccgtgcactctactctgttaaatggatagtcactgttatgtcaaaaacagacaaaaagttaatttgggtttcctaggctgtagagaattttaggagtctctctcacaaatagggtctcttttttcat

SEQ ID NO: 297084 - DNA, 631 bp, Homo sapiens
atatttcagaccgtgcactctactctgttaaatggatagtcactgttatgtcaaaaacagacaaaaagttaatttgggtttcctaggctgtagagaattttaggagtctctctcacaaatagggtctcttttttcatgttatactctacttctgtttgaaactctgattacagtaatattagatatcatttttaaatcttgttttaaaagtctaaagtygctaaaactgaaatcatgtactgttcaacgtatcatgtgatcccacgagggtggctatttggaaggtaagtgttttaatttacatggcatattttcaggctacataatcaccctaatatggtagtctgattagaaatatttggagtgtatgctttctggttaccagatgatcattagaaactacatgactcttttttcttaatatgttgactttagagaagccatttcttttacatctgaaaaacatctttccttctattttaacttaattcatctaaggtttacccatacaattattatatacatgcaataatttcatggataaatccttgataaactagtaatgaaacattttctgtagacttgtagggtgccagttaacttagaatatgtgttacataaatcattccat

SEQ ID NO: 297085 - DNA, 417 bp, Homo sapiens
tccttttgttgttgaatccaatatgtgtgattatattttattgtttggatttttaaaatttttatggtagaaaaaattatagcagcacatattgaacattaaataagagagcaaaagaatgtcatttacsgtatagccattgccttgctctacttttttttttttttttaaacagagtcttgctctgttgtgcagactggagtacagtggcagaatattggctcactgcaacctctgcctcgtgggttcaagcgattctcctgcctcagcctcccaagtagctaggattatggacgcacaccaccatgctcaactaatttttgtatttttagtagagatgtggtttcaccatgttggccaggctggtctcaaactcctggcctcaactgatctgcccactttggcctcccaaagtga

SEQ ID NO: 297086 - DNA, 606 bp, Homo sapiens
ttttttatctggcaatgtttttaagattttgtatttatattttctttttaacaattttgactatgctatgtgtgatgttggtttttttttttttaaatctttatcctgcttagtattccttgagtttcttggcttggcttaatagttatcaccaaatgtgaattttttccagccactatttcactaaattttttaatccaatcttgcctatatttcttggacttcagatgcacatatggyagacgttttggtttgttgttgttgttgttgttattttctctccatatcattgaggctttgttcactttcatcagaatttttatgtctggatatcactttctgttcctctttcttcatgttcattgatcatgttttctgcggtgtccaatttgctactaaactcatctgtgaatatttcaattcggatatacttttcaattttagaaccttattttttttacagttataatcttagattacccacacatccacttaaacagtttttcctttaaaattttacaaatattttaaaaactgttttaaaatttatttctgctaatattaacaattctcatatctgattttatttatttccttttcttggat

SEQ ID NO: 297087 - DNA, 606 bp, Homo sapiens
ttttttatctggcaatgtttttaagattttgtatttatattttctttttaacaattttgactatgctatgtgtgatgttggtttttttttttttaaatctttatcctgcttagtattccttgagtttcttggcttggcttaatagttatcaccaaatgtgaattttttccagccactatttcactaaattttttaatccaatcttgcctatatttcttggacttcagatgcacatatggtagacgttttggtttgttgttgttgttgttgttattttctctccatatcattgaggctttgttcactttcatcaraatttttatgtctggatatcactttctgttcctctttcttcatgttcattgatcatgttttctgcggtgtccaatttgctactaaactcatctgtgaatatttcaattcggatatacttttcaattttagaaccttattttttttacagttataatcttagattacccacacatccacttaaacagtttttcctttaaaattttacaaatattttaaaaactgttttaaaatttatttctgctaatattaacaattctcatatctgattttatttatttccttttcttggat

SEQ ID NO: 297088 - DNA, 587 bp, Homo sapiens
agacctacaggatccctatgcaacactcaatcaattggcagagagagaacaattgctgttaggacatattagttacataactgacgactgctgaacactgtgattttaattcattaaaatcatttaagttccattaattttcttcagagttccacagcatttttaatggtaaacttatagcacttattatagggcttttaagattagatgttcaattttctagtttattataatagataaagatttggcttttctggatattttttgccttttggtcaaaaacgcagatgataaatgtgtcaaatagccatttttggtatcasttgtataaaggccaataatgagatacatcttacaaatgttctttaaaaaacacctctaaatcttacatattctctttgcaattagaaataacattcttatttttgtgtaactcttattacctaaagagagttaaagggtttatgaagaattaaaaagagtgaagaatgaaacattcattgtttcaacaaccctagacatttgaaaatatttcaggagcctaaagctgatgtaattactattagagatctataaaaagaaattac

SEQ ID NO: 297089 - DNA, 493 bp, Homo sapiens
tcaagttagcaatattcttataatgtgagcagcaggagcatatccatggttctccttattttataaacagaaatcaagtataaagtatgtggttgcttataagtctttgaagggaatgagattttatccagcttcttagaaataagcacatgagcactgacttgattctctgaagctctcatagatgataaaagataaatgtttctcattccaaaactctggaaatttgtattagatcacactccctcttttaattaatatgcaaacacattgcagcacgatgatatatgttttcacatgcaccatctcatttgatagtccataacaactcatatgacacatcartgtaccctattttgaagaaatacacaatgaaaatcagataattgtatcaataaccttaattcacagcactggaaagcaacagaaaaaaagatttggtgggagatctccttgctttatgctgacaattctttctatattaatattttgg

SEQ ID NO: 297090 - DNA, 594 bp, Homo sapiens
cattttggctgttaagaatcattcaccaacatgacctcttttcttcttgagccatgctaataaggctatatgacttgccacccactcataaatacacaagtgaaaaaaatttatcttgcaacaattatatagacttgtccttgagcactaagaagaatatctgttcttttattcccttattctgacagtaaacatttattgagtgttctatatctagacccagggctagacattgcagttataacagtggaaatctagttttagaccagaatttataatctgggggaatggagacaggggaggtatagcggaaagagaagtaaataggcaaacataaagccaagtggtaagtaagcataggattttaggrgagggtgggaaagtgggagggggaagaggaaaagagagggtgagttttcaaaaaatcaggcaccaaacaacaaaaaaaaatcataggttcaaaaaacatttcccaagagaaagtggcctctaaactgtgatctcaagcaaagctatgttaattcttacaattattccattgtgtaggtggagaaactgaggcaggaagacactggtctgaagttgtaaaaatgt

SEQ ID NO: 297091 - DNA, 594 bp, Homo sapiens
cattttggctgttaagaatcattcaccaacatgacctcttttcttcttgagccatgctaataaggctatatgacttgccacccactcataaatacacaagtgaaaaaaatttatcttgcaacaattatatagacttgtccttgagcactaagaagaatatctgttcttttattcccttattctgacagtaaacatttattgagtgttctatatctagacccagggctagacattgcagttataacagtggaaatctagttttagaccagaatttataatctgggggaatggagacaggggaggtatagcggaaagagaagtaaataggcaaacataaagccaagtggtaagtaagcataggattttaggggagggtgggaaagtgggagggggaagaggaaaagagagggtgagttttcaaaaaatcaggcaccaaacaacaaaaaaaaatcataggttcaaaaaacatttcccaagagaaagtggcctctaaactgtgatctcaagcaaagctatgttaattcttacarttattccattgtgtaggtggagaaactgaggcaggaagacactggtctgaagttgtaaaaatgt

SEQ ID NO: 297092 - DNA, 453 bp, Homo sapiens
aattctgaagagatgatggatgtcattagagtgacaaaggctgaggacaagcaagtcattttcataaggcagaactgctactcagcttgtggggccaaccttttgctacaaaatgtaaatacttctatattgaccagtaaatagctgaatctttgagctcccacaaygtgacctcattgagctagccaccttgatgcttccccggggtctccttatgtccccactcctattgtgtagctgcagaagtgatgccaggcagggcagggtgttcctgggccctgctgaaacagtgcagctggcatctgttctgatgaccagtgcccaagccatatagctttttacgtgtttgagtagcacccctatgtccataagcctcaaaaatgacccaaaaaggaagaaaataaatttcaagtgatgtaagaaatttttaaggtatttaatgtctcagcttca

SEQ ID NO: 297093 - DNA, 526 bp, Homo sapiens
gaattccaagtatttcctatcctattaaaatgaattggaagtgttaagtaaaagtaaatgacagtatatcacatcctycctgattttcaccctaattaacatgaaaagaagccactctaggtttcagatctttttaatttaaagaaaaacattactacaacaaaattattttattaccaaaaggatgtgcttttcattttagtggtcgtagaattggatatcaattccaaactgtcaatacaaactcaaactaaaaactagacttaggaatctccatttttttatattagtattttatgtttgttgagaaagctggctcctaggccacactcacatactaaaaatcatatgacatggagttctgctcctcttaggattgaaaacatcacaagagaacatcactcctacccttacagcaaggaaaaaggcagataatctacaaaaatatcactcttcttaagcccatcagagctaaaatcacagagttacaaaataaatcaggcaaactaaaactaaattccaaaga

SEQ ID NO: 297094 - DNA, 526 bp, Homo sapiens
gaattccaagtatttcctatcctattaaaatgaattggaagtgttaagtaaaagtaaatgacagtatatcacatccttcctgattttcaccctaattaacatgaaaagaagccactctaggtttcagatctttttaatttaaagaaaaacattactacaacaaaattattttattaccaaaaggatgtgcttttcattttagtggtcgtagaattggatatcaattccaaactgtcaatacaaactcaaactaaaaactagacttaggaatctccatttttttatattagtattttatgtttgttgagaaagctggctcctaggccacactcacatactaaaaatcatatgacatggagttctgctcctcttaggattgaaaacatcacaagagaacatcactcctacccttacagcaaggaaaaaggcagataatctacaaaaatatcactcttcttaagcccatcagagctaaaatcayagagttacaaaataaatcaggcaaactaaaactaaattccaaaga

SEQ ID NO: 297095 - DNA, 542 bp, Homo sapiens
ttgggagaaaatatctgcaagccatacatctaataatggatcaatatataaaatatataagaaactcaaacaaccctctaaaaagaaaacaaattacccaattaagaaatgggcaaaggayctaaatagacatttctcaaaagaagacatacaaatgacttcagatatatgaaaaaatgctcaacatcactaatcattaaagagatgcaaattaaaaccacaatgagatagcacctcacaactgttagaatggctactatgaaagcaacaaaagacaggtgttagcaaggatttggaggaaagggaatccttgtacactgttggtgggaatgcaaattagtacaaacatggaacatggtatggaggttcctcaaaaaactaaaaatagaattaccacatcatttagtaatacaatttctgatacccgaaagatttaaaaatcagtgtgttgaagagatgcctgcctgtatccccatgttcattgcagcactattcacaatagccaaattatggaatcaacctaagtgtccataaaggaataa

SEQ ID NO: 297096 - DNA, 608 bp, Homo sapiens
aaaagtaagtcaatacccagtgtgttattttaataactgattttaatacagtgccattctgcaaaattgataaatggtgtttgtaatagcttatttattgccaaagctaagtgctgttttttgttactatgtaagctaagttccttctgaaaagaatgaaatactcatctatttgcccaggaaagatggtattattttaagcaaaaaccattaatttgattttcattgatgaactttagccagttgataaatcttcaaagggaaacttatacctatatatgagcacagttggatttctratatgttaataagattgctcccatgaagactctcagcaagatacataaactctgggagaaaatgcctctttttctagatgacatattaatggttttaatgacttcttccaagcctggcataaacatagtgcccaagaagaaattattgggtctgtgtttaaattatcattttataacttagataaatctcctatttattttttaaagtgttatcctttgtgttaatttcctcaggctgtcataacaaataccactaacttggtggcttaaaaccacagaaatttattatctcagtgttcagaagtccaa

SEQ ID NO: 297097 - DNA, 578 bp, Homo sapiens
aagctgttcccaaattcctgagccatagaaactgtgtgagataataaatgtttattgttgttctcagccactacatttctaaattattttttatttatttttagacataaggtctcactatgttgcccaagctggggtgcagtggctattcacaggcacgattgtagcaaactacagccttgaactcctgggctcaagtgatcctcccacatcagcctcccaaatagctgtgactacagacatgcaccatgacaccaggctaagttatgggataatttgttatgcagcaatctcaacatgaggcaatggtaagactgtttaaaaatgttatgtgttttttggctacatcaattgaataaaggtttcatatcatctattaataatccacttctagacttacactaatgtaggatattgtttatagcttgagtcgtatagtatgacagacattggtaaagatattgagagtactaaagtactatcaagatagtgaaaacaacaaaatataacatraggagtgcttcagtcaactggtgatgtttaaccttgagtagactaaggaattacatggtatctat

SEQ ID NO: 297098 - DNA, 532 bp, Homo sapiens
ttatctcattcctgaatttgacagctgcttagctaaatggttcagggtgtctcatgaggttgaattcaagatattggctgaaattgcagcatcaaaaaatttgaccatggctgtaaattctgcttccaagatgctccctcacatggctgttaagttcatgctggctgttgacagacagcctcagttccttaccacatggacatctccttagggctgtctgtgtgtcctcataacatggcagctacctccagagacagtgatcaaaaagaaagcaaggcaaaagttgctgtrtattttatgtgctatccttgaatggcacacatcgttatttccacaatattctattagctacatagggaaacttcattcattgaagggggggtggggcatgacattgcaggagaacgttaattataggagcctggaatcattgaggccattgtggaggctggctaccatattcactgaagtctctaataatttaattttgagatacttcatccctttaggtattaattgattttttgaaacc

SEQ ID NO: 297099 - DNA, 285 bp, Homo sapiens
ccctctcctggctgtagcaagaagtgggctgaagaggacaatataaagtaattgcaaacagaaaacaaaaaacaacaaaaactattgtarcaagcagggggcggggtggggggaagaattatttctgtgtctgttttggcaaggccccaagactaagtcctatgctccaatgctccaaagaaagacgcaggaccccaaagcaggactaacatggtcaagaacaagactgtgtggctctttgctgatagcccaccaccagcctataaaagaggttggagaaactaa

SEQ ID NO: 297100 - DNA, 285 bp, Homo sapiens
ccctctcctggctgtagcaagaagtgggctgaagaggacaatataaagtaattgcaaacagaaaacaaaaaacaacaaaaactattgtagcaagcagggggyggggtggggggaagaattatttctgtgtctgttttggcaaggccccaagactaagtcctatgctccaatgctccaaagaaagacgcaggaccccaaagcaggactaacatggtcaagaacaagactgtgtggctctttgctgatagcccaccaccagcctataaaagaggttggagaaactaa

SEQ ID NO: 297101 - DNA, 1545 bp, Homo sapiens
ccctctcctggctgtagcaagaagtgggctgaagaggacaatataaagtaattgcaaacagaaaacaaaaaacaacaaaaactattgtagcaagcagggggcggggtggggggaagaattrtttctgtgtctgttttggcaaggccccaagactaagtcctatgctccaatgctccaaagaaagacgcaggaccccaaagcaggactaacatggtcaagaacaagactgtgtggctctttgctgatagcccaccaccagcctataaaagaggttggagaaactaawtatgtgaattaaaaaaaaaatagaggtaccatggatactacttagttcttccaatctacactttttctaaagagcaggttaccttcagactatgagaaaaagagtcaaattttccaaatggtcccctaattctgatcagttctaaagcaccatagctcattcttcttaccccagtgacctgaacaagatttgacaattctagccataaaatcttacactgggctcgggctcacagaactgaattaataaaatacattgtttgtctttatattaaatcaaattatgaaggtacatttttgatcatttgcaaatgtcacttctaattagctcaaggatcctgatatagacaaaccatactcaaagtcaataagttaggtwtgtttttgtgtataccttaagggctaatgtcagtattttgactattaggctcatgtgaacttttgaaaagagagttaaggaaaacaataatgttttaaatagtggctttggatattttaagctaaaattgattaatactgcaatgtttaattcatttttaaaagatttatgagaaaacccacagtattttaagtaatttagtctcattctaaaacgcaccttgccaaggcaaaagcatcatcaataagactwtatgtgaattaaaaaaaaaatagaggtaccatggatactacttagttcttccaatctacactttttctaaagagcaggttaccttcagactatgagaaaaagagtcaaattttccaaatggtcccctaattctgatcagttctaaagcaccatagctcattcttcttaccccagtgacctgaacaagatttgacaattctagccataaaatcttacactgggctcgggctcacagaactgaattaataaaatacattgtttgtctttatattaaatcaaattatgaaggtacatttttgatcatttgcaaatgtcacttctaattagctcaaggatcctgatatagacaaaccatactcaaagtcaataagttaggttwgtttttgtgtataccttaagggctaatgtcagtattttgactattaggctcatgtgaacttttgaaaagagagttaaggaaaacaataatgttttaaatagtggctttggatattttaagctaaaattgattaatactgcaatgtttaattcatttttaaaagatttatgagaaaacccacagtattttaagtaatttagtctcattctaaaacgcaccttgccaaggcaaaagcatcatcaataagact

SEQ ID NO: 297102 - DNA, 629 bp, Homo sapiens
tatgtgaattaaaaaaaaaatagaggtaccatggatactacttagttcttccaatctacactttttctaaagagcaggttaccttcagactatgagaaaaagagtcaaattttccaaatggtcccctaattctgatcagttctaaagcaccatagctcattcttcttaccccagtgacctgaacaagatttgacaattctagccataaaatcttacactgggctcgggctcacagaactgaattaataaaatacattgtttgtctttatattaaatcaaattatgaaggtacatttttgatcatttgcaaatgtcacttctaattagctcaaggatcctgatatagacaaaccatactcaaagtcaataagttaggtttgtttttgtgtataccttaagggctaatgtcagtattttgactattaggctcatgtgaacttttgaaaagagagttaaggaaaacaataatgttttaaatagtggctttggatattttaagctaaaattgattaatactgcaatgtttaattcatttttaaaagatttatgasaaaacccacagtattttaagtaatttagtctcattctaaaacgcaccttgccaaggcaaaagcatcatcaataagact

SEQ ID NO: 297103 - DNA, 403 bp, Homo sapiens
aaaatactgcatatacacttttatttatgtgaaatgaccagaagagacaaatctatagaggtagggaatacattartggttgcttagggctgggcatatgggaggctgcaggcatgacagctaaagggtatggggtttctaaaactgactgtggtgatgattacacatctgtgaatacactaaaaaacactggattgtacactttaaataggtgaattttatggtatgtgaattatatctcagtaaagctgttcttaaaaggcaatctactggaaacagagtaaaaatttattggccaggagaaatcatacctcattaatattttaaaatattttacatgagcaactaggcatatgtaaataaagaatgagtgatctacttttatcttcaagaagacacaagt

SEQ ID NO: 297104 - DNA, 546 bp, Homo sapiens
tgcagctaaagcttgccttatctattatttttttcatcaatctggaatttcgtgagaaggtttacttgtttttatacaacyctaacatttttcaagtaaggaaaaaataaatcagtgcagatagaacacaaatatatttccaaaaaatggtctaatttaatgggagcattaaaaaaatcctcaggcttgtcatataacagttaaagaaattcaatggcttatctgataaaagaaaaaacaaaaaggaaggaaggaaggaaggaaacttacacattgatcttccaattgttgggcatgcgacccttctcctttggatatgggtatttatgataaatcagtcagtcaagataaatcattgaaaagaatatctcaaggtataacagttctgattgtagatgaagatttggaatcatcaataaattatttaagagatcacttagctgaagtttacataagttccagctttactgttgcatctttatacttatattagtttaatgtggtacatcaattcaaagaagaaataaatcaattaataatatttac

SEQ ID NO: 297105 - DNA, 541 bp, Homo sapiens
aaatgaaacgattgagttttctayatattggctaacattcaggagtatcaggattcatttttatagacatagttcttcactatctaaccatgtaagaggttctagcagtatgaaatatggccactctaattttctctaaggaaactgactttgattgcaccaagctgacacacttactcccattccctctgcctgtttacatggagtggactatcaaaggcacatatgctttcctgagagagacatcccgggatggagatgtgaaactggctcatttctaagagatggttgaggacatggtgttaaagcaataacttatacatgggtgagccatttgaattataaaaaggttctagtcagtaagaattccctaatcttggattatttaaacagtgagaaaatatttatagaagatcattgaactcacagtacaacttaactggccacactgtctaccaaacaggaacacatctgaacagaaagtagatggaagttaggattggaaaaaaagctaattcctttatgggtgcatgaaggcatt

SEQ ID NO: 297106 - DNA, 614 bp, Homo sapiens
ctgaacaaccttttctctacaaaaacttttttacacattagctgggcatgttggtgagcacctgtagtcccagttacttgggaggctgaggtgagaaaatcacttgagctcaggagattgaggctgcagtaagctatgatttcaccaatgcactccagcctatgtgatacagcaagaccctgtctcagaaaataaattaaataaataaatacatttggcaaagtagagaaaatgacatactggaattgttttaattgaaatacttagaaaatcttaactcagtagccatatttaaatgtctagaaaaatcctgttaagggtttgatttttaacataatgaaaatgtgcaagaaatttgatacactatatttgagttttaatttgttggattcataaaatatatagaaaaaattttaattagacttataaatctgcttctttggtggtgtttgtattttgaaattgtaaatgaattcggtaaaattttagctagtgttgtttagaagaatttggttacatttataagtttctygtaagtgatatatccttaagaggacttgattaagtttgtaagtgctgtttaaatgctcaggagaatttaatgtgtgcaattt

SEQ ID NO: 297107 - DNA, 512 bp, Homo sapiens
aatacatatattctgcatatcctgtgtttcttcaaaggggagaaaaataacaaaaggctaaatgttgtagaatggtagatctcaacaaaatatatggaagcattttttgatgcttcaaattctttaacaaaataatgacttccacattggaaacattgaaacataggcaggattaccacctatgaaaaaggtagttcagaaaaatcctagactggaatgttgaataaactatacaaaatggccatgagrctgctttcccatttgatctaagatacacttagttttctgcaataaaccagcaaatttagaggcattcccttacccaaagctccaaagtacttagaataccatcttaggtgacacagtgaactttctgcagatccatggaatgttatttaagtgttttcccagttaacaccaggatctagatatgaagtagaaagaccgaaagaccactacagaggaagatacctctcattagtatttggtctaaagactttttttcaaggctt

SEQ ID NO: 297108 - DNA, 541 bp, Homo sapiens
ttaagaatcttcttagttttaccacatagaaactgggtttaacatttatgtagaatatatataaacgttatacaaacatttatgtgttatctattgtgcactgaagatgaagagcctggtaattgtaaaatattttgttaatagtttcatttttcaaagtaattaagacattaatcctattttcagtagaataacttatatgaaaatgctgactttaagtccgaagtaaactttttttgacattatagagccccagtgttctgagctcttcccccaagagcctggcccatataaaagcccattcttccattgctgtcttgaaaaaaatcttatgttcaggactttttcttatcattgctccttcaggctaagccttatttgtccatcagcyttctttttgttttatcttaacaatatagattaagtagaaaaaaaataaagcaaaatatgcataaaaacattcatgtattatgtataattgcctttcaaaaccttagttactatgctaaggtgtttagattctagctcaaagtttttaaat

SEQ ID NO: 297109 - DNA, 610 bp, Homo sapiens
ctcatgaattctgcacattttaattctcaaattatgttaaatgtctagatccactctaggatgactaaatatatagaactaagtaatacaatttactaaaaagaattgctccctctagtgaagtcacaatattatttcatttsctggcactcctgtactgagtaatttaataaatgttataagtgatgatgactattatgttgatgatagtggtctggcctacttttgtgatattaaattttaatgttttctgtgcttgaaaacaggaaagttaataatggttgattacagctgtttactggatattttagaacattacatttaaaaactctgtgttgaaaaagtaatttatttctaaaactcttgagattatttctgaaacactattggtactatgtgatgttgaggcctatgacaaagttgacattagcagagtaaagaggggaattaatgcaattgtcctaataattaaaagtgttctggggaaagtaagtttaactggaaatctaattttagccataatgcctatctttgctctggttaccatatacctaagaaaaattagacattatcaatcttattcctctctactagtcagaaatattgtgca

SEQ ID NO: 297110 - DNA, 534 bp, Homo sapiens
cattgagccgagatcgtgccactgcacttcagcctgggcgacagagcragactccatctcaaaaaacaaacagacaaacaaaaaaggaatgctttgtgtgttttttatacaagacctttatcagatatgtgtcttacaaatattttctgaacagtatctttcacagagcagaagtttttaattttagtaagttcaacttaccagtttttttatggattgtgcttttggtgttgtatataaaaattatcaccaaacctaagactttctatattttcttctagaagttttatagctttgcattttacattttggcctatgatctattttgagttaatttttgtgaaggcttacatcagtgtctgcattcagtttttttgcatgtgatgtccaattgttcccacaccatttgctacaaagatgacattctctccatttgaattgcctttgctcctttgtcaaatatcagttgattatctttgtagcttgtttctgggctctctactgtgtgtgtgtgtgtgtgttgtgtgtgtttta

SEQ ID NO: 297111 - DNA, 534 bp, Homo sapiens
cattgagccgagatcgtgccactgcacttcagcctgggcgacagagcgagactccatctcaaaaaacaaacagacaaacaaaaaaggaatgctttgtgtgttttttatacaagacctttatcagatatgtgtcttacaaatattttctgaacagtatctttcacagagcagaagtttttaattttagtaagttcaacttaccagtttttttatggattgtgcttttggtgttgtatataaaaattatcaccaaacctaagactttctatattttcttctagaagttttatagctttgcattttacrttttggcctatgatctattttgagttaatttttgtgaaggcttacatcagtgtctgcattcagtttttttgcatgtgatgtccaattgttcccacaccatttgctacaaagatgacattctctccatttgaattgcctttgctcctttgtcaaatatcagttgattatctttgtagcttgtttctgggctctctactgtgtgtgtgtgtgtgtgttgtgtgtgtttta

SEQ ID NO: 297112 - DNA, 534 bp, Homo sapiens
cattgagccgagatcgtgccactgcacttcagcctgggcgacagagcgagactccatctcaaaaaacaaacagacaaacaaaaaaggaatgctttgtgtgttttttatacaagacctttatcagatatgtgtcttacaaatattttctgaacagtatctttcacagagcagaagtttttaattttagtaagttcaacttaccagtttttttatggattgtgcttttggtgttgtatataaaaattatcaccaaacctaagactttctatattttcttctagaagttttatagctttgcattttacattttggcctatgatctattttgagttaatttttgtgaaggcttacatcagtgtctgcattcagtttttttgcatrtgatgtccaattgttcccacaccatttgctacaaagatgacattctctccatttgaattgcctttgctcctttgtcaaatatcagttgattatctttgtagcttgtttctgggctctctactgtgtgtgtgtgtgtgtgttgtgtgtgtttta

SEQ ID NO: 297113 - DNA, 544 bp, Homo sapiens
cttcctacttaattgtattgattctctggctacttctgtccatcttgttttttttttttaaattaaattagtctttctccttttattttttttaatgtaggttcttactctgtcgcccaggctggaggagtacagtggtatgatcatggctcactgcaacatctacttcctgggctcaagtgatcctcctgcctcggcctcacgagtacctgggactacaggcatgcatcaccatgtctggccaactttaaaaaattttttttgtagagacagggtattgctatgctgcccaggcttgtctcaaactcttggcctcaagtgatcctcctgcgtcagcctcccaaagtgctggaattacaggtgtgagccactgtgactygcttattccttctaattttttattttcagcattttatttctctgttccaaaatttttagtggttctttgattgcctgtaggataaaggccttgggttagttttcaagacttcacatattctgggccctactatgccaattcagattttcctttctgcattgggat

SEQ ID NO: 297114 - DNA, 611 bp, Homo sapiens
agtaagacatatgtgaataaaatgatattaggtctgtataattctgaataataaaataaagattaagatggtaatattggtccctcaagtactggtatttaaactttaaaaatcaatcaagagagaagattaagtggtgtttctttggtactgaaaatgtaaagctaagaccaaattgttctacttcacagatttaagatacaaagaaygatatttaaaggtattaaaataactatttcattatcttcagtttgtaaagaatatcttatgaagtacacttagaaggaatccctgagtatattaagtactctattagtatctttcttcataaacaaagaggaacaatttaaaggctttgcaagacatataaacacagtgcttagtaaaagcattatctgtttataaggctctctccatcgtgcttgtaaattaggccaccaaatgcttcagaggagaaacaatagattcacaaaattaaactctaacatttgaatacattaaccactctcaagtaaattaaaaaaccattctctgatggtgtttctatgttgttttagccactctatattgtttttcactgtttccagcacttgttccctaggtttttctcc

SEQ ID NO: 297115 - DNA, 604 bp, Homo sapiens
tttggttaactagccctctcatcacctttatgtccactcatactccacacaagctttaagaagccagtggcatatgggtgctattggttctgtgcccattggacattgggttctgtcccagtgagggacttctgctaatggtttatatctcttctaggctctgcctggagaagcagtcggctagctctaatgttcttgggcggctctgtacctatcagaatgtttctacaccctcggtactgaagctgaatgctgagaaggaggaaaggcaaagaggttgctgtacctcttgctcttctcctgtccccgttattctacggctgaattaggtggcttttttccccttcctatgtggcagggacttttcttgtgtcctatcttgagttcttcagactratagtaaaattgacggttaagccagccggactggcttttaatacattactggaagtttaagaaatttaaaaaatattttttctcttgacaaaccctgtttttaaaatagatggaattgctagggattcggctggtgttaattgcatttttctattcctgtgctatgtgtactaatcaccatcctatgcccccttcacctgctctctaa

SEQ ID NO: 297116 - DNA, 1157 bp, Homo sapiens
ttctaaaaatataaaatattgttttcacattttaagcattatcctatactgagtgaagtgtgcagttaaattttgggctaaatcttaaataagggctacatgaactcactagggaatgagacaacatctttgataaataaattggggacatttaaagaattcatatgagttgtctaaatgagtcagagggtttcccatcttgattattatttatcctattctttatttgtttttgttatcaaaattataagcagatagaacttagaggaaatgttgatatataatgtatgtatatatgtgcataaatatttatgcacacatttatacagggtggtttatttaaaatcgcaatgcttcaaatgaacctcctatttkgaattttttaagcattttttcatttctctacatagagaatacagggttaggcacagagaatatattcccaattatgttactattttaaactgtcttttaaaatgaaaactttaataaaacaaaacgccacatatagtttaatcattttacttctaagtaggatagagagatcagatttagctttcwgttgtctaaatgagtcagagggtttcccatcttgattattatttatcctattctttatttgtttttgttatcaaaattataagcagatagaacttagaggaaatgttgatatataatgtatgtatatatgtgcataaatatttatgcacacatttatacagggtggtttatttaaaatcgcaatgcttcaaatgaacctcctattttgaattttttaagcattttttcatttctctacatagagaatacagggttaggcacagagaatatattcccaattatgtwactattttaaactgtcttttaaaatgaaaactttaataaaacaaaacgccacatatagtttaatcattttacttctaagtaggatagagagatcagatttagctttcttaaatgtttcatgacagcttatttgtatttttttatagctgtgaactcaaatataaaggaaaaatcctggtaagaataacaacctcagaaaaaaaatccattgttcaaaataacagcgaaaaccacagtcaatgacttcaaaaacagtgaggtatttttcagctccatagtaatgtttattaactaaaacctaacactggtaa

SEQ ID NO: 297117 - DNA, 627 bp, Homo sapiens
tatagcactgctgaaggatagagcacctatccttccctgattttaagttaacttatggaatatccaaagtcctggccacakcctgcttgtaaaacaaaaggatttatttcttgtgtttttttaaagtttttctttgcttttaaagagaaaaaaagttcacaatgacatatgacttcttcaaaaggccgtgatagtctattacgctaccctctccgcctctgcccccaacgccgcccaaaaataccatgtcctcgttaaagactaaacgttctgtataggcagagtccacctctaagcagtccaggctctgccttccttccctagtgagtcccattctccttggtatccattgggcggatgcccagcctggatagaaccccgaaacgggggtagcacgagagcgactggagacccctaaaagccagaggtttgagagagggtggacgcagctagcagaagatggtgtagaagccagctgagaacgaccccctagagcaaagagacctttctttggcttttcttgctttgggggtcctgaaaggaactcataaaatggtcttcaccctcaggaggaggacggactgaccctcctctgtcactggcttaaaaagtttcagggcggcggct

SEQ ID NO: 297118 - DNA, 578 bp, Homo sapiens
aagctgttcccaaattcctgagccatagaaactgtgtgagataataaatgtttattgttgttctcagccactacrtttctaaattattttttatttatttttagacataaggtctcactatgttgcccaagctggggtgcagtggctattcacaggcacgattgtagcaaactacagccttgaactcctgggctcaagtgatcctcccacatcagcctcccaaatagctgtgactacagacatgcaccatgacaccaggctaagttatgggataatttgttatgcagcaatctcaacatgaggcaatggtaagactgtttaaaaatgttatgtgttttttggctacatcaattgaataaaggtttcatatcatctattaataatccacttctagacttacactaatgtaggatattgtttatagcttgagtcgtatagtatgacagacattggtaaagatattgagagtactaaagtactatcaagatagtgaaaacaacaaaatataacataaggagtgcttcagtcaactggtgatgtttaaccttgagtagactaaggaattacatggtatctat

SEQ ID NO: 297119 - DNA, 409 bp, Homo sapiens
atacacttattagaataaacgtttttggccagctaaccaactactgaaaaattggtacaggaaaacatacaaagaaaggaacacgtccttagcctacatttggaagtttgtatgtgaggcctgaaaaggatctaaaaagayatagtacagtcctttctaaaataactgagtcatgtgttgagattggttttgaaaccattagtgtctaaaagtaaagaaaataatgaatgccagaaagggggggtcggggaaggttttctccaaaatacaccctagagattgaaaagggagaagggagaggataaaggttgactagacatgagtgaagccaaaaaaatcaccttcccctttcaaaagggaatggagagaggaaggggggatagtacacgaatgggaaaaaatcaactcc

SEQ ID NO: 297120 - DNA, 409 bp, Homo sapiens
atacacttattagaataaacgtttttggccagctaaccaactactgaaaaattggtacaggaaaacatacaaagaaaggaacacgtccttagcctacatttggaagtttgtatgtgaggcctgaaaaggatctaaaaagatatagtacagtcctttctaaaataactgagtcatgtgttgagattggttttgaaaccattagtgtctaaaagtaaagaaaataatgaatgccagaaagggggggtcggggaaggttttctccaaaatacaccctagagattgaaaagggagaagggagaggataaaggttgactagacatgagtgaagccaaaaaaatcaccttcccctttcaaaarggaatggagagaggaaggggggatagtacacgaatgggaaaaaatcaactcc

SEQ ID NO: 297121 - DNA, 616 bp, Homo sapiens
tattactgacattttgtagcaagcacttgccctaatattaagtataagaactcatttgttactaaaagaaacattaccattcaatagggaaatactggttcatggaaacatatgatctctgctctctaaataattgtgtactttttggcatggtaagaatattgtatcaatttaatcctttagatacaaaaaatgatgaaagagttattgtctgttttaatgatagtttgaaagtgattattatgggcacatttctcagttctctctcctacttaggatagttacctatcctaagcagtcactacattaataaaagaaaggrgcactaaacctgaggttaaaataaatcgtacccagtactaatcaaagttaggttgaatgtttgcatgcagttcatttggatgaatactactctcagcaaagatatcagaaagagcatttcatgcaacaggaaatgtgaagttctcaccactgcccagagcatgtatacataccatccagtagttatgttacatggaaagggtgctgccaaacatcttgcataaggcaactttaaatatggatctggaaactggttagaaaatccctaaactgaatttatttgagggtttaacaa

SEQ ID NO: 297122 - DNA, 596 bp, Homo sapiens
ttactttgtggcctgactgttaatacagtcatctgttgtttaactgtggggaaacattctgagaaatacatcgttaggcaattttgtcattgtgagaatgttgtagagtgtacttacacaaacctaggtggtatagcttactacacacctaggctatatggtatagcctattgtttctaggctacaaatctgtacagcatgttactgtcctgaataccgtaggcaaaattataacacagtggtagtatctgtgcagctaaatgtatctamacatagaaaagatacactaaaaatacagataaaaatggtacagctgtagagggcacttaccatgaatgtagtttgtgggactagaagttgctctgggtgagtgagtgagtgagtggtgggggaatggtaaggcctaggacatttctgtaaggtagactttataaacaatgtactcttaggttacactaaatctattttttaaatttctttcttccataatatattatccttagcttactgtaacttttttatttgataagctttttaattttttaactttttgactcttgtaataacacagcttaaaacacaaagacgtgtacagc

SEQ ID NO: 297123 - DNA, 522 bp, Homo sapiens
aacacaccttctccatggcctccctgacctcatctaaattgaaatccttggaaactgcatttcttagtcttgttttccaagtgttctgttggatataaacaccttatctgtttttcaaagttgagtttgccacccctaacccatttgttaatcctccatctccagcctcattctgacacttctccagtgttgtcttagttaatgcctttgaatctcatcccaacccccactgccatcatgttcaccaggggcatggtcatataatgctcctaacatgatgcctgccatataagaarcactcaaaacatgacaggtgctattatcatgaatatcctcaatgcttctcccaaccaaatctatttatctatttataatccagccccaaattatttatttgtttatatattttctaccacatctctttagataccctacaatccagttatgtacatgtcacatatttttgtgactctaccatttcccatatgcattacctacatccttggcctgatctgcccttcc

SEQ ID NO: 297124 - DNA, 611 bp, Homo sapiens
tcccatttaatagtcgtaacaactcaatgtgtaggtactgttaccaccctacttttcagttgaggaaactgagctttgaagaggttaggtaccttgccctttgttgaacctctactgaacagagtgtcatgactggaaccttggaagtctgactcttcatgttgttgcgatgtaatattcaayatatacaaacaacatatatttatatatgtaagtaatgaactggaacaataacacccaacttaaaatattgctacatggcacataccctagcctcagtcactaccatgaattttgtgtttatcatttacctgcttttaaaaaatatcatctcaaatgtatatcctaaaataggacatcacttagtgttattttttagctttacaaaaatagtatcactctgactacagtcttctatagtttgctctttttcactcagtattacatttctgaaagtcatctatgctgttcattttcgctgctgtatgatactctaatgtgtggatagacagcatttactcattctcctctgggctattttcttgagtttatacattgttgttttgaaaattattgcaaacatctgctggcatggtgtgcaaaagtttctc

SEQ ID NO: 297125 - DNA, 618 bp, Homo sapiens
tttggggataaatggtgtccttcctatattgagtcttcttatccatgagcaaagtttttctgttatttattaggttttcttcaatgtcttccaataaattttatactttttctgcctaaaattcttatataccttttgttagatttatttaataaaaactacaaataataaaaacctggtcttataggactactcatctttctattttttcacttgtctcagttttggtaagttatatttttcttaaaatttatccatcttgtctagacattyggcatacagtaattcatagttcattatagggttctaaaaatctctgttgaagctataatttatttgcaatatccttttggttgttgtttgaaatttcactaatttttgttattcatacctttatcaacttccttccactttcttcagattaagattgttcttttctaattcaagttagatgtttagcttgttaattttcattttccatcttcctgaaagttattttaatacaggcccattaaatataaattttctcagttttgttaatctgaaaatgtcttttcactatcctcaatcttgaaaattttaactttttcccaatactttgaggatatcaagttattc

SEQ ID NO: 297126 - DNA, 592 bp, Homo sapiens
tctcctggctcactatacctactcaccgtccaccagtgtgctctggccactgggtgggaagctctggttgaaaggacaaatagggtatcttccagttctagagatcctttatgattgcagttccagtctatttcatctttgcccggcttccatgattagaaactctcctataaaatgagccctaaactgtttcccagccctcttctccattgtctaaatagaaactctccacaccattctatgtccataccaggatatgtcaaaggctaattcatccatcttgcctcctccacaagctagaatgtcacatccccccctctattatacatcaaagaaaggagcacaatgtcaatggtaaatgagtgccacattaataatgctagtaaagtcagagctctctggagacagatatgcccactttaataatgaatataagacctrtcaaacaataccaaaagaagccattgtttaagcagataaatattgcagctctgtttcacacagtgtaacacagcgaagacacatggaatattaccagataagatacatattacatgcaacaactaggaagggctgctcagtgacattcaga

SEQ ID NO: 297127 - DNA, 568 bp, Homo sapiens
gacatttggaggaatgcagttcgttgtcaaggaagatgttttgtacggtggcttcctgtattaggccatccttgcattgccacctgagagtgggttatttaggraaaaaaaaagagatataattgactcacggttctgcaggctgtataagctgatgctggcagctgctcagcttctgggaaagcctcagggagcttttgctcatggtggaaggtgaagtgagaacaggcacataatttggtgaaagcaggagcaacagagagagtgggaaggaggtgccacacacttttaaatgaccaaatctcgtgtgaactcagagtgggaactcacttatcaccaagggaatggcccaagctattcatgagggatccatccccatgatccaaacatgtgccatcaggctccacctccaacattggagataacattttttttcttttttttgagacagagtctcactttgtcactcaggctagagtgcagtggtgtgatcacagctcactgcaatctccgccttctgggttccagtgattcttgcgcctcagcctctcaagtagctgggactaca

SEQ ID NO: 297128 - DNA, 511 bp, Homo sapiens
gatgaatgtggaacattgatcacccacctcatccctaccctggcctaatctttcatctgtaccaaccaatggctatctatatggagaaakaaaaataacagcaagagatgtaagctgggaatgccactcacccttgttctgtgggggtgagcactctggtctggggcttgaggatgccttcaacacctctcttggttgaagctctcagtcactgattgctctcgatctatcattgttgctgcccttcccataaagcatgactctgagcaggcaggtaagctgccagtcttctcagtcctctttgttccatatgctttctagaggcatgtttctgaatatactcaaatacagtcattttttaaaggtggtttaactgtggtaatgatctcaggaattttatatgtaaatttctaaactgaacatttaatgtaaactaaatcagctctatcaccacctttgattccagaaacacttttttttttctcatattaacaagataaagccttcacct

SEQ ID NO: 297129 - DNA, 540 bp, Homo sapiens
tcgctccaattaggcatttttccaactatatttcatcttgatgggacaagtctactactcacaatcaatcactgtgatcttttcaaaggcgagtattttaggttcagagtcataaaaagaatgacttgactacgcagcctccataacttgaaccacagktgatataggcagagattatgggtgttggatattactttttgtgttattaatatttgaagcatcaggatatgcatagtgatattctgggtacagttcttacacctctcttctcatgaccttactagaataaatatatttaaataagactgatggaaaggaagagaggaaatgaacaatgacacaaattaatgtccaaccaaattcctcatttttttcctgtcattttattattaaacacattataaatacttgctttcctcatggttgttttgttattggactactttagtttgaagtgaatcattgctcatatacagcacataaaaccaagactattaaggaaatgaatgcttggtgattgttttatgagaacatgcaaaa

SEQ ID NO: 297130 - DNA, 610 bp, Homo sapiens
ttgctgtgaaagttgtacaagggcgccttaattttgtatatgtctatatgtgaagaacaaaattaaaagtcattagacactcttctaaatcggtatttgaatgtgtcagaagtaattcaatggaaagcttagaaaattctatatcaaagtgcaaccttaatcgagtcccttgaattttaatttgttttagaactactggatttcaaagtaaaaaaatatatttttaaaaacaagrtatttctggccttttaaaataaatagagccctgaatctttgttaagtcaatcaagtttgattagcctaaaacaagcagactcccgacccccaacaatgatgtctcaaacatatgtaccacaccccctgctggcctctccacattccctgtgattgaatgaccacaacctaagaggccagggcagaggggcaaacatttgccttcctcccacagatgatagaacccttcctttccccgtgatgcataaaagtgccattactttccatttccttcaccttccctactccaaaacatcttactcattttaaagacttgcaggatcatgatataaaaagtttaaattatttctcctaagtgaggaaataagtaaaaggt

SEQ ID NO: 297131 - DNA, 630 bp, Homo sapiens
taggtgatgttctaaattccctgtgtagaatgtacccgtgatgcctggggggcgggctggacgctaagctatgagagatgacacattagtgcatcctccttcatagccccatggctgcccctgccaggtaggttctaggtttaacaaactcgtttgtacagacttcttcttataatggtgtcatttaataaactgataaaacatgagttcagaaagtgagttgtgtctgcaaaaaataaccrggatgctttagaaaatcttgataaaggcaaattattaaaaactgttgctaagttagatattggaaggatactgtgagaaaatagagacattttttaaatctaggattttttaaatgttcttggccctacatcacgagagtggatagtaaatttaaaagattaaatttaagctttatttgtatcacagttttatttttccctgcttaaactgcctgtatcttttacccaagcaaataccactcccacttcatcagataagagtatttcttctgtacatattaacaggaccagctacataatttgcagggcccagtgcaagatgaaaatacaaattcccttcttcaaaaattaagaatttcaatacggtgacagcagagcattaaagccc

SEQ ID NO: 297132 - DNA, 630 bp, Homo sapiens
taggtgatgttctaaattccctgtgtagaatgtacccgtgatgcctggggggcgggctggacgctaagctatgagagatgacacattagtgcatcctccttcatagccccatggctgcccctgccaggtaggttctaggtttaacaaactcgtttgtacagacttcttcttataatggtgtcatttaataaactgataaaacatgagttcagaaagtgagttgtgtctgcaaaaaataaccaggatgctttagaaaatcttgataaagscaaattattaaaaactgttgctaagttagatattggaaggatactgtgagaaaatagagacattttttaaatctaggattttttaaatgttcttggccctacatcacgagagtggatagtaaatttaaaagattaaatttaagctttatttgtatcacagttttatttttccctgcttaaactgcctgtatcttttacccaagcaaataccactcccacttcatcagataagagtatttcttctgtacatattaacaggaccagctacataatttgcagggcccagtgcaagatgaaaatacaaattcccttcttcaaaaattaagaatttcaatacggtgacagcagagcattaaagccc

SEQ ID NO: 297133 - DNA, 630 bp, Homo sapiens
taggtgatgttctaaattccctgtgtagaatgtacccgtgatgcctggggggcgggctggacgctaagctatgagagatgacacattagtgcatcctccttcatagccccatggctgcccctgccaggtaggttctaggtttaacaaactcgtttgtacagacttcttcttataatggtgtcatttaataaactgataaaacatgagttcagaaagtgagttgtgtctgcaaaaaataaccaggatgctttagaaaatcttgataaaggcaaattattaaaaactgttgctaagttagatattggaaggatactgtgagaaaatagagacattttttaaatctaggattttttaaatgttcttggccctacatcacgagagtggatagtaaatttaaaasattaaatttaagctttatttgtatcacagttttatttttccctgcttaaactgcctgtatcttttacccaagcaaataccactcccacttcatcagataagagtatttcttctgtacatattaacaggaccagctacataatttgcagggcccagtgcaagatgaaaatacaaattcccttcttcaaaaattaagaatttcaatacggtgacagcagagcattaaagccc

SEQ ID NO: 297134 - DNA, 562 bp, Homo sapiens
cattgcatgtcattttattttatctatttcattttatcagaagtataataaaaatttcttaatggtttcagttctttgaaataaaaaaaaattctgygcgaataatcggagagaatatgaggaatgtctccaagtcctcattctagtgctacattttcaacagccttggcttagacaaatcccttaacctcttgagatatccatttcacttgctaaaaactacatgaatcacaaatagctagctctttcagaatctgtgaatttagagaatgttgggaaaacagtttgactacttaaaaacaggataaaaatagagggaataggtttttagctccctcctaccaaaaaaaaaatttggtcattagaaaggctgccttcccactctatgtcatgcaaaccaccaggagattttgatgtatacttgtgagtgcatacaaagttctctctctctctctctctcaatctgtttctctatttgaaatctttatttctggatttcaacacaaaacattttgacagattgactttttgttaatgactttttacgtatcagcttactgaa

SEQ ID NO: 297135 - DNA, 555 bp, Homo sapiens
gtgctactggcattcagtgggtgggggctagggatactagataccctgtaatatacagaatattcctcgatcctgcatgggtttccatatgcactcaggtgaaatacctggctgtaattacagaaggctgtaaacctaatgttttcacatgaaatcacaaagtatttttaaaagcatgattttaatgtatattgaatttctcagtagtggagctactgtgtaaagaaaggaaaggctgtatcttggtcagagtttttggggtttgtttttgctaggagttgttcactgttttggaaaataacatcacaggacagtaacactgctcatagcagttgaattcccattccaatcacctgtatcagtctgcctgtgtagctgccacattcaccatgagccgacagccagtctacctctgaacgatgcaagtgtctgattatttcattatgtcaccactgtcctgctccgaggcatttatatatttttcctttagattgcatgtaggkcactctatttatttctttgaaatagtctgtgcaggtagtttatctgaatttc

SEQ ID NO: 297136 - DNA, 519 bp, Homo sapiens
tttttgtctgttacagtggagaatagaccttaagggacaaggtggaagcagggaggtagtaaatcggctattataacagtctttgggagacatgatgccattccatactggtgccaactgggcactgattgttggaggggatgacaaacttagtttttcacaccacagcattagggrcagtgggatgttgatgatgtgggaggctatgcaagtgtggggacagagggcatatgaaacatctctataccatcctctcaattttgctgtgaaactaaagctgctgtaaaaagaaatcttaaataaaatgagaaaccacaatcaatcatggcttaactattgaattactaaagaacaggctatttatatacaaaaaaagtacttgtggacaagcatctggatgacaaatattttcatgtgatggaaaccattcatggggcaacaataatgttattataacaatatttttatttgaattataccacagaatttgttgtttctctttgttgtaattctctgtct

SEQ ID NO: 297137 - DNA, 628 bp, Homo sapiens
cctgtattaaggatttaagctccgttgcacaacgaagaaaatccagagattacagtgtacccttctttcttttcattccagttgatcaaacacatatctgaagactacaaatttcattaacaatcccaaactatcagcaacaattcttcaaaggctatttatcaaatttgtaaatgtgttagggtagtccaggaaattctctctcattactttattctattgattttcagctgcacatattttcactttttaatctctctgaaacaaggtttatcttgcaatgcaatgcaatygtacaatcactgtcaacctatagttatgtgaaaatcgtttgataagctaaagaaaatgtcagcatcagtgcatcctacattcaataaaataaggaggattacctaaatatctgcttataggggtgtggctaacaccttctagtgacagtgagactcacgtgcatattgaaaggaggttccagacccttatgatttgtattttgaaagattcctcacagatactaattcacacagtccattcatgagttattctagaaatagtatgcaagaaattaggatatggaaaatactcaggcccctgagaccttaaaagccaaattacaataatagaatct

SEQ ID NO: 297138 - DNA, 439 bp, Homo sapiens
aactgcattaaagttattccctgacatactggactgtttctagacccttaaagcacaggctaaatagacaccacagtacctatcactattcccatttccataaagtggagagccacacaagcaagaaagagggcaaaacagcaattagaggcaacttcctataataacttccagggyttgcattttttagttagaaagagctatgaaaagatacagctctcaatgctcaagtgataaaatccacttcctaaacatgctgcataaacttcaaattttcctgccaaaacatcctgatatgtttatgaaatgtcacctagtttacaaattggcacaccttctatgaggagttggggcagtgatacgaagagttttatggggtcctttctaggaaatacttcttggggtagaccagatgcagatcacgacaaacagacctgaa

SEQ ID NO: 297139 - DNA, 513 bp, Homo sapiens
tctaacaagccatgtataatcacaatattctttttcaattctctcaatagcatttactatttgatatttttttcttacatgtttaggtttttaattgtgtttatattctgtctccctcaaatagaatggaagccttacaagtgcaggagcccygtctatgttgttcatacccttttccccagaacttataatagttctaggcacatagcacatacttaccaaatagttgctggtttatgaaaacaatagagaacttcgtaaaagagccttttatcattggcaacacttactgttagaaatttatcttttatgttggtgggaatgaatctcttcctaattctacacactggtctcaaatattccctgggtcttaagacaaatgaatagattttgattcatttaaagagtatgaaaaataatactgtatgcttgggtcatcaaaatacttgagggactcatatcagtttgaaactaataaaataatgtttaatgatttttatattatacattctt

SEQ ID NO: 297140 - DNA, 604 bp, Homo sapiens
caattcttaaagaaaaaaaggtcctgaaaatttctcttttccacaatgagcattatgcctaaatttgctgtsgtcactttgcttgtttttgctctttgtcatcaagtttccatggatctattgtgattatctacaagtgttgaaacataaggaagacccaagaatgattactttctcagaagtgaaactgagctctattagaacttgggagagtgggagggcactctctaaataggaaaattatgggcaggaggaagattacaaagtggttttcagtttgaaggcctctactgtcttagaaagcccaacattctgtcctcacataaatctggaaaatgtctatgggatgggaagaggacaccccatctcagtccactagactgatacctaaacagacagtgagactgtcactgtcatcaggagacgaggacttccagaggggctgacacaacgtatggaatacttcgacactttctaaattgaatacatttttacatgaataaaaatgctagtggtgtgtgtgtgcatggatatttatatactcaggcattttcattagtttgctgacatttgatcagacatttaaaagtcttttgactaactc

SEQ ID NO: 297141 - DNA, 612 bp, Homo sapiens
tgggtgttattttatttccatatgattccataatttatatgtacatgtaacaagatgttgattttcaggctctaaattgttaattttgaaatttgcatgataaaatttagtcagtgttatttgtggttgatttgtgtgaggtcaaatgctcaggatctttcttcagttttacttttcttctgaactcttgaattctcacctccttcactgagttaatttctgctctgatgagctatattatgaaattgcagtacacatgccagccctagagttgtatgttatttaagttgagactatagattacagagataggcagtcttgttgttaatcttcctgcttgtttcaagatccaacttaaaaacatatgtagccaataatcctcgctgtagttagatggaatctgcacttcatattaatggtagtaaaaaaatatcaagattaagtaggttcaaagaataagatattagtataaatctctaaggagaagtgtagttccagatttatatgatggaattttgttacagrgaatattaatcaattccccttacctccattttattcatggaattttttcattaattctcttacatgggccttcattatcctccccag

SEQ ID NO: 297142 - DNA, 621 bp, Homo sapiens
taactcataagactgaagaatgcatggtgggaccttggatggctgctggtgatgaaccgagcaaaggaggactaaayggagccaaccagtgaactcccaccagggcactggcagtggtggcacatatatttgcaccttttagctactgaggtggttttgctactttaattcttgtggtgttaaggagactcaagcatagaccctcgacactgggtgcaggtactgctcggcaaatgaggaagcctattaggagcgtgagcctgcaacatctcctgtaaatatcatgctgaaggaatgcagtgcacagggaagcaagttgagcctgttgacctctaaagcctttcattttggaagccttgataattctgtgattccagagagatattgctgctctttctgcaatttctatcttttaacgttggcagctcaagcaggttctcagatgcttggagtgaagctacttattaaaaaataattaacagtgagatcatcatgggcacggctgagttttaacaaaagaactcatggaattttcggggttttaaaactgctatatataagtccgaagactaaaattagcaataatcattaggaaataaagcactgtggttaatgtccaca

SEQ ID NO: 297143 - DNA, 562 bp, Homo sapiens
cacgtatgtacacacatgtgtacataggtacacatccatataaatacacaaacaacttcgtttttcttatggtatgactttttaagttaaaagatgtatgaaaatgtggcatttagtgataaaaagaaagacatacagaatgttaaatatttataggtagcatacctactatgtgcaaaaactaccacagtcactggggacaaagatgaatgagacatgggtctggcctgaaaaagcacctattatagagggtgcaggaagtgggagacatgaagtacacagataaatattaatatgtaataagggcaycataagatgtaccacatttaagcagagataaatcatttaaaaggaatctgtaaggcaggcatcctgatttcacaccagactcttaaccacaaaagataatgttggaactttaagaagactactgaggaattcatttgtgatgaatgaacacatacttcagaataaaagtagctgctatttattgaatgtctactttatatttgttttctctaattctcacaatgctgcaagcttgttttacagataaaacttc

SEQ ID NO: 297144 - DNA, 497 bp, Homo sapiens
gacacaagatcaacatacaaaaacaattgtatttcagtataaaagcaataatcaatcaaaaatcaaattaagaaaaccatgctagtgtagcgtatccatataatggaatattattcagtcattaaaaaggaaamaaattactgatacatctccactggtgtggatggcccttgaaaacatgatgttaagtaaaagagtccagacacaaaggtctgtattgtataattcaatttatatgaaatatctagaatttgtaaattcttagaaatcagattagtgtttgtcaggggctggggaaggagagaaatgtaaagagactatttaatggatactgggtttcctttgggggtgacaaaaatattttaaaactttaaggtagtgatgattgcacaccattgtgaatgtactaaatgctactaaattatacactttaaaatggttaattttatgttatatgaattttgcctcaataaaaataaaaacaagagaagaaggaa

SEQ ID NO: 297145 - DNA, 606 bp, Homo sapiens
aataaaaataaaaacaagagaagaaggaaattctgtgttacatttattatgcatgaattagagtgaatgcaaatgaaaaatgccaaggtttatctttgaaaaattgactaatattaaaaagtaaatcaaacatttttaaaaaataaaaagtaagggattatctgtggataaagtaggggtggtaaagctgtgttgataaaaacaaaaatcttttctacaggtccagtgagtcaataaaaaaacattatttgctcttactatggtcacagcatgacactatatagtttgagcaagtgaaaggctataaaatctactgtcatctcctctgcctgtcgtggaggcaggcagaagccaatgcaattgacttagaaagaatattctgagtctgactcaggcatggaagtgggttaatggaggttaaaaggaataataaatgggaaaaccaagctgaaatccagggaacacatccagtagtagtcaatctaatggaagaaaaacagaagtatgaggcaaagcaattaaatgggsgctaccggatgaaatagttcccataaaagaggatgagttggtggcatatggaaaaataaagataaggtaattaaaggc

SEQ ID NO: 297146 - DNA, 871 bp, Homo sapiens
ataatctccaaatcatacatctgagaaacgacttatacgcagaatatctaaagaaccctcaaatctgaacaataaacaacctaattaaaacatgaacaaaacagttgaacagatattttaccaaaaagaatatacaaatggaaaatatatggaagactgcccaatttcattagtctttaagcccaatttcattagtctttaaggaactgcaaattaaaaccacaatgatatatcacaatacacctattagaatagctaaaataaaaatgaagcgaaacagccaggtgcggtggcacatgactgcagtcctagctacttgggaggctgaggtgggaggatcacttgaacccagragttcaaggctatagtgagctatgatcacaccactgcattctagcctgggtggcagcgggagacgcagwagaaaccctgggtcctacccatgagtgacctggaaggctaaatcaaggaggccttatcttcctttacccaacctgctggttcacttagaacagctcccacatttttactaggtctgtggtaatgctttttgagcttgtagttgtctttcctgatttatcctcaggaaatttaatttgtaccaaatcacttcttcgcaccaaacctcagatgcccataaaaagaggggtcaaaagagatcatctctatgctttctttcaacttaatattctgtgatttcagaaaaggtatagaaaactgtwcaccaggaaagggtattcaggctgacacaatttactcagaagtcacttctgcatttccatttatagcttttgaagccattctccttacggtaaactcacacagacattttacaaacaccgcaatcacccactcccaccccaagtacaca

SEQ ID NO: 297147 - DNA, 608 bp, Homo sapiens
ctgttgactaagtatgctagccagatgttttaaaataattggtagggcagacaacacatttgtgtgattgacatttttattttttattttattttgttttttggtgttgagtagccttggtctttgtaactgcagggttgcttactaaaacctgtctttatttctgagaagcagagagtgttgaactcagtgggtgcttctagacttggggattagtgctgggttctcttgtaagatgtggacttgatgtggaaaggtagcaaggtgagtggcctggctatatatattcttttgtatctttttcctctcttttggtactctaaaccagaggcttgatctcygttgattttagctattttaagcctcttaacttcccttcctctttctgtgaaatctgattcaaaagtaggatgcactctattgcaggttgtatctaactataatcaagggtgaccagcatagaaatacatggggtatttcgtggaaaggcagattgctaggccctcctctaactactgaatcaaaacctctagaggatacggtagtgggaaatggtcttttaaataaactccccaggtgagtctaactgcagacttaagagaactgct

SEQ ID NO: 297148 - DNA, 581 bp, Homo sapiens
gccaagctcattcatttatatgttgtttacgcctgttttcttgcagcaacagcagagttgagtagctgtgacagagactgtatggctcacaaagccaaaaatatttaccatctggccctttatagaaaaaggctgcctacttccatgttacaytcacccattacttcatctcactgcttggatcctaaatagattcctgcccgtggcataggattctgggactttgagtgagaggaacagatgggcaggaagacttgatatgtaggtaccagagaagggatatgacactctaaagatccctgagtgttacctgcgaggggcttagttttttttttttttttttttgctcaacagtcctttaaggtatgtgtccttaaggttaacttgctacataatatctgtctatgaaaaggttgtgaaccgtgaaccaaaggactttcatgattagtcatatgacacctgaggggacagtaccaggtacccaggtaccaacctggttgaactccaaattattttcaccaaaaaggatgaaacccattttcaaattagtgatatctgactcaagacattaatgtatgtga

SEQ ID NO: 297149 - DNA, 581 bp, Homo sapiens
gccaagctcattcatttatatgttgtttacgcctgttttcttgcagcaacagcagagttgagtagctgtgacagagactgtatggctcacaaagccaaaaatatttaccatctggccctttatagaaaaaggctgcctacttccatgttacattcacccattacttcatctcactgcttggatcctaaatagattcctgcccgtggcataggattctgggactttgagtgagaggaacagatgggcaggaagacttgatatgtaggtaccagagaagggatatgacactctaaagatccctgagtgttacctgcgaggggcttagtkttttttttttttttttttgctcaacagtcctttaaggtatgtgtccttaaggttaacttgctacataatatctgtctatgaaaaggttgtgaaccgtgaaccaaaggactttcatgattagtcatatgacacctgaggggacagtaccaggtacccaggtaccaacctggttgaactccaaattattttcaccaaaaaggatgaaacccattttcaaattagtgatatctgactcaagacattaatgtatgtga

SEQ ID NO: 297150 - DNA, 574 bp, Homo sapiens
taacaaaacaaaagatgctgcagttgcaaactcatttgaaacaacagcaactcacacaaggctcaaagtgactaatcctgattccatatggtgttcaaacacaggaaagaaggaaaagtgcctggttagctttgggcgctgatgatcctgggggtacacaaaatatgaaaccttttaaaactaagtgtgcagagaaatatcatctggcacacacagcaaggaagggctcaatacctagttgaggaataaagaaataaatgaagaatgtgtagcatcagtagactacaagctaacatttactgaygactagctaggtgccaatttttgttcacttatttaatcatttcacagatgaaaaattgatctccagagagattaaatatttgcccaaatttcagctagtcagtgtgcagctgaaattttaccttaaggctggttacagaaccagaactctaaatccttatggtttagtggttaggagtatgctcgctggagccatgtttcctgggttcaagtccctactgcaccacttactagcttgaggggcttacatgatctcttacaactcagtttc

SEQ ID NO: 297151 - DNA, 529 bp, Homo sapiens
ttttgtgtcttgttttcatgttggcagagacataagaaaatatttctgaccaaaatctatggtcagagcatctttctagacatttattcaagttattgaattttattcagtttcctgctaaataataataatatttgccattggtaactgcttgtgtggaaatacataaacaggaattagtaaagaagggcgccagctctgagtggtataaaggacacggggtctggagccagaaaaccagtttcagtctcaactttgttagtagctgtgtagcttttgacaaacmaattaatatctttgagcctgtctctgccttggtaaagagagttcctgataataatactacctctcaggagataatgggtttgaaagtattttgtaaactgtaaagtactagacaaatattaggtattatgttagcaccgtgagaaggtttgaaaaaagcaagaaaacaacactttgctagtgaagtttgaagagctttctaatttgggagttgttgcagacaccattaagaattgagacacac

SEQ ID NO: 297152 - DNA, 544 bp, Homo sapiens
ttgcagtcagaaaacatatattttgaaagtgagaatcagaagcttcaacagaaacttaaaataatgactgaactatatcaagaaaatgaaatgacactccacaggaaattgacaatagaagaaaattaccagatagaggaataagagaagctttctaaagtggaagaaaagatcagccatgtcactgaagagctggagacctatagaaagctagccaaagatcttgaagaagaattggagagaactgttcatttttatcaaaagcaggttatttcctacgagaaaaaaggacatamtaattggttggcagctcggactgctgaaagaaacctcaatgatttaaggaaagaaaatgctcacaacaaacaaaaattaactgaaacagagtttaaatctgaacttttagaaaaagatcctaatgcacttgatgtttcaaatacaacatttggcagagagcgttcgccatatggtccctcaccgttgggtcagccttcatctgaaacgagagcttttctctctcctcaaactttgttggaggatccac

SEQ ID NO: 297153 - DNA, 577 bp, Homo sapiens
gctggtagtattagccctagaatcattatgtgttgattattatttaagaaagaaatagcttcccaacttaagtcactgtcatttcagactttaatttggattctgacctgtatctgaaagaattcatcaagtgggatcacaaaggttaaaaggcagaagcagtaataaaaataattgtgttgagaaagaaaatgaaagctaagggtgcatttgataaacagcaggaaatattcttagacgtatagggaagtcaggttatgaagcgatttccctggtaaggctgaggagtacagatttacattttagtaaacaagagcaactgaagagttttaagcaagagtttgtaaatttattaattcattaacttgcttgttcatcaaatatatgttcattacctactctgagtgttatggtaaaaactyttttctcaaagattaatgattgactaaagacaaccaataattaatcacttggggaatgattagtaagaaacagccaggaaataggaacaaaaggtagaagattatccaataatctagatcaggagtgctgatatacaaattagaacctgtcatcc

SEQ ID NO: 297154 - DNA, 504 bp, Homo sapiens
atatgggatatgatgcaaggtagactctaagtacatgattacgcaaattaccccaaaggccatggaatagaaaggctcatagaccaaattaagatgcctgactcacttggttcattgactcaatttaaacacatagaagaaagaggcaagagatgggtaggaaaagtgcaagcagagcaggagtctgctgccttaattttggattatatgatgttatatatccactctctctcttcctgctaattgtgtggtcatgaggatcaaggacgaggtgtgagcaaatggtacctggcagttggaaggtgcctagaccaacatacacatcttacaacagaggcaaatacacctggccacagctagaggttactaattagcctaatgagcagcaatgggttttatttgctaaaatgtgtgccactcaaggaaggccaactaataygtacatgaatattgagcacatgtcccacataggcctcacatatatttagcatgtgatgcacatta

SEQ ID NO: 297155 - DNA, 532 bp, Homo sapiens
aaaagtcattatatgaaaaacacacttgcacacatatgtttatagcagcacaattcacaattgcaaagatgtggaaccaacctaaatgtccattcactaatgagtggataaagaaaatgtggtatatatgcatgatggaataccactcagccattaaaaggaacgaaataatgtcttttgcaacaacttggatggagctgtaggccattattctaagtgaagtaacacaggagtggaaaatcaaaaaccatatgccttcacttataagtgggatctaagctatgagtaaataaaggcatacagagtgatataatggactttagagactcagaagtaggagggtgggaagggggctagggataaaaaaccacactttaggtataatgtgcactactctgatgatgggtrcactaaaatctcagaattcaccaccatatagttcatccatgtaacaaaaagccagttgtaccccaaaagctattgaaataaaaaaaaaaacacgctgtataccttaagtaaatacaattttgtt

SEQ ID NO: 297156 - DNA, 532 bp, Homo sapiens
aaaagtcattatatgaaaaacacacttgcacacatatgtttatagcagcacaattcacaattgcaaagatgtggaaccaacctaaatgtccattcactaatgagtggataaagaaaatgtggtatatatgcatgatggaataccactcagccattaaaaggaacgaaataatgtcttttgcaacaacttggatggagctgtaggccattattctaagtgaagtaacacaggagtggaaaatcaaaaaccatatgccttcacttataagtgggatctaagctatgagtaaataaaggcatacagagtgatataatggactttagagactcagaagtaggagggtgggaagggggctagggataaaaaaccacactttaggtataatgtgcactactctgatgatgggtacactaaaatctcagaattcaccaccatatagttcatccatgtracaaaaagccagttgtaccccaaaagctattgaaataaaaaaaaaaacacgctgtataccttaagtaaatacaattttgtt

SEQ ID NO: 297157 - DNA, 532 bp, Homo sapiens
aaaagtcattatatgaaaaacacacttgcacacatatgtttatagcagcacaattcacaattgcaaagatgtggaaccaacctaaatgtccattcactaatgagtggataaagaaaatgtggtatatatgcatgatggaataccactcagccattaaaaggaacgaaataatgtcttttgcaacaacttggatggagctgtaggccattattctaagtgaagtaacacaggagtggaaaatcaaaaaccatatgccttcacttataagtgggatctaagctatgagtaaataaaggcatacagagtgatataatggactttagagactcagaagtaggagggtgggaagggggctagggataaaaaaccacactttaggtataatgtgcactactctgatgatgggtacactaaaatctcagaattcaccaccatatagttcatccatgtaacaaaaagccagttgtrccccaaaagctattgaaataaaaaaaaaaacacgctgtataccttaagtaaatacaattttgtt

SEQ ID NO: 297158 - DNA, 532 bp, Homo sapiens
aaaagtcattatatgaaaaacacacttgcacacatatgtttatagcagcacaattcacaattgcaaagatgtggaaccaacctaaatgtccattcactaatgagtggataaagaaaatgtggtatatatgcatgatggaataccactcagccattaaaaggaacgaaataatgtcttttgcaacaacttggatggagctgtaggccattattctaagtgaagtaacacaggagtggaaaatcaaaaaccatatgccttcacttataagtgggatctaagctatgagtaaataaaggcatacagagtgatataatggactttagagactcagaagtaggagggtgggaagggggctagggataaaaaaccacactttaggtataatgtgcactactctgatgatgggtacactaaaatctcagaattcaccaccatatagttcatccatgtaacaaaaagccagttgtaccccaaaagctattgraataaaaaaaaaaacacgctgtataccttaagtaaatacaattttgtt

SEQ ID NO: 297159 - DNA, 600 bp, Homo sapiens
gtgtagatttttgggtcttgtttgcacttgacatttgaattaatatatcccaattctccctccaatttacttgtacatttattgtagttggttaaaagaaaaaaaactgcaggtaagtcaggcaataaactctgagttagtaggccatttatcttctgtaataaataggagtcagaaagtygcacagaaaattgggctatagcattcaataaggcattcagtaatgaatcaacgtgttacttcctccaccctattctgtaggcctcaatgaagtaacaaaaatgtttttcctctaacaaaagttagtagtatattccttttttaaaaagtcctttcctcacaagaacacatagaaaaggatatatttaaatatattaaaaacaccaattaggatgattttctctagcagtactcaataggagatgaaaggaaaggagagaaaaggtagactgtggaaagatagatcaaaaggagggaaagatgactttacatgggctcagaatgcatcccagtaagtttgtaagttactacaatccctgcccccttacttttggccaatgaccacttcaaaaaaaacagtcaactattgaaagaaactca

SEQ ID NO: 297160 - DNA, 600 bp, Homo sapiens
gtgtagatttttgggtcttgtttgcacttgacatttgaattaatatatcccaattctccctccaatttacttgtacatttattgtagttggttaaaagaaaaaaaactgcaggtaagtcaggcaataaactctgagttagtaggccatttatcttctgtaataaataggagtcagaaagtcgcacagaaaattgggctatagcattcaataaggcattcagtaatgaatcaacgtgttacttcctccaccctattctgtaggcctcaatgaagtaacaaaaatgtttttcctctaacaaaagttagtagtatattccttttttaaaaagtcctttcctcacaagaacacatagaaaaggatatatttaaatatattaaaaacaccaattaggatgattttctctagcagtactcaataggagatgaaaggaaaggagagaaaaggtagactgtggaaagayagatcaaaaggagggaaagatgactttacatgggctcagaatgcatcccagtaagtttgtaagttactacaatccctgcccccttacttttggccaatgaccacttcaaaaaaaacagtcaactattgaaagaaactca

SEQ ID NO: 297161 - DNA, 524 bp, Homo sapiens
tgtttaatttttgaagagccaattttttgtttcatttatcttttgtatggaatcttgcgtctcaatttcattcagttagtctctgattttagttatttcttgtcttctgctagctttggggttggtttgcccttctttgtctagtayctctaggtgtgatgttaggttattaatttgagatatttctaacttcttaatgtgggaatttagcactataaacttgcctcttaacacttcttttgctgtgtcccagacattctggtatgttgtgtgttcattttcattagtttcatttttttaaaaacttctgccttgatttcattctttgtccaaaagtcattcaggagcagattgtttaatttctatgtaagcatatggttttgagagatcttatttgtattgatttctaattttcattgtgctgtggtccaagaatatggttggtatgattgtgttgtttttgaatttgttgataattgctttatggccaagtgtgtggttaatctcagagtatgtggcatgta

SEQ ID NO: 297162 - DNA, 586 bp, Homo sapiens
cggctagctttctgtgctgcacattgatgtcctccagcacctgccatgaatgccgcaactatgtcaagttcttctggaccagcatgtctttccactrtaattcattccttagttcgaagaaatcctctttgatagcattatctggtttctggacagataattgcaatctttttgaagaaaaaaacatcctatctgtcttgcaatatccagaaactcctggatacactgatcaacaccagtttgaatttcttcctgattggtgccattgacatacttctgactcaccagagaagcaaagcaagcctgaaaatatgacttcaacttttccatcaaggtactgtcataaggtcttagagaacctggagcttcctgaagaagcaaagcctagcttgggagttccagtgggggtggtgggggacccagtggctccacagggaacataacacctggtggagctgccatatcttgaatgagatttcttttaaagagtcagtggagatgttaactaggcagttgaatatgaatctgacattcaagagagtagtccagaacaaatacatatttgagagttattgaccaagagaag

SEQ ID NO: 297163 - DNA, 586 bp, Homo sapiens
cggctagctttctgtgctgcacattgatgtcctccagcacctgccatgaatgccgcaactatgtcaagttcttctggaccagcatgtctttccactataattcattccttagttcraagaaatcctctttgatagcattatctggtttctggacagataattgcaatctttttgaagaaaaaaacatcctatctgtcttgcaatatccagaaactcctggatacactgatcaacaccagtttgaatttcttcctgattggtgccattgacatacttctgactcaccagagaagcaaagcaagcctgaaaatatgacttcaacttttccatcaaggtactgtcataaggtcttagagaacctggagcttcctgaagaagcaaagcctagcttgggagttccagtgggggtggtgggggacccagtggctccacagggaacataacacctggtggagctgccatatcttgaatgagatttcttttaaagagtcagtggagatgttaactaggcagttgaatatgaatctgacattcaagagagtagtccagaacaaatacatatttgagagttattgaccaagagaag

SEQ ID NO: 297164 - DNA, 586 bp, Homo sapiens
cggctagctttctgtgctgcacattgatgtcctccagcacctgccatgaatgccgcaactatgtcaagttcttctggaccagcatgtctttccactataattcattccttagttcgaagaaatcctctttgatagcattatctggtttctggacagataattgcaatctttttgaagaaaaaaacatcctatctgtcttgcaatatccagaaactcctggatacactgatcaacaccagtttgaatttcttcctgattggtgccattgrcatacttctgactcaccagagaagcaaagcaagcctgaaaatatgacttcaacttttccatcaaggtactgtcataaggtcttagagaacctggagcttcctgaagaagcaaagcctagcttgggagttccagtgggggtggtgggggacccagtggctccacagggaacataacacctggtggagctgccatatcttgaatgagatttcttttaaagagtcagtggagatgttaactaggcagttgaatatgaatctgacattcaagagagtagtccagaacaaatacatatttgagagttattgaccaagagaag

SEQ ID NO: 297165 - DNA, 657 bp, Homo sapiens
tacactgatcaacaccagtttgaatttcttcctgattggtgccattgacatacttctgactcaccagagaagcaaagcaagcctgaaaatatgacttcaacttttccatcaaggtactgtcataaggtcttagagaacctggagcttcctgaagaagcaaagcctagcttgggagttccagtgggggtggtgggggacccagtggctccacagggaacataacacctggtggagctgccatatcttgaatgagatttcttttaaagagtcagtggagatgttaactaggcagttgaatatgaatctgacattcaagagagtagtccagaacaaatacatatttgagagttattgaccaagagaaggtattaaagccaggatttcacagagataaggaaaacacagaggtgagatgatttatgttcaaatctggagtactatcaacagttggaggttaagcctaggaggaagagacaggaaagaagtctgttgargaaggtagaaggaaagcaggaaaaagttgagtcatagaagccaagaaaagaaagcatttaaagaaggaggaaataatcaattattttaaatgcagtttaaatttcaaatatggtagggacagagaagtgatttctgatatttcatagcatggaaattatagca

SEQ ID NO: 297166 - DNA, 448 bp, Homo sapiens
tttctagccttatactgtccaagccagaaagcttatcatccccatttagaattttagactagtgaataaaaattttaactttctgggaagcttagtgttttattttttattttatttttataagaacaaaggccttaggacyggttaacttgtgtttgatttctctttctcatgcatattatgaaagtcacaattcttggaggccacttttcctggtgcaagataagtgaaagaatacataactcaaggtgtttaagattgtcagtgagataaattatgtaaagaatctagcttactgacttgcttatatgggtaatcaacaaataatactggctttcctcctcattataattgaccttttgcagaacttggcattattgacaatttctttcttcaaacttacctccgtctctcctcttcaataacatctacttttctggttcttctc

SEQ ID NO: 297167 - DNA, 520 bp, Homo sapiens
tgcctcacttctttctgaaatggccacagttcaggctttctttgcatagattattattgtatccttctgacaggttcacaaatgattccatcttttccttctgcaaattattccagagtcattttctaaaatacagatatgatctccatatatgtcagggtaaaactcaaaatcctcacttgatgtacaaggcctctaggagtcaagacttgcctgaggcttcggcctcatcggtctcactaaactactgmatatatcagagtgcaacattaaaccttttttgcagaaatcgttttctctatttatcatgtccttccccatcttgtctttaatctctacacgtcttttaaactgtcagctgaaaagtcaattatttaacattaagcaaattcttattaaaccccaacttaatgtgccaggcactgtgctagccagttcttcgtgaataatttctagacactcagacacttctcattctgctttgttcacatatctgttatcaaattgaactgtcaggatt

SEQ ID NO: 297168 - DNA, 556 bp, Homo sapiens
acctgagctcttgattgttccaatatagagtataacttgggagcaaggttactaatggattaaattgcactgcacacaaactcattcaaatgcccaatacttgcattaaaatattttaaaaatcacagctcttaggttttattgaaaagaataatgtatttattatttacataraataattaaatatggaaagttactaagaagaaagtaaaaaataagccaaagtctacgtaacagaaatattgtaaatatttgttaaatagaatttattgtgtctctttgtgtatatatacagagagacaataggtaggtaacaataattttgaagcaggtatgatagtactctacatgtaatttttaattaaaatataacatttaatatgcattaaaaaaaaacaggcccggtgcggtggctcatacctgtaatcccagcactttgggaggctgaggcaggtggatcacctgaggtcaggagtttgagaccagcctggccaacatggtgaaacccatctctctactaaaaatacaaaaattagctgggcatagtggcaggcgc

SEQ ID NO: 297169 - DNA, 556 bp, Homo sapiens
acctgagctcttgattgttccaatatagagtataacttgggagcaaggttactaatggattaaattgcactgcacacaaactcattcaaatgcccaatacttgcattaaaatattttaaaaatcacagctcttaggttttattgaaaagaataatgtatttattatttacataaaataattaaatatggaaagttactaagaagaaagtaaaaaataagccaaagtctacgtaacagaaatattgtaaatatttgttaaatagaatttattgtgtctctttgtgtatatatacagagagacaataggtaggtaacaataattttgaagcaggtatgatagtactctacatgtaatttttaattaaaatataacatttaatatgcattaaaaaaaaacaggcccggtgcggtggctcatacctgtaatcccagcactttgggaggctgaggcaggtggatcacctgaggtcaggagtttgagaccagcctggccaacatggtgaaacccatctctctactaaaaatacaaaaattagcygggcatagtggcaggcgc

SEQ ID NO: 297170 - DNA, 578 bp, Homo sapiens
tgttgcattctcagcttgataaagtgctgttgttttkggaatttcctttgtcctgatgattttgtttatgttttccctaattatgttgctcccatcaatttctctgagtttattattttatttcaatggagcacattcttcaggagattgatgagaggatgtggatgagagagaattattttgagacactctgtgtctagaaaggtttttatcccacccttgaatttgatttgatattttggctagatatagaactaatggttaaacaaatgctttcctctcaggaatttcttcacttttttagcttctaattttgcttttgagaagtctgatatcatttaattgtaaatacattgcatataatccacttgggcttttttttgtagacattaaggtatcagttttctgtatagtattttgaaaattcaattattatccacccatcaattttccagtaagatttttcctaattttttttatatttctcatctttttattatcttccctatatttcattttgtcgttttacatttatatctaaataattctttattgtatttcagtggtattttaaaagt

SEQ ID NO: 297171 - DNA, 532 bp, Homo sapiens
caactttgccaacagaatcatgattcatatttggctgtgatcccagttcacttggatatatgtagtttcttaagtttccagatgcagaaaggataagcctccttggcccgatttacagtgtctagcaggaagttagttagggcagatgttttgaattcgtggttaacctgttycagtttccactattggtggccatttctgaatatttgaggaagatgaaatactaattgaagtaaaggaggcaatctagtgtctcataaaacaataacctcactttatagtctgtgaaaatcttgtgatctttagcaaggggaaaaactaggaggacaaagtatctcctgccaactattagtgcaatgcattgtgcttgttttctttgttagcaatgataaagcatgtgtcaagctttgattaggattattaagtaaaagtttttacaatgtagagttttattgtttttattgtttttgtttttgctttttgagatagggtctcactctcttgcctaggctagaaagtagtcacatgatct

SEQ ID NO: 297172 - DNA, 609 bp, Homo sapiens
gcttgttttctttgttagcaatgataaagcatgtgtcaagctttgattaggattattaagtaaaagtttttacaatgtagagttttattgtttttattgtttttgtttttgctttttgagrtagggtctcactctcttgcctaggctagaaagtagtcacatgatctcgggtcactgtagccttgacttcctgggttcaagtgatcctcccaccttagcctcctgagtagctgggactacaggtgtgcaccaccatgcccacttaattttcgtattttctgtagagatagggtttcaccatattgccttggctggtcttgaactcctgagctcaagggacctgcctacctgatcctttaaaagtgctgggattatagatgtgtgctatgcactggcagtgttgtttttatatgtattctgtattttcataactatttcagtgaaaatattgggtattgctattctagatgttttatgtggagaaaactatgttagagttctctagttagatgttatcttactcagaaaattgaatccatgtgtctaaatttctcctactaggtaaaaactatcagactagatagtctttaaggtccaaactactgtatt

SEQ ID NO: 297173 - DNA, 564 bp, Homo sapiens
ctctctgttcttggaatgtattattatttcccagggcaataaatcaaggaagctgactgcaagctccaaaactaaataaccaagttgttgagccactaacaagcatatgcaattcatcacttatatgatacatgccaaaacaggtaaagagtttgtaaaggatgtgctgctgccttctttttatttatttctttttagttttaatcagggtaattctcaagggcagatactaggaaaaagagaaaatatagagaaaagaaataaggaagcaaaactttatgtttggtttcagaggataacactttgttatttatagagcaggaagggggatattcaagcattagctctttatattacagcacygtgactctgttaagaacactgttttaaccaaagattcaggaagaaattttaactgctatcaataaaacatgtgtaatgtctgttttagtacatcttaaaaaattcacctaggcccgttgttctcaaactttaatttgcatatcagtcagtacaaagctgcttacgattcagattcttaggctccttttgaagaacctgttt

SEQ ID NO: 297174 - DNA, 502 bp, Homo sapiens
gtttgctatgatagataggtaatgatttatcaaacaatttaacacatggtatctaaaatggaatatgagaaaaaaagcaaaatttaaaatgaatgctttaagaagactctataaaggtgcatttcaaagatattttgtccaattagatgtaggttttctctctaatttgaagaatcaataaaagaaaatgcattatgggagggtttatggaaaaaaagcaacatacaactttgtgctcattagaacaataataaaaaagtggacctacaacaaaacattraaaaatattttatatctttgtatgtttagagttaaaaacaaaatgtttaagataggcatgcatcaatatttatttacctttttaactgacattttgctaacttatcagctataagtattgataatgttggataagaaggtattagatgctggcaggtgcaactggatataatacagtagtttcaatgagatgttgaagtaagccagcatgtcactccaaaat

SEQ ID NO: 297175 - DNA, 612 bp, Homo sapiens
gattaaaaaaaaaagaaacagtaatggatcaaatatttcatgtgactggaaaacctatatattcaaaataatgtggggacatttatgtaaaatatggtcttatgttacagtctttttggtgaaattaaatttattaatatattttaaatttttccatataacaccacaagttccaggtatttgctacctgaaaacatttcagaaccactgttttaatggattgaataccatctcaccttatagctggatttagtgtcatttatccttgaatcctaaaacctttgaagtgggaaagttgttcctaaaagaactatcaaattagattcttcttatgaaagctaattttccatttctcttttatgacacactgtataaaaggtcatgttttatagtcaaaatatgtgggttaaatttcttcccttccacttatataggtgactttaggcaaattgttggacactggtaagctttactcttcttatatataaaagaggaataatactgttcctagctcatagggctattggaaggacgaaatgatataatgcatgtsagtcacttattagagtacttggcacatgtaaacacataattagtggatactactatata

SEQ ID NO: 297176 - DNA, 558 bp, Homo sapiens
ctgagtcaccacatggaaaactgctcgtctgcagagttataaaatttggctaggacttcatgtgagtgagaaataaagcctttgtttgtgaagccagtataacttattatgtagcatagcctacaatattctgtctgatgtagaaaaatacaagttcatgttattttatgctgatgttattgtgttcctttaataatttatccttrttaaaccctttgcctcatattttacttgataatttttgatcatcccattattttcaaccttcgttttatttaagacttgtaactaggctatagctgggtgtatcttaaaaatcaaatctaatagtttttttcttcttttaggtattttaatccatttacatttttggaattactaatagatttacttagacttgtttctgtggttttattattatcaagattttagttccaatttttaaaaaacaaccatcattagctgtcatttgatattatagtcagtagttggtacaatttgttagcttattgttaaaaaattgttttctgtatttagtgttgttttattccagcccct

SEQ ID NO: 297177 - DNA, 558 bp, Homo sapiens
ctgagtcaccacatggaaaactgctcgtctgcagagttataaaatttggctaggacttcatgtgagtgagaaataaagcctttgtttgtgaagccagtataacttattatgtagcatagcctacaatattctgtctgatgtagaaaaatacaagttcatgttattttatgctgatgttattgtgttcctttaataatttatccttgttaaaccctttgcctcatattttacttgataatttttgatcatcccattattttcaaccttcgttttatttaagacttgtaactaggctatagctgggtgtatcttaaaaatcaaatctaatagtttttytcttcttttaggtattttaatccatttacatttttggaattactaatagatttacttagacttgtttctgtggttttattattatcaagattttagttccaatttttaaaaaacaaccatcattagctgtcatttgatattatagtcagtagttggtacaatttgttagcttattgttaaaaaattgttttctgtatttagtgttgttttattccagcccct

SEQ ID NO: 297178 - DNA, 521 bp, Homo sapiens
cattccctccctgtataagaattatgtgcccacactctttgtcatatgactctgtagaacctccygtggagtaagaagggtatattttcctgttcctttgatatggggttggccacatgactggctttgacctatgtactattagcagacatatcatggacagaggctctagcgtgctggcatcatttggcttggccttctgtgcctctgccatcaccatgaaaagaacatggcccaggatgctgctgttcttagaatgaccaaggtggatcagaccaggctggacttgcggactaagagccaagcttagctgaatccagccatgcttcactgacctacatgcccatagacaagaaaaagaaatgtgtcttgttgtgaaccattgaaatttaaggagttgttatgcagcatgaatacgctgatagatcctcctatactttcttaagaacccaatttttatttttattttattattttttttaaagacagggtatcactttgttgcccaggctggagtacac

SEQ ID NO: 297179 - DNA, 567 bp, Homo sapiens
ctatagtcccagctactctgcaggctgaggcacaagaatcacttcaactccggaggtggaggttgcagtgagccaagatsgtgccactgcactccagcctgggtgacagagcgagattctgctcaaaagaaagatgaacaaaaacagaatctgtagctagcagaactgtcccatgagaaatactaaaggaagactttcaggttgaaagaaaatggtaccaggaaatgaatccgcagaaagaaatgaagagcaatggaaatgataaatatgtgggttagcataaaaggctgtatgaacaggtttttttctctttttttatatgagtttgttttaaatgttctgtttaaatatatatttatagattatgtaagttcatatgatatataaatatatatacatttgttaatataagatagtttaaaatgtttgtttaaatattatatgactgcataaggcaatcactctatcactgttctgtcggatttatggcatatataggtataataaatatagcattaatggctcaaagaatggggaaatggagctatattagaacaaagttgttat

SEQ ID NO: 297180 - DNA, 567 bp, Homo sapiens
ctatagtcccagctactctgcaggctgaggcacaagaatcacttcaactccggaggtggaggttgcagtgagccaagatcgtgccactgcactccagcctgggtgacagagygagattctgctcaaaagaaagatgaacaaaaacagaatctgtagctagcagaactgtcccatgagaaatactaaaggaagactttcaggttgaaagaaaatggtaccaggaaatgaatccgcagaaagaaatgaagagcaatggaaatgataaatatgtgggttagcataaaaggctgtatgaacaggtttttttctctttttttatatgagtttgttttaaatgttctgtttaaatatatatttatagattatgtaagttcatatgatatataaatatatatacatttgttaatataagatagtttaaaatgtttgtttaaatattatatgactgcataaggcaatcactctatcactgttctgtcggatttatggcatatataggtataataaatatagcattaatggctcaaagaatggggaaatggagctatattagaacaaagttgttat

SEQ ID NO: 297181 - DNA, 521 bp, Homo sapiens
cagtattgttcagatggcaattctacccaaatttacctacaaattcaaatgcaatccctaccaaaactccagttaggattttgtagaaattagcaagttgattccaaaatatatattaagatgcaaaggatgtagactagccaatstaagtttgaaaaaaaacccacaattcatattacttcacttcaaaatttactgtaaaactagagtaatcaactcagggcggtattggcatacagacagacatgttggtcaatggaacagaatagagagtacaaaaataaacctttacatttatggacaattgatttttgacagtggtgcaaaggcaatccccgtagaaaagacagctttttttcaacagataatgtttattgatatggtttggctgtgtccccacacagatttcatcttgaattatagttttcataatccccatgtgtcatgggagggacccggtgggaggtaattgaatcatgggggcagttaccctcatgctgttctcatgatagtgagtgagt

SEQ ID NO: 297182 - DNA, 521 bp, Homo sapiens
cagtattgttcagatggcaattctacccaaatttacctacaaattcaaatgcaatccctaccaaaactccagttaggattttgtagaaattagcaagttgattccaaaatatatattaagatgcaaaggatgtagactagccaatgtaagtttgaaaaaaaacccacaattcatattacttcacttcaaaatttactgtaaaactagagtaatcaactcagggcrgtattggcatacagacagacatgttggtcaatggaacagaatagagagtacaaaaataaacctttacatttatggacaattgatttttgacagtggtgcaaaggcaatccccgtagaaaagacagctttttttcaacagataatgtttattgatatggtttggctgtgtccccacacagatttcatcttgaattatagttttcataatccccatgtgtcatgggagggacccggtgggaggtaattgaatcatgggggcagttaccctcatgctgttctcatgatagtgagtgagt

SEQ ID NO: 297183 - DNA, 521 bp, Homo sapiens
cagtattgttcagatggcaattctacccaaatttacctacaaattcaaatgcaatccctaccaaaactccagttaggattttgtagaaattagcaagttgattccaaaatatatattaagatgcaaaggatgtagactagccaatgtaagtttgaaaaaaaacccacaattcatattacttcacttcaaaatttactgtaaaactagagtaatcaactcagggcggtattggcatacagacagacatgttggtcaatggaacagaatagagagtacaaaaataaacctttacatttatggacaattgatttttgacagtggtgcaaaggcaatccccgtagaaaagacagctttttttcaacagataatgtttattgatatggtttggctgtgtccccacacagatttcatcttgaattatagttttcataatccccatgtgtcaygggagggacccggtgggaggtaattgaatcatgggggcagttaccctcatgctgttctcatgatagtgagtgagt

SEQ ID NO: 297184 - DNA, 581 bp, Homo sapiens
tgactatcatgaatgccaacatacatccctaacaacccagtgctgttaccctccaaactttttatgtcttgcaaagtattagaacttcatatctgaagccataccactcagagggaatgcaatacatattgacatctcctttaggatgtccatagagaattcaagaaaagaaataatttaaaagtgcttttgggtacagctatttagcactagagggtaagagtagagatagattgtaaagataataatagggttaggcataggattaggatctgggtcagagtcrgggccggaagtatggttagagatggggtcatggtcagggtcaagatcaaagtcagggttaaagtaagggtcagaattaaggaccagggtagggatcaggatttaggttcaggctcaaagtcttgggacagggttagggttaggattagaaccagagctttgttctcaggacccacccgcggatgggtcaccatggctttggagcacctggtagtgtggcatgtccacagtgaagaccagagtttcgttgtccttaagactgacctgggagacgtggctgcaggccattgaggaag

SEQ ID NO: 297185 - DNA, 581 bp, Homo sapiens
tgactatcatgaatgccaacatacatccctaacaacccagtgctgttaccctccaaactttttatgtcttgcaaagtattagaacttcatatctgaagccataccactcagagggaatgcaatacatattgacatctcctttaggatgtccatagagaattcaagaaaagaaataatttaaaagtgcttttgggtacagctatttagcactagagggtaagagtagagatagattgtaaagataataatagggttaggcataggattaggatctgggtcagagtcggggccggaagtatggttagagrtggggtcatggtcagggtcaagatcaaagtcagggttaaagtaagggtcagaattaaggaccagggtagggatcaggatttaggttcaggctcaaagtcttgggacagggttagggttaggattagaaccagagctttgttctcaggacccacccgcggatgggtcaccatggctttggagcacctggtagtgtggcatgtccacagtgaagaccagagtttcgttgtccttaagactgacctgggagacgtggctgcaggccattgaggaag

SEQ ID NO: 297186 - DNA, 579 bp, Homo sapiens
ttcgttgtccttaagactgacctgggagacgtggctgcaggccattgaggaaggtgaggcaaaagcttcctgtctgctccccgtgtgctgaggagggagctctgccatgggctttactttcacacgttatattctacaagtcttgttttacaaaagcatcccttccttgaggcttcggctgctcatcgctgctcatcatcatagcgtgccataacatatagtaagatttgggtttgtttctgggagagatcttggcatagagaaaggagaaatgcttagagccaccatcaagacagttgggatgaaagctggggataggcagaggctggaggaaacatgtgcaccccttgtaaacacttattcatgttttagttattcacttaaagtgttaaattagtaaaaatagtattgaaaaattgaaaartaggcatattaaaacttgtaacactatttaagcttagatatattatttgtacctcatcaacattttttattttgttgagaaagtgtaaggttaattggcagcatatttctaatagtagatagaataatgtctgttttataaacattgacatccta

SEQ ID NO: 297187 - DNA, 489 bp, Homo sapiens
attcattgtgtattttatcacacaaataaggcacagatttttaaaaaatcatcaacttcctggctacctatatagacataattacatagaagctcaactaaatttgcaaacattccagagtttgggtttccaataattctttgtgattctttaaaaggtaaagtatttttttcccataaaacatagcaacatttaaaatcacccgtagaatgtcctgcyatttttgtttctgtagtttcctcattttctgcaaagcctcgctgaggaaattgactttgaatatccttttacactcttctgttttagaaagcattgtggtaaaacattgaatcatcatggtcataagttctgttcacattctttcttgctttgaatattttttcccagtggccaatatttgattctgttgtatcatggctaaaaggtaggcatggcaacaaaataaagacaggaagtctttggaataagtgatcccatcacaatgaatca

SEQ ID NO: 297188 - DNA, 588 bp, Homo sapiens
ttagcatggtccgaggtggatttatggagaagttgttccttgatccaaaccctgaagaatgggtgtcatttccatgggcagaagaaggaaaaggagtgaggaaacatggaagcagttataaaggtggaggtacaaatgcctcggaggacagtgaggaggccagccaccttggaacagagggttctgatgaggaagttgggcagattaygtgtggaacacatgggctggaatcagtttcttggcaagtttaaatgttaggctggagagattagatttcagaaaagcatctgtgcccttcatgtcagctgccaaggtctttgctgttacccaatagctagcatatttattgtggcaaaatgtctaggagtatgattaaaggtggaaaacaactatcagagttcagagtggtaaagccgagacatgcagaatagagattcgagcgaatggtgaggaaaaggaggtagtcaattcagaaaggggagtctgttcactcgttgaacaaatagttattgaatacctctgtgcaaggcatgtgctaggcactgaaaagggagagcaccatttcttaagaactggttaatggtctga

SEQ ID NO: 297189 - DNA, 314 bp, Homo sapiens
atgtgagtagaatgcacacatcacaaagtagtttctgagaatgcttctgtctagtttttatatgaagatatttccttttckaccttaagcctcaaagtgctgcaattatgcactttcagattcttcaaaaagagggtttcaaaactgctctggcaaaaggaagtttcaacgctgtgagttgaatgcacacatcacaaagaagtttctgagaatgcttctgtctaatttttatgtgaagataatcctgtttcccaagaaggcttcaaagcaccctaatatccgcctccagattctacagaaagagtgtttcaaaa

SEQ ID NO: 297190 - DNA, 314 bp, Homo sapiens
atgtgagtagaatgcacacatcacaaagtagtttctgagaatgcttctgtctagtttttatatgaagatatttccttttcgaccttaagcctcaaagtgctgcaaytatgcactttcagattcttcaaaaagagggtttcaaaactgctctggcaaaaggaagtttcaacgctgtgagttgaatgcacacatcacaaagaagtttctgagaatgcttctgtctaatttttatgtgaagataatcctgtttcccaagaaggcttcaaagcaccctaatatccgcctccagattctacagaaagagtgtttcaaaa

SEQ ID NO: 297191 - DNA, 294 bp, Homo sapiens
tgaaccttcctttggattgagcagttttgaaaaactcttcctttataatctgcaggtggatatttggagtgctttgaagccttctttggaaacgggagtatcgtcacmtaaaaatagacagaagtattctcagagacttctttgtgatttgtgcattcaactcacagagttgaagcttctttttgatagagcagttttgaaacaccctttttgcacaatctgcaggaggatatttggagctctttgagtgctacattggaaacgggaatatcgtcacctgaaaactagaaagaa

SEQ ID NO: 297192 - DNA, 294 bp, Homo sapiens
tgaaccttcctttggattgagcagttttgaaaaactcttcctttataatctgcaggtggatatttggagtgctttgaagccttctttggaaacgggagtatcgtcacataaaaatagacagaagtattctcagagacttctttgtgatttgtgcattcaactcacagagttgaagcttctttttgayagagcagttttgaaacaccctttttgcacaatctgcaggaggatatttggagctctttgagtgctacattggaaacgggaatatcgtcacctgaaaactagaaagaa

SEQ ID NO: 297193 - DNA, 781 bp, Homo sapiens
tttgaagccttcgttggaaacgggaatatcttccccttgaaaccagacagaagcattctcagaaacttctttgtgatgtgggcattgaactcacggagctgaaccttcckttggattgagcagttttgaaaaactcttcctttataatctgcaggtggatatttggagtgctttgaagccttctttggaaacgggagtatcgtcacataaaaatagacagaagtattcccagaaacttctttgtgatttgtgcattcaactcacagagttgaagcttctttttgatagagcagttttgaaacacccttttgcacaatctgcaggaggatatttggagctctttgagtgctacattggaaacgggaatatcgtcacctaaaaactagaaagwtttgaagccttcgttggaaacgggaatatcttccccttgaaaccagacagaagcattctcagaaacttctttgtgatgtgggcattgaactcacggagctgaaccttcctttggattgagcagttttgaaaaactcttcctttataatctgcaggtggatatttggagtgctttgaagccttctttggaaacgggwgtatcgtcacataaaaatagacagaagtattcccagaaacttctttgtgatttgtgcattcaactcacagagttgaagcttctttttgatagagcagttttgaaacacccttttgcacaatctgcaggaggatatttggagctctttgagtgctacattggaaacgggaatatcgtcacctaaaaactagaaag

SEQ ID NO: 297194 - DNA, 560 bp, Homo sapiens
gaactgagtaagttctgtggtttgtttttatagctaacagagtttcccattgttgtccagcaaagggatggagcactggatgggtgaggattggcatccagaagaaagggtggcatgaagggtccacgtatctctgcccaacttctgggctgcctctctgtctcatgagctcatctgcacttggtggtctctgcagccagggtcagaaagtagagagacaggrgcagccttgtgtgtttcctgagtgcctattggagtctaagttctagaatagtgggcgaggggctgggataggggctcagccttgtggatctgagggatgttggacagagatgtctcttctgaatgagtgggaggcgctgctgtgggttgaccctgagcctgtggtcttcagtcttggccaaggctgtagggatcacgtggacttcctcacagggagggtgggagatgcagatgagatgagatattttttttcctggttattaggacaggcagtctccagcactggctgtgagggaggcagaggtgccttctgtgtgattatgattggggaagttgag

SEQ ID NO: 297195 - DNA, 560 bp, Homo sapiens
gaactgagtaagttctgtggtttgtttttatagctaacagagtttcccattgttgtccagcaaagggatggagcactggatgggtgaggattggcatccagaagaaagggtggcatgaagggtccacgtatctctgcccaacttctgggctgcctctctgtctcatgagctcatctgcacttggtggtctctgcagccagggtcagaaagtagagagacaggagcagccttgtgtgtttcctgagtgcctattggagtctragttctagaatagtgggcgaggggctgggataggggctcagccttgtggatctgagggatgttggacagagatgtctcttctgaatgagtgggaggcgctgctgtgggttgaccctgagcctgtggtcttcagtcttggccaaggctgtagggatcacgtggacttcctcacagggagggtgggagatgcagatgagatgagatattttttttcctggttattaggacaggcagtctccagcactggctgtgagggaggcagaggtgccttctgtgtgattatgattggggaagttgag

SEQ ID NO: 297196 - DNA, 378 bp, Homo sapiens
gtgtgtagccttttcagattggcttcttgcaggtagtaatatgcttttaaatttcttccatgtcttttcttggcttgatgacttattttttcagtgccgaataatattccactgcctggatataccatagtttacccattcacctactgaaagacagcttggttgtttccaaattttggcagttacggctgagctgctataagcatgcatgtgcaggttttcatgtgaacataagtcttcacattagctgggaaactaggagtgtgattgctggaaatagttargtttttatcattgagtgggcatcatctgcttgggaggagacagcgtccaagtactttcctaaagcgtcatgaagccatacacttgaataagcca

SEQ ID NO: 297197 - DNA, 523 bp, Homo sapiens
agtgcctcctacagtatctggcatgtagctgatgaccatatgttgtcagcatgtcaacatcattggtgttgtcttaaggctcgctgtgtccaaactcagcccattctccaagcatgccttagcctagttccttccctggagtagtcargattttcagctgcatgaatccagtattcagaattttctgggaaactcctaattacaaatactctacctcattgtcccataaatcaacttatctgtgcaggttttctgattgcttgttcagaaaacaacttcttcctattcaaggaactttaaggactaccaattttttgactttgtttgctagaagtctacagagcctccctggatgctgccagtgtagacagtgcaatcccactggggttatgtgtctgaattgatgcagatggagcttttatctagactcgagaggtagaaagaagaggtaggagtttgggtttaactgagaactgggagtacagagaggtggttgagggggactcttggtggttagtgggaa

SEQ ID NO: 297198 - DNA, 612 bp, Homo sapiens
acaaggtcttaaaaaaagatgaagtcaagcgctctctgatgaacacaagccacttttgaaagaaggatgaaagatcttgaagtgaaaaataataataacaataatgcatctttaggaatcagtcaatgtaagggcaaggtatggggtatctcactaaccatcaggttggtcaagattcaaaaaggaaagaaaaacattgttagagtctagaatttgatgggtgccaagatacaatctaaggctatcaacacaggcaagaatctgatgaatttcaccaatgtaaccaagcgtggaataatatatttcccaaaccacctaatcatttgcccaaaaatataagaagtatcattgtcattatcagtttaccttaaayattatattgattaatagaataaacggggattcctcggccaacaagatgtcctgtatttctgagcaatattttcatgtattgcaaatctaattaacttcaaatccattgtctggtctcttgtgttcaaaattaatgagatttttatgcagtctatcggagaaacagcttcatgtcctcctatcatttcctcagatgctcagagccacaaggacttccaactagaaaattaaatagacaac

SEQ ID NO: 297199 - DNA, 612 bp, Homo sapiens
acaaggtcttaaaaaaagatgaagtcaagcgctctctgatgaacacaagccacttttgaaagaaggatgaaagatcttgaagtgaaaaataataataacaataatgcatctttaggaatcagtcaatgtaagggcaaggtatggggtatctcactaaccatcaggttggtcaagattcaaaaaggaaagaaaaacattgttagagtctagaatttgatgggtgccaagatacaatctaaggctatcaacacaggcaagaatctgatgaatttcaccaatgtaaccaagcgtggaataatatatttcccaaaccacctaatcatttgcccaaaaatataagaagtatcattgtcattatcagtttaccttaaacattatattgattaatagaataaayggggattcctcggccaacaagatgtcctgtatttctgagcaatattttcatgtattgcaaatctaattaacttcaaatccattgtctggtctcttgtgttcaaaattaatgagatttttatgcagtctatcggagaaacagcttcatgtcctcctatcatttcctcagatgctcagagccacaaggacttccaactagaaaattaaatagacaac

SEQ ID NO: 297200 - DNA, 605 bp, Homo sapiens
atgttcaggtcttgtttctgtgagaccagttttaacatgtgtgacctcaggatcttcctttctcttatatattaaatagagataaaaatacacaccttgcagggttgtgggattttaaatgggtaaaatttccagagagtttgctcagcacatggtaagttttcagtgaatagcaacagttatctctatgctagcagtgcctacatgtaggggtactgcttaatacgaattaaagcgaacatgtgtcgttgcagcaagtaagcatgtagtgccatgtactcgccaaacacgttgctgcatcttcagtagatttcaaatgcaaaatgcagctcttgccatcaaaataactcatgagagataggtgaagagaaaaattagcatatattttaacactaaaataattttggatggattacaaaatagaagtaaaaagtgaaatcatgaactggaagaaaattaagactaaaaagtatcytggaattgggaaaactttctaaacaaagcatcaaagtcagatgccattaaggaaaaggtgaatacgtttcaattctacataaaaaacgttaacacttcttcaggaaaaaaaataacataaagccacgctt

SEQ ID NO: 297201 - DNA, 599 bp, Homo sapiens
gtaatattacagtttgctgtctctactgtggtgatggtttcatgagattatacatatgtcaaaattaattaacttgtacattttaaatgtgtgtacttttctgcaagctattcatacctcgataaagctgctaaagatggcatttctaattttccatgctgttgtagaaaatagggaaaatttttaagatgttaaaaaagtcacagattatcactgagaaaaaatgtatttttgataatttacatcttcttaggtgctcagcattctgcttagcattatattaaaaggatttatctcaatgtatttaaccagtgtgtattayaaataaacacattatacacatacataaatatattctgattatttaaagataatagttataataaaacctttttatgtgtaccactgattattttcttggtgtatgttccaaaatgatccacgtgtccaaacacttttaagatactatataattgctcctagaaaagagattttacagagagaaggatcagcacaaaaggagattagtctagtctaagaaaaaaataaacaaaaccaggcatgtaccactgaggaaggaagacaatggagaagtgcta

SEQ ID NO: 297202 - DNA, 599 bp, Homo sapiens
gtaatattacagtttgctgtctctactgtggtgatggtttcatgagattatacatatgtcaaaattaattaacttgtacattttaaatgtgtgtacttttctgcaagctattcatacctcgataaagctgctaaagatggcatttctaattttccatgctgttgtagaaaatagggaaaatttttaagatgttaaaaaagtcacagattatcactgagaaaaaatgtatttttgataatttacatcttcttaggtgctcagcattctgcttagcattatattaaaaggatttatctcaatgtatttaaccagtgtgtattacaaataaacmcattatacacatacataaatatattctgattatttaaagataatagttataataaaacctttttatgtgtaccactgattattttcttggtgtatgttccaaaatgatccacgtgtccaaacacttttaagatactatataattgctcctagaaaagagattttacagagagaaggatcagcacaaaaggagattagtctagtctaagaaaaaaataaacaaaaccaggcatgtaccactgaggaaggaagacaatggagaagtgcta

SEQ ID NO: 297203 - DNA, 598 bp, Homo sapiens
aagtcatgcatccagctaaaattctgtcaccaagaataagtggtaagtagatactgtgggacaaacagcattatgtcactctctaaatacatgaaatttatgaggactaaatcctgacatattcttgactccttaaatttgcaaatacctctctcccatataatatataccttaaaatgcacattgaacaagagataatcacagaattgcactgacattgtggtgmtaggctcagctggcccagccctttccacaaaggagtggttagctattttccatgtctgcctcacagactgtgatttaacttcatgctttggaaaatggtgtgttagtagctggccatgtgccttcaacttgcttaggaatatttgaaactatgtaagtggatcagtgcctgatcccaactgttcattggatcaaatggaaaacacacacacacacacacacacacacacacatcattcctgaacagtctgacttaatggatctgtagcagggtcatggcatcccttgttgtaaaacttgcacaggtgattctaatgtataaccagagttgggaaccactgagctaagacattcaaactccacgttggctgtg

SEQ ID NO: 297204 - DNA, 598 bp, Homo sapiens
aagtcatgcatccagctaaaattctgtcaccaagaataagtggtaagtagatactgtgggacaaacagcattatgtcactctctaaatacatgaaatttatgaggactaaatcctgacatattcttgactccttaaatttgcaaatacctctctcccatataatatataccttaaaatgcacattgaacaagagataatcacagaattgcactgacattgtggtgctaggctcagctggcccagccctttccacaaaggagtggttagctattttccatgtctgcctcacagactgtgatttaacttcatgctttggaaaatggtgtgttagtagctggccatgtgccttcaacttgcttaggaatatttgaaactatgtaagyggatcagtgcctgatcccaactgttcattggatcaaatggaaaacacacacacacacacacacacacacacacatcattcctgaacagtctgacttaatggatctgtagcagggtcatggcatcccttgttgtaaaacttgcacaggtgattctaatgtataaccagagttgggaaccactgagctaagacattcaaactccacgttggctgtg

SEQ ID NO: 297205 - DNA, 657 bp, Homo sapiens
gcatcactattttttcacaatcatgttcaggttctccaatttcatctggaaggaaagtggctgagttcaggaaaggacaggcctttaactgaactgcagatccctccagcagcaaaacttaatatttgaggaggcgattatctgttagccagagacttcctttagaggataacagtccctttacattatagggggtgtaaacaatcaggtcattcctcatgctcaacttagtcacttctggcaccagcaaagccaccactgcaactgttcagaggcaagctggccatcctttagccatcaagtcaagttccttgcttaggttactggatggctgctgggctgggcctcaggcctgagttaagactcccaaagctatccccttcctttctgagatgtgcagattaaatgccctccctatggaaagactgagggttgatgctttaagtaaagcttgctttagctgtttaaatgccttctgagccttaggttcccagatcagggagtgagtttyagctattgagtttcttttataaggtgatatgaagggtgaactatttcactgtacccaggtatccacaatctgcaaaaaaccccaaaatcctcttagctgtttgagggttttgggaagggggaaggaggaaagaggctgaatcctct

SEQ ID NO: 297206 - DNA, 570 bp, Homo sapiens
ctggtatttatttatgctttctcctgttgatgggctttaggtttttcaaattttgcaacagtatgaaggaagctgaaagaaacttttgtgagtgtttcttcagtaggcaggagcaatcttccactttgctacatcttttcaaactgctctctaagtgattatgctactatcatatgatatgttctgactagcatcatatgagagtttctattgatccatatcatatgaagaaacctttagttatagtagtttcaccaactggaggggagtaaaatgaaatccagatgggagtaaaatggaatctcatggtgaytataatcttctcatccatttgtcatcgtgatgtaagttcagtatgacctgcttgtcatatcctttcctctttcttatagtatttttaaagctatttttttcttcttttttgttttttgttttattgtttttgggattttttttttttttttgagacaaggcccctcttgctgtgtcatcctcttgctttgtcattgcagcctcgacctcctgggcttaagggattctccttcctgagtctcctaagtagctgggact

SEQ ID NO: 297207 - DNA, 539 bp, Homo sapiens
gagcacaccctgtgcaactcaggtggtgaaggactcaaaagcttatggctaccctctccagactgcttgacttacacctttttcctattgttcttgctctacagccttttagaggaataaagcccagttgggagtctaacatgctcctgagtcttatgagtcctgtttgtgaattatcaagcataaaggtggtcttgagacatccacacatgcacacacacacatacacactcatgaaaagaaaaaaaaaatttccaagattagagcccactcttayttcagagcatgttgatattccattttatgcatgtaaatacacagacacgtaaacccaaatacaattttgggcccatgaaggagtgaaagggaaagccaaagaggttaaagaagatgtctgcaaccaacatttgtgtacaatcactaacaaagtgtacaatatacaatgaatttctacaaattaatgataaaatgcaggaaacctaataggcaaaggattggaacatgcatatcacacacaaaaaatattcaaatggctaaca

SEQ ID NO: 297208 - DNA, 492 bp, Homo sapiens
aactgcatttataatctgttgaggatgttgctgagacatctctgataccccatctgtgatggtgcggacatggactgtgggggagggacgctgtggatgtgggttggagggtccatctgataagggttaagcaggtagagaagagtcaaggtgtcagatgcaggtgaattaggaagggcctacaagcgtgtaaaaccaaaatggtagtgaagggaggcactttgtcactcacacagggagtctgaggttcaaaagtgaactttgggaaccatactcagagagagaaaaragaaactgaggaagcagtgtgatggagaccaactggcggggttttctgggtgggtacccagccaatgcccttcctccaagatcagccgtccaggatgtcctcatggtgtgcagagtagggacagtactgcatgtccaggtcaaatctctcaggcttgtgggagaaagtggtataaattagtgaatttagaagcatataagaaa

SEQ ID NO: 297209 - DNA, 492 bp, Homo sapiens
aactgcatttataatctgttgaggatgttgctgagacatctctgataccccatctgtgatggtgcggacatggactgtgggggagggacgctgtggatgtgggttggagggtccatctgataagggttaagcaggtagagaagagtcaaggtgtcagatgcaggtgaattaggaagggcctacaagcgtgtaaaaccaaaatggtagtgaagggaggcactttgtcactcacacagggagtctgaggttcaaaagtgaactttgggaaccatactcagagagagaaaaaagaaactgaggaagcagtgtgatggagaccaactggcggggttttctgggtgggtacccagccaatgcccttcctccaagatcagccgtccaggatgtcctcrtggtgtgcagagtagggacagtactgcatgtccaggtcaaatctctcaggcttgtgggagaaagtggtataaattagtgaatttagaagcatataagaaa

SEQ ID NO: 297210 - DNA, 417 bp, Homo sapiens
tgagctcctcatggagaaataatttaatagctgaagatcgtttgagacagttcctggcatgcaaaagtcttaaagataatgtaactagtgttgastagccatttagagaggaaaagattgggcttagagccagattgctagagcctgagcatgttggcttgtcacttacagctatgagaccttgggcgggtcacttcagctctgtttccttattccctaagatgggaataatgagagcgctgctttgtgggtagtcgtgaggaatgaatgagttaatccacatacaggacctagaacagcacctgtcacatagtaaattctcaataaaaatcttagccattatgatccctaggctctgaagtaaaaaattatttcccctatctcataaggttgttgggaggtttatatgagacaacc

SEQ ID NO: 297211 - DNA, 540 bp, Homo sapiens
gcttattttctggttgctgaataaattctttcaactgctttacagtagccaatcttcggtctcggtcgttttcccgggtgatcctccgaagaagatatgacagtcgagactcatcacaataagacatcgatctctctgtgaatatataaacattttgttgtccactgagtataaataagcaaaggaaattttaaattttaaaataattttaaaatttttaaaattaaaaattatttaaataataattaaattattatgggggctcatgcctgtaatcccagtactttggaaggygggtagatcacatgagttcaggagtttgagaccagcctgggcaacatggtgaaaccctgtctccacagacacacaaaaaattacataaactagccagccaaggtggtgtgcacctgtagtcccagctactcgggaggctgaggcaggagaatcactggagcccgtgaggcggaggttgcagtgagccaagatcaccccattgcactccagcctgggtgacagagcaagaccctctctcaaaaataa

SEQ ID NO: 297212 - DNA, 540 bp, Homo sapiens
gcttattttctggttgctgaataaattctttcaactgctttacagtagccaatcttcggtctcggtcgttttcccgggtgatcctccgaagaagatatgacagtcgagactcatcacaataagacatcgatctctctgtgaatatataaacattttgttgtccactgagtataaataagcaaaggaaattttaaattttaaaataattttaaaatttttaaaattaaaaattatttaaataataattaaattattatgggggctcatgcctgtaatcccagtactttggaaggtgggtagatcacatgagttcaggagtttgagaccagcctgggcaacatggtgaaaccctgtctccacagacacacaaaaaattacataaactagccagccaaggtggkgtgcacctgtagtcccagctactcgggaggctgaggcaggagaatcactggagcccgtgaggcggaggttgcagtgagccaagatcaccccattgcactccagcctgggtgacagagcaagaccctctctcaaaaataa

SEQ ID NO: 297213 - DNA, 602 bp, Homo sapiens
gtgactcacatctatcatcctagcactttgagaggattagctggaaggttctcttgagtccaggagtttgagaccagccatgtcaacataacaacacctcatctctaccaaatttgtttctaaattagttgggtgtggtggctcacaccagtagtcccaccaactacttgagaggctgaggtgggaggatcacttaagcctgggaggtcaaggctgcagtgagccaagatcgtgccactgcactccagcctgggcaacagagaccatgtctccaaaaaaaaaagagtkggggggagagggcggagggggaagcattcttggccatgcatgcacagtggctcatgtctataatcccaacactttgggaggctgaggtgggaagactgcttgaggccaaaagttcaagaccagcctgggaaacactgagaccccatctctacaaaaataaaaaattagcaggagctatgctgggaggatcacttgagcccaagagatagaggctgcactgagtcgtgatggcaccaccccactttaaaaaggaaaaaaaaaaaaaagctgggtatggtgacacccgcttgtagggctgagtgaggtgggaagtt

SEQ ID NO: 297214 - DNA, 529 bp, Homo sapiens
tgaccaaataacttacctcaagcttttcattttcaaatgtctctaccactcaatactattcaatctagcttcttctgtctctctacaaaactctttttccttataatccctagagcatctgacaaggctgactactcccatctggatgtcctatatctagggcacttcccttctcaatgtccctgtatttttttgaatggcttcctcttctatcctttcacaaaaatgctaaactaggattctgacccaggccttccttcctcttcactcactattctccagaggcttctctctggtttggttgcttacaaaggctctagagtatagagactgaaaaggaaagagggccttttctgtgtactaatcatctgcaaatctctcaagcttagactgtctccttagttcaaaatccaattcttaacagcttacccaacaatctcatctgcacatttcattagaaatcttaaaacakggcttgttctctgtgtgctcctactccagttaatagcattgtttctcttccctctac

SEQ ID NO: 297215 - DNA, 493 bp, Homo sapiens
gattagtatcctttccagactgtgtgggttgactttcacccatctggagttgcttggaacaaagataactacctcaactccttgtcaygaaagcaaaaaaaaaatagcattagagttctgagaacaggatgtcattacgggttgtgccttgtcagctacaggtaagatatttgagtggctcctcaagcctccccaactccctctccaacctcgctacacagtcttcccaggtctggtatttgacctccagactgccgcccagaaagcaactcagagctcagcaacaccatgatgatgaaacacaaatatgtgggcccccaactttggagactccactggttgcttttgtgcagctctttctatatatgactttcaaaatggcagccaaccctctcaactgttggttgatctgaatatgtaaagttcagccttcaaacccagcaaacagtcagctataggatagagttcaggtgctggggaatgaccacggttg

SEQ ID NO: 297216 - DNA, 493 bp, Homo sapiens
gattagtatcctttccagactgtgtgggttgactttcacccatctggagttgcttggaacaaagataactacctcaactccttgtcatgaaagcaaaaaaaaaatagcattagagttctgagaacaggatgtcattacgggttgtgccttgtcagctacaggtaagatatttgagtggctcctcaagcctccccaactccctctccracctcgctacacagtcttcccaggtctggtatttgacctccagactgccgcccagaaagcaactcagagctcagcaacaccatgatgatgaaacacaaatatgtgggcccccaactttggagactccactggttgcttttgtgcagctctttctatatatgactttcaaaatggcagccaaccctctcaactgttggttgatctgaatatgtaaagttcagccttcaaacccagcaaacagtcagctataggatagagttcaggtgctggggaatgaccacggttg

SEQ ID NO: 297217 - DNA, 493 bp, Homo sapiens
gattagtatcctttccagactgtgtgggttgactttcacccatctggagttgcttggaacaaagataactacctcaactccttgtcatgaaagcaaaaaaaaaatagcattagagttctgagaacaggatgtcattacgggttgtgccttgtcagctacaggtaagatatttgagtggctcctcaagcctccccaactccctctccaacctcgctacacagtcttcccaggtstggtatttgacctccagactgccgcccagaaagcaactcagagctcagcaacaccatgatgatgaaacacaaatatgtgggcccccaactttggagactccactggttgcttttgtgcagctctttctatatatgactttcaaaatggcagccaaccctctcaactgttggttgatctgaatatgtaaagttcagccttcaaacccagcaaacagtcagctataggatagagttcaggtgctggggaatgaccacggttg

SEQ ID NO: 297218 - DNA, 493 bp, Homo sapiens
gattagtatcctttccagactgtgtgggttgactttcacccatctggagttgcttggaacaaagataactacctcaactccttgtcatgaaagcaaaaaaaaaatagcattagagttctgagaacaggatgtcattacgggttgtgccttgtcagctacaggtaagatatttgagtggctcctcaagcctccccaactccctctccaacctcgctacacagtcttcccaggtctggtatttgacctccagactgccrcccagaaagcaactcagagctcagcaacaccatgatgatgaaacacaaatatgtgggcccccaactttggagactccactggttgcttttgtgcagctctttctatatatgactttcaaaatggcagccaaccctctcaactgttggttgatctgaatatgtaaagttcagccttcaaacccagcaaacagtcagctataggatagagttcaggtgctggggaatgaccacggttg

SEQ ID NO: 297219 - DNA, 597 bp, Homo sapiens
tgccccataacccttggtacaaatgtctccaaatatatccatcaagcctacakgtagtactgagaataacaacagtagctaacattgattggacacttctaagccccttaaatccattatcttacttaattctcacaacactgatcaagagttggataaaataatccactctcaagccagcaaatctaaaccagccactcttccgtatggattcctgctcttatggtaacaagggcttgcttccccacctcttattcttaacccttctagaaaacctctgctcctccttttctgagatggaaaaatttataagtgaaaaaccattccatctttcgaggtgtggagggaggaaaacaatcactcctgccttcaactaagagtgtgaaaaataagcttaactaaacctgaaatacattttcaaatgcctttgaaaagacttataaatcaaatcacatttgtccatctctctgctcttcaaaattatcatgcatgcacctgaagtttaagcaaagaaatccattaaacaaacaaacctaaaatcataaaacccagatttagagatttatccgctcagtctaatgaatgcccaattcagaa

SEQ ID NO: 297220 - DNA, 597 bp, Homo sapiens
tgccccataacccttggtacaaatgtctccaaatatatccatcaagcctacaggtagtactgagaataacaacagtagctaacattgattggacacttctaagccccttaaatccattatcttacttaattctcacaacactgatcaagagttggataaaataatccactctcaagccagcaaatctaaaccagccactcttccgtatggattcctgctcttatggtaacaagggcttgcttccccacctcttattcttaacccttctrgaaaacctctgctcctccttttctgagatggaaaaatttataagtgaaaaaccattccatctttcgaggtgtggagggaggaaaacaatcactcctgccttcaactaagagtgtgaaaaataagcttaactaaacctgaaatacattttcaaatgcctttgaaaagacttataaatcaaatcacatttgtccatctctctgctcttcaaaattatcatgcatgcacctgaagtttaagcaaagaaatccattaaacaaacaaacctaaaatcataaaacccagatttagagatttatccgctcagtctaatgaatgcccaattcagaa

SEQ ID NO: 297221 - DNA, 530 bp, Homo sapiens
gtggaggttgcagtgagccaagatcatgccactgcactccagcctgggcaacagagcaagactctgtctcaaaaaaaaaaaaaaaaaaaaaaaaaaaaaaaaaaacggggactgctagatgagagagaaagggagagacaaaagggctgacaaactatgctcactatttggrtgacagaaccagtcataccccaaacatcagcaacagacaacatacccatgtaacaaacctgcacatgtatcccctacatctaaaataaaagttgaaattataggctgttcgcagtgctcatgccagtaaccccagcactttgggaggctggggcagaaggatcacttgagcctaggaaatcaagaccagcctgggcaacatagggagacttcctctctacaataaaattaaaaattagccaggcattgtgatgtgcacctgtggtcccaactacttggaaggctgaggtgggaggattgcttgagcccaggagttcaaggctgcagtgagccgtgattgtgtcactgtactcatcctg

SEQ ID NO: 297222 - DNA, 530 bp, Homo sapiens
gtggaggttgcagtgagccaagatcatgccactgcactccagcctgggcaacagagcaagactctgtctcaaaaaaaaaaaaaaaaaaaaaaaaaaaaaaaaaaacggggactgctagatgagagagaaagggagagacaaaagggctgacaaactatgctcactatttggatgacagaaccagtcataccccaaacatcagcaacagacaacatacccatgtaacaaacctgcacatgtatcccctacatctaaaataaaagttgaaattataggctgttcgcagtgctcatgccagtaaccccagcactttgggaggctggggcagaaggatcacttgagcctaggaaatcaagaccagcctgggcaacatagggagacttcctctctacaataaaattaaaaattagccaggcattgtgrtgtgcacctgtggtcccaactacttggaaggctgaggtgggaggattgcttgagcccaggagttcaaggctgcagtgagccgtgattgtgtcactgtactcatcctg

SEQ ID NO: 297223 - DNA, 580 bp, Homo sapiens
cttctgtaaatactctctttgctaaactstcctcaagtaattgattttaatgtgcatccattgcctgccaggacctgattagtccatttcaagcatccaatatcaaagaatgcacccaaaacaaagacgctgttaggaaacacagaactgggcactgcaaaggtctttgagcatgacacaaggatgttgcaagagcggcaggcccagaaggcaagtggggattgaagaaccttaacagcatattcacggggctcagtcctaggattcagcatcatgacatatcacctccaagcttccatgctttcatttgtatagctaagacttgacaagactagtgagggtgtccgatgatgaggacagtcaaggatgttaaattcctgactatacattaacaaggaggaaaaaaactaacaaacctgcatcagtgtgaagaccagaaaggcctgtccacagagccagatgacaaggtacaacaggatgctgttgaaaaaaatcagactagataagagcaggttgctgtgtgagcaaactcagaccatacaagagaactataggcccctctcctccagcccagaattcc

SEQ ID NO: 297224 - DNA, 580 bp, Homo sapiens
cttctgtaaatactctctttgctaaactctcctcaagtaattgattttaatgtgcatccattgcctgccaggacctgattagtccatttcaagcatccaatatcaaagaatgcacccaaaacaaagaygctgttaggaaacacagaactgggcactgcaaaggtctttgagcatgacacaaggatgttgcaagagcggcaggcccagaaggcaagtggggattgaagaaccttaacagcatattcacggggctcagtcctaggattcagcatcatgacatatcacctccaagcttccatgctttcatttgtatagctaagacttgacaagactagtgagggtgtccgatgatgaggacagtcaaggatgttaaattcctgactatacattaacaaggaggaaaaaaactaacaaacctgcatcagtgtgaagaccagaaaggcctgtccacagagccagatgacaaggtacaacaggatgctgttgaaaaaaatcagactagataagagcaggttgctgtgtgagcaaactcagaccatacaagagaactataggcccctctcctccagcccagaattcc

SEQ ID NO: 297225 - DNA, 514 bp, Homo sapiens
cttctcttcttactatttcaagatggctgcccaattcatgtgcagaggaaagagaagttctttctctttactctgacagttgaataaaaaatccaaagcctggctctctttggtccatccctgaatcagtcattatggcctggggaatggagtaygctaattgacttaagggaatcagggcccagcactggagtgaaggtggggctaatgccacctaatccactggagagtaccaaaagtgtgcttccccaaaggaaattcacaatactgtgggaaaggatgaattgatgctgagtcactatgaatgacaaatgcaaaagataaacataccaggccccactccttgcaggaagcaaaagatcctagagggagaggctgacatggaacaggatgtctgaccaataaaacttcttccaatgaggattcacagacatagtcataccttccaggttaagtaaggctcaattccaggcagctgtctgtctcagctcctcatgcacatccgtcgcttctg

SEQ ID NO: 297226 - DNA, 514 bp, Homo sapiens
cttctcttcttactatttcaagatggctgcccaattcatgtgcagaggaaagagaagttctttctctttactctgacagttgaataaaaaatccaaagcctggctctctttggtccatccctgaatcagtcattatggcctggggaatggagtatgctaattgacttaagggaatcagggcccagcactggagtgaaggtggggctaatgccacctaatccactggagagtaccaaaagtgtgcttccccaaaggaaattcacaatactgtgggaaaggatgaattgatgctgastcactatgaatgacaaatgcaaaagataaacataccaggccccactccttgcaggaagcaaaagatcctagagggagaggctgacatggaacaggatgtctgaccaataaaacttcttccaatgaggattcacagacatagtcataccttccaggttaagtaaggctcaattccaggcagctgtctgtctcagctcctcatgcacatccgtcgcttctg

SEQ ID NO: 297227 - DNA, 514 bp, Homo sapiens
cttctcttcttactatttcaagatggctgcccaattcatgtgcagaggaaagagaagttctttctctttactctgacagttgaataaaaaatccaaagcctggctctctttggtccatccctgaatcagtcattatggcctggggaatggagtatgctaattgacttaagggaatcagggcccagcactggagtgaaggtggggctaatgccacctaatccactggagagtaccaaaagtgtgcttccccaaaggaaattcacaatactgtgggaaaggatgaattgatgctgagtcactatraatgacaaatgcaaaagataaacataccaggccccactccttgcaggaagcaaaagatcctagagggagaggctgacatggaacaggatgtctgaccaataaaacttcttccaatgaggattcacagacatagtcataccttccaggttaagtaaggctcaattccaggcagctgtctgtctcagctcctcatgcacatccgtcgcttctg

SEQ ID NO: 297228 - DNA, 456 bp, Homo sapiens
ttttcacctgtcctcttgtgattttcctaatacttttctttaaatcaactaaaaatatatatatatagaaaaaaatatatatatatagagagagagagatggtttcgctcttgttgcccaggctggagtgcaatggtgtggtcttggctcattgcaacctctgtctcccgggttcaagtgattctcctgcctcagcctcccaagtaactgggattacaggcatccaccaccacgcccagctaattttgtatttttcatagagatggggtttcaccacrttggccaggctggtctcagactcctgacctcaggtgattggcctgtctcagcctcccaaaatgttgggattacaggtgtgagccaccatgcctgacctaaatcaactaaaatatttttatttaattatatcttaaaaggaaatgttacagaggtccacaatccctcatctgcaattcc

SEQ ID NO: 297229 - DNA, 468 bp, Homo sapiens
cacattcatattttagttacctgaattctgagatctttataagtgggatttcagtgatgtttatagcacacagggttgcaccaagtcctaccaaatgaaagctcttcaggtcctggatactgtatcctgaatcatccaggtacccttgcaaaatggattcagcctaaaaaatagtaagaataaaagataaaccatccaggaatgatcaaggtccccaggcctgaggggataaataagctgttgctgtagtctcctgactgatctcccatcctactcctctggaatccccactccaaaccatcctggcctctgcatccaagttcatgtccttaagatactacttcaactgagtatgtcccctaatctatgraagtgtcttcaggcaatgaatctcttacatccttcaccaatattaaaggcacttgtgtcctgtgtgtctgctgcttatttccttcagtcactcttatg

SEQ ID NO: 297230 - DNA, 515 bp, Homo sapiens
tctcaaaaaacaaacaaacaaaaaacaacaaaaaattcaacctgggaggtacaaattcaataggtttgtgacagggctttggaatccacatattataaaaactcttcaagtgattccaatgtcagccagaactrgtgaccaacaataattcacatcccatggagctccacatgggcactcctgtgagtgcaaagcaccttccggtctctggacacactgaactcaaccatgaacagaaatacggactaatgtacagctggtatttgagttaattatgccaatcatggaaaaaaacagacacagcttctcaccaaagggtgtaacttccaacttctcctaaatagcgctgttctaaagctaggcacgcccatgtgggcagactgaattcaaccttctttcccatgaccaacactctcctgacctctaggaagccacaaaatcgttgcagagaaggaaaagccttctatattctttcccccaccaaaaaaaaaaagaagaagaagaagaaaagtcaa

SEQ ID NO: 297231 - DNA, 515 bp, Homo sapiens
tctcaaaaaacaaacaaacaaaaaacaacaaaaaattcaacctgggaggtacaaattcaataggtttgtgacagggctttggaatccacatattataaaaactcttcaagtgattccaatgtcagccagaactagtgaccaacaataattcacatcccatggagctccacatgggcactcctgtgagtgcaaagcaccttccggtctctggacacactgaactcaaccatgaacagaaatacggactaaygtacagctggtatttgagttaattatgccaatcatggaaaaaaacagacacagcttctcaccaaagggtgtaacttccaacttctcctaaatagcgctgttctaaagctaggcacgcccatgtgggcagactgaattcaaccttctttcccatgaccaacactctcctgacctctaggaagccacaaaatcgttgcagagaaggaaaagccttctatattctttcccccaccaaaaaaaaaaagaagaagaagaagaaaagtcaa

SEQ ID NO: 297232 - DNA, 515 bp, Homo sapiens
tctcaaaaaacaaacaaacaaaaaacaacaaaaaattcaacctgggaggtacaaattcaataggtttgtgacagggctttggaatccacatattataaaaactcttcaagtgattccaatgtcagccagaactagtgaccaacaataattcacatcccatggagctccacatgggcactcctgtgagtgcaaagcaccttccggtctctggacacactgaactcaaccatgaacagaaatacggactaatgtacagctggtatttgagttaattatgccaatcatggaaaaaaacagacacagcttctcaccaaagggtgtaacttccaacttctcctaaatagcgctgttctaaagctaggcacgcccatgtgggcagactgaattcaaccttctttcccatgaccaacactctcctgacctctaggaagccacaaaatcgttgcagagaaggaaaagccttctatattstttcccccaccaaaaaaaaaaagaagaagaagaagaaaagtcaa

SEQ ID NO: 297233 - DNA, 491 bp, Homo sapiens
tttcttttagagacagggtcttgctctctctctcaggatgaggtacagtgggtgcaatcatagctcactgcaaccttgaattcccgggataagcaatccttcctcctcagcctccctagtagctagaactacaggtgcacaccaccacatgaggttaattcttccttttagrgagacattttctcactatgttgcccaggctggtcttcaactcctggatcttcccacttcagcctcccgaagtgctgtgattatgggcataagccactgcacccagccagcaattttgtaacattttaatcactctaaaaagaaatcctacatccattagtgcacccctaaaaaatgaagaccttggcaaccactagtctttctatgaatctgcctctttgagacatttcatataaatggagtcatataatacatgtttttagggttcaatcatgttgtaacatgtaaaccattcctctcatatcaatggagtcatacac

SEQ ID NO: 297234 - DNA, 491 bp, Homo sapiens
tttcttttagagacagggtcttgctctctctctcaggatgaggtacagtgggtgcaatcatagctcactgcaaccttgaattcccgggataagcaatccttcctcctcagcctccctagtagctagaactacaggtgcacaccaccacatgaggttaattcttccttttagggagacattttctcactatgttgcccaggctggtcttcaactcctggatcttcccacttcagcctcccgaagtgctgtgattatgggcataagccactgcrcccagccagcaattttgtaacattttaatcactctaaaaagaaatcctacatccattagtgcacccctaaaaaatgaagaccttggcaaccactagtctttctatgaatctgcctctttgagacatttcatataaatggagtcatataatacatgtttttagggttcaatcatgttgtaacatgtaaaccattcctctcatatcaatggagtcatacac

SEQ ID NO: 297235 - DNA, 491 bp, Homo sapiens
tttcttttagagacagggtcttgctctctctctcaggatgaggtacagtgggtgcaatcatagctcactgcaaccttgaattcccgggataagcaatccttcctcctcagcctccctagtagctagaactacaggtgcacaccaccacatgaggttaattcttccttttagggagacattttctcactatgttgcccaggctggtcttcaactcctggatcttcccacttcagcctcccgaagtgctgtgattatgggcataagccactgcacccagccagcaattttgtaacattttaatcackctaaaaagaaatcctacatccattagtgcacccctaaaaaatgaagaccttggcaaccactagtctttctatgaatctgcctctttgagacatttcatataaatggagtcatataatacatgtttttagggttcaatcatgttgtaacatgtaaaccattcctctcatatcaatggagtcatacac

SEQ ID NO: 297236 - DNA, 544 bp, Homo sapiens
tgctgtttcctctttcctgttttgaacaaattttctttaatgcattgtgtgagtacacatgtagaacatattctttgacatcacataaatatttacacaatatttaaaactcactgtcatgaagtatttatttcacttgcaaacattatcatctattgttctatggaaaattacaaaataaaaggcacggstgctttgatttttagtacctggttttgtttgttttgttttctttccattgaccttgcatatttaccagtgaatttataaagtcaaaacagagcattattgaaagggaaaattaagtagactccccagagattgagaggtaaagtttgcaccctagcttctgtgaggagcacctcccagtcataatcactgtactctggactatcatggcaatttcttgctttgttagcagagacctgtctattaaggaccaaatccagaatatctgagaacaaaattgagggagtagccatgggttatccctttgtgcctagaacattgcctggaatccagtgtccacatgataaacattttt

SEQ ID NO: 297237 - DNA, 1069 bp, Homo sapiens
taatcattattggttccaggagttttttgttgattcttttggattttctacatrgacaatcatatcatctacaaacaaagatagttttatagttttatttcttcctttccaatcagtatactttttatttctttttcttgtcttactgcattagttagaacttccagtatagtgttgaaaaggagtggtgagagggagcatcctttttgtgttcctgatcttagtatgaaattggctgtagggtttttgttgatgttctttattaagttgaggaaattctcttcagttccttgtttactgagatattttatcataaataggtttggattttgtcaaatgctttgtctacatctattgttagaattatttgattttttttctctctttagtctattgataacaattgattacattagttgatttttcaaatgttgaaccagccttgcttgcctgggataaatcctacttggtcatggtgtgtaattctctttataaattgttggattcaatttgctgattgttgttgaagattttwtaatcattattggttccaggagttttttgttgattcttttggattttctacatggacaatcatatcatctacaaacaaagatagttttatagttttatttcttcctttccaatcagtatactttttatttctttttcttgtcttactgcattagttagaacttccagtatagtgttgaaaaggagtggtgagagggagcatcctttttgtgttcctgatcttagtatgaaattggctgtagggtttttgttgatgttctttattaagttgaggaaattctcttcagttccttgtttactgagatattttatcataaataggtttggattttgtcaaatgctttgtctacatctattgttagaattatttgattttttttctctctttagtctattgataacaattgattacattagttgatttttcaaatgwtgaaccagccttgcttgcctgggataaatcctacttggtcatggtgtgtaattctctttataaattgttggattcaatttgctgattgttgttgaagatttt

SEQ ID NO: 297238 - DNA, 452 bp, Homo sapiens
ggagacttaaaacgtcttcagacgtgcaaggactccaagatacctgccatgcattcttgttcacaaaggatgtcctttgggaaaacaaggtgggaagccgaaagacaggaagccgtggaacccagaacacaggttccaccaggggagaggcaaacggaagggtgggytggggaggggcggtagaaccctggcctcgagcccaccggccaggacagagcccacctgaggatggagggtggaaggcgcaaaccgccgatttgaggtgtggagtcgggaagaagatagaaaggcattttttgctggaccacttagggggaaactgatgtataggaaactggacacgaggcccagtgtggtggctcacgcctgcaatcccagcactttgggaggccaaggcgggtggatcacttgaggtcaggagttcgagaccagcctaaccaacatggggaaac

SEQ ID NO: 297239 - DNA, 452 bp, Homo sapiens
ggagacttaaaacgtcttcagacgtgcaaggactccaagatacctgccatgcattcttgttcacaaaggatgtcctttgggaaaacaaggtgggaagccgaaagacaggaagccgtggaacccagaacacaggttccaccaggggagaggcaaacggaagggtgggttggggaggggcggtagaaccctggcctcgagcccaccggccaggacagagcccaccygaggatggagggtggaaggcgcaaaccgccgatttgaggtgtggagtcgggaagaagatagaaaggcattttttgctggaccacttagggggaaactgatgtataggaaactggacacgaggcccagtgtggtggctcacgcctgcaatcccagcactttgggaggccaaggcgggtggatcacttgaggtcaggagttcgagaccagcctaaccaacatggggaaac

SEQ ID NO: 297240 - DNA, 608 bp, Homo sapiens
aaccaacaaaaactcacattagtaattatttttaagtgtaaatagttcaaatacaccaattaagacaaagattgcaaaggggatttttaaaacgcaacccaactatgtgctacctactgacttcaaacataacaayataggtaggctgaaaaaggaggaaaaaagatatatgcattttggtccattttctgttgcttataatgggatatctgaaactgactaatttataataaataaaacttatttcttatagctctggaggctgggaagcccaaggtcaagaggacacatctggtgagagcattctggctggtggggactctctacggagccccaaggcaatgcagtgtatcacacggtgagggactgaggtgctaatgtgctcgcccaggtttcccttcctcttcctgtaaagccaccagtttccctcccatgataaaccattaatccattaacccattaatccattcattaaggcagaggcctcatgatccagtcacctcttaaaggtcccaccactcaatactgccacattgggaattacatttcaacatcagttttgaaggagacattcaaatcatagcagcataaaaacattattttttaaa

SEQ ID NO: 297241 - DNA, 447 bp, Homo sapiens
ccgcttagccaccatgaaccaattaaacctccagcagccccaggaagtcggagctcattatctccaatgtctacatggggagccgaccacttccgaagctgtaattaccggaggtcagagggcacctgaggcaggaagtctggtctgtcccagcacattcttggcgctcccaggttttccctctgaggaacacagaggaggagatgccctccgccgttggaagtccttccacagtttaaggggcttcaaggagccctagctgggggaaaaagaaccttcgaccatctttactcaagccaggcgctgtgaaaagaacctcccakacagtagcctcgtgcctgggagggagcaggctacggggcgggtttgctggagagatgccggcctggggcagccttagggaggaaggaattggaggcagctgtagaggggttctgcaggaagagg

SEQ ID NO: 297242 - DNA, 584 bp, Homo sapiens
gtgattgcaaaaagtaatataccttccaggagttaactgttcactctagaacagatttccttttttttgttgttgggggggacggagtctcgctctgtcccccaggctggagtgcagtggcacgatctctgctcactgcaacctctttctcccgggttcaagcaattcttctgcctcagcctcccgagtagctggtattacaggcgcgcaccaccaggcccggctaatttttrtatttttagtggagacggagtttcaccatactggccaggctggtctcgaactcctgacctcatgatccgcccacctcggccttccaaagtgctgggattacaggcgtgacccaccgtgcccggcctagaacagatttgactcaagttctaaaataataggatcaaagtaattacacacaatactggtacttttaaggccatctttctttggatcaagacccacaaaatagcaaaaatatccaaagttgtgcttattagggttcaatgtaattaactattgtatataatatgattttattttaattttccttcccatggaaaactgagtcgttagaaacaaattaaaaaaaa

SEQ ID NO: 297243 - DNA, 584 bp, Homo sapiens
gtgattgcaaaaagtaatataccttccaggagttaactgttcactctagaacagatttccttttttttgttgttgggggggacggagtctcgctctgtcccccaggctggagtgcagtggcacgatctctgctcactgcaacctctttctcccgggttcaagcaattcttctgcctcagcctcccgagtagctggtattacaggcgcgcaccaccaggcccggctaatttttgtatttttagtggagacggagtttcaccataytggccaggctggtctcgaactcctgacctcatgatccgcccacctcggccttccaaagtgctgggattacaggcgtgacccaccgtgcccggcctagaacagatttgactcaagttctaaaataataggatcaaagtaattacacacaatactggtacttttaaggccatctttctttggatcaagacccacaaaatagcaaaaatatccaaagttgtgcttattagggttcaatgtaattaactattgtatataatatgattttattttaattttccttcccatggaaaactgagtcgttagaaacaaattaaaaaaaa

SEQ ID NO: 297244 - DNA, 845 bp, Homo sapiens
tttaagagttgctaaaatatgctaggatagcatttgggttctaaatttcctagtaacacgaaattaggaaactttgtcagcttcacagctcacaatatmcattagataaaatgactgctcaggagagttacagttgttcctggtactcattgcaatgtccaagagtctttataaatagagcaactaggtgatataacagatatttcaacagtaatcttacaatagatacaaaaggggcatctaagggctgtttcttatagtgaccctccatatacactgacggcattatacgcaatccagcacaaccaattctgcagaggttagaatggagctggatgtctgaagccatgagccccaccccatacagatctgggagtatgaatggaccctacggcccccaggcaatcctgcctgaagattctwtttaagagttgctaaaatatgctaggatagcatttgggttctaaatttcctagtaacacgaaattaggaaactttgtcagcttcacagctcacaatatccattagataaaatgactgctcaggagagttacagttgttcctggtactcattgcaatgtccaagagtctttataaatagagcaactaggtgatataacagatatttcaacagtawtcttacaatagatacaaaaggggcatctaagggctgtttcttatagtgaccctccatatacactgacggcattatacgcaatccagcacaaccaattctgcagaggttagaatggagctggatgtctgaagccatgagccccaccccatacagatctgggagtatgaatggaccctacggcccccaggcaatcctgcctgaagattct

SEQ ID NO: 297245 - DNA, 377 bp, Homo sapiens
ctattttaatacaggtgtttagtgctgcaaatttttttcctgtgtgctgctttattacatcttacatcctgttgtattttcatttagttcaaaatagtttctaatttatttctcttttgatttcttctttgagccataggttatttagaagtgtgttatttgattttcatctcttgtggtgtttcaaccatttacatttaatatgatttttagtaaggttaggtttgactctrtcatcttactagtagtttcttctggttttgttcccctctccctctttttctgccaccttttggattgaatatttttaatgagtctcttttaatatccattgaatattatactgttgggtgctggatatttttgtattcctataa

SEQ ID NO: 297246 - DNA, 478 bp, Homo sapiens
ccgcttctacttgactccaacttttatttcttcaaccctgtgaaactactggaaattccattcagtctctctgtcccttagccatctctttctgattgtattctccgcctctcagccccatctctcctatgaatcaaatgcctaggtgggatggggggtaagggaagtggctccacttgggtctgcctcaatgtatttcctttctttcctggaccttgcccctaatttatgcctgccttggtcactctatctgtttgatgacttcaaacagatgatctttttacaaaaatttagccattctagttgttttcaatggagagttgctctaatrcaagttaaacttttggagccagagtagaaatctagctcatgcagcatttcttgaatatttactgtctgctcagcattgtggagcttcagtgcatataaaagagataaaagactcactcctgatctgcattcatttggggagataaga

SEQ ID NO: 297247 - DNA, 455 bp, Homo sapiens
ttaggtgggggtggggttttggtcccttgagaaccagtatcttgttatgcatttttttcacgagctaccaagaatcatcgcgtgagataatcgcaggagctggtaaggcccttcttaggagcaagtaaaaacgatggcgtaacacgaccacatttacacaactgttgcacggcggtagtaaaagaatcattaacacaaaaatcaaacgttttcaaataaactataatcgcccgaggctgggaaaggcctaggtctggggccagctggacccaacgcagggcactgggggaagggggtgtgtggacaggtggctcgggatctcggccccacaggtgcccaggggcaagactccgcgggttcccggccctcaatccgaccccgcagaccgccccctccccaagcccggacccgaggcctcgtccgccggcccctmtgacccagggccccggacagaa

SEQ ID NO: 297248 - DNA, 599 bp, Homo sapiens
ccaagtgcatgaaatgatgtgttgtaactggtgggtgggtttggtcagtccaggttggctgataggtttatttatcagaacagactttaagaggttgtcactgaattgcaagagatgcctttcaagtaacttgcatctgggtgctttgcacctttcatttccctctcccttctcattgcttgtacatctcctttctggcttgctttctctcaggccctttttcaggatgcatattgtgtcaaatataaatttggaaaacctagccagagaatacttgacttgagggagacaaccctaagaacattgacctgcagtgggcactccggtggggctagagtgttcactagcctgccccaagtgtgacttctgcttgtgtgtatcacccatttctttattcatttagtacatattttccaagcgatttctctgtgcctcagacactgtgtgaggtcctagggacacaatggtgtgcagaagggaaaactgttgttgccctcacaygggggaggtagcaacaattacaaatttacaggaataaatatgtgataataatatcctagctcaacatagaaaggaagttatctcagtatttacctaac

SEQ ID NO: 297249 - DNA, 537 bp, Homo sapiens
atcagtctcaaatctaaaccaattttggaggtgaggggtggtccatcttgcacctataaaagtctcattactggtggtgttaacttttcttggtcaagacagtgtctgccaggcttctacaactagaaagtcatgtttttccccttttgtaatcaatagatattttctggagagataatttgagactatgtaaaatttcatttaaaccctactttcacccaccagtttgggtgtccattaatgttaattattactgtgatagttgtcaaatggagaccttctgatatcatcaatccttctacatttattagttggctttctactgtaagggagacttctcttgccttcccatttgtttattcayttattcatttatttcttttagcagtgtggagccacatatttgtgttttattcagtagattagaatctgtaactgtcattatttatcttgatgctcaaatcaccagatgtggccaatgaaagcctctttaaactggcttctgagaatttttgttatctcctcattattgtttga

SEQ ID NO: 297250 - DNA, 548 bp, Homo sapiens
ataccagaagtggagttgcttgatcagatggtaattccatttttaatttttaaagaaattaacacagcatttctcacagcagctccaccattttatccaccaacaatgcacagggttccaatttctccatatcctcacctatgataaccattttgttttttaaaaaatagtagccatcctaaacgatatgaggtatctcactgtggttttgatttacatttccctaatgattagtgatgttgaacatcctttttgtgcttgttggccatttgtatatcttctttggagaaatatscattcaaacccttcactcattttaaaaagcacggttttttgttgttgttgagttgcaggggttcttcatttattatggatatcaactccttatcagatatgtcagttgcagatatttcctcttattctgtggtttgccttttaactctgttaatcatgtcctttgatgcacagaagttttatatgtacagtccaacttaatctggttttgttgcagctgcctgaatttttgtcatcatatccaagaaatcatt

SEQ ID NO: 297251 - DNA, 568 bp, Homo sapiens
acaggcattgggtaactgttcccgttccaaattggagaaatcagccaaaacaaagggttccacagctctatgcaagtccaaaagccagtggggcagtcatgaaatcttaagctgtgaaatgatctcacatccaggacatgctgatgcaagaggtgggcttccacagctctgcccctgtggctctgcagggtacagcccctgtggctgttttcatgggctcatgttgagtgcctgtggctttttaggtgcatggtgcaagctgtcaatggatytaccattctggggtctggaggacagtggccctcttctcacagttccactaagcagtgcccagtggggactctgtgtgggggcttcaaccccacatttccctctgcattgccctagtaggcattccccatgagggttctgcccctgcagcagacttctgcatggacatccaggcagttccatacatcctctaaaatctaggtggaggctcccaaagctcaacttttgtcttctgtgcacccacatgcacagtgccacatggaagctgccaaggcttggagcttgcaccctctgacgc

SEQ ID NO: 297252 - DNA, 461 bp, Homo sapiens
taccaaattctgaaagtaatttccaatttaatttaaattataagtttcaacaatttcaagttttcaagcttgtctaaaataatgattacaagaacttagtaaacaaaacatttcaaaaactttaaacaaaatcatcagtactgcactgtacttttatgtctggtaatataaaatttaaatataaaccttctccctgcccccaatgaaaatggtacttagaagggcttccaatgtgaaaatggtaacatttttacaacttgaaattttaattacttgaattayaggaactgttctctctgcatgatgtaatcacgatatgacacatcataggtacatagtacacattttcatttgatctcttgcttttaaacttacactgaaagactgtagaatgtctattaataatatttaagggaactatgtgtctattccatagggaaaaaagacaccaatacccacaa

SEQ ID NO: 297253 - DNA, 569 bp, Homo sapiens
ccgtgtgctccgggcttgtccccggctcggcctttccttccctccctgcctgtctttccacccttctcgttcccaaacccccrttcatcccagttcacttttggaagtccatttctgttgcattcgcgaaaaacccattccaattcttgttggttccactgggaggtgtttagtggatcctgggtccctcagcgatctctgtgcaacttgcggaggggaaaccagtggatgggaaatacagcgagggagcaagttgctacttgcgtggtggaaccttaatgtgaatgcggggaggatgtagtgataatagtggtaatgggctgtttcctcaaatttcgtatccggcgcattcagtgcggttggaattaaggtgggggaggcacacttcggggaccaaagaattaaggtgctgaagacatacttcatgcacgacctttggttctgatttctcaaagtgcttgtcattataatgaacaattaatataataccatcttctatatattgatgattggaagtcactgaaagcagaaagctggctttgtcaggaaaataaaaagaaattgggaag

SEQ ID NO: 297254 - DNA, 505 bp, Homo sapiens
gaaaactttgtgtttgaaattaaagraaaaatgcattttagtgcttatgtatttatggggtaaatatgtgtgtgtttgtgtatgtttgtattttctgctcccccacccccctacctccaccagctccgcattggaatgaaactgcagaaaaaaatttgggagtcctggcagatgaagacaatacattgcaacagaatagcagcagtaatatcagttacagcaatgcaatgcagaaagaaatcacactgccttcaagactcatatattacatcaaccaagactcggaaagcccttatcacgttcttgacacaaaggcaagacaccagcaaaaacataataaggtaggcaggaggctggctatgcaaaagtaactatcatgaagagttttcctttgatttgattttctgccagaatctgagttcacaaattttactgcagcattttattaagaaagcaattaatattatgataggggagaaactggaaggaattaacttgggatcta

SEQ ID NO: 297255 - DNA, 603 bp, Homo sapiens
gactaataggtcatgtctaactcatttgtcttattgataggagaaatgggtgttgtctttaaagaagagaaatccaaggcccttttgataaaatgcattgaggcttttatagctttccttatgaatgagaccttttagagttaagtggttrgttctcaaactccagcacctttgcttaggatgctggaggaaggaaaaacagctgcctcaaagcctgtttcaaagaatgctcaagccctcctcagcagagacttgaaatttcagtggcactttttaataactcagatgtttgaggctatgactaatgcttgccttatagtttaaccttatgtggctgttttctttggtgggacgtggtttgactgtaatatacctgacttccgtgataataaggtttgttaaacctgtacccaccgcttacctagaggaatagttgggtttcttttatactgtactttgaaaagaatgtttctacagaaatcgtatttgaaagcatttttcttattagtttaactctataaacatttgttgcacctttctcatatgcaagcggtatgctaagtattcaaagataagagataaaggttaaaaggatgaaaagac

SEQ ID NO: 297256 - DNA, 585 bp, Homo sapiens
tgtttgaggctatgactaatgcttgccttatagtttaaccttatgtggctgttttctttggtgggacgtggtttgactgtaatayacctgacttccgtgataataaggtttgttaaacctgtacccaccgcttacctagaggaatagttgggtttcttttatactgtactttgaaaagaatgtttctacagaaatcgtatttgaaagcatttttcttattagtttaactctataaacatttgttgcacctttctcatatgcaagcggtatgctaagtattcaaagataagagataaaggttaaaaggatgaaaagacatgatctatcctccaggaggcaggaaaatgagataagcaagattctaaaagtgctcccgtacaggtatagacagtgttgttgtttggtgggtgccttgaaattaccctttgtgttctgtgacctcccttttacttctgtttttaagcatctcttgaagtagttgataaaaagtgttccatctgctttctgctgtatcttaggatgacttgcttaataacagtgatgagagacacttgccagttctgctgctttagaaatgtttcagta

SEQ ID NO: 297257 - DNA, 577 bp, Homo sapiens
ccattctttgctgagaagctctagatgtatccatgtgtgttaagacatgccctcaacattcaggcagcttagaactctgccttagccttcacttcctacktgcacagaaactccaatcagccagaggtgaaagagtagggccctctcaggtctttcccaggcatgcacacagcttttcacatttatgcaaccttttaggtccccaggaatgtatcagagcttttcaaagaccctgtggactgcttgttccccagatttttttttcaagttttgaccaggctcttgtttgtcccatctggtatcacagtgtcaaaccacagaagtgaaaataaccaatgtgggagaaattttaggtaaatattcaataaacctttgtgttaggatatggtgccaagaaaagtgaggagacagaaatgatgctgagcctcctgtgtcattctccctgacctaactgcattatgttcatttggagaagtgggcaattcactagcagaatggactctgcttgagaaacaggctctcttcctttactcaggatgaactcccaatgccccacttaccatcatgcactaccatc

SEQ ID NO: 297258 - DNA, 577 bp, Homo sapiens
ccattctttgctgagaagctctagatgtatccatgtgtgttaagacatgccctcaacattcaggcagcttagaactctgccttagccttcacttcctacttgcacagaaactccaatcagccagaggtgaaagagtagggccctctcaggtctttcccaggcatgcacacagcttttcacatttatgcaaccttttagrtccccaggaatgtatcagagcttttcaaagaccctgtggactgcttgttccccagatttttttttcaagttttgaccaggctcttgtttgtcccatctggtatcacagtgtcaaaccacagaagtgaaaataaccaatgtgggagaaattttaggtaaatattcaataaacctttgtgttaggatatggtgccaagaaaagtgaggagacagaaatgatgctgagcctcctgtgtcattctccctgacctaactgcattatgttcatttggagaagtgggcaattcactagcagaatggactctgcttgagaaacaggctctcttcctttactcaggatgaactcccaatgccccacttaccatcatgcactaccatc

SEQ ID NO: 297259 - DNA, 595 bp, Homo sapiens
cttgatatccaacttccaatttacaggaaattcaaggataaaggaayatgttaaacctcaccatgcagatgcaattcacgaaagagagactgaaaatgtttataggacaggtggcctgtttcttcaccaataaattactatgaaggtggaaaacaagcaaggggaggagaagctaggttaaaagagatttaaagacatatctaaagacagaactaagtgatcatgtttgaaccactctggttttagacctgtaaggagaagtaaggaaaagactaccatagacatcagggcagaatttacttttgagggaagcaaggaagttataatcaggaggaagttgtgaagctcttccttccaagtagctgggaaggttctgccacctgggtgactgttacaagggtattcggctaataatgatttaactgtatatttgttaaatatatagtttatttgttctgcatctgtgtcctaatcaattttgaagaagttaaaacaatctttctctcattgttcttggaaaatgtaagattattttcattatgagatttgatagtttcctgacaaccatcttttccaaagtgtgttgttttctata

SEQ ID NO: 297260 - DNA, 575 bp, Homo sapiens
cgcacatctcaatagctgattgctagagcaatagtagaatgctgatttttttcattaggcctgcacagctttcaagttctaattcgcccagatgtactcaagaacatgttgtggtattaacaataactgtttttcaattaacagtcaatatgtggaggaaccaaamaaaattaaaaggctcctttgcacttaatttttcccacatgctacttaaaaggcattttctctcccttttaatgttaattgaatcatcatccgcttgtcacttaaatttcaaatacatgggaggacacttctctaagtgctgacatgtagttagaggtcacactacaaacccagatgtccctactctcattactcatctcaatctcagcagggaagacaggtataatatctaaagggcagtttaattcttctgatgatttttttaaccataatcttattaaaaagcttaaactttccatttgaatttcctttttctgaagttttctatggtctctctgaacacaagtacactctggatgtcctttaaaaaaaaaaaaaaagattcttagaaggattctaaatcccttaaa

SEQ ID NO: 297261 - DNA, 533 bp, Homo sapiens
tttacaatattccagcagttattattcttctattgctaaacatattgtcccacatgygcctcataaaaaatccagtgaggtagtcattactatctgtacttaacagatgaggaaacaaatgttcagagggttgaaatgacatggcagcagttatccaatgcatgcatgatagaagtggaaattaaagtctagggctgtctgactcctcctccttcatcatgcttcctttccaaatatctgcaatgtaacttccaaactatacaatgaaacacaacaaaccccaattttgggcacaacgaaatacaacaaacatcaattttgggccaacaagattgggcacaattttaggttcaacaaaattgaacatcaatttgatgtaattgaagttaagaaatacaagaatccaatcaagtgtgtatcaatgttatttctattgtaagtgacaaaaactcaagcccagctgattgaagcaaagggggaatttattgattcttacggctgaaaagttcatggtaggctctaggaattaattg

SEQ ID NO: 297262 - DNA, 533 bp, Homo sapiens
tttacaatattccagcagttattattcttctattgctaaacatattgtcccacatgcgcctcataaaaaatccagtgaggtagtcattactatctgtacttaacagatgaggaaacaaatgttcagagggttgaaatgacatggcagcagttatccaatgcatgcatgatagaagtggaaattaaagtctagggctgtctgactcctcctccttcatcatgcttcctttccaaatatctgcaatgtaacttccaaactatacaatgaaacacaacaaaccccaattttgggcacaacgaaatacaacaaacatcaattttgggccaacaagattgggcacaattttaggttcaacaaaattgaacatcaatttgatgtaattgaagttaagaaatacaagaatccaatcaagtgtgtatcaatgttatttctattgtaagtgacaaaaactcaagcccagctgattgaagcaaagggggaatttattgattcttacrgctgaaaagttcatggtaggctctaggaattaattg

SEQ ID NO: 297263 - DNA, 539 bp, Homo sapiens
agcaaataaccacaatgttcagctaaaaaaatggagcaaggtaactgaccttggctttttattattatgacagaatcaattatactcattgatgaattaggtgatacttttccagatttctgtatttccttaggacacacctctggacaaatgaaaatttattctagcaggaaatctgtttttagatggtttttatacacatgcacacacacatatgtacatatacacacaygcaccccaatttctacaaggcaattttcttgatatggattaaatctattcaaataagattattctgttttgcaactgactgaattcttttattttcttttcaaaataatccactgttcaatcaaattaaaatgcttgttttaaactttaatttgtgtgcacatatagccacagtcattcttcagctaaagtacactggttattttaatcctttaatcaatacttccttccagcaattcatatcttttcattccctttccaaaattattcatttctctaaggaaggtagaaggttttgctgacttatc

SEQ ID NO: 297264 - DNA, 596 bp, Homo sapiens
ttatgactcttcagctgcatcacttgatattcttctcatgaaaaaggcaaaaatataacattacataatagctacatgtacagccatgtagaattttcaaaattctttctcatgtctctgtccctcagtacgtaacatgtttattcatacagggtgtaggacaagcttaaaatggggaatagctgtgattttgaaccaagaccagggtctagggcaacagtggyggcaactagaaaaggagacttttttgtgaggaatgttttttatactgattagggtaggagaaatattctgtgttatgactgggctgctacttacacaagtgtatacaactcactgaactctattgtatacttaggattttactatatacaaagtaaacttcaacaaagttcattttaagaagaaaaaaaaatatgtcccagagttataacaatggtatgcttgcttacagattataatatatagtccatttggatgcatgatactctgtacataacaatgatagaatgcatattttgtttaaaaatatgtatctttccctgctgtttctttggaaagacttatgactgttgacagcctgttattatgtaata

SEQ ID NO: 297265 - DNA, 567 bp, Homo sapiens
ttattatttttctaacaattgtcttygtaattaaaatatattcattaatgcatacatgcaaagatttttttggacaacttatggactttctagactatgtccattatccctgggaccctcagaccctagtaggataaactttcatatacaggattagcaaagttatcacttttcctacaacaatgcttcagctggcatttctgagtgacaaaaataaataacaccaagagtgaaccctaatgtaaactatagattttgcctgataatttgtgtcaatgtagtttcaccagctgtaaaaaatgtagcactctgatgggggatgttgacagttgggtagaccatgatgtatgtgcaggggctgaggctatatgggaaatctctgtaccttctgctcaactttgctgtgaacctaaaactgccttaaaaataatgtctaattaaaaaaagaaaaaagtaacttttaaagctccagctgcaccctatgaaaatatttaacttatctcactttctaacattattaggaatcgatttttttagatatggtctttgtgtatttaaacagggaag

SEQ ID NO: 297266 - DNA, 567 bp, Homo sapiens
ttattatttttctaacaattgtcttcgtaattaaaatatattcattaatgcatacatgcaaagatttttttggacaacttatggactttctagactatgtccattayccctgggaccctcagaccctagtaggataaactttcatatacaggattagcaaagttatcacttttcctacaacaatgcttcagctggcatttctgagtgacaaaaataaataacaccaagagtgaaccctaatgtaaactatagattttgcctgataatttgtgtcaatgtagtttcaccagctgtaaaaaatgtagcactctgatgggggatgttgacagttgggtagaccatgatgtatgtgcaggggctgaggctatatgggaaatctctgtaccttctgctcaactttgctgtgaacctaaaactgccttaaaaataatgtctaattaaaaaaagaaaaaagtaacttttaaagctccagctgcaccctatgaaaatatttaacttatctcactttctaacattattaggaatcgatttttttagatatggtctttgtgtatttaaacagggaag

SEQ ID NO: 297267 - DNA, 1132 bp, Homo sapiens
gtccattatccctgggaccctcagaccctagtaggataaactttcatatacaggattagcaaagttatcacttttcctacaacaatgcttcagctggcatttctgagtgacaaaaataaataacaccaagagtgaaccctaatgtaaactatagattttgcctgataatttgtgtcaatgtagtttcaccagctgtaaaaaatgtagcactctgatgggggatgttgacagttgggtagaccatgatgtatgtgcaggggctgaggctatatgggaaatctctgtaccttctgctcaactttgctgtgaayctaaaactgccttaaaaataatgtctaattaaaaaaagaaaaaagtaacttttaaagctccagctgcaccctatgaaaatatttaacttatctcactttctaacattattaggaatcgatttttttagatatggtctttgtgtatttaaacagggaagtgtcatcaatgtaaaaacataattaatattttcactttggattctacaccatcaaaaagaaagttctgaagagtcactgtcttatcaagcatgaccaaaagtcgcttwgcaaagcctaaactttttctatttggtactttgtagaagcagctggctcaccctgatttccagggttactttttatttaacatcagatgacaactttctaaaagtaatcttagaggagatgttatccataataattcaatctggaaagtgtctaactaataaccttatctaatgcccagacagaattttacaactgtcatagatataaaactaaaacatcaaaacccgatatttctgtatgagctgcaaaagtcatgttataaagaaagtttcagtgttttgacatgtaactaagatttgcatgtatatgtcttaactaagagttgtatgcataagtcttagtatgtttgtactattataacgaaatacctgagactgggcaattcaaaaaawagaaacttatttctcacttttctggaggctgggaagtccaagatcaaggtactggtaggtctggtgtctgataaaggtcgttctctgcttccaagatggcagcttaaaagttattttctccagaggggacaaatgctgtatcctcacatggcagaaaagaca

SEQ ID NO: 297268 - DNA, 604 bp, Homo sapiens
aatacttagagtcctatagaaactttttttctctgagtaaaaataatgacttattgctaataaggctgtataccatgctgcatgacacatgcaacttcgtggattgtttgagcttactcacccaaaatgttacattgtgttgacttaaagtcattttctttttttcggttgaagatrgtgagcactgtcttcccaattcatgatgtatttcttgctgaataatcaatacttcatcttattgattagtatatattattttaatttaactttaccctaaaaaggatcacatttgaatttttcttccaaaacttggtcacacaatataaaaactaaaaaactaaaatcttgatatacatataatgtcttatctaaaaatgaagtgtgagatatagaaaaggggtcagcaaatatgactttgcagataatgagctcttgttgccactactcaactctgctagagtagcacaaaagcagctacagacaataaatacatgaatgagcatggctgtgactcaataaaacttgatttagagaagtaggcaatgtcagcaaaaatagtggagaaaagatctccccaaatctcttcctgcataaaagcagcaag

SEQ ID NO: 297269 - DNA, 553 bp, Homo sapiens
atattgcttctttatacaaacacatctttataatccaaattatattgatttcctgggcatgctctataagtttctcaccttcttgaatatattgagcaaggcaacagttgcatgcatcctagagaaaaggaatagcatgaagttcttaaccactgagaataacagggagttatatcaagccttcttccagcaaaagtccataaggaaagtaaaggttttcctcaagcctttatttcttaggtcacaaaaagttgcaagcctggggcttaaactcattctcctccttttcttggtaaatcctaaatagcactgcatacctttctgattcacttcaccttagtacatatgtttctaaggactgagatccgttaactgatctctgcttttaaccccaccttatgcctgtaacttgtagaacctttgctgcctgccagaaggcagacatgtcttttttttcagatgctytttttttttttttttttttttttttgcaacagagatagaaagttttccgttttcacctgatttctgatggtcatattctgtggcgcag

SEQ ID NO: 297270 - DNA, 562 bp, Homo sapiens
gtgcaccactggcccctccagaattggcatctcaccatctcagtgtgagtgtgggcattagcttccctcaaatttcagttattatttttttcctttttttcctgttagtaaggatcataccaaccttgtctaactccaatgagtgtgatgaccaagacttaagacacagaataccttacataagctataaagttctacactrtattattgtggtatcactgctggccagatactattaatgggcatatttgtacagcttgtgggtatggttgtgttaggactaaaacttagcattgcatgcattacattgtacacaaacagatatgaatgcatggttgataaaaatggaagcacaacttctttgtgtaagtgtgatcctttccagtcagtcagaccaatcagaatggaggaaagcataacttagttgctgattgaataagaaaagggtcagaatgtggtaaattggaggagagtatagcccagagaacccatgtggggggaaagtgtgagccatgaatgagaaaagagagaaagcctggacacctatagaatggctaggagt

SEQ ID NO: 297271 - DNA, 594 bp, Homo sapiens
acctgggtcttgacttgcagcttcactagagcaaggtttattgctacagaaaggcagaagctgtaaattttctatttttttaatgtggttgttgttaaaggattatttgttttatttgagcccttgaaccctatggctctgacacacacagtaagaccccgcttccaagtttatggcagggaagtcagtctgtagctagagaagcagtatcagaaagcagtacttagttaaattgatcaattacaatgaatggaggcttatttagtaaatattaaaagactgactcaatgaatgagtttatgatatgactccggaactggcaaaattataaaaacacaattcccmtgtgaagaaataacaaataggactcattactaggagaatgaaatgttgcctctctcagaggatttggacttttcagtggcatttttttagcatctatggccctattaaaccttgttattttttccctaatttgtgccattcagaaatagatttcatttaactttcccatggctcatttctctcccttagaacattttcatatgattccctgataaagtccatgcagcaacacatttccattataaaact

SEQ ID NO: 297272 - DNA, 426 bp, Homo sapiens
aacatactacatttcaatcacacccttgatcaaattatgctgcttctcaccttggcacttttccttacatggaacctctcaccatcatccccatgactgcctcctacgatttttatcatgcatgaattgaatccattttcatgtctgtctttctaaggggccartgaccctgtttgtattctttgtgggtgaatcttcacagttgaaacacagttattggcacactgaaagaattttattattgtcattgcctagatggttctggaccataaaaagaaagttgaaaggggaagagcttgcatgctagattgcaagcccaaaggcagccaatcccaagaaacagtggctgtttcttctcctttgcctgaatacctacattcttaggtctcattatccaagattgtgttcaatgcaaggagacaagaa

SEQ ID NO: 297273 - DNA, 426 bp, Homo sapiens
aacatactacatttcaatcacacccttgatcaaattatgctgcttctcaccttggcacttttccttacatggaacctctcaccatcatccccatgactgcctcctacgatttttatcatgcatgaattgaatccattttcatgtctgtctttctaaggggccagtgaccctgtttgtattctttgtgggtgaatcttcacagttgaaacacagttmttggcacactgaaagaattttattattgtcattgcctagatggttctggaccataaaaagaaagttgaaaggggaagagcttgcatgctagattgcaagcccaaaggcagccaatcccaagaaacagtggctgtttcttctcctttgcctgaatacctacattcttaggtctcattatccaagattgtgttcaatgcaaggagacaagaa

SEQ ID NO: 297274 - DNA, 578 bp, Homo sapiens
aaatactgataaaacaaatgtgggaacgactgtgtgctgtggtctgaatgtttgtgcctcctcctccaaactcacatgttgaaacataacccccaatgtgatggaattcagaagtggagttattggaaggtgataagggcacgagggctccgctcatgaacggtattaatgtccttataaaagaggcctgaaggagcttcttcttcccttgtaccatttgaggacacccagaagtcaccatctatgaggacctggctctcatttaaacacttcaggtggggcgtggtggctcacacctgttatcccagaactttgggaggccgaggagggtgaatcacttgaggccagaagtttgagaccagcctgaacaacatgatgaaaccccatctctactacaaatmcaaaaaaaaaaaaaaaaaagctgagtgtggtcgcacgtgcctgtaatctcagctactcgtgaggctgaggcagaagaatcacttgaacctgggaggcggaggttggagtgagctgagatcaccccactgcactccagcttaggtaacaaagtgacactccatcttaataataataat

SEQ ID NO: 297275 - DNA, 1072 bp, Homo sapiens
attatgctcagcctagggtgtgctttgggggtttatgtggtatagtagacagctttacatactactttttccaaaaaccactgaggccaacatgttttttcaatttgttgagcttatgatcttctgaataaacattgtcccacagtttcatcagcctctctggagtctgccactgttatctggtccattctgcaacctctgcctcactctcctggactgatatgaggccaggctctgtttttcttcccctgtgggtcagtttcatattgacttcagctgggycccataccttatgccatttatcaagctatggcatactgaatgatatttagaaacctacactagttagtgggaaatatggggaaaccaatacctccatggccacaggtctgtgaacactctgtccaagccgtccaccctgagagctgacagttgaccawtaaataaaataaatgttaaaataaatcatggtatacagcattctgccctgtatcagtcagtttcagaatttgaccaaatggagatccatttcagatgttctgttcttaggactggtgacgtagtctgcagctactctgttggtttaaagagcatgagcgtgttgtgacaaaacagagcaaagtcaggataggtgacagaggtttgttttgttttaattcccactgatgtattccacctctcttaagagaaatgccaccaattttcattctgcaagttcgttaaagaagtttctggggaaatgtgagttaactggtcccctttttccaatttatccaaagactgtttcagtgattcttgaagtgtgatagtatctttacttcwactaaactgcccccatagtgtttttcatttatatgttggcaagaaaatgccaacttctttggaaaaggtctgactatagcttttgtctgaactccatatagtttggaacagagggaaaaaaaggagggctataaaattacaaagattcagaacccattaatttgaaacttggtagggatgcattttaatgtaggttgaaaagaaaaatctctgctatttatccaaatattatctgcttaagcaaactgac

SEQ ID NO: 297276 - DNA, 471 bp, Homo sapiens
cataaaattcacccttttaaaagtggtttttagtatattcatggagttgtgcagccataaccactgccctcattaaagaatctgactcaaatatcatgattttccagcatttttggagtacaggacttaggtaaggaaatgcttttttgtctacaatgtcttttttttttttttttttttttttaaragagagggttttggtctgtcactcaggttggcatgttgcactctacaggcacgtgctactacacccagctaactgttgaatttttttgtagagatggcgtctcattatgctgtccaggcttgtctcagactcctggccacaaatgatctacctgccttggccttccaaagtgctgggattacaggtgtgagtcattgcatcccagccactaatttgtctcattttatttctttcaggaaagttcacatccttggctccttccaaaatatcaagatggcaagaac

SEQ ID NO: 297277 - DNA, 471 bp, Homo sapiens
cataaaattcacccttttaaaagtggtttttagtatattcatggagttgtgcagccataaccactgccctcattaaagaatctgactcaaatatcatgattttccagcatttttggagtacaggacttaggtaaggaaatgcttttttgtctacaatgtcttttttttttttttttttttttttaagagagagggttttggtctgtcactcaggttggcatgttgcactctacaggcacgtgctactacacccagctaactgttgaatttttttgtagagatggcgtctcattatgctgtccaggcttgtctcaractcctggccacaaatgatctacctgccttggccttccaaagtgctgggattacaggtgtgagtcattgcatcccagccactaatttgtctcattttatttctttcaggaaagttcacatccttggctccttccaaaatatcaagatggcaagaac

SEQ ID NO: 297278 - DNA, 560 bp, Homo sapiens
cgagttagtgggtgtagcgcaccagcatggcacatgtatacatatgtaactaacctgcacaatgtgcacatgtaccctaaaacttaaagtataataaaaaaaaaaaagataacgcccccaccccaaggccccttgcatacttgcgtttgaatactcatctcacggtgcyggacttttcgttcctcctccatgagctgtcttgtgcccctggccattctgtaccccaggtcttgaactcttcaaggtaaggcatctctgtgcatctttgtagcctggtcgtttagctcaatgcctgaggatgtgtaggtaacatggtaacattctgtggaaaaaaatcgtcagagatatgaggctttgggtggaccaccgtatgtctctggaggtaagagaacagtgtcatatgggatccctgggtcttgtgggactgcattattggtatgttgtgttgggtgctataatcagaccccttgaaggtcaaataggtctttgcgaccctccctggttccccatctaccatgaggagctttgcttctaggcaaaaatacattgtatgttctgac

SEQ ID NO: 297279 - DNA, 494 bp, Homo sapiens
gatatagcaggcccagctccgggccaccacaataaagcagatatcacaataaagtgagtcacatgaactttttggtttcccggtgcatataaaagttatgtttacactatactgtgttctattaagtgtgcaatagcattatgcctaaacaaattacataccttaattaaaaatactgtattgtttaaaatgctaacaattatctaagccttcagcaaatcataatctttgttggtgaaggatmtcaccttgatgtcgttggctgctgactgatcagggttgtggttgctgaaggttagggtaactggagcaatttcttaaaataacacaacgatgaaatttgccatgctaattgattcttcctttcatgaaagatttctctgtggcatgtgattctgtttgatagcattttactcatagcagaacttctttcagacttggagtcagtcctctcaaaccctaccactgccttaccaactaagtttatggaatac

SEQ ID NO: 297280 - DNA, 560 bp, Homo sapiens
aatctttgttggtgaaggatctcaccttgatgtcgttggctgctgactgatcagggttgtggttgctgaaggttagggtaactggagcaatttcttaaaataacacaacgatgaaatttgccatgctaattgattcttcctttcatgaaagatttctctgtggcatgtgattctgtttgatagcattttactcatagcagaacttctttcagacttggagtcagtcctctcaaaccctaccactgccttaccaactaagtttatggaatactctaagtcctgtgttgtcatttccacaatgttcacagcatcttcaccaggagtagattccatctcaggaaaccactttctttgttcatccagaagaaataactctacatctgttcaaattttattgaaattgcagcaattcagtctcatcttcgggctttacttctaattccagttctcttgctattcccaccacatctgtrgttgcttcctccattgaagtctcaaacccctcaaagtcagtcatcagggttggaatcaacttcttccaaactcctattaatgttgat

SEQ ID NO: 297281 - DNA, 613 bp, Homo sapiens
ctgcagctcctacgtcagcacttgctgcttcgctgtgcactgtcatgttatggagagggcatctttccttaaacctcttgaaccagcctctgctagcttccaactttcttctgcagcttcttcacctctctcagaatcaaagaactaggggcttactctggagtaggctttggtttaagggcaagttttagctggtttgatcttctttccagaccactgaaactttctccataacaaccataaggctattktgctctcttatcatttgtgtattcactggagtagcacttttaattttctccaagaactttcccttcgcattcacaacttagctaattgtttggagcaagaagcctagcttttggcctatttctgcttacaacatgcagacttcactaagtgcaatcatttctagcttttgatttaaagtgagagacatgccactcttcctttcacttcaaaactgagaggccattgtaggtttattgattggcctagttttaatattattgtgtctcagggaatagggaggcctgaggagaaggagagagatggagaaatgactgataaatgtgtgttctgactgctccattgatcagctaagtttgctgtc

SEQ ID NO: 297282 - DNA, 613 bp, Homo sapiens
ctgcagctcctacgtcagcacttgctgcttcgctgtgcactgtcatgttatggagagggcatctttccttaaacctcttgaaccagcctctgctagcttccaactttcttctgcagcttcttcacctctctcagaatcaaagaactaggggcttactctggagtaggctttggtttaagggcaagttttagctggtttgatcttctttccagaccactgaaactttctccataacaaccataaggctattttgctctcttatcatttgtgtattcactggagtagcacttttaattttctccaagaactttcccttcgcattcacaasttagctaattgtttggagcaagaagcctagcttttggcctatttctgcttacaacatgcagacttcactaagtgcaatcatttctagcttttgatttaaagtgagagacatgccactcttcctttcacttcaaaactgagaggccattgtaggtttattgattggcctagttttaatattattgtgtctcagggaatagggaggcctgaggagaaggagagagatggagaaatgactgataaatgtgtgttctgactgctccattgatcagctaagtttgctgtc

SEQ ID NO: 297283 - DNA, 609 bp, Homo sapiens
gacatagtctccctcagtacttgtgaatgagaagttccagtgagttcagttttcttcctgacttagttaaacagaactctgctcaattttaactttaattgtggagagagagaaaaaaagcattactccagtttcctggacaagcattctactagggtcaagataatggggctttcttttattgaggtcataatttcaaataaattcttttttgaatcctatatgggttgtagaagattttggctaacagactggtattgcaccagtgaaccacttcaaagttagggatttactcttaggaaaacaacatcaattcactatgtaataygaccttattttcttgtgaagtgtctctttcccatacggtgcaacagagggaaaaacaaacaaaacagtcctttcaactaaattggatgttttggatttcagataaaaagcagggcatttttcttttaatagtgagagcagaggcatgtggaatatctatgctatcatcccatgtaggatatatctaagtgatcaaacagtaattgtgatttttgtgaactaggcctaatgtaacatttggtgcttaattcacctgaggtagctactttctttacttaatgc

SEQ ID NO: 297284 - DNA, 559 bp, Homo sapiens
gaacctctaataataaattcattggtgggggcttgtttgcttttctaccataaattttttttaaaggtgtttgatcttgaagagtgatctgttgatgtaggcagtctgtcccccagtgagtgacamgcctggaagtcatggggcacattgagccacagcccatggggacctggcttcacctcctcctcatccccctctacacctccccaccaacatttcccccaaacaatggcagaaggctgcagagtctttaacacttttactttaacacttttagttcttcacagtccaactaaagatagaacctgcgagagagcagttgctaatagctggcttactttcagacttgtccccaccaactttagcgatgacatgaacctacaaaaagcacaggcatttccactgacttgaaggaacagcagatgagaacaaaaatagcatttgctcttttacttgtatgtaagaacttcattcagctggcagcatttttgggtggtctttgtacctccgaatagtggacacttcagtatctggttcgggtctgcatccccaagtgtta

SEQ ID NO: 297285 - DNA, 538 bp, Homo sapiens
gcccttgtgaatgaggaagaggattgtgttggaaagggaatccctatctttgtgtgcatgctcctcttccctgagccaaggccccagaggctggaggcaaagccaagcgtgcctgctctctgggggctgtgatgtcatctgactccactggggcagagcaaaagtagatgaatggcctccctgcttggccgtgaagataaagtcattaactttgggaaaactcatgtttaggttcccaataagataattagaaarcaagaacaaaatctggattgttctaaactccctagctatgtgctggtttgggttttctctattttagcttctcccataaatggtttcgtcgctttcaactggtctgtttatcacctgatgagctattttcagaggcttcacaggcagaaattttctgaaaatctggaactttgtttatataaaaaccatttgctttaaggaggtagatagattggtatgaatagctgttgatattcttgtgtactgcctcccttatactgggggggaaagaatccactttcat

SEQ ID NO: 297286 - DNA, 603 bp, Homo sapiens
ctaagatggacttctgaattgcttttgcagcttcaaacaagatgctgtaggggaaacctaagggaacatctgagccattttaattccctctgaccatttctccctttgggaaaaacccaaggggcatcagatgtgatggaaccaaattcaaacaaagatattggtaaagaaacacacaatttagtttctactttcctacaaagatactggttattgataacacagcagccgtgtgtgtgtgtgtgtgtgtgtgtgtgtgtgtgtgtactgggaaaaaagatagagtcagagaagccccagtggggttcatcatgcttactttgaaggcaaaagcagagtttgcatcattttggtaccttttyattttccaacagggagaagaaaatcagataacatgaacacagaagtattttgccagctttcaattttatctaaagtacctggtcttagagtttttaacccaatgtagaattttctgaggttggactatgatgatgatgacattattattaggagcagctactattggattgtccacctactgcaagtgctatgcccagcattttatagagcgaattctatttaatccccacaaaaatcttg

SEQ ID NO: 297287 - DNA, 605 bp, Homo sapiens
gcagtcaagggacaagtgagaacctgtgtggcattttatactcactgtgtctaccatgtagggtctagctataggttctcttttatagtctaggaacttgctgttcaaaatgtggtccacagacaagtgccactggtgctacctgggagcttgttagaaatgcagagtgtcaggcctcacccctgagccactgaatctgaatctgcattttaaccaggcccccaggagagtcctccacacattgtaggctgagatatgtagctctggtttaccgcctttcaatcttccacaygcattgcagtcaccttggaaaagtacccatgccagggcccacccccacacccagagataatgatttaattgttatggggtgcagccaggacaatgggatttttaaaaactcttcaggtgattgtaacatatagcaaagtttgagaacaactggtctagtatacacacaaatagattaaaagaaaaaatgagaaatcccttcctggactataaatagaatcatagaaagtttataaacaactgtagcaaaatttattgaaaataaattgaacatataaccaccaatctgatgtctttaccatatagtgtcaata

SEQ ID NO: 297288 - DNA, 605 bp, Homo sapiens
gcagtcaagggacaagtgagaacctgtgtggcattttatactcactgtgtctaccatgtagggtctagctataggttctcttttatagtctaggaacttgctgttcaaaatgtggtccacagacaagtgccactggtgctacctgggagcttgttagaaatgcagagtgtcaggcctcacccctgagccactgaatctgaatctgcattttaaccaggcccccaggagagtcctccacacattgtaggctgagatatgtagctctggtttaccgcctttcaatcttccacacgcattgcartcaccttggaaaagtacccatgccagggcccacccccacacccagagataatgatttaattgttatggggtgcagccaggacaatgggatttttaaaaactcttcaggtgattgtaacatatagcaaagtttgagaacaactggtctagtatacacacaaatagattaaaagaaaaaatgagaaatcccttcctggactataaatagaatcatagaaagtttataaacaactgtagcaaaatttattgaaaataaattgaacatataaccaccaatctgatgtctttaccatatagtgtcaata

SEQ ID NO: 297289 - DNA, 605 bp, Homo sapiens
gcagtcaagggacaagtgagaacctgtgtggcattttatactcactgtgtctaccatgtagggtctagctataggttctcttttatagtctaggaacttgctgttcaaaatgtggtccacagacaagtgccactggtgctacctgggagcttgttagaaatgcagagtgtcaggcctcacccctgagccactgaatctgaatctgcattttaaccaggcccccaggagagtcctccacacattgtaggctgagatatgtagctctggtttaccgcctttcaatcttccacacgcattgcagtcaccttggaaaagtacccatgccaggrcccacccccacacccagagataatgatttaattgttatggggtgcagccaggacaatgggatttttaaaaactcttcaggtgattgtaacatatagcaaagtttgagaacaactggtctagtatacacacaaatagattaaaagaaaaaatgagaaatcccttcctggactataaatagaatcatagaaagtttataaacaactgtagcaaaatttattgaaaataaattgaacatataaccaccaatctgatgtctttaccatatagtgtcaata

SEQ ID NO: 297290 - DNA, 582 bp, Homo sapiens
ctttgttcaccttgatgtttctggacatcccttttaattattgaactgaattcgtgtaaagtaggggttttccatattctcatctttaacttcaaaacccaggttccatttcacaacttttccaaatgttgggttaacaagtcataactacracccttttacatgtttcttaatcaccaattgtgcttcaaatgtgctctgaaaaacaaaggtgcctttcatgttattccctgattaaaaaaaactttacatttagttagaatgctaaattctatagcaatttgtgtccaatggttataagactaattcattctgattttaaaactcattctcacttaaaaattttaaaatgtagccctcattccctataggctcatatacaaatatgaaaactacatgtatatatttatctttcatatattcaatctcaaatggtaatgaatattgattatggttcctgtgcttatatatagatgaaagaatgtacatgataaaacccaaatgctccacgtaccaagttattaaacatgccatataccctgtagtatcaagcagtaactctcaccattcacatttcagttt

SEQ ID NO: 297291 - DNA, 582 bp, Homo sapiens
ctttgttcaccttgatgtttctggacatcccttttaattattgaactgaattcgtgtaaagtaggggttttccatattctcatctttaacttcaaaacccaggttccatttcacaacttttccaaatgttgggttaacaagtcataactacgacccttttacatgtttcttaatcaccaattgtgcttcaaatgtgctctgaaaaacaaaggtgcctttcatgttattccctgattaaaaaaaactttacatttagttagaatgctaaattctatagcaatttgtgtccaatggttataagaytaattcattctgattttaaaactcattctcacttaaaaattttaaaatgtagccctcattccctataggctcatatacaaatatgaaaactacatgtatatatttatctttcatatattcaatctcaaatggtaatgaatattgattatggttcctgtgcttatatatagatgaaagaatgtacatgataaaacccaaatgctccacgtaccaagttattaaacatgccatataccctgtagtatcaagcagtaactctcaccattcacatttcagttt

SEQ ID NO: 297292 - DNA, 626 bp, Homo sapiens
tttcacacacagcattctccctcccctaccccagcctggttttcagcataggacgattttcctaaaggaactcttgagtggtgaagacaactgttcaaatggagttcccctaacccaagcagggcacacccacacccaaggcccttcgaccctcctctctccccatcccttaaatttagaggaatggttggaaatgaattaaggatgctggttatattagtctgttcttgcattgctataaagcactgcctgagactagataatttataagaaaagaggtttaattgactcacagttctacaggctgtacaggaagcatggctggggaggcctcaggaaacttaaaatcacggaggaaagcgaaggggaagcagacacatctttacccagcaaagcaggctacagagcgtgaagggggamgtgctacacgcttttaaaccaccagatcccgcgagaactcactcactgtcaccagaacagcaaggaggaagtccgtccccatgatccaatcacctcccacgaggcctctcctccagcaatgaggattacaatttgacatgagatttgggtgggaacacagagccgaaccatatcactggtcattgtggtgtctctaaaaggccagg

SEQ ID NO: 297293 - DNA, 577 bp, Homo sapiens
cctcattaaaagagttaactttttttccaacattataaaagggaataaacaatgagaaattttcttgtaagctacatgtcttctctccccacctttagataaatgctttttctagaacagtgattctcaaatttttagtgarcattggaaccacctggagggcttgttaaaacagattgctgggccccacccctagggattctgattcagcaggtctagggtggagctggaaaatttgcatttctaataagtttccaggtgatgctgatgttgctggtataggaacctcacttaagaagcacagtttagtgttcttcgtgtacctacagagacttgtatatctctgtatctctacacgtatacacaacagattattaaaaatgaacccattctttactaataattttgaaatttgttttcatttaacaaaatatcctagctaacatttctttgctgatttcctacatcatatcctagattagggatttctatcattctttttaatggctgcatagaattccattgtatttttgcaccatttatttaaccagtctctattgttggaagtttagatttt

SEQ ID NO: 297294 - DNA, 624 bp, Homo sapiens
ctacctcatatgttcaagagcagacaaaattaacataatggaagtcagaatagtggttactttgcaggggtagaaggaacaagggagctttctgggatgttagaagcattcggtatcttgatctggatggtagttacactagaaaatacatatgaaaaaattcattgagctatacatttaagagtagtgattctacatattttactgaatgtatattatacccctactaaaaagtagaaagaaaaaacagaaaaaaatatgccagaatattaagtgtataaccagacygtcctgagaaaactggcatacaccaccaccctattttttagggaaagggacaagaatgatataaggaagtttttaatggaaactaaaatgtaataaattaaaatccactttgagttcagtaaaaagcagaattagtgctgaagaaaactgaattagttatgagaatgaaaaaaacaggaaaaaacacctcataattaagatgaaaggggcaagtcatgaaaacaagagagaagataataggtatagattggtgaccagaacaaagcagaccagaaataatcaaagatatggcagaagaaaagtatttgaactctaggtaatagcagaagaattcct

SEQ ID NO: 297295 - DNA, 592 bp, Homo sapiens
tatatttatattgactaattttgacctgtctacatttaacttctcaagaatgttctctatgcaaaataatttattccctaatgttgtgtctgacatgggcacatgtccaaaagttctttgctcatgttaaaaaaaccaaaaaaccaacgaacarctataagtatagtagctgtatgatattatttatatcaatggtctcatcggtgataagaaaaaaatcacaattgcctaatggtttcttactttgtcctgtacgttttgaatcctgtcttcatcatgctgaacaactgcatttccagcaaatacatactcatgttgagacaaaaacaatgaaaatttcagtccatttcttcagttcagtgatggtttcattttcatttaacttattatttttccttttttccataatgggatctatagttgtccttttttgtgtgttaggaatagttttattgagatacagtttacataccaaaaaattcattctttatgcaattcttcaagtatacaattctttaagtatacattcagcagtttttagttaactcaatgttgcataaccatcactactacttaattttagaacatgttc

SEQ ID NO: 297296 - DNA, 546 bp, Homo sapiens
acagctaacaagtgacagagctgggatttgagcctaggcggactgacttctaagctgtgctctgaccactaagctacagtgcagtgaagatcagtggcagaggagtggtcaggagactgctggctttgggggcttcacagagaagttatttggtatccctgastttctcacacagattatcaagaaggaaacagggagatttcaggctgcatttgggaggagggctgggaaaatatctgggttagatttgtcatagggtctttaacatgttcttttgcttcaaaggctaggagaaaagccgtggaagctccattcacttattgtaaatactaatactttctctgagcataggtacacttctgtctactttcagggtgtgccaagaagttggttcccttatctcccttccaattttgttccggaaattaagcgtcatgggtataaatgtttttctgctttctaaacagtaccttacctgttagggagattccaaactgttcatttctgctttatattttttgaataccttatgctattagctacaca

SEQ ID NO: 297297 - DNA, 578 bp, Homo sapiens
agaaaggcctttcttctggttccagattttgtgctcttttgttgtgcagcagttttcccttacccataattttgctttttatggtttctgaaaatattagatggaaaatttcagaagtaagcaacttataagttttaagttgtgtgctgttttgagcagcatgatgagatctcatgccctctctttgccccctagctgccgaacatcaatcattgctctgttcaccatctccatgctgtcgacctgcccgttagtcacttagtagccctctcagttatccgatcaactgtcagggtgttgcagtgcttgtgttcggtcacctttactttacttgagaatgccycaaagtacaggagtggtgatgccagcaatttggatataccaaagagaagccataacgtgcttcctttaaaagtgaagaggtgaaagttctcaacataaggaaataaaaaaatcgtatgctgatgttatcaaaatttactatggtaagaacaaatcttctgtccatgaaattgtgaagaatgaaaaagtaatttgtgcatgttttatacagagtttggaactatttgaggtttcag

SEQ ID NO: 297298 - DNA, 609 bp, Homo sapiens
ttcttgtcatcattccctaaacaatacgacaaagatttacatagcatttatattgtattaggtgttataagtaatctagtgaggatataaagtatacaggaggagattccaaggttttaggcaaatgcaatgccattttatatcagggaattgagcatctctggattttggtatctgtgggaggtcctggaaccaaccccccatgaatacccagtgacaactgtgcctggatcttatatataaaaactgaatgtcatggcagaatactcaaggaagattaccacatcatcaagtactcctatagcacttgttgtctctccccacacccattctctctcagcctctgttaccaagtaccatatggaaccackggttatctctaatagatgttatacttggctaaggaaaaagtatgtctctggcaagcagtcttgcctaaccaggtccttggagtgttgcctgtactaaatcaagctttttaaggactaaggacccattcttaaaatttctataccagatctatggcaatgaaaagggtgaaactcagtaaaatatcttgaaaagatttattctgagccaaatatgagtgacaaatagcccatgacacag

SEQ ID NO: 297299 - DNA, 609 bp, Homo sapiens
ttcttgtcatcattccctaaacaatacgacaaagatttacatagcatttatattgtattaggtgttataagtaatctagtgaggatataaagtatacaggaggagattccaaggttttaggcaaatgcaatgccattttatatcagggaattgagcatctctggattttggtatctgtgggaggtcctggaaccaaccccccatgaatacccagtgacaactgtgcctggatcttatatataaaaactgaatgtcatggcagaatactcaaggaagattaccacatcatcaagtactcctatagcacttgttgtctctccccacacccattctctctcagcctctgttaccaagtaccatatggaaccactggttatctctaatagatgttatayttggctaaggaaaaagtatgtctctggcaagcagtcttgcctaaccaggtccttggagtgttgcctgtactaaatcaagctttttaaggactaaggacccattcttaaaatttctataccagatctatggcaatgaaaagggtgaaactcagtaaaatatcttgaaaagatttattctgagccaaatatgagtgacaaatagcccatgacacag

SEQ ID NO: 297300 - DNA, 520 bp, Homo sapiens
agctttgtaatatgttttgaagtcaggaagtgtgatgtgtcaggctttttgttttgttttgttttgttttgttttttggtccaggattgctttggctatttggactccttttcagttccataaaaattttataattttttaaatatttctgtgaaaaacgacatggggattttgacagagattgaattgtaactttagattgcattttggtagtatggycattttaacaatattaatttttccactcctgattatggaatgtctaattatttgtttctgtcctcttggatatccttcatcagtgttttatagttttccttgtagaggtcaatcacctccttggttaaatttctccctgggtattttatttttctgtgcatagctattgtaaatgagattgccttctcgattttgttttcagctgtttcattattggtgtatagaaacactactaatttttgtatgtttattttgtatcctgcaactttactgaatttgtttatctgttctaagcattgtt

SEQ ID NO: 297301 - DNA, 520 bp, Homo sapiens
agctttgtaatatgttttgaagtcaggaagtgtgatgtgtcaggctttttgttttgttttgttttgttttgttttttggtccaggattgctttggctatttggactccttttcagttccataaaaattttataattttttaaatatttctgtgaaaaacgacatggggattttgacagagattgaattgtaactttagattgcattttggtagtatggccattttaacaatattaatttttccactcctgattatggaatgtctaattatttgtttctgtcctcttggatatccttcatcagtgttttatagttttycttgtagaggtcaatcacctccttggttaaatttctccctgggtattttatttttctgtgcatagctattgtaaatgagattgccttctcgattttgttttcagctgtttcattattggtgtatagaaacactactaatttttgtatgtttattttgtatcctgcaactttactgaatttgtttatctgttctaagcattgtt

SEQ ID NO: 297302 - DNA, 531 bp, Homo sapiens
tacctgctcctgcttcatcttccaccatgagtaaaagctccctgaggcctcctcagaagctgagcagatgccagcaccacgcttgtacagcctacagaaccaattaaacctcttttctttacaaattactcagtctcaggtattcctttatagcaatgcaagaatgacctaatggaataacattactaaaattagaaaattatagagatggagaacagattagtagttgctaggggttagggcaggtggcatagggagggaggtatctgtgattataacagggaagtatgagggatccctgtgatggaaccattctgtgtcttgactgtggtggaggtcatacaaatgtatacctgtgataaaactgcaaagaacaaaatacacacacccacacacacacacacacacacaygagtacctataaaactgatgaaatctgaataaagttgatggattatatcaggattaattttctggcttgattttgtactttagttatgtaagctgtcatcattgggggaaattggatga

SEQ ID NO: 297303 - DNA, 571 bp, Homo sapiens
ctaaacttcattaaaatttacaacttctgctctgcaagagaatgagaagataagccacagatggaagaaaatatttgcaaatgacatatgtgataaaggactgttatctaaaatatacaaagaactcttaaaactcaacaattaaaaatgaacaacctgattaaaaaatgggcaaaaaaccttaacagagacctcaccaaagamcatacagagatgacaagtatatgaaaagatgctcgatataatatcatatgccattagaaaaatgcaaactactaaatgcaaagtggctgcaccactttgcaagatagtgtggcagttttttttacaaaatcaaacatactcttaccatatgatccagcagttaccttccttggtatttacctaaataagttgaaaagttatgtccacacaaaaacctgtccatggctatttacagcacctttattcataaatgccaagacttggaaacaaccaaagatgtccttcagtagaggattggatacataaactgtgggacatccaaaacatagatattttttcggtgctaaaagaaatgagctattaaggc

SEQ ID NO: 297304 - DNA, 575 bp, Homo sapiens
acaaacaacaataggtaagaggcaagaggtatattaagcacactgaattatatttgtggaatatattatattccactttattgttggaagaaacttgaacttagaaattaaatctgaattttgagagtttacattgtatttattctgacaaaatatgatgtgttattgaatttaaaatattactaaaagatgtcakaaagattccttcagagtgttaaatatctaccaagaaaggaactttggcaaccaaatataaacacctaaggggacaaatggtatttcaaaaggtattacgtatttctcaagccagatggctgactagaggtattggacacttgctgtttccagaggaaaaaaaaagccaaaattacaaatagataatcacatctggcacagagcatctgagagagaacaatgaaattcaactgataagtcatgaaaaacaattgaggcatggcaagaaaggaaagtgaggcactcagttcttctgggattggctggttgctgggagaggctcaatattgtggagaaagctaagtgaaaccctcagttgtccacgttttcaccacagacta

SEQ ID NO: 297305 - DNA, 575 bp, Homo sapiens
acaaacaacaataggtaagaggcaagaggtatattaagcacactgaattatatttgtggaatatattatattccactttattgttggaagaaacttgaacttagaaattaaatctgaattttgagagtttacattgtatttattctgacaaaatatgatgtgttattgaatttaaaatattactaaaagatgtcagaaagattccttcagagtgttaaatatctaccaagaaaggaactttggcaaccaaatataaacacctaaggggacaaatggtatttcaaaaggtattacgtatttctcaagccagatggctgactagaggtattggacacttgctgtytccagaggaaaaaaaaagccaaaattacaaatagataatcacatctggcacagagcatctgagagagaacaatgaaattcaactgataagtcatgaaaaacaattgaggcatggcaagaaaggaaagtgaggcactcagttcttctgggattggctggttgctgggagaggctcaatattgtggagaaagctaagtgaaaccctcagttgtccacgttttcaccacagacta

SEQ ID NO: 297306 - DNA, 531 bp, Homo sapiens
ttaagttaggcttgttcaagttacaagttacagagactcactcagtttacctctggtgatggaggtttgttgggaggattaacaaggaagagaggaagcacaggaaagcccagaaaacaggcttcgtggtggcctctgttcaagacgcatgcctgtctgggtcccagtggccaccccrgtagtctgccattcctgctcttgacttccctgtttctctgtgcttggtcctcatgtgaattttctacttatccgagggctcttctgttgtacactaagatatggcacctacctactcatggcttctgttgcttaacggcttctgtttatattttttcctgccttctctttatatttattttggcttcagggtcactgtaccatctgaactactttctttgtgtcttctaacagaaggttgaatggatggcttctactcattcctttagattaggatgtcagggacacatgatgcaaagcacagtttccctacgtaaggaacagtgtagactgatctttcctcaggaagctgtg

SEQ ID NO: 297307 - DNA, 1161 bp, Homo sapiens
ttaagttaggcttgttcaagttacaagttacagagactcactcagtttacctctggtgatggaggtttgttgggaggattaacaaggaagagaggaagcacaggaaagcccagaaaacaggcttcgtggtggcctctgttcaagacgcatgcctgtctgggtcccagtggccaccccggtagtctgccattcctgctcttgacttccctgtttctctgygcttggtcctcatgtgaattttctacttatccgagggctcttctgttgtacactaagatatggcacctacctactcatggcttctgttgcttaacggcttctgtttatattttttcctgccttctctttatatttattttggcttcagggtcactgtaccatctgaactactttctttgtgtcttctaacagaaggttgaatggatggcttctactcattcctttagattaggatgtcagggacacatgatgcaaagcacagtttccctacgtaaggaacagtgtagactgatctttcctcaggaagctgtgwaagggataacgagctgggatatttttgaaggatactcacaatttgcaacacaaataaaatctagtttaaaaatatgtgtgttttttcagctctaatgactgaaaatgttaaactaaatattttgcttaaacaagtaaagatgaaggggttagatgagcaaattagaatgcagaagctgcctctgctgccagttttccctagaagagaatggctaattcatatgcgatgtattcttgtctctccttgggagaaagaaagtcwgccctgggaggagcccggctgttcagcattttgctgctggtcaggattgattccagatgtgggaggtaaatgctagaaagagtttggaaaatggagtggaaatgaaaaatccctcaggccatttgagtgctgatgacagatgaggtagatattttcaggtaactaatgaacttgctgggagcttggagagtgcttagcccaatagatatttaacaggcaggaaagacccagctgaaatacatggctgctcccatgcactgtgcacccaaaacagggggaaacggggagtcccaagggtaacacataaatatcgaaagctaagacacagccagctactctgtaaataagctgaatttgccttttcctga

SEQ ID NO: 297308 - DNA, 559 bp, Homo sapiens
aatcacatgatagcaagctgataagatttctctcatcttcagtcagtgagaagaccaaactgcttcaacaagtttgcttcctcagggatgggtgtggtggctcactcctgtaatcccrgcactttgggaggcccaggcaaaaacatcacttgagcccaggagttcgagaccagcttgggcaacagagtgaaaccccatctcaaaaagaaaagaaaaagaaaaaaaaaacagtttacttccatagctgctacagctctcctaacagtcctagaactctggaaagtcagtaatcaccataactgagttcactctgccctttagtaacagcataattaattctgttaggattacgtcaatgaaaacatgtgtaaaacggtgtcataatactaactgtaaaattcagtggcaaaatccagagtgttctgaagtagcagatctctgcttctttagggcaagagttctctttagttttgcccattcttttatctcggtccctagcttagtgctcagcacatggtaaacagtcaataactactttttgaacatcagctttaaccta

SEQ ID NO: 297309 - DNA, 559 bp, Homo sapiens
aatcacatgatagcaagctgataagatttctctcatcttcagtcagtgagaagaccaaactgcttcaacaagtttgcttcctcagggatgggtgtggtggctcactcctgtaatcccagcactttgggaggcccaggcaaaaacatcacttgagcccaggagttcgagaccagcttgggcaacagagtgaaaccccatctcaaaargaaaagaaaaagaaaaaaaaaacagtttacttccatagctgctacagctctcctaacagtcctagaactctggaaagtcagtaatcaccataactgagttcactctgccctttagtaacagcataattaattctgttaggattacgtcaatgaaaacatgtgtaaaacggtgtcataatactaactgtaaaattcagtggcaaaatccagagtgttctgaagtagcagatctctgcttctttagggcaagagttctctttagttttgcccattcttttatctcggtccctagcttagtgctcagcacatggtaaacagtcaataactactttttgaacatcagctttaaccta

SEQ ID NO: 297310 - DNA, 559 bp, Homo sapiens
aatcacatgatagcaagctgataagatttctctcatcttcagtcagtgagaagaccaaactgcttcaacaagtttgcttcctcagggatgggtgtggtggctcactcctgtaatcccagcactttgggaggcccaggcaaaaacatcacttgagcccaggagttcgagaccagcttgggcaacagagtgaaaccccatctcaaaaaraaaagaaaaagaaaaaaaaaacagtttacttccatagctgctacagctctcctaacagtcctagaactctggaaagtcagtaatcaccataactgagttcactctgccctttagtaacagcataattaattctgttaggattacgtcaatgaaaacatgtgtaaaacggtgtcataatactaactgtaaaattcagtggcaaaatccagagtgttctgaagtagcagatctctgcttctttagggcaagagttctctttagttttgcccattcttttatctcggtccctagcttagtgctcagcacatggtaaacagtcaataactactttttgaacatcagctttaaccta

SEQ ID NO: 297311 - DNA, 534 bp, Homo sapiens
ttatttcatagactcaaattaccaaaccttcagagggaaaaaggaaaaagctcctttcacccctacaggtacagtcacctctctcctgcactgcaaaaccccatctcagttgtcctactcctattgcaatggtcctgaataaagtcagtctcactgccctttaacaagcatcatgaataattttttctttaacacaacctctcarctgtggcccttgttctgtttagataactagcaatttggccaagagtacatttgaagacctcctgccatctttcgaacttaataaaaatagctttaatagctacatgctttatgaaataatatttaccatctttgtttaaaaatgttccgttctttcaacattttactctaagatcctagatctttagaaagtttttcttgactttctaggcctgggtaagttaccccctgcgatgtgctcctataacatcctatgtttctgctgttattgcctcaattacacaggaccgtaactacctgtttaagacctgtctccccctctagactgaa

SEQ ID NO: 297312 - DNA, 578 bp, Homo sapiens
taaattaacatttattgaccaccagtaaacatgagaaccaaactgtacagaaaatatttggtattttatcctcaccagggatgttccccagtgcattataatgtatcaaaatgtcttatcatttttctttaattagatacccttggatggatgtacaagaaacagtgtacattatgcaacaaagtttttcttaatttttgtcaaagacaaccttgcaaacaggactggagcttctagcagcttctggcaaggaaattttataaatgagaatttgtagcagaggtcacgagtttagtctctgacattgtatcaactggattggcatcccagctctaccacttcctgtcttgagaccttgagtactttatttaacctcttatgaagctataattttaaaagggtaaaaatagcatttatcttatggggttattgggaagattaaatgaaataacatgcataagctcttagcatagtggctggcccatagcaagagrtcaataaacattagatattattatcattattatttatcagaatggcttttcttagaagccttttgtagtcaaagacagccaaaa

SEQ ID NO: 297313 - DNA, 581 bp, Homo sapiens
agccactgataatcatccgcctccttttcctttttggaataactttttctctctattattcccaagattaggtgcttccctctatttatttagttattcatctgtccaacagacattgattgctaagtagtaggttttgtgaatgcataaattctacttcagataatctgcagtgtagagggaaaagtgaaacatgcacatacacataactttaaaaggtagaaagtgatgagagtcagagggaagagacatagcacagtggaattcagagtggggagtcgctgctgtactatttcaggactcacattgtgtgcccatatagacagagagatgctagagaggatacaagaaaaatggaagccactgttcttgtgcttgttgggrctcggaaaacaatatcccgaaatgaaggcctcagaagcaagtgtttttttgaccttctccttccctcttgtctctcagtcccattctcccctgaggctagctttagccaaagaaactacaaatcccttttccccaaggtgggacatagaaactagaacctctttgcccacaagcccttcataaaacctaaaagtatt

SEQ ID NO: 297314 - DNA, 537 bp, Homo sapiens
tgaacaaaggaggaaggagcttttaaccctagtgcagttcctgtttctgtgtcctttgcctattggctggggttggaccacacaatctaagctgatcctgattggctgagacttaaacttttccaaataaggtaaacatgtgatttgtgaaaagaagaaggtggggaagaaagtgggtagggytgatttacaacttttgcaacttatgaccaggaggttgagtctttgaggagaaacttagttgtcccaacaacatcttcaacaaagaacagtacattttagagaagtgacaagacaaaggaaaagaactttgagtctcccaggagcagcaagttgtgagaaggcaaaacaatggcagataaaggctggttagtgaaacttatgcatgaaaattcttccagtaccatctctagacaatcagggtcaaaagttgtctttagtggttaacctttgttctacttggagaaagaggggtgggatgccttttgtccttataaatctatgtcctgctttaagacaaagagaggaagagtagag

SEQ ID NO: 297315 - DNA, 365 bp, Homo sapiens
taggctctctaaaagaatcagaggtattagtcttgctctcagagagcatgcattctagttagaataacttttgtctgtctcgtttgtgcaaataaactatcatcacacttgaaatttggaacaaacyacagggaaagggaatatatatatactagctagcaatggctttggggaaaagaagtatcttgttatgacctgttctctgatagtagttgtcttttctcctcagttaattatttttttgtttgttttttttcttttagattatttgattttcaatgctgtagaagatcaaagaaaaataacgattttatgttcaaagtgagaaaacatgtcacatttttctttgattagtgcctagggca

SEQ ID NO: 297316 - DNA, 541 bp, Homo sapiens
ttggcacagggcggatgaggtcatagccaagtcctgtcactgcatgggcacttgggtagggcatgagaagtttaaccaggtcaggggtcctatactgggacccccagactctgggtcagcatcccagtgactggtgctcaggcaagctgcagggcttcgctctccccattggccagctcgattaatctggtggctaatcaggcccctttgaagrggggcgggggcggatgaaagagtggcacacctgttttcacttgactccaatcctgaaataattctgtagctcctacaagatttgaaacaaattaaatttgaaagggcagagagggcagctttgaatggttggctctgtggaaaaatgctggttttcgctccaggaaatggcttaactgagagactgtattcctggcctcggtggctggggtggctgtcagtgcatgaccgtgactcgggccttgttgggtgggttcttttgccttgttatctctggcatcaggcttttgctttctggactttgataatgtcagtggaaggttataat

SEQ ID NO: 297317 - DNA, 541 bp, Homo sapiens
ttggcacagggcggatgaggtcatagccaagtcctgtcactgcatgggcacttgggtagggcatgagaagtttaaccaggtcaggggtcctatactgggacccccagactctgggtcagcatcccagtgactggtgctcaggcaagctgcagggcttcgctctccccattggccagctcgattaatctggtggctaatcaggcccctttgaagaggggsgggggcggatgaaagagtggcacacctgttttcacttgactccaatcctgaaataattctgtagctcctacaagatttgaaacaaattaaatttgaaagggcagagagggcagctttgaatggttggctctgtggaaaaatgctggttttcgctccaggaaatggcttaactgagagactgtattcctggcctcggtggctggggtggctgtcagtgcatgaccgtgactcgggccttgttgggtgggttcttttgccttgttatctctggcatcaggcttttgctttctggactttgataatgtcagtggaaggttataat

SEQ ID NO: 297318 - DNA, 625 bp, Homo sapiens
tgtggccaggaatttggcagctacttgtctgggcagttcttggtggagtctcacatgagactgagtcagaagtaagccagggctgcagtcatctgaagccttgactggggctggaggatttgcttccaagatggtgcactcccatggctggcaagttggtgctgcctgttgatgacagtcctcagttcctctccacatgggtctctccacagtgttcatcagtgacttgcagcatggtgactggatccacctagtctagaagttgcaatgcctctgataacataactcctgaaagtcctaatccagtgtggaggatactaaactgttctttgtcacacagatcaaccctgattcactgtgggagggtactacttgaagggatgaaataacagaagacagggatcatgtggcaccgtattggaggctggctactacagccttgaatggatcaaaattcctctcattagtcttgtctttgaaccactgtgggggaaggtgaratcttttgagttgcttgagatttggcctttgtaaattaaagttcctggtattaataactcttagaaatcttgatgctataactttaaaatattagctgctagaaatttggatgtcacaaaacaat

SEQ ID NO: 297319 - DNA, 661 bp, Homo sapiens
cacaaaacaattcgggaaagatgcagccaaaactttctccttgacctctacaaacacacacactctcacaattcctttactgcctgttgaattttcacaatgaaagcattcttcctgagcggaaatgaaattaagcttttctgggtaatcccacacttttcctaatatgtactgacttcagacaaatacatgtttcacagagtaaatacagcccaagggcccagtttattcttggaagagttggaagaactgacatcattttcttcttgtgatctgtgggtatttttcacctggtgagaattggcaccaacgcctttgctccaggcatggcaacacttgggtactgtgtttccaaagattccaacctgagcctcactgagttggaagaggctcaggttggaatcttttatcatttccctggyattctccctttactcgtagggctacatattttctcacctcctttaattctgcacaaagccaggataatgtatgatttaggttagggtacaaacatgcaggaatagggtattgcaggctctggaaaacagccccacctaaaactgctcctcaaatcctactcgtcatctgttctctcctatggagcctgtcctgaatttcacacaagaaagctcaaggccatcaacatttggagcaaaac

SEQ ID NO: 297320 - DNA, 595 bp, Homo sapiens
atacagcccaagggcccagtttattcttggaagagttggaagaactgacatcattttcttcttgtgatctgtgggtatttttcacctggtgagaattggcaccaacgcctttgctccaggcatggcaacacttgggtactgtgtttccaaagattccaacctgagcctcactgagttggaagaggctcaggttggaatcttttatcatttccctggtattctccctttactcgtagggctacatattttctcacctcctttaattctgcacaaagccaggataatgtatgatttaggttagggtacaaacatgcaggaatagrgtattgcaggctctggaaaacagccccacctaaaactgctcctcaaatcctactcgtcatctgttctctcctatggagcctgtcctgaatttcacacaagaaagctcaaggccatcaacatttggagcaaaactggaattgggctgcaggccttgagcaggcacttttattaaatgttattattttatttttgcttctgaagagttaccctgagattttcttataactttgtgtaatccctcaccctttttctggcatagtcgtcaacttaa

SEQ ID NO: 297321 - DNA, 595 bp, Homo sapiens
atacagcccaagggcccagtttattcttggaagagttggaagaactgacatcattttcttcttgtgatctgtgggtatttttcacctggtgagaattggcaccaacgcctttgctccaggcatggcaacacttgggtactgtgtttccaaagattccaacctgagcctcactgagttggaagaggctcaggttggaatcttttatcatttccctggtattctccctttactcgtagggctacatattttctcacctcctttaattctgcacaaagccaggataatgtatgatttaggttagggtacaaacatgcaggaatagggtattgcaggctctggaaaacagccccasctaaaactgctcctcaaatcctactcgtcatctgttctctcctatggagcctgtcctgaatttcacacaagaaagctcaaggccatcaacatttggagcaaaactggaattgggctgcaggccttgagcaggcacttttattaaatgttattattttatttttgcttctgaagagttaccctgagattttcttataactttgtgtaatccctcaccctttttctggcatagtcgtcaacttaa

SEQ ID NO: 297322 - DNA, 540 bp, Homo sapiens
agacttccttgtccctaagagtgagctgtgtacctctctgtgtcctcccacatagagacccctgcacttttattatcacagcactttgtactctctrttggaattgcttttaaaattgtctcaatgaaagattttacatgcccctcaagggtagggatgtgccataatccctgtagtcatcccagtactagagtactctggggatgtatatttgaataaactaataaatgaatgaattactcaattgctgtgcagatgtaagcagttgccatcatattggtcaaccaacatttagagtgtgactatcttgtttcaggttctgtattaagggctgggaatacaaagatggacaagaaccttccttctgcttctcactcatagtagagcatgtaagtggataattactacagagtgcagctccatggacttaagaaagaggtaaagaagtgaccccttcagaaagtattgtaggacactgatgtaaaggcatgattcattttcactgccttagggcgtgtgatacaagaaagagcactgttt

SEQ ID NO: 297323 - DNA, 540 bp, Homo sapiens
agacttccttgtccctaagagtgagctgtgtacctctctgtgtcctcccacatagagacccctgcacttttattatcacagcactttgtactctctattggaattgcttttaaaattgtctcaatgaaagattttacatgcccctcaagggtagggatgtgccataatccctgtagtcatcccagtactagagtactctggggatgtatatttgaataaactaataaatgaatgaattactcaattgctgtgcagatgtaagcagttgccatcatattggtcaaccaacatttagagtgtgactatcttgtttcaggttctgtattaagggctgggaatacaaagatggacaagaaccttccttctgcttctcactcatagtagagcatgtaagtggataattactacagagtgcagctccatggacttaagaaagaggtaaagaagtgaccccttcagaaagtattgtaggacactgatgtaaaggcatgattcattttcackgccttagggcgtgtgatacaagaaagagcactgttt

SEQ ID NO: 297324 - DNA, 348 bp, Homo sapiens
tagctagtaagagtgttctccattaaaataacataagttgaatagttccttctactgtaaatacccctcagtactatttcaatacaatattttcaaaccacattctgtatagccctaggttccacgtttgtttgtttttttcttagaggtgtcacacaagattgtcttgtggtaggacatagaaatatgctccaaaactttaatatgaaagagccttatggcactaagcaacttggatggaaggtggtggttgagttgaggaaggaaggraggagaaccatcttctaaccagaacagttccactttcatctcctttaaatatatgtttgtgttctgcacaatattaca

SEQ ID NO: 297325 - DNA, 540 bp, Homo sapiens
tggacttctaacctccagaactgtaagaaaataaatgtctattgtttaatccaccagtctctgatattctcttatggcagcccaagtagactaatacagaacatatattttaaataaaattaagattattccacagattccattttgaatccttcctttttcactcattaaaatttttccaaaaagttaaatattcttggcaagctgatgtttgaaatgaatgcatgatatttcatcataaggatatgtccttgtgatactgtaaaatatatatttggtctttgtttttgtttcctgacatgcagctcctaaartgactaaaatctctggaatgataagtgtcttttatatgctaataagatgactggtggctggggtcccctagatagcttcaggatgggggcttgttactgagaagaccaagagatgattagagagttgggattttcagccttaaccccaacctctgaagagaagtaaggggctgaagcttgagatgatcaccaatggccaatgatgtaatcaattgtgcctagtaat

SEQ ID NO: 297326 - DNA, 540 bp, Homo sapiens
tggacttctaacctccagaactgtaagaaaataaatgtctattgtttaatccaccagtctctgatattctcttatggcagcccaagtagactaatacagaacatatattttaaataaaattaagattattccacagattccattttgaatccttcctttttcactcattaaaatttttccaaaaagttaaatattcttggcaagctgatgtttgaaatgaatgcatgatatttcatcataaggatatgtccttgtgatactgtaaaatatatatttggtctttgtttttgtttcctgacatgcagctcctaaagtgaytaaaatctctggaatgataagtgtcttttatatgctaataagatgactggtggctggggtcccctagatagcttcaggatgggggcttgttactgagaagaccaagagatgattagagagttgggattttcagccttaaccccaacctctgaagagaagtaaggggctgaagcttgagatgatcaccaatggccaatgatgtaatcaattgtgcctagtaat

SEQ ID NO: 297327 - DNA, 540 bp, Homo sapiens
tggacttctaacctccagaactgtaagaaaataaatgtctattgtttaatccaccagtctctgatattctcttatggcagcccaagtagactaatacagaacatatattttaaataaaattaagattattccacagattccattttgaatccttcctttttcactcattaaaatttttccaaaaagttaaatattcttggcaagctgatgtttgaaatgaatgcatgatatttcatcataaggatatgtccttgtgatactgtaaaatatatatttggtctttgtttttgtttcctgacatgcagctcctaaagtgactaaaatctctggaatgataagtgtcttttatatgctaataagatgactggtggctggggtcccctagatagcttcaggatgggggcttgttactgagaagaccaagagatgattagagagttgggattttcagccttaaccccaacctctgaaragaagtaaggggctgaagcttgagatgatcaccaatggccaatgatgtaatcaattgtgcctagtaat

SEQ ID NO: 297328 - DNA, 558 bp, Homo sapiens
ttttaagtttttcttgacccagtgcctatgactagataagcgttctcctttggggattgtaagagattgtgtgcccagtcccatgatcaatatgtgacaaaccctgtttgagtctctagatgcattgtttagcattgtttaaaaaatattgattattattctccgtaatggacatctgctatttttaccttcctagcatctattcttccttcttgtggcaataaaattccatagactttggagaaccatcaatcaaggtgggactgtttattaaggtcttggggcccatgcttggccaatcagatgttctcttcttggacagggcaccttagatggtgggactctagagcagaaagtaggcagagttcccatagagaaggcagccccatgaagagaccttgcacagctcctattacaaaggctcagatccgctatggttccatccttcccaagaccagttctttagcrtctccttttattgtctgggccaccacagatcttttcagttaacttttttttttttttcacttgacttagccagtgactgcttctgctact

SEQ ID NO: 297329 - DNA, 1108 bp, Homo sapiens
aatactctatagtgaataaaaaggaatgagctatagatagatgaataaatattataagcaaacataaaagaatacatcctgtatgataccatatatataaagttcamaaaggagcaaaacacaaaagagtacatactatatgatgccatatatataaagttcaaaagtaaaaactaaactccattttttgagcatacaaaaatgtaagacctttttaaagaggcaagaaaactaattactataaaagacagaatagtgatttacctttagaagggcaaagagagtattgtgttaaatgaggaagacacaggcattttctgggttgctgccaatattctatgtcttgactttggtattagttacacaagtatttattttataatcatttattacactgatatttatgatttatgcacatttctgtatgagtgttatatttcacattttaaaacatttaaaaagtatttaggggaatgttgggaatatggcaccctgaatgtgtcwatccattcaatggaatactctatagtgaataaaaaggaatgagctatagatagatgaataaatattataagcaaacataaaagaatacatcctgtatgataccatatatataaagttcaaaaaggagcaaaacacaaaagagtacatactatawgatgccatatatataaagttcaaaagtaaaaactaaactccattttttgagcatacaaaaatgtaagacctttttaaagaggcaagaaaactaattactataaaagacagaatagtgatttacctttagaagggcaaagagagtattgtgttaaatgaggaagacacaggcattttctgggttgctgccaatattctatgtcttgactttggtattagttacacaagtatttattttataatcatttattacactgatatttatgatttatgcacatttctgtatgagtgttatatttcacattttaaaacatttaaaaagtatttaggggaatgttgggaatatggcaccctgaatgtgtccctgctgttctcaaatctcaattcctaacagcagtcttcctctcctgagtctatctggcaggcaggcagggcattgaagggtaagaat

SEQ ID NO: 297330 - DNA, 572 bp, Homo sapiens
ctgggatcacttacctcatttgtcgtgatattcgtaatgcctaatgaacactagcatctcaataaatgttttacaataagtgagatgagaagcatggagagaagactggaaaggagatgagatgagataaactcaagcttgtttgttcacattattttaaaaattactgttgtatctttgggctggaagcagaatgaaaatggaacaatagtcttgcatgacattaaaattttagtgatatttcaatgctytactctgacttctaggtatatattttcacatttggaaaacaacacatgaatttgtattacatgtactgtacctcattccaattaagaagttcttttaaacaatcatttaatagttcggatgttaaaaacttttattttacctagctagtattttggttaggattttccaaaaagaatagctaaaaaaattatctagtatttatttttcttgctgagttccacctcaaaaaagtcctatattaatgaaaagttgtcttacatgagaaactgagaatacagggaaacatttgaaaggcttattgatgaaacttgagcagttgc

SEQ ID NO: 297331 - DNA, 589 bp, Homo sapiens
atttgtttcattctgtgattttaatagcaatgaagcaacttgttttgcaggccctgaatccaaaattgagacatagcaatctggacaaataccaaagcttaattaagtctgctatcctggtgataaatatggactaaaaaattattctagtagatagagtacatataacattacattcttctctgtcagatgcctcatcagcacagaccacagtgagatacaacctcatacacatacagttttagtaccttaatcatattcataaaattatagatatggatggtttctcccaaggttaccatttcataagaaataatttgaccycaaggtaatttggattacctttcaagaattttttgttgctggtgttgcgtttattgaaacaactcgtttgtgagaaaatattaaagttcatgtaaaataataaaaatgaagcatcacaggttaatgctactagacccttttctgtcccttgaaaatatagtctttggtttttcagacctctgagggaggctttattgtctgacccattaaattaattcttgggactcatttattttcttctttgctattaagctctcgcttggta

SEQ ID NO: 297332 - DNA, 567 bp, Homo sapiens
aaattaccagcagctttaaaaacatcattttaacatattttgaacataaatcatctaaaccaacacaataataaaatatgtattattcccttattttaaacttaaaaaaagttttccacacatatgaataagatatagtaaggaatggttctttttaaaaagttggggtgtttgaaaacaggaatattatttgttcttaataggcaaatctgtattttttcctattcactactatcatcaaktatgtttaatttaaagctctggttaatatccagggccacttgtccctgggggaaagttatattctgaagattgttttagaaagattctagtgcctatgttctcaccgctgagcaaaagggaagattgaagagtgaagttttgcagatgggttccctaagaaagcaaagacacgtgtgttttcttagtgacgctcatatacttttagttcaccttgtgacacctgtggctgctctatatcagacagcatgtgtctggtggcagcacccaaatgttaaaatccagcatgcaaagccaaaatcatcaacatgtgatttaccagtgaat

SEQ ID NO: 297333 - DNA, 589 bp, Homo sapiens
aaatcacaaagcatgcaccgttggtggcacttggtggcttattcattattctgtttggtagattggagaggcagaagaataaaaagagttattgttctcatttccatgtgatttgactcaggcatgtttaaagagtagctcttgtaccagggaaatgaagatttgatcctgcactgctcttaaggtaaatatttttacttaatttgatctaaatgaacattggactctayccttatttttttctcctggtattttctcttctcattaaaatctctgacgctgctttgtcacagtttccactgacaacagggtctcatgctcattatatgctggctctgagttttgggacaaaggtcacttaaagaagagaaaatcatgttaaagaaaccttggagagaaaatttgaatatggcaacaactataaatctgttgtaaatataatgagttttgactactttttctctagagaaaaactcaagccatcaaagaaaatttcttaagcagtaaactttcattctacaaaatattgtcttttaacttcttactgatgtatcttcttttggaaatgtaagcgcttaatgacatattg

SEQ ID NO: 297334 - DNA, 614 bp, Homo sapiens
tctgtttggtagattggagaggcagaagaataaaaagagttattgttctcatttccatgtgatttgactcaggcatgtttaaagagtagctcttgtaccagggaaatgaagatttgatcctgcactgctcttaaggtaaatatttttacttaatttgatctaaatgaacattggactctatccttatttttttctcctggtattttctcttctcattaaaatctctgacgctgctttgtcacagtttccactgacaacagggtctcatgctcattatatgctggctctgagttttgggacaaaggtcacttaaagaagagaaaatcatgttaaagaaaccttggagagaaaatttgaatatggcaacaactataaatctgttgtaaatataatgagttttgactactttttctctagagaaaaactcaagccatcaaagaaaatttcttaagcagtaaactttcattctacaaaatattgtcttttaacttcttactgatgtaycttcttttggaaatgtaagcgcttaatgacatattgactcttgctgaagccacaagccaattactcatccttccaaatagattttttttcatggagtgatggagatggga

SEQ ID NO: 297335 - DNA, 639 bp, Homo sapiens
aaaaacaggtggcttgccaggtttggctcagaggccatggtctgtctacaccttatctaaaataacaacattgtactattttagatgtgttgagaartttcctcaaaccttgagattcttgctccctaagttggagtggttttatgtggccagaccatctgacttggggaagaaagcaaatatcttgaatcgtacatcttatgtcttccagttagtgttaactatgattactaatcattgtcaaatgaagagagtataaaaaaaacaatttaacatgtgccagaactgtgctgtcggctttatttatacgacatccttgagtacttacaacaccaccagaaaagatgaatatgtagagatagaaaaccctcatgggaaaaagaaaatttataggtgtgagacaatgagtgcaatggaaagaacgtgaattttggacagataagacttgatttcaagtcctggcttcactcctccattccatgtgaccttggccagattttatacctctcttgagtttcttcattcataattgaaaatataaaactatatgagaaaattatgttgtaattgtaatttataatattacctatcttttagagacatggtaagggtttttgaagtgagcaaaaaaatcatgta

SEQ ID NO: 297336 - DNA, 1279 bp, Homo sapiens
aaaaacaggtggcttgccaggtttggctcagaggccatggtctgtctacaccttatctaaaataacaacattgtactattttagatgtgttgagaagtttcctcaaaccttgagattcttgmtccctaagttggagtggttttatgtggccagaccatctgacttggggaagaaagcaaatatcttgaatcgtacatcttatgtcttccagttagtgttaactatgattactaatcattgtcaaatgaagagagtataaaaaaaacaatttaacatgtgccagaactgtgctgtcggctttatttatacgacatccttgagtacttacaacaccaccagaaaagatgaatatgtagagatagaaaaccctcatgggaaaaagaaaatttataggtgtgagacaatgagtgcaatggaaagaacgtgaattttggacagataagacttgatttcaagtcctggcttcactcctccattccatgtgaccttggccagattttatacctctcttgagtttcttcattcataattgaaaatataaaactatatgagaaaattatgttgtaattgtaatttataatattacctatcttttagagacatggtaagggtttttgaagtgagcaaaaaaatcatgtawaaaaacaggtggcttgccaggtttggctcagaggccatggtctgtctacaccttatctaaaataacaacattgtactattttagatgtgttgagaagtttcctcaaaccttgagattcttgctccctaagttggagtggttttatgtggccagaccatctgacttggggaagaaagcaaatatcttgaatcgtacatcttatgtcttccagttagtgttaactatgattactaatcattgtcaaatgaagagagtataaaaawaacaatttaacatgtgccagaactgtgctgtcggctttatttatacgacatccttgagtacttacaacaccaccagaaaagatgaatatgtagagatagaaaaccctcatgggaaaaagaaaatttataggtgtgagacaatgagtgcaatggaaagaacgtgaattttggacagataagacttgatttcaagtcctggcttcactcctccattccatgtgaccttggccagattttatacctctcttgagtttcttcattcataattgaaaatataaaactatatgagaaaattatgttgtaattgtaatttataatattacctatcttttagagacatggtaagggtttttgaagtgagcaaaaaaatcatgta

SEQ ID NO: 297337 - DNA, 1158 bp, Homo sapiens
catacatttagataatttaaaactcaaagagtactgaaaagcttaaaaagaaaagctctagtccttttccccacctctaggttcttttgaggaacctaaattagggtagccagatttrgcaaataaagatacaagatgctcagttaaatttgaattgcaggtaaacaataaatacctttaaatataaacatgttccatgcaatagttgggacaatgtttacaatgtacttatactaaataatgattctttatctgaaattcaaatttaagtaggtatcctgcattttatctgtcaaacctaccctaaatcaaataagccatactaagatttctgtcttccaaaaatatttgaaaaactacttttaaacttcgtatctatttcaaaggtgaccagcagttcccttttccccagaactgaagtgtttcctgagatgggggactgttggtggtaaaaccaagacagtcttaaataaacatgtattattcgttggtcacctcatttcttatgttaaagatatttccatctcactaaacaataaaccttatttttgcttatcagtttgagacattatcgttaatttcctacwtttcaataatagattgagtttacggagatacaaagagaatttccattatccaccctgtgaattgaagggatggattagcaaggataatacaagaacagtaaactaagtgatgttttattgtcttgttttagcaagwcctgaatcaagaggggatcaaatgtgaggagattggggaattggaaacccaacttctcataaggtatgagattctaaaatagagctagaaccctagactttaatctttttcctccaggataagcaaattcaatcccctcactatacagatgatacatttgagttctggagaattaaagtgacttgaataatttaagaaagctaattagtggcagatccaggatgtgagcccatgcctctctcctaattcctgtacctctgctataaaaccacatggacatgttggctctttccttctaacattacattggctgaaagcattttctggagtcagaaacaagaagcaagtttgcttatctgacagacataaaacaaggggaacaattagtgtagctttcttgggaaggtgacagtgattttaaaaaacagcctatta

SEQ ID NO: 297338 - DNA, 471 bp, Homo sapiens
tttctattaagccaggtctctctcatcttccatattttgctccttgtcaggagactgaattatttaaaaggcctggccctggtattaacatgctggtcctgaatggtgacagagcacagggacacactattttaaaaacactgttaggaaagaacattttagtttctcttgtcctagactctgtttgttctcagacactgtgtcataaaattttcatggacattaacttcctttgacttccacggccttgtctctcctgggccctgtctcttcttgattgtcttgggttttgttaactactttttctttttctcctcctttagtttaagtatttcccaacattctctctaaggattttgccacttctttgcagaacaaagaatgcacacctaccaaagggctactttgcactcagcactgrgtaagtcactttccaatcaatcatcccagaaaccatctgaaatatttgtg

SEQ ID NO: 297339 - DNA, 471 bp, Homo sapiens
tttctattaagccaggtctctctcatcttccatattttgctccttgtcaggagactgaattatttaaaaggcctggccctggtattaacatgctggtcctgaatggtgacagagcacagggacacactattttaaaaacactgttaggaaagaacattttagtttctcttgtcctagactctgtttgttctcagacactgtgtcataaaattttcatggacattaacttcctttgacttccacggccttgtctctcctgggccctgtctcttcttgattgtcttgggttttgttaactactttttctttttctcctcctttagtttaagtatttcccaacattctctctaaggattttgccacttctttgcagaacaaagaatgcacacctaccaaagggctactttgcactcagcactgggtaagtcactttccaatcaatcatcccaraaaccatctgaaatatttgtg

SEQ ID NO: 297340 - DNA, 1173 bp, Homo sapiens
ttattatctttattacattaatattttgttaaagaaagaggattacagcattatttacagttactgatctgtggattaataggaaacactgctctttaaatatagtaataacatgttagttaccaagaaaactgaggcctgagaggtagagaaattctgatgaacataaacaaattgggtataagaatggaaagcaaatcatttttayggcaaatgcatctgagcaaacctggaataatactattttctaattgtcaataactgtcaccccttgattacagatgtttataatacataatagaaatatatactatatattgcccattaaaattggcaagcaaaatagaagctccagtatttcagaatttcttgaaaagaaaattgggggaaggggagaatacacacacatacacacacacacacagacacactcacaaaataaaacatattatgccaagcccacactgtaatttatcaactgggaaggaaattggcatgtcttttcctgctgatttattggttaattccaacaattcattgtagaaaaggccaccaatwgaaaaaataactgtgcggttggaatgtcatcctagtcttttttctgtttgtgtctctgtgtatttacaaagttgagatcatattgaatgtattgttttaaattttattttacctatagtgaaatgaaatttccatgtcatttttccttattactaataatgaggttttcttttatagagatagaccatattttgtctactcaaccctctaccgctggacatttaggttgctttcagtttttatggtaaacagcatgctcacaaccaaacattwgtacatataattgtagagaaaataaccatgaagttatatttactttttctatttgaacattccagacaccccttcccaaaagacagggattttctttaatatttggatgtcttacatagttagatttggaggacggcaggcctgagagaatttgatgaaattggctcggctcaccaatatacatcagaagctttaatatacgctctaaaatacggttacaaatatcaatttctttcttagttaactgaagttaatagtggataattttcttaaagaccctaaaattttgttttgaaaaagctcaggtcagaatcatctttctgctgggaaaaaaaaaaaaaa

SEQ ID NO: 297341 - DNA, 1034 bp, Homo sapiens
cttttcctcctaatttttaaattacttgagaaagagtgaaaatctttaacttcatgtgtaaacyttcatagcagtgaaagtattagtctgcagtgatagtactcaatatatgtaattgatcattttattaattgcctgtctctgtaaactttggtcaaagtaaatttgtttcacaagagtatgctgaataccagccaagatgcataagctgtttcctaggggaataacttgcgggcccatggattgtttatatatttttatgatgttgggtaactgttccataacattaagtttctgtgtttacctgaatacttagaagaatataaaagcttcttagccttaaacaaaatatttctgaaaaagaaatcatttaatcatgcttataaagtgaatgagaaatacaataagtatgattctggcaagtctcaaagcaaaatttctcagaaaaaaagaagtgatagtctcaccattctccctaactagggaagcacttttatccctatcactcataaagcaataacactttattwcttggggttactgggattttgagacgccagaacaagtggctaaagaaaactagagactcatttgataagtatcaatcaattcagctagcctttttttgttgcwgttacaggaaatataatcaagcagcacataggtctgtgtattcccaattatcattcaacactccataactgttatttataactctatggaatggtaacatttgggaggaacaagtgtgagcctctgaagaaaggctactaaggaaaagagaaacagctatggtcatgtttaagctcgatgtaagtacatttatgtgttaccttgtgccaggatatgccccagtatttgatcgaatattattctgtgtgtaactgtcaggggcttgttgatgagattagcatttgaatcagtagattcagcagatggccctccctaatgtgggcctcatccaatcagttgaaggcctggatggaacagtctgaggaagacaatttcttctccctatctatcttcatgctgag

SEQ ID NO: 297342 - DNA, 601 bp, Homo sapiens
ttatatttagaagtttgttgrgaataatgaaattctttaaaggtctatagtgtagcagtgatatcagaatgattaaataatttattatcacttctaattcttacattatttaaaaattattttaaattacttattatattctaatgaacagtgagaaagtatatgatatggtttggaactgtgttcctatcaaatctcatgtcaaattatagtccccagtgttggaggtggggcctgctgggaggtggttggatcatggatcatgaatggtttcgcgccatcctcttggtactgtgctcacaacagtgaatgagttcttgtgagatctgttcatttataagtgggtagcacccctccacctctgctttttgctccagctcctaccatgtgagatgcctggctccccctttgctttccaccgtaattggaagctccttgaggcctccccagaagcagatgccgccatgcttcctgcacagccaattcaacctcttttcttataaattacccagtctcagatatttctttatagcaatgcaagaatgacctaataaatacagtataaaataaactagaaatgcttgagtaggaaaacattacg

SEQ ID NO: 297343 - DNA, 539 bp, Homo sapiens
gcttctgtaataactgctatcaggccttgaatagcggtcctaagctgagcatttyctggctctctgctggagtgcctggaaggggatctggccactggcttcccctgggaaggggttcacagaagccatctgtcttgggatataaatatagtattatcatgggcgggaagcaaactttttagtagccaactgaggtccctgtgtgtgggattagtgaatggccactaatctttctagctcctctctaaatacggtagatgatcttctggaaatagaggtaaaaacgttttgtaatttaaaagatatactacaatccagaggatataaattctttgcagtcagggtccaggatacattggcagagagcattgcctgggaaggcttggtatggatggagtttgattagagtcctgaaatgtaggtgtagttacaagggacggcaaaatcatccttgtggtgtgtacctggggcctctgccaaagtttctcctggctataagcatttgcataagtaacttgtttgtcccatgcctggaggtc

SEQ ID NO: 297344 - DNA, 539 bp, Homo sapiens
gcttctgtaataactgctatcaggccttgaatagcggtcctaagctgagcattttctggctctctgctggagtgcctggaaggggatctggccactggcttcccctgggaaggggttcacagaagccatctgtcttgggatataaatatagtattatcatgggcgggaagcaaactttttagtagccaactgaggyccctgtgtgtgggattagtgaatggccactaatctttctagctcctctctaaatacggtagatgatcttctggaaatagaggtaaaaacgttttgtaatttaaaagatatactacaatccagaggatataaattctttgcagtcagggtccaggatacattggcagagagcattgcctgggaaggcttggtatggatggagtttgattagagtcctgaaatgtaggtgtagttacaagggacggcaaaatcatccttgtggtgtgtacctggggcctctgccaaagtttctcctggctataagcatttgcataagtaacttgtttgtcccatgcctggaggtc

SEQ ID NO: 297345 - DNA, 524 bp, Homo sapiens
acaaaagtatgataagctttggagcacaattcctttctccagtccttatttttttggtaagaataaattatgataggaccgtgtgtattatttgtagaataaactttattgttatacttggcctgattatttgcataaaatgcagcaagaatggttatttctacataggccttttcaattggcttggatggaactctgttccacaaggaatttcagataagacctttaaagctgagcccagggctgggcrcggtggctcacgcctgtaatcctagcactttgggaaaaaaaaaaaaaaaaaaatagtcgtgcccggccatgtgtttgtatcctcaaatacttgtgagttgggagattctttgcttgtaaggtcccaggataaacttggagctcccagacctgttagaaagtgacattccttactgaccacaggttaggaactctgtgcagggatggcgtagacaaggtatgaggccagataactcactctcttgagtacagtaccaagtgggatggcgctaaac

SEQ ID NO: 297346 - DNA, 576 bp, Homo sapiens
aattgagccatgttccgagtagtatgaggaaatctcactcagtcccgctcaagacatgaattctccckttgtccagcatctccactctacctgctcagtagccactcagtagccctcttggttatcagatccactgtcccagaatcacaacacttgtattaaaggaacccatattttactaaataacgtccccaaagcacaagagtagtgatactggcaattgagatatgacaaagagaaactataaagtgcttcatttcagtgaaaaggtaaaaattctcaacttaataagccaaaaaggaaaaatgtatactgagcttgctaaaatttaccctaagaacaaatctatccatgaaattgtgaagaagaaaaaaattgtgctagatctcctgttgcacctcaaactgcaaaagttatggccacagagcatgttacatgctcagttaaaaagacttcaaatttgtgggtgaaagacatgaacagaaatgtattctgatataaggcaggcaggttcattctaccatcccaagtagtgtcactcactagggatttgggaacatatttcaagtagagaaa

SEQ ID NO: 297347 - DNA, 543 bp, Homo sapiens
gacggtaaggggcagagcaaacacagcctgcagagcctgtgctyttcacagctatgctagccttcctctcctgcccatgaaaaaacagggatgagtttgtgcttcagaaagagccacatgctctgtggaatactatacagcaatgaaaacaaagtcaatggaactacatgcctggacatggactcatcttacaaacacgatactgaatgaaaggagctaggtacggggtgtacatgacataaaagcgagagcatttgctctgagtatgtaacaggaaggggacacgatggggactcttgagggcttgatttgagctagttacacatgtgtgtacatttgattaacagtcaaacaacatttgtgaatttttctgtgtttatggtatacatgaattaaaaatatatttaacaaaaagggaagagtatcttttcctccagctgatcatgaaaagcatgttttttcttttgttttgtttttctttactggcttttagaaaattgaagctaccattaatagtctctcataataaatacaggtatcatc

SEQ ID NO: 297348 - DNA, 578 bp, Homo sapiens
aagggaagagtatcttttcctccagctgatcatgaaaagcatgttttttcttttgttttgtttttctttactggcttttagaaaattgaagctaccattaatagtctctcataataaatacaggtatcatcatcttttgtatatctatttcttattcagttccactccatttaattctatttattgtcttccttttgtctgtttatatgaatggaaattgaaaaaccaaaatgtactgaaaggatcagtagtcagataccatatataaatattgcctattaataagtacttagacaaccttgatgaataatgtttttcttctttttcagttttctttgacagagatccatgtattctggaataagtagacaatctgaaaaaaacataaytagatttcatattttctttatttgacatctcacgaatcaatcttcacattgaatactgagagacatgacataattggaccttgcttctatgaatagaactttggataaaggatccctgttctaggcatttcttttatatcttatccttgaaattctcaaaacactttatctgatctcttatagtattgt

SEQ ID NO: 297349 - DNA, 578 bp, Homo sapiens
aagggaagagtatcttttcctccagctgatcatgaaaagcatgttttttcttttgttttgtttttctttactggcttttagaaaattgaagctaccattaatagtctctcataataaatacaggtatcatcatcttttgtatatctatttcttattcagttccactccatttaattctatttattgtcttccttttgtctgtttatatgaatggaaattgaaaaaccaaaatgtactgaaaggatcagtagtcagataccatatataaatattgcctattaataagtacttagacaaccttgatgaataatgtttttcttctttttcagttttctttgacagagatccatgtattctggaataagtagacaatctgaaaaaaacataattagatttcatattttctttatttgacatctcacgaatcaatcttcacattgaatactgagagacatgamataattggaccttgcttctatgaatagaactttggataaaggatccctgttctaggcatttcttttatatcttatccttgaaattctcaaaacactttatctgatctcttatagtattgt

SEQ ID NO: 297350 - DNA, 602 bp, Homo sapiens
cacagaataggagcttactcaaacaagttaatattatgattcttaatcattatttattattattttacttataacccatgattttttcatcaaattaaartaaagataaaattagagatggtcatgaaaacttatttcatgaaaaaaattatgtttaagttaatctttatttgtgtcctaaaggtttattgtccagtttcaattttaatgaatattgtttaaagctgaaatttttctttagtctcattactctagtactgtaagataacaaatttgggttgtttaatctgctagatttgtgtgtatggtaatttctaacaacatacataaacacaaaatagaagatcttgatctgatttataggcccctcaaaattttaatattctcttttagagagaagagaatcattttgtttggcaagatgtcttattatttgcataagtgtttatttacttaatcaattcacatgacccaaataagtgtttgcacttcaaatagttaatacgtgtcatatctactggtacattgaactcaaaagaaagactcaatgatagagaagtattacgtgaattgcataatgtttaggctaccaaattttagtg

SEQ ID NO: 297351 - DNA, 602 bp, Homo sapiens
cacagaataggagcttactcaaacaagttaatattatgattcttaatcattatttattattattttacttataacccatgattttttcatcaaattaaagtaaagataaaattagagatggtcatgaaaacttatttcatgaaaaaaattatgtttaagttaatctttatttgtgtcctaaaggtttattgtccagtttcaattttaatgaatattgtttaaagctgaaatttttctttagtctcattactctagtactgtaagataacaaatttgggttgtttaatctgctagatttgtgtgtatggtaatttctaacaacatacataaacacaaaatagaagatcttgatctgatttataggcccctcaaaattttaatattctcttttagagagaagagaatcattttgtttggcaagatgtcttattatttgcataagtgtttatttacttaatcaattcacatgacccaaataagtgtttgcacttcaaatagttaatacgtgtcatatctactggtacattgaactcaaaagaaagactcaatgatagagaagtattacrtgaattgcataatgtttaggctaccaaattttagtg

SEQ ID NO: 297352 - DNA, 556 bp, Homo sapiens
attcttaatcatcagattgtttctccggatgctcttccatcaacagatgaacatgttctggcagtttgcacatgtgtacagaactactcattaccactccaagtctatgatttcatttgtaggaaaaaatttaaaagattttgtatttgttatatttgtttttttctccctataatgattgggacccattccagattttgtctattgattttatccctgtatgttgtcatatataagttatcttttcaagtttaccagtgaactccatgttgcataacacaatagatatgtgcaatcttattatatttcttcaagtgtttgaaactgatgaacacccaatgaaataagcattttatttttcattttctatattctaccaccaacctaataaaagcctgcaataattagtcttatctgctaatgtttccggtgcttaccacaraatgtggcttaaaatagttgtttaacaaataatactttgtgattaagtgaggttaaaaaagacaacaatatccacttaaagccattaaagtagcagcatttattgagatagctc

SEQ ID NO: 297353 - DNA, 560 bp, Homo sapiens
attattcattcaaattatcaattcctttgtatttgaagaaaactactgtatagtaattatttgtctcttttcctttattatgtacacacaaagcgttgctaatatttgttaattcacatattagctgcaaaggatttcttaatgggtatttctggctaagttgagagagattctaggattactaaaattgtatgaaaattattacctggtaggagtgtgtgagaaaaggcttattccattcaacatagataatagtcatataaaattaaatgtataaattttgatttttagtgttaagtattcggttttcatttttaaattgacaattttgacaattataggcacycactcaatacaagctaaaaaatatttctgtcaccctcgaaagttcccttgcattccttttcagtcgatacttctctcaccccaatggaaactgctttcttatttctatcactatagattagcttcatatttttataaaatgtttataatttgaatcatacaaaagagacatttgatatcttttttaacataatatttctaagattcatcaatgt

SEQ ID NO: 297354 - DNA, 560 bp, Homo sapiens
attattcattcaaattatcaattcctttgtatttgaagaaaactactgtatagtaattatttgtctcttttcctttattatgtacacacaaagcgttgctaatatttgttaattcacatattagctgcaaaggatttcttaatgggtatttctggctaagttgagagagattctaggattactaaaattgtatgaaaattattacctggtaggagtgtgtgagaaaaggcttattccattcaacatagataatagtcatataaaattaaatgtataaattttgatttttagtgttaagtattcggttttcatttttaaattgacaattttgacaattataggcactcactcaatacaagctaaaaaatatttctgtcaccctcgaaagttcccttgcattccttttcagtcgatactyctctcaccccaatggaaactgctttcttatttctatcactatagattagcttcatatttttataaaatgtttataatttgaatcatacaaaagagacatttgatatcttttttaacataatatttctaagattcatcaatgt

SEQ ID NO: 297355 - DNA, 560 bp, Homo sapiens
attattcattcaaattatcaattcctttgtatttgaagaaaactactgtatagtaattatttgtctcttttcctttattatgtacacacaaagcgttgctaatatttgttaattcacatattagctgcaaaggatttcttaatgggtatttctggctaagttgagagagattctaggattactaaaattgtatgaaaattattacctggtaggagtgtgtgagaaaaggcttattccattcaacatagataatagtcatataaaattaaatgtataaattttgatttttagtgttaagtattcggttttcatttttaaattgacaattttgacaattataggcactcactcaatacaagctaaaaaatatttctgtcaccctcgaaagttcccttgcattccttttcagtcgatacttctctcaccccaatggaaactgctttctkatttctatcactatagattagcttcatatttttataaaatgtttataatttgaatcatacaaaagagacatttgatatcttttttaacataatatttctaagattcatcaatgt

SEQ ID NO: 297356 - DNA, 572 bp, Homo sapiens
gctgaaggtctgattataacaaaaaactgactttccatttgcaagagggaattcctcctaccttactgccgtcaaacctgaatttaaaaattggttatcctagttgatttagcctcagaaacaccctgcaaattttggactttccagcctccataatcttgtgagacaattccttaatatacgtatamatatacacacatatatatgtgtgtgtgtgtgtatgtgtatctatgtatgtatatatgtatatacacgcacacacaaacacatcttatttgttctgtttccctggagaaccctgatgtataaggaccatggccttttcttttccctttaaaataaattttctacaagaactggagttcacaatttcaactgtaaagctaaaatttatcacttcccagtttaaattgtattaatgaataataatcatttatgctaatttttaacagattcttccttaattacaacatcttatagttttcttacactattcattgtctgaattatcactcttttgcaatgcaacatatggtgtactatcatttatctttgataatctgcatggacac

SEQ ID NO: 297357 - DNA, 562 bp, Homo sapiens
tactgccgtcaaacctgaatttaaaaattggttatcctagttgatttagcctcagaaacaccctgcaaattttggactttccagcctccataatcttgtgagacaattccttaatatacgtatacatatacacacatatatatgtgtgtgtgtgtgtatgtgtatctatgtatgtatatatgtatatacacgcacacacaaacacatcttatttgttctgtttccctggagaaccctgatgtataaggaccatggccttttcttttccctttaaaataaattttctacaagaactggagttcacaatttcaactgtaaagctaaaatttatcacttcccagtttaaattgtattaatgaataataatcatttatgctaatttttaacagattcttccttaattacaacatcttatagttttcttacactattcattgtctgaattatcactcttttgcaatgcaacatatggtgtactatcatttatctttgataatctgcatggacactatttgttgggagcaaaccccyccaaatccaaccataaactggccccaagact

SEQ ID NO: 297358 - DNA, 242 bp, Homo sapiens
ctcagctacctggcatttctcagtggggagggggattctcagtaccaagggaactaacaggcttttcagacyaggtgctttttgtggcaaggtcccccttgcagatattcacagtcactcagcatctctggctggaaaagaaggtctcaggctatgagtggaaagactttcaacctgataatcgggccacatattgctagcagtcccagattgtactcctttgcccagctgctgtgggtgag

SEQ ID NO: 297359 - DNA, 625 bp, Homo sapiens
aatgattaaataaaaaaataagtgattgacctgccattatgttttgatcttttttccttgtgacccttggcttcagcataagcatgcttggcatctttccttactgaattttttaaactgttttaattttgtagcacagcattccctgacaatatgttgtaatattgcataagtggtaattcagagaggttccatgccacatctggcttttgcagaaagtccccagacaatatgagttccatctaagtacactcatctctttatcctctgtcaacaaaaagaaagaaactcttattactgagaattagagctttatctctcaattctgatcaactctaaagaattttgtatttttaaatattttgttttcttttttgaaggaagctacttctccctttcattctgctgcgtcccttcatcatataaggtctaaatgtgaatagtttacacataagttctagtttattgatggtctataatattctacctttattatattctaatagtctaacagagattcatataaaaattrtcaaactttttattatggacttctgtaaacttttataaatctttctgaccacattctcttagaaatagctcaattgaaactgtgggaaatatt

SEQ ID NO: 297360 - DNA, 613 bp, Homo sapiens
aggtgtgataggggttgaggattttaagaaatccagtggtgcaagaaaagttttggactgagaataaagagatctaaattatatattttaacctgcttccaactgaaccatttaccttgaggcactcgcttttcttttctgactatctgatctcttttcttaaaaaaataataaaagatatgagcaagttgattcccgtgatccctttcaattccaaagtcctgtgactatacacagtggtgaagagttgagagtaagaatsagtgcaatgtatgtactaaggtgagagaactggtggagagattgcagcgggttctggaatgcttagcttgcattttaaacaaataaaaggatgttttggccattgccactctcatttgagaccatcattcagaaaatcatttgatctggagagtaaccttgacatttcaggtcaggtctaaaattcttaagaaaccacgttttcatgccagagggtaatataatttttcctgctagaatattgtgaaaaatgtcgtaacttaaagacatctagtcagtgaattttaacttctttgtattctttaaaaagcctatttgcgcttcagtgtattgcaaaattaactgcatgttg

SEQ ID NO: 297361 - DNA, 536 bp, Homo sapiens
gaaacttcttcactgatatatcctcatcacttagtacctaacagcacatgataggtgcttaataaatactatgtattaattctattagtagtctggttcatatcagcaaaaccaaaatatataatgatgataaaacattacaaaaatctaatttggagtagatggcctcaattatcggttttgattgtccacactgccctgcttactatggctttattctgttcccaatgtaggtcccttaataatataagggatgattcgtctggaaggtaagactgttacaaatgtatatgtgtgtctaatgacagagttcctaaatacataaagcaaaaatggactgttttaaagagtgaagtaaaaaattccacaatcagaaagagattttattactttaagcaattgttcaaacaactagattaaaaaaaacagaagatttgaacaaaactatcaacaaccttaatctaattgatagatgtagattatctgccacaacagcaaaatacacrtttttcaattgcatatggtacattcaccaa

SEQ ID NO: 297362 - DNA, 354 bp, Homo sapiens
tattttttaatttgaaaaatacaaaagagtagaagatgactctcagttttctgccagtggcctgcacataaggcaaatctgctaatggagatgaagtttacacaatggacagaagtactttggaggaaaggaaaataaactaacttaggtcatactgagttcaaattgcctcttgaagattcagaagacatctactagagaggggaatacacagctctattactcaggagtgagatctaggcaacaaatataggctctaaatatgtggcaraaatgataaaagataatcttttatgaaactgtgttatcataatgccaccagagagtagagagttaaatcttgtataaaagagt

SEQ ID NO: 297363 - DNA, 553 bp, Homo sapiens
ggttaaatatatgtagatgtacacaaaaaggacaatgtgtatatcctctacactataacaatagaacaatgctgatggataaaaatcttaaagttttgtgaatagtattacctggaaagagaaattattaactgcttaggtattagaatttaaaaaaattaatttctgatcttccagaattatcaaaatgatcactgagacctccaggttactcagcaaaggcagcactgcttctttggaacccataaccatggaaatgctttgacagcctytcttaaactcccaccaagacagtgagtatccagacaacatcttcaatgagaaacttttcttgataattctggaagtggttctactgtgttctggaaagaccccaagtatacctctatcagaccacttaccaggacatatactagttttcttaatgtttttcttttgtagttgacactagttttccctgtaaactatcggttggggagaaaaaaataaattatttttctactctgaaaatgtagctttctcagggccattatagaagaggtcaacaattatt

SEQ ID NO: 297364 - DNA, 588 bp, Homo sapiens
gtttagaaagttagtaagaccaaaatttgaatcctggtattatcacttggtaactttgaaatttatgtagaactgtttttttaaatacctatctgcttcaatcttattctgctaagtggggataatgatacctaatttatagtgtgaaaattacgtgaatcgcataagtaactctgcctggtatgggatctagctgtatacattttaatttggtgttcaatataatttagtcttctccacacacaaagaaaatatttggggaagataaacaagatttttgctttgctctttacatcttgcarttatgaaaatattataaaatgcaattatttgccacaataggaaaagacagttgtggctgaatttttaacactattttgattttcaatatggttttgttacatagtttatacaataaattaaaatgagtaaaaaatcgttttcttatttgttggtttagtttttatccttttaaaattaatacttaatccatttagaaaaaatcaatgggttgctactgaaaaaagaaagtgcctattaaatgctcatttgaaccacagcttcaaagcagaattgagttaatttggt

SEQ ID NO: 297365 - DNA, 588 bp, Homo sapiens
gtttagaaagttagtaagaccaaaatttgaatcctggtattatcacttggtaactttgaaatttatgtagaactgtttttttaaatacctatctgcttcaatcttattctgctaagtggggataatgatacctaatttatagtgtgaaaattacgtgaatcgcataagtaactctgcctggtatgggatctagctgtatacattttaatttggtgttcaatataatttagtcttctccacacacaaagaaaatatttggggaagataaacaagatttttgctttgctctttacatcttgcaattatgaaaatattataaaatgcaattatttgccacaataggaaaagacagttgtggctgaatttttaacactaytttgattttcaatatggttttgttacatagtttatacaataaattaaaatgagtaaaaaatcgttttcttatttgttggtttagtttttatccttttaaaattaatacttaatccatttagaaaaaatcaatgggttgctactgaaaaaagaaagtgcctattaaatgctcatttgaaccacagcttcaaagcagaattgagttaatttggt

SEQ ID NO: 297366 - DNA, 1072 bp, Homo sapiens
atattcaataattattagctattcaatcgtagaaggagaaatagaaaacctccttagaggtaatatagcctttaaactgattgggccagagtggtcatacaaaaatgttaggaaaggctttcaagaaaataaaagcaatattggcaaaggctaagagaaaaaggtttatgttgaatgtatgcaaaatrtaaagattttaattaggctacattgttagtgtatgaattgttttgttaacgtaatatggcatattgttctatcagttaccaaaagacattttaaaattcttcagtgtgattctgtatttgcctgtttctcatgctctttctattttgccttgtatattttgaggtcgtgtttttagaagcatatattttagtgtttttatatcttcttttttagtttaaccaccatcattatattatctctcattggaagagcttttcaattgcattattctttacacatgctgaactattaawtaatatagcctttaaactgattgggccagagtggtcatacaaaaatgttaggaaaggctttcaagaaaataaaagcaatattggcaaaggctaagagaaaaaggtttatgttgaatgtatgcaaaatgtaaagattttaattaggctacattgttagtgtatgaatwgttttgttaacgtaatatggcatattgttctatcagttaccaaaagacattttaaaattcttcagtgtgattctgtatttgcctgtttctcatgctctttctattttgccttgtatattttgaggtcgtgtttttagaagcatatattttagtgtttttatatcttcttttttagtttaaccaccatcattatattatctctcattggaagagcttttcaattgcattattctttacacatgctgaactattaaacatgtctcagtaaatttagaaaggattggaatcatacaagcaaatgaactctgaaaaaaattgagttaaactagaaatcagtattgaaaatatacctggaaaattcccaaatacttagaaaataagccccatacacttaagtaatccacgagtcaaagctatagtcat

SEQ ID NO: 297367 - DNA, 590 bp, Homo sapiens
taatatagcctttaaactgattgggccagagtggtcatacaaaaatgttaggaaaggctttcaagaaaataaaagcaatattggcaaaggctaagagaaaaaggtttatgttgaatgtatgcaaaatgtaaagattttaattaggctacattgttagtgtatgaattgttttgttaacgtaatatggcatattgttctatcagttaccaaaagacattttaaaattcttcagtgtgattctgtatttgcctgtttctcatgctctttctattttgccttgtatattttgaggtcgtgtttttagaagcatatattttagtgtttttatatcttcttttttagtttaaccaccatcattatattatctctcattggaagagcttttcaattgcattattctttacacatgctgaacyattaaacatgtctcagtaaatttagaaaggattggaatcatacaagcaaatgaactctgaaaaaaattgagttaaactagaaatcagtattgaaaatatacctggaaaattcccaaatacttagaaaataagccccatacacttaagtaatccacgagtcaaagctatagtcat

SEQ ID NO: 297368 - DNA, 567 bp, Homo sapiens
gtcatataacactgttatagctacaatttgaatatataatggtctcatcgtcaaaaatctcatacaatggaaaagaagatacagcagtaacttatgaaagttctattaaaaataaagtactatgaaaaggaggaagaatacatagggcagttcccttaaaaaactttcatgtttgacctaaagccagaacatttcgcagcagtttactccattcactctacatgtatactgaattaactctttggttgattatgaaagttagatatctgtttagactatatatcctcttcattgaactagcacatacttttaacagatttacaaattacagataatgtacaatgtatatatacttcatttattgccactgggatactttatatataaaaactgtatctttatgattctgtgtgtaggtgtattacaaacctcttcctagttttaaaatttagatggcaaatrgaatatgtaatgaaataaaaataagtatttatggatatggaagtgagagagaaagaatggtagagaaataaaataaagctaaatgtaaataaatggatatcataa

SEQ ID NO: 297369 - DNA, 459 bp, Homo sapiens
aagcataaatgtacttttatcatgcatgtagattaagttatttgttattaaactaaaagatgaatattaccaattttgcagatactattattcttctatatactaatgcragcatttcctgactcacgtgttctaacttaaatagaaaatgtttattcatgtatacaaccattcattcaacacatattaaaagaatggccactatggtgccaggtgctgttctatgcactgaggatacttaaagctcctgctccattctaatgaaagaaaacagacaataaacaatcaaataattacatgtcaggtagtaagagagatataaataaaaataaattagatcaagtggaaagagaaaaacagagaagaaagtgtgtggtagagcacattattatactggtctgttagggctgacctcactgataagagaacattcgaatcaacaggacaattgagacatat

SEQ ID NO: 297370 - DNA, 580 bp, Homo sapiens
taaaatttagatggcaaatagaatatgtaatgaaataaaaataagtatttatggatatggaagtgagagagaaagaatggtagagaaataaaataaagctaaatgtaaataaatggatatcataaactcttatatagcacaaagataggctataaatggctttaaattccctaatagccacatcaaagtgtcatgtgatcatttaaaagaactattatgtctagaaagaaaacaagacataacaagacagaaatctcaattgctcagaaaaagcataaatgtacttttatcatgcatgtagattaagttatttgttattaaactaaaagatgaatattaccaattttgcagatactattattcttctatatactaatgcgagcatttcctgactcacrtgttctaacttaaatagaaaatgtttattcatgtatacaaccattcattcaacacatattaaaagaatggccactatggtgccaggtgctgttctatgcactgaggatacttaaagctcctgctccattctaatgaaagaaaacagacaataaacaatcaaataattacatgtcaggtagta

SEQ ID NO: 297371 - DNA, 459 bp, Homo sapiens
aagcataaatgtacttttatcatgcatgtagattaagttatttgttattaaactaaaagatgaatattaccaattttgcagatactattattcttctatatactaatgcgagcatttcctgactcacgtgttctaacttaaatagaaaatgtttattcatgtatacaaccattcattcaacacatattaaaagaatggccactatggtgccaggtgctgttctatgcactgaggatacttaaagctcctgctccattctaatgaaagaaaacagacaataaacaatcaaataattacrtgtcaggtagtaagagagatataaataaaaataaattagatcaagtggaaagagaaaaacagagaagaaagtgtgtggtagagcacattattatactggtctgttagggctgacctcactgataagagaacattcgaatcaacaggacaattgagacatat

SEQ ID NO: 297372 - DNA, 638 bp, Homo sapiens
tatctatattcgtttccgtagaatggactcttagaaatggattgataaatagaatcatgcttcaagytcttgatccatattattatttttaaaaatttgtcctagtttataattcaatcaacaacacataagaatttcctcaactcagctctaccagacttagacattcgtttgtttttattgttgttatgattacgctatggggttgtttatcagtttaagaaaacagattgaaattttcttttgtgaaacccacttacatgttagtatttttgtgttttacagtaattttactcatttgtttctatttttgctcttaaaacttcattggtgttacaaaatcctctcattactaacacctattaaatttgcattttttctgagaaatttgatttctagtgtttcaaaatgtagctcttaagaaaatttgaaatgtttttgattcaaagtgagataaagaccaagatatttaaatttttgttcaatatataatctccttcccctactgatttaatattaagcaagttcaacaatacagaaaagttgaaaatggattgtggccttctatggaatcacaatcgtataaattcacatatcttcggtatgggttctcatgtaaccagaagcttttaaaatca

SEQ ID NO: 297373 - DNA, 638 bp, Homo sapiens
tatctatattcgtttccgtagaatggactcttagaaatggattgataaatagaatcatgcttcaagttcttgatccatattattatttttaaaaatttgtcctagtttataattcaatcaacaacacataagaatttcctcaactcagctctaccagacttagacattcgtttgtttttattgttgttatgattacgctrtggggttgtttatcagtttaagaaaacagattgaaattttcttttgtgaaacccacttacatgttagtatttttgtgttttacagtaattttactcatttgtttctatttttgctcttaaaacttcattggtgttacaaaatcctctcattactaacacctattaaatttgcattttttctgagaaatttgatttctagtgtttcaaaatgtagctcttaagaaaatttgaaatgtttttgattcaaagtgagataaagaccaagatatttaaatttttgttcaatatataatctccttcccctactgatttaatattaagcaagttcaacaatacagaaaagttgaaaatggattgtggccttctatggaatcacaatcgtataaattcacatatcttcggtatgggttctcatgtaaccagaagcttttaaaatca

SEQ ID NO: 297374 - DNA, 587 bp, Homo sapiens
gtacatttattatttatgtcctgactgcttctgaactggactagaggcagcttgccccaaaaatgcaagtgtaaatgtagttttagaaacagacagaaatgtagatatcaatgtagatataaaaatacccacaggaaagttcaaataaaaataaaataaaataagagaatttatgaagaaaggaggtggtagctgtrtcagaaatcaatttaaaatttatgcaggactccccagcagccaagataaaaagggaaagggaattggttacataacaactaggtctcccagattcattctgtagagtattaatcataatcagttctaacaggttgtccatcacatactccatgctgtgtcacaaaaaaggcaaatttgagttgtcagtcttggctttagtgttctttttaggatgacaatgacaagtccatgcattttcactctcagaaaaaacaaaagacagaaacgggaacttagattcccaaagtgattataatttgacatgaaacaggcgcctcttctgtccttactatctggatattcttaggaaaatcacccagtttctcaaaataattattttcctctattca

SEQ ID NO: 297375 - DNA, 587 bp, Homo sapiens
gtacatttattatttatgtcctgactgcttctgaactggactagaggcagcttgccccaaaaatgcaagtgtaaatgtagttttagaaacagacagaaatgtagatatcaatgtagatataaaaatacccacaggaaagttcaaataaaaataaaataaaataagagaatttatgaagaaaggaggtggtagctgtatcagaaatcaatttaaaatttatgcaggactccccagcagccaagataaaaagggaaagggaattggttacataacaactaggtctyccagattcattctgtagagtattaatcataatcagttctaacaggttgtccatcacatactccatgctgtgtcacaaaaaaggcaaatttgagttgtcagtcttggctttagtgttctttttaggatgacaatgacaagtccatgcattttcactctcagaaaaaacaaaagacagaaacgggaacttagattcccaaagtgattataatttgacatgaaacaggcgcctcttctgtccttactatctggatattcttaggaaaatcacccagtttctcaaaataattattttcctctattca

SEQ ID NO: 297376 - DNA, 587 bp, Homo sapiens
gtacatttattatttatgtcctgactgcttctgaactggactagaggcagcttgccccaaaaatgcaagtgtaaatgtagttttagaaacagacagaaatgtagatatcaatgtagatataaaaatacccacaggaaagttcaaataaaaataaaataaaataagagaatttatgaagaaaggaggtggtagctgtatcagaaatcaatttaaaatttatgcaggactccccagcagccaagataaaaagggaaagggaattggttacataacaactaggtctcccagattcattctgtagagtattaatcataatcagttctaacaggttgtccatcacatactccatgctgtgtcacaaaaaaggcaaatttgagttgtcagtcttggctttagtgttctttttaggatgacaatgacaagtccatgcattttcactctcagaaaaaacaaaagacagaaacgggaacttagattcccaaagtgattataatttgacatgaaacaggygcctcttctgtccttactatctggatattcttaggaaaatcacccagtttctcaaaataattattttcctctattca

SEQ ID NO: 297377 - DNA, 587 bp, Homo sapiens
gtacatttattatttatgtcctgactgcttctgaactggactagaggcagcttgccccaaaaatgcaagtgtaaatgtagttttagaaacagacagaaatgtagatatcaatgtagatataaaaatacccacaggaaagttcaaataaaaataaaataaaataagagaatttatgaagaaaggaggtggtagctgtatcagaaatcaatttaaaatttatgcaggactccccagcagccaagataaaaagggaaagggaattggttacataacaactaggtctcccagattcattctgtagagtattaatcataatcagttctaacaggttgtccatcacatactccatgctgtgtcacaaaaaaggcaaatttgagttgtcagtcttggctttagtgttctttttaggatgacaatgacaagtccatgcattttcactctcagaaaaaacaaaagacagaaacgggaacttagattcccaaagtgattataatttgacatgaaacaggcgcctcttctgtccttactayctggatattcttaggaaaatcacccagtttctcaaaataattattttcctctattca

SEQ ID NO: 297378 - DNA, 1045 bp, Homo sapiens
caaaaaggggtaaactgacaatgtgtgcattctgatatgatggactgagaaggacacaacatcacttctgtgggattctgtatacgtcacctagatgcactcttgaggaagcaatcagtctaaccccattgaggcaccatacaaaacaactgggcaatgctccktaagtgttccgagccatgagaaacagagggtactgagcagctgttctagaatgaagtcttgtgagacatgaaaaaattcaatgtgtatttctgattggattctgatccagagcaaggacaataatgataaaatctactctattctgcacagattgtctcatgtcctgctgctgatcctgaattcaattcaggaatacatgaatcaatgttattttccttatttgatatttcctgattgaatatttggagatttagaaactgtaggattacataaaacctcctttaggtaaataacatgagaacatgaaggaaaaagtcccagcaaccatcctgcagatagaagacctgwtgtgtgtctcacatattttctaagcttttggtaatcttatgtgtctctcgggtgagcttcttcgaaggtagawgcatattatatatttggcatatctccagtgtggtaggctgaatattggtccctaaagatattcagatcccaattcctggaacctatgaatgtcaccttctatgtgaaaaggaactctgtggaggttatcggaggatttgagatgggaaaattattctggattatgtgagtgggccctaaatgcagtcacatcggaccttaaaagagcgagtagagggaaaattgacacagaagaggagaacacaatatgacaataggaacagagagtggagtgagtgacagggccatagccaaggaaaatcgacagccactagagtctaagaagggcaacagaaaacaaattatttcctggagattccaggggagcacagctctgccaacaccttgatttagctatgtaagacttagtttggatttctggcctctagaactgcaagaaaataaatgttgttattttaag

SEQ ID NO: 297379 - DNA, 532 bp, Homo sapiens
tgtgtgtctcacatattttctaagcttttggtaatcttatgtgtctctcgggtgagcttcttcgaaggtagaagcatrttatatatttggcatatctccagtgtggtaggctgaatattggtccctaaagatattcagatcccaattcctggaacctatgaatgtcaccttctatgtgaaaaggaactctgtggaggttatcggaggatttgagatgggaaaattattctggattatgtgagtgggccctaaatgcagtcacatcggaccttaaaagagcgagtagagggaaaattgacacagaagaggagaacacaatatgacaataggaacagagagtggagtgagtgacagggccatagccaaggaaaatcgacagccactagagtctaagaagggcaacagaaaacaaattatttcctggagattccaggggagcacagctctgccaacaccttgatttagctatgtaagacttagtttggatttctggcctctagaactgcaagaaaataaatgttgttattttaag

SEQ ID NO: 297380 - DNA, 532 bp, Homo sapiens
tgtgtgtctcacatattttctaagcttttggtaatcttatgtgtctctcgggtgagcttcttcgaaggtagaagcatattatatatttggcatatctccagtgtggtaggctgaatattggtccctaaagatattcagatcccaattcctggaacctatgaatgtcaccttctatgtgaaaaggaactctgtggaggttatcggaggatttgagaygggaaaattattctggattatgtgagtgggccctaaatgcagtcacatcggaccttaaaagagcgagtagagggaaaattgacacagaagaggagaacacaatatgacaataggaacagagagtggagtgagtgacagggccatagccaaggaaaatcgacagccactagagtctaagaagggcaacagaaaacaaattatttcctggagattccaggggagcacagctctgccaacaccttgatttagctatgtaagacttagtttggatttctggcctctagaactgcaagaaaataaatgttgttattttaag

SEQ ID NO: 297381 - DNA, 532 bp, Homo sapiens
tgtgtgtctcacatattttctaagcttttggtaatcttatgtgtctctcgggtgagcttcttcgaaggtagaagcatattatatatttggcatatctccagtgtggtaggctgaatattggtccctaaagatattcagatcccaattcctggaacctatgaatgtcaccttctatgtgaaaaggaactctgtggaggttatcggaggatttgagatgggaaaattattctggattatgtgagtgggccctaaatgcagtcacatcggaccttaaaagagcgagtagagggaaaattgacacagaagaggagaacacaatatgacaataggaacagagagtgragtgagtgacagggccatagccaaggaaaatcgacagccactagagtctaagaagggcaacagaaaacaaattatttcctggagattccaggggagcacagctctgccaacaccttgatttagctatgtaagacttagtttggatttctggcctctagaactgcaagaaaataaatgttgttattttaag

SEQ ID NO: 297382 - DNA, 535 bp, Homo sapiens
ttacagctaattttgtatcacttaaaggaaaaatagaaactttcaatcacatacattaaacaggtccatgtatcccaaccctcttctttatgctgtatttgaagattatctggaggtttctggtaggcatcagcttaggaaataaagaagaatatttttataaaatataactgtaacagtcatcagagaattacatataattctcccatgtcacgattcagagatgtagattgatttttccaacacaaaacaattagctgcttgccagtgatgattttgaatccaacctttatcaagctccaacatttgataaaattctgtggtggcagtacctcctctgccataagaggaagtaaagggtaaataaagatttggaaatatcctgaggtggagcagaaagggaaagagagacttcatctayctgccctgatgcaaggtgacaaaagaatcattcccaactcacaccttagggaagagtacaggctctggagactgacaggttttggtgaatttgttgatgtaatgatatttttac

SEQ ID NO: 297383 - DNA, 535 bp, Homo sapiens
ttacagctaattttgtatcacttaaaggaaaaatagaaactttcaatcacatacattaaacaggtccatgtatcccaaccctcttctttatgctgtatttgaagattatctggaggtttctggtaggcatcagcttaggaaataaagaagaatatttttataaaatataactgtaacagtcatcagagaattacatataattctcccatgtcacgattcagagatgtagattgatttttccaacacaaaacaattagctgcttgccagtgatgattttgaatccaacctttatcaagctccaacatttgataaaattctgtggtggcagtacctcctctgccataagaggaagtaaagggtaaataaagatttggaaatatcctgaggtggagcagaaagggaaagagagacttcatctatctgccctgatgcaaggtgacaaaagaatcattccmaactcacaccttagggaagagtacaggctctggagactgacaggttttggtgaatttgttgatgtaatgatatttttac

SEQ ID NO: 297384 - DNA, 592 bp, Homo sapiens
ggtttgaatatcacctgaagaacagaaggctaaagattccaatgtgtggatttgtaaagtgacaacttccagagcttcatcagaaactgaatgaatgaacactagcataataggcatgctgagaaaattcttaaaaacatttttaggcgggtggtcacctgaggtcaggagtttgagaccagcctgaccaatatggtgaaaccccatctctactaaaaatacaaaaaaaaattatctgggcatggtgacacaggcctgtagtcccagctactaaggagtctgggacagaagaatttcttggacccaggaggtggaggttgcagtgagccaagatcrtgccactgcaatctagcctgggctatgaagtgggactctgtctcaaaagaaaaaaaaaataagatttttaatggattcttattaccttgagtaaaatgcacttccaactccttttcagcattatttttttaatttgaaaagcactgtcctttagtgtcatcaagttttacaaatattcagataggggctttaaaaataccagctttcatatatgacttcttggagtctttcaagtgcgtgcctgatgtaggtaaat

SEQ ID NO: 297385 - DNA, 1669 bp, Homo sapiens
tggctgtctgttacccgactgctcctctgttgatgaatgacaacatcaacctgtgcttgttgcctgctgcaatctggatcctccgacctaaggcacttggagctctcatcaattcatttcttaccttccaagtaacattttgtttgctttttacgtgtttattctacatattcagaattctaagggggacataaccagagctaccctttaagcttttctcttcaacaccattcctgtgccctgccttctttggagcctggcctccctgactgtccaatatcttggggtgagttccctgttgcctcactcgcagctgcagcatgaatgaactcataccctgcaaggcactgtctcagctcagatgagggaatctaarttcatatgccaaaatctcaccagttcagcacatgcatctcgcatctctaattaaggtgaagctctcaggactggcatgagcatcctagggttttgggggcttagtgagtggaaagcaagtcatagagagttgatgttgtcaatgaccgatgacaagacacttaagagcaattaaggaactcaaactgaaaaggctttcttatgtaatattttattttgttatataagtagatattctaattagaatacatttaaaatgttaacatwtggctgtctgttacccgactgctcctctgttgatgaatgacaacatcaacctgtgcttgttgcctgctgcaatctggatcctccgacctaaggcacttggagctctcatcaattcatttcttaccttccaagtaacattttgtttgctttttacgtgtttattctacatattcagaattctaagggggacataaccagagctaccctttaagcttttctcttcaacaccattcctgtgccctgccttctttggagcctggcctccctgactgtccaatatcttggggtgagttccctgttgcctcactcgcagctgcagcatgaatgaactcataccctgcaaggcactgtctcagctcagatgagggaatctaaattcatatgccaaaatctcaccagttcagcacatgcatctcgcatctctaattaaggtgaagctctcaggactggcatgagcatcctagggttttgggggcttagtgagtggaaagcaagtcatagagagttgatgttgtcaatgaccgatgacaagacacttaagagcaattaaggaactcaaactgaaaaggctttcttatgtaatattttattttgttatataagtagatattctaattagaawacatttaaaatgttaacatwgacattttgtagaaaaatttcaaaaaatattttctaaaagaggcattcccccaatgagaccagccaaagataataaaaagaaaagatattgcatgctgcatttgwaacttaacatgaggttgagatactctagaccccatgactgctatgaggaaatgagctcataaacctctgaggggtcttattggagtgaaataagtatctttctattttactttattttcattttttagtacttctccaccaacctttaaaattaatgctttaatgaattgatgtatttatttatacattcattcagaacatagttataaatgtcattctgtaatattctgtaatgtatatgaccatatagttagtacaggtggaaagggagactgggaag

SEQ ID NO: 297386 - DNA, 385 bp, Homo sapiens
gacattttgtagaaaaatttcaaaaaatattttctaaaagaggcattcccccaatgagaccagccaaagataataaaaagaaaagatattgcatgctgcatttgtaacttaacatgaggttgagatactctagaccccatgactgctatgaggaaatgagctcataaacctctgaggggtcttattggagtgaaataagtatctttctattttactttattttcattttttagtacttctccaccaacctttaaaattaatgctttaatgaattgatgtatttatttatacattcattcagaacatagttataaatgtcrttctgtaatattctgtaatgtatatgaccatatagttagtacaggtggaaagggagactgggaag

SEQ ID NO: 297387 - DNA, 385 bp, Homo sapiens
gacattttgtagaaaaatttcaaaaaatattttctaaaagaggcattcccccaatgagaccagccaaagataataaaaagaaaagatattgcatgctgcatttgtaacttaacatgaggttgagatactctagaccccatgactgctatgaggaaatgagctcataaacctctgaggggtcttattggagtgaaataagtatctttctattttactttattttcattttttagtacttctccaccaacctttaaaattaatgctttaatgaattgatgtatttatttatacattcattcagaacatagttataaatgtcattctgtratattctgtaatgtatatgaccatatagttagtacaggtggaaagggagactgggaag

SEQ ID NO: 297388 - DNA, 582 bp, Homo sapiens
acttattataccttggcaggaatgaggaacagaatgatatatgggaaggcacagggccttctccagtgaaagttctggagatccaaaaaagaagtgcttgtcttatctagcattagagtgaaatgaaaatctaccttgatattccatgtcatcagcagtgtagcccagtgactactgaaaaccatgtgtacagggaagtgtcacggaatttgacctcttcattccatcttcactctcattttcttcattcaaggcttttcatttattttctaggttgtaaaacgtcccaatttctcctactgtcttcattatccctctcccccacttaccttccatattgctatcaaatactttgaatgttaattttgtgttctgaactttactaaagttatttatcaggtctgggagccttttggcagtctttagggttgtctaggtatagaatcatatcatcagtgaacratttgattttcccttttcctgtctggatgccttctaattccttttcttgcctacttgctctggctatcacatctggtaccgtgttgagtggtgagagtgggcactttgtcttgttctagt

SEQ ID NO: 297389 - DNA, 611 bp, Homo sapiens
tagttttactctgtagatacgctgatctgatgaataccttcttctagaagaaacgagyctgttgcatagtaagctaatcaaaagatgaagaaaagggtttgcatttctaaaggactctcctgtcattgcagtagtaatatgtcctgggctttagaaagagaccaattttgttggaagactgactcagatagtaaggaatattccttattagcttgtgtgacttaaaaaaataacttaccttctctgatatcattttacttgtatataatatgaatataattgaccacgttacagggattgttactctggtatagtcaatactgagtaacttggagtttataattattaatatttccatctgtgcataagagtgcatgaatgaccaatggttatcacaatctccttttttgtctcccaaaacttgttcatacgcaagtgaacttgtaaaaatctctaactgactttactgcctattcctcttgaagcttttctagtgatttggccttaatcgaggaatttagcagatgtgcttaccttttctgtgaaatgccggtcaagctcccaggtctttactgagtacacactatgtagctagcctgcgcatacagtcc

SEQ ID NO: 297390 - DNA, 398 bp, Homo sapiens
gaacatgatacagtgctgcagagattttgtttatggccagttttgtggccagtttatggccagattttggggggggcctgttccctacatgtcccccttatttgatttgcaaagcrataaaagcaaaggcagctttgtcatggtgagctacttctcacaggagtcaggatccacatctgcagactatacaaagacaaacaacacagattaaaagcacaatcatcattgaaattacagagcttccaagtatttttatccattttaatgggttactagctgctaatctgtctgcagctcctttaaacactccagttcctggcattaaggccatgtgtgcttgagatgttttaaatatttgttcttctaattttgccatatccaaaaacaagtttgtagtg

SEQ ID NO: 297391 - DNA, 398 bp, Homo sapiens
gaacatgatacagtgctgcagagattttgtttatggccagttttgtggccagtttatggccagattttggggggggcctgttccctacatgtcccccttatttgatttgcaaagcgataaaagcaaaggcagctttgtcatggtgagctacttctcacaggagtcaggatccacatctgcagactatacaaagacaaacaacacagattaaaagcacaatcatcattgaaattacagagcttccaagtatttttatccattttaatgggttactagctgctaatctgtctgcagctcctttaaacactccagttcctggcattaaggccatgtgtgcttgagatgytttaaatatttgttcttctaattttgccatatccaaaaacaagtttgtagtg

SEQ ID NO: 297392 - DNA, 538 bp, Homo sapiens
ggtgagctacttctcacaggagtcaggatccacatctgcagactatacaaagacaaacaacacagattaaaagcacaatcatcattgaaattacagagcttccaagtatttttatccattttaatgggttactagctgctaatctgtctgcagctcctttaaacactccagttcctggcattaaggccatgtgtgcttgagatgttttaaatatttgttcttytaattttgccatatccaaaaacaagtttgtagtgtgtccttctagatacttttttattctttcccaaattttgatcttattaagagctattaatagtttccacaaatccttcatgtttacctcctacaataagccatatcatttgaggttgaggtgccactatactgccatggtttcagataataggaacttttgccatacttcttatcatttctaccatctgaccattttgtttagatcagctgagcatagtgtggccatggcatgcagactgagaggtgcaatttaggttaaacatccctttaggggaccaat

SEQ ID NO: 297393 - DNA, 566 bp, Homo sapiens
ggagtctcctatgtctacttctttctacacagacacagtaacaatctgatctctctttcttttccccaaatttcccccttttctttttgacaaaacagccatcgtcttcatggccctttctcgatggtcgctgtctcttyggaactgttgggtacacctgcagaaaggctgtcacttcacacttggaagattgaacagcagccaggcagaggcgctcctcatttcccagacagggtggcggccgggcagaggcactcctcacatcccagatggggcggccaggcagaggcactcctcacttcccagacggggtggccgggcgaccatagttactttaaaaggagcaaaacatctcacaaaccacttttgcatttgcttttatttcatgctgtttggaattaattgattttgtgctctcccagaatgctctggtggagaaaggagacaactaaaggccagcttcttttttggaaaataacttagcttctagttttggaaccctgaggaatttgacccagtgggtatatatccaaaggattataaatcatgctgctataaagacacac

SEQ ID NO: 297394 - DNA, 566 bp, Homo sapiens
ggagtctcctatgtctacttctttctacacagacacagtaacaatctgatctctctttcttttccccaaatttcccccttttctttttgacaaaacagccatcgtcttcatggccctttctcgatggtcgctgtctcttcggaactgttgggtacacctgcagaaaggctgtcacttcacacttggaagattgaacagcagccaggcagaggcgctcctcatttcccagacagggtggcggccggrcagaggcactcctcacatcccagatggggcggccaggcagaggcactcctcacttcccagacggggtggccgggcgaccatagttactttaaaaggagcaaaacatctcacaaaccacttttgcatttgcttttatttcatgctgtttggaattaattgattttgtgctctcccagaatgctctggtggagaaaggagacaactaaaggccagcttcttttttggaaaataacttagcttctagttttggaaccctgaggaatttgacccagtgggtatatatccaaaggattataaatcatgctgctataaagacacac

SEQ ID NO: 297395 - DNA, 566 bp, Homo sapiens
ggagtctcctatgtctacttctttctacacagacacagtaacaatctgatctctctttcttttccccaaatttcccccttttctttttgacaaaacagccatcgtcttcatggccctttctcgatggtcgctgtctcttcggaactgttgggtacacctgcagaaaggctgtcacttcacacttggaagattgaacagcagccaggcagaggcgctcctcatttcccagacagggtggcggccgggcagaggcactcctcacatcccagatggggcggccaggcagaggcactcctcacttcccagacggggtggccgggcgaccatagttactttaaaaggagcaaaacatctcacaaaccacttttgcatttgcttttatttcatgctgtttggaattaattgattttgtgctctcccagaatgctctggtggagaaaggagacaactaaaggccagcttcttttttggaaaataacttagcttytagttttggaaccctgaggaatttgacccagtgggtatatatccaaaggattataaatcatgctgctataaagacacac

SEQ ID NO: 297396 - DNA, 554 bp, Homo sapiens
ttctgtagtttgagggttcccttggcatcagtttattgatccaatttgctgatcagtttgctgatccagggggtcagcaaatattttctgcaaagggcagtatggtaaatatatgagctttgtgggccattatgtgtctctcatcactgctgctgccttgtcttcctccacccattctactcctcctcctccacctcctaaaattctactaaaagtgtaaataaccattcttagctcataggcattacaaaacaaggacttagacaaaattcaacctgtgggccataagttgtcaattcctagataatctatggtgtgacccaagmactaagacccctgtacacatgaccaggtgcacagtggggagagtgtagaccatccttgatccccaataagacctgtgtatagcctgtagtttccaagctattcctggatgggcctggagatggagtaggtgcagttcactggtggactctgagcctcaggcccctctgggactatgcttgaagcaacctaatgcccctcccccacaatctccttggctgagctgggcc

SEQ ID NO: 297397 - DNA, 519 bp, Homo sapiens
aaagatactgatgcttagcaagataaagtgatggagaagagcccctagttattaaatgataacatcaggctgataattgaacaaatttggacagcatgctttcctcctttcccgctatttccagtctactgtcaagtctggatgattccctttcctctgttgttctgttttttttttttgtataaatttagggagtataatrcagttttgatatagggatatactgttagtggtgacctctaggcttttagtgtaaccatcacatgaatagtgtacattataccgttagtaatttcttatccctcaacacctctcacccttccaagtctccaatgtctactattccacactctatgtccatgtgtgcacattatctattaatggcaaaaactgcacttacatttgcaccaacctatatagcccctgattataagtgaaaaaatgtggtatctgactttctgtttctaagttgttcacttaaaataatggccactagttccatctgtgtttctgcaaaaa

SEQ ID NO: 297398 - DNA, 574 bp, Homo sapiens
gttgaggagccagagaacaacgtcagaacccaacacaaggccccccacagttacagcatgcagtcaagtagttgggagttgagcattggctccctaaaatctcccagaaacaaagccagtcatctgaatcacttttatgccacaatcaaacactcaaggttatcaaataggataaggggtggaaaccattgaatggtcagcaacctcaaagactgaaggtagataagcccacaaagatgagaatgaatctgcacaataacactgaaaactcaaaaaaccagaatgtcttctttcctccaaatgatggcatcatctctccagcaagggtttggaaccaggctgaggctgagatggctgaaattacagaagtaaaattcagaatgtggatagaaatgaagttcattgagctacaggagtacgttgtaaccygatgcaaggaagctgaaaattatgataaaacattgcaggagctgaccgacaaaatagccagtgtaaagaagaacatatctgacctcataaagcttaaaaacacactacaagaactttataatgcaaccaaaagtattaatagcag

SEQ ID NO: 297399 - DNA, 1163 bp, Homo sapiens
gggtgctggcctgtgcaggtctggttcccttctctgcctcacaagcaaaaataattgctcagtatgtggaaggatcccgtgttctctgtgcagtctcagcgcaaggacagggtgctggcaggggtgtgcttgatggctctgtgcctgccaaagctctgtcagcaatggcggtcagtgagggtgttgggtcatactgcactcccacatgctggtgaagcaagcaaaacaaaacccgcctgtgcagaaacaccctcaaggtgaggtggggtgtttttgtgggcccagaggaagcttcagtatggggaagaaacgtgtgagctgatgcacatccataggggccaccttgctggagctctccgtttgtcaggcatagtctgccagcayggaagccatggagtaggcccctagggcacctgagactgccctgtaagcaggcatggccaggctgcagccttgggagagcccaacaaattgagcatcagccccatctgatgtgcaaggcagccctgcagagatcaggtctgacagttcccctagggctaaagtatcttacggaagcaagtagagcctagaaggacagccaaccctwgggcagcagatagcctcaggcaagttttcaagcctgtctcaccctccgtctggacacagactcagggctgctgtggggagcactgcgggagtgagactggcccttcggtttgtggtttgtgaagaagctgggtgaggacagtgactgccagcttttccccactttcctgacaacctgtatgacagcagatgagccgtaatcctcctawgtacacgggaataacacccctatcccccacagcatcaacaagacacgcccaaggagagtctaagctcagacacgcctagccccactagcacctgatggtccttccctatccacccaggtagtgaaagacaaagggtatataatctttgaagttttagagccaagtccaccaccggttcctctccaactactatagctgatgcattctggaaattgccacctcctgacaagagaccaaccagcacaaaaatagaacattaaaccaccaaagctaagggtcctcatggaatccactgaaccctctgccacctccaccagaaaacgtgctggtatttatggctgagagatccagagacagttcacatca

SEQ ID NO: 297400 - DNA, 561 bp, Homo sapiens
ttgatgtatccagcaaaccaccttgtcacgtgtatacctatgtagcaaacctccatattctgtacatgtaccccagaacttaaagcatagtagaaaaaaattttaaaaagctcaatatcacttatcattagagaaatgcaaatcaaaaccacaataagataccatctcatactagtcgaatgactattattaaaaagtcaaagcatgacagatgcttatgaggctgcagagaaaatagaagacttttacactgtttttggaaacataaattaattcagccactgtggaaagcagtttgaagatttatcaaagattgaaaaatagaaccaccatctgacccagcaatcctattactgtgtgtatattgaaaggaaaacattaaaagatacctgcactcttatgtttattacagyacagtttgcagtagcaaaactatggaatcaacctaggtgtttctcaatgccatattggataaagtaaatgtggtacatatacaccatggaatactgtgcagccataaaaaggaatgaagttatatcctttgcagcaacatggatgtag

SEQ ID NO: 297401 - DNA, 593 bp, Homo sapiens
ctttttttgttttccatttgcttgatagatcttcctctatccctttattttgatcctacatgtgtacctgcacatgagatgggtttcctggatayagctcactgatgggtcttgactctttatccaatttgccattctgtgtcttttaattggagcatttagcccatttacatttaaggttaatattgaaaaaaaagaattattattactttttactgttgagttttgaatgttctttacatattcaagtgctttgccagatccgtgatttgcaaatattttctccagtgtatcgtttttcttctcattttcttaataggatcattcacagaagttttaaattttgatgagatagtttatcagtttatttaatgacttatgcttctgatgtcatgtccaagaacactttgtaaagctctaggtcctgaatactttctctagtgttatctcctaaacgttttatagttccatattttacatttaagtgtgtgatccagtttgagtttattttttgtataaggtatgaagtttagaatgaagttcatttttttggcttaagaatactgcttttttacagtgttctatatttgaaa

SEQ ID NO: 297402 - DNA, 593 bp, Homo sapiens
ctttttttgttttccatttgcttgatagatcttcctctatccctttattttgatcctacatgtgtacctgcacatgagatgggtttcctggatacagctcactgatgggtcttgactctttatccaatttgccattctgtgtcttttaattrgagcatttagcccatttacatttaaggttaatattgaaaaaaaagaattattattactttttactgttgagttttgaatgttctttacatattcaagtgctttgccagatccgtgatttgcaaatattttctccagtgtatcgtttttcttctcattttcttaataggatcattcacagaagttttaaattttgatgagatagtttatcagtttatttaatgacttatgcttctgatgtcatgtccaagaacactttgtaaagctctaggtcctgaatactttctctagtgttatctcctaaacgttttatagttccatattttacatttaagtgtgtgatccagtttgagtttattttttgtataaggtatgaagtttagaatgaagttcatttttttggcttaagaatactgcttttttacagtgttctatatttgaaa

SEQ ID NO: 297403 - DNA, 550 bp, Homo sapiens
aacacgaatgaccaaggaactctatcgtattctattttactcatgctacttccctatattagccaactactattgctaaatatgatgatttaaaaggaaagggaaagatagggcmacccgtagtagttactcctttcagtcctttcatcagtgaactgaaagtagagactgttggtagaatgtggacatatcaaaaagtgaaatagaaaatacttgaattagctttgtgcagcatttccattcttctggtaagcagaaaatacatatgcatgtataagctatgaaatacaaattgtgtaattttggtgactgtgaatatgagttaaatcctttttgagataggatcttgctctatctcccaggctggagtgcagtggtgcaatcatggctcactgcagccttgacctctgaggcaaaagtgattcttctacctaagcctcctgagtagctgggtccagaggtgtgcaccaccacacttggctgatttttatttatatatattttgtagagacagggtcttttaatgttgcccagtctggtctcaaacccc

SEQ ID NO: 297404 - DNA, 550 bp, Homo sapiens
aacacgaatgaccaaggaactctatcgtattctattttactcatgctacttccctatattagccaactactattgctaaatatgatgatttaaaaggaaagggaaagatagggccacccgtagtagttactcctttcagtcctttcatcagtgaactgaaagtagagactgttggtagaatgtggacatatcaaaaagtgaaatagaaaatacttgaattagctttgtgcagcatttccaytcttctggtaagcagaaaatacatatgcatgtataagctatgaaatacaaattgtgtaattttggtgactgtgaatatgagttaaatcctttttgagataggatcttgctctatctcccaggctggagtgcagtggtgcaatcatggctcactgcagccttgacctctgaggcaaaagtgattcttctacctaagcctcctgagtagctgggtccagaggtgtgcaccaccacacttggctgatttttatttatatatattttgtagagacagggtcttttaatgttgcccagtctggtctcaaacccc

SEQ ID NO: 297405 - DNA, 623 bp, Homo sapiens
ataaaaatgaacagtaaagttcatactaataatttcaatttttaattattccttatatagaacaacattaaatagcaagtagaagataccatggtgagagagagaaagagaaagatatatatgtaagagagacagagcatgtgaatgcaccaacgaatgaaaacrctttttacgttaacagtactttctccctgctttttcaaagagaggtcccacattttcattttgcactaggccccacaaattatgtagctgtctctggctgtatgtttgacatttttcataatatacttttgggtaatgtcttacctgttctttaaatactcacacaacaccctatgaagttttttcttgacatttcatatcaaaccactaatttttaagccctttagtgattagtagaaaggtcagctttgttattacatggctgtgtaactattgagaatgctttatctctctctaggtttgtgtctttacttgtacaatgaagaggttggatgagatggttctttcttaagttccttcagattgggacactgtgattctctcatttatataatttaaagaccttttccatctacagctgagtgacattggttatgtgtaaacgtcatgtcctttta

SEQ ID NO: 297406 - DNA, 558 bp, Homo sapiens
atctgggccccttccacttcatcctccacactgccaaaataattttaaaatataaatctgattatggtactcgaggtgcttaaggccctacaatggctactgatatgatttggctctgtgtccccaacccacaattgttgaattgtaatcctcatgtgtcaggggagggacttggtggaaggagattggatcatgagggtggatttcccccatgctgttctcatgatagcgagtgagttctcatgagatctgatggtttaaaagtttggcacttctccccttgctctctctctcctgcttccatgtaagacgtgccttgcttccccttctgccatgtttgtaaatttcctgaggcctccccagccttacagaactgtaagtcaaacctcttttctttataaattacccagtcttaggtagttctttatagcagtgtgaaaacagactaatacacctgmccattgcctttaaaataaatctcaaattcctttcagggcccacaaggccttatatgattctgtccctacttatttcagaagccttgttttttgccacccc

SEQ ID NO: 297407 - DNA, 571 bp, Homo sapiens
ataatcccatttgtttatttttactttggttgtctgtgctttcgtggtcttattcaaaaagtatttttccagaccaatatcctagactgtttcccctgggttttcttctagtagttttgtagtcttgggtcttacatttatgtctttgattcattttgagttgatttttctrtaggatgagaggtgtgggtctagtcttatatttctacacatggatacctagtttgaaagcaccatttattgaagagactattctttccccaatgaatgttcttggcacttttgtaaaacacaagttggctgtagattcttatattaatttctgggttatttcctctctttcattggtctgtgtgtctatttttataccagtaccatgctgtgcttgttactgtagctttgcagtacattttgaaacatggtagtgtgatagctccagcttgttctttttgctcaggatggctttggctattctgggtcttttgtggttccacaaaaatttttaggattttttttcctatttctgtgaagaatgtcattagtattttgatagagattaccttgaatccag

SEQ ID NO: 297408 - DNA, 571 bp, Homo sapiens
ataatcccatttgtttatttttactttggttgtctgtgctttcgtggtcttattcaaaaagtatttttccagaccaatatcctagactgtttcccctgggttttcttctagtagttttgtagtcttgggtcttacatttatgtctttgattcattttgagttgatttttctataggatgagaggtgtgggtctagtcttatatttctacacatggatacctagtttgaaagcaccatttattgaagagactattctttccccaatgaatgttcttggcacttttgtaaaacacaagttggctgtagattcttatattaatttctgggttatttcctctctttcattggtctgtgtgtctatttttataccagtaccatgctgtgcttgttactgtagctttgcagtacattttgaaacatggtagtgtgatarctccagcttgttctttttgctcaggatggctttggctattctgggtcttttgtggttccacaaaaatttttaggattttttttcctatttctgtgaagaatgtcattagtattttgatagagattaccttgaatccag

SEQ ID NO: 297409 - DNA, 525 bp, Homo sapiens
ctatacactaacaacagtcatgctgagaattaaatcaagaactcaatcccttttacaacggctgcaagaaaaccctaggaatatacttaaccaaggaggtgacagatatctacaaaargaactacaaaacactgctgaaagaaattatagataacacaaacaaatggaagcatattacatattcatggattggaagaatcaatattgtgaaaatgaccagatggctgaaagtaatttacagatttaatgcaattcccatcaaaatatgaatatcattttttactgaattagaaaaagcaattctgaaatttatatggaataaaaagggcccaaatagccaaagtaatcctaagcaaaaagaacaattcagggaacattgcattgccacacttaaaattatacaacaaggctatagtcacaaaaacagcatggtactgttataaaagtagatacatagaccaaatggaccagaatagagaatccagaagtaaaccaaatatgtgcaaccaactgatcattggcaag

SEQ ID NO: 297410 - DNA, 514 bp, Homo sapiens
tgggtgcaccaaaatctcacaattagccactatataattcatccatgaaacaaaaaaccacttgtaccccaaaagctatgtaaataaaatatatatatttttaaaaatttaaaaagaaccaacttaagtgcccattgactaatgggtggataaagaaaatgtgatacatatacacacaatggagtactattcagccataaaaaagaatgagatcttgtcatttgcaactacatrgatggtactggacatcattatgtttagagaaataagccagagacagaaagacaaactttgcatattctcccttatttgtgggatgtaaaaatcaaaacaattgatctaatggacataaagagtagaaggatggtcataagaggctgggaaggttagtggggtggggttgatggggaaaggtggggatagttaatatgtacaaagtagaaaagaatgaataagacctaatatttgataacaccacagggtgaatatagtaaataataatttaattgtacat

SEQ ID NO: 297411 - DNA, 1149 bp, Homo sapiens
tctttcagttattttaaaatgtacaactaaattattgactatagttaagtggttgtgctatcaaataataggtcttattcatttactctagttacctttttgtacacattaacaatccccacatctctcccgcccaaccactacctttcctagcctctggtaaccacctttctactctctatctccatgagatcaattgttttaatttttaaatcccacaagtaagtgtaaacatgtgstttgtccttttgtgcctggcttatttcatttaacataatgagctccagtttcattcataatgttgcaaatgactaaatctcattcttttttatggctgaatagtagcgtgtaagtacattttctttattcattcatatgtagatgaacacttaggttgcttccaaatcttggcaattgtgaagacagctgcaacaaacatgagagtgcagatatatcttcaatatactaatttttttttcttttgggtctatacccagcaatgagattgttggaacatatgatagctctagtgttataaaatagagctgtccaagttgttcttcctagtagwcaaatgactaaatctcattcttttttatggctgaatagtagcgtgtaagtacattttctttattcattcatatgtagatgaacacttaggttgcttccaaatcttggcaattgtgaagacagctgcaacaaacatgagagtgcagatatatcttcaatatactawtttttttttcttttgggtctatacccagcaatgagattgttggaacatatgatagctctagtgttataaaatagagctgtccaagttgttcttcctagtagttttactaatacacactcccaccaagagtgtatgtgtgttcccttttctccatatcctcaccaacatttgttattgcctgtcttttggatatgagccattttaattggggtgggattatatctcattatagttttgatttgcatttctctgatgaacaaaggtattgagtaccaattcatatccctgttttccatttgtaggtcttcttttgagaaatgtctattcatatctttcacccatatttaaatcgtattattagaatttttttctatagagttgttcaagcttctcatatattcccattaataatt

SEQ ID NO: 297412 - DNA, 592 bp, Homo sapiens
tatagggcatggtgcacatgcacacaagtgctggtgggataagtatggcaaaatttctccatgcatatacacactggcaaagtgatgtggggggattgccatgggcctagggaaagctgcagtgatgggagagagcagatgggctggtcagtggcatggagacaaacctactggagctttctgtcagttaggcatggtcttttagtgcaagaggtatgatgtgggtcctcagggaacttaaggctgcactgcaagtaggtgtggccaggatggggtccygatagaggccagcagaccaagaggtgctcaggtcagactgaccccatttgaagggcaagaccaccctgcagatttcaggtgtagaagttcccttagggctaaagttttctatggaagcaagttgagcccaggaggatgggagtccttagccatgttctgccacagacactcccacaccaaaccctctgggcttgacactggctgcccctaccacttctctaaacagctcttcctgccaacataagagtctggtggttgagaggtctcctcctgacaggattccagaggtccatggcaaaagcaggttgctctc

SEQ ID NO: 297413 - DNA, 588 bp, Homo sapiens
actgtttgtctattgactgcttttaaatctaatttttatgtaattttaaaagaccttattattggctgtgtatggtctctgaaatttctgtttctttagttgatggtcagctagcaatttgacagatttttcttaaacagttggactgaaaaagacacaaaactgttccattctttgcagactgtctttgttttgggccactcctttaagattaaggtggtccagttaacactctgtcttagccttcacttcctgctttcacagagcrtaaagattagccagagatgagaggtaagttcttttgaggtattttctgaacatgtaccctatcttgggcaggtgtgtggctcttactttctatcttttagtttggataatttctattaacttttctccaatttatttttattttattttaaagttctggggtatttgtgcagaatgtgcagatttgttacataggtaaaagtgtgccatggtggtttgctgcacctatcaacccatcacctaggtattaagcctggtatgcattagttattttcctgatgtgctctccccactgccctcctctgacaggccccaatgtgt

SEQ ID NO: 297414 - DNA, 528 bp, Homo sapiens
attcaccattctagatgtcattaagaagatttgtaattcatgggaggaggtcaaaatgtcaacattaactaaagtttagaggaagttgattccaactctcatgaatgactttgaggggtttgaggcttgtggcttaaaacaacagcaaaaggtagtaattgctggtttagactgttctcctgccttcttcccccytttaaatagataagttgtacctatttctcagtgcacagctttctatgatgtattatagttatgaatatatttttagtgggaagagttttggagacggacatatacaagttttaatcttggttctatcactcagtagttttgtggccttggacaacacactgaaccctttttaagctttattggaaaaagactgatggtaatacccatcccatggatttgttggattcaattaaatgagataaaatatgttaaacaccattttttgcctggcagataataggtgcccaatacatgtaaattttattatctgcaagtagcagaaaacctgattaa

SEQ ID NO: 297415 - DNA, 596 bp, Homo sapiens
ggataaatggtacttacattttgacagtgtatgaagtgcataattttagaggatgtaacaattttatataaaggagaccttagtatacatttttgtcatctttgctcaatagatccactgataatttccataattgatgtcagtatttaaaaggcctcagtttttgaaaagaatgaaaggtagatttatgatttcagtttttttaagtttcatttcccaaaaktttattattctgctttggtttaataggtaagtaggacttttcacacaccattgcatgtacctctgtgattttaaacttaaattgttcccttatggcaaactgtatccatttgcagcccctgatgaactttgaacaaatcattctggtttattaaattgtacattctaatccagaagaatccaagactcatgtcataaaacgcatctgcttgctgtgaaatggtgtcagattttattctgattcagaaatttatttgatctttgtctctgtctctctgaaggatgtgactcatttgtgatattgtcagaagtgtaacttttatatttgctgctttttttccaaacattttagtgatatatttataactattatc

SEQ ID NO: 297416 - DNA, 596 bp, Homo sapiens
ggataaatggtacttacattttgacagtgtatgaagtgcataattttagaggatgtaacaattttatataaaggagaccttagtatacatttttgtcatctttgctcaatagatccactgataatttccataattgatgtcagtatttaaaaggcctcagtttttgaaaagaatgaaaggtagatttatgatttcagtttttttaagtttcatttcccaaaattttattattctgctttggtttaataggtaagtaggacttttcacacaccattgcatgtacctctgtgattttaaacttaaattgttcccttatggcaaactgtatccatttgcagcccctgatgaactttgaacaaatcattctggtttattaaattgtacattctaatccagaagaatccaagactcatgycataaaacgcatctgcttgctgtgaaatggtgtcagattttattctgattcagaaatttatttgatctttgtctctgtctctctgaaggatgtgactcatttgtgatattgtcagaagtgtaacttttatatttgctgctttttttccaaacattttagtgatatatttataactattatc

SEQ ID NO: 297417 - DNA, 475 bp, Homo sapiens
tttgatcttctcaataccactttgaggtatactacatgaartaaaattgtagaatcatgtcatacgagttcaagtccagtgttattccctctgcactgtgagtctgaaggacagtctatgtgcaggctgtaaagaagaaatcaaagacaaccacactctcagctatactcctacacatgaataaagttacttttagcaatataatttttaaaaaataaataacatatttctaatttaaaacgatgcctagctagtatcccctcatgcaactgcttctaattctccattagcatacctacgaagtcacagtaaaaaatgaaaatgaatattaccattgaaatcacagatgactgataaccttttgctaggatcttagaggcatgtgcactgacaatagaatcaatgaaggtgcctgtaaccccagcactttgggaggccggggcgggcggatcatctgaggttgggagctcgagat

SEQ ID NO: 297418 - DNA, 489 bp, Homo sapiens
agagggcaagcagacaatccaaaccatgcagccttgcctaatatttcttgtatcacagtccattaaccaaaggaaatcacaggaccaagtcccaagtcactggagcagggaagtatatgtcatctggaagagaaagaagggagaatgaagaaagtatttctaacacaaattcaatctatcacatattacttggacaatgctatagattgaatgttttcctttgttatcaatattgcacatgcttaatctgcacgtcagtgtgtatatatatctcagatctatacagaatataaacagaggcatattataaattatcaagtagtgtttctgtttttatggataatatttgaatgtygatagtaatttttaaattaaaaaatgggtttctattatttggaggaataactctaataaggcttaaaattattttaaaacaagataggttacttagtaacaaacatacacaaatataaaaattaaattgtattg

SEQ ID NO: 297419 - DNA, 241 bp, Homo sapiens
gctactctttgtagttatagtcacatctccccttttctccctcccaaaaacctggaaccacaaatgattttcctattgctataattttgttaggagatgaatattttaatagcttttttttttttactttaacatgtattgggaaaaattagccctctaaaaccatgatttcagagayattgcttgggatcaaaataacttggatatttaagtttttaaaaagtagtcaatttaaagaaac

SEQ ID NO: 297420 - DNA, 602 bp, Homo sapiens
tcttacagcttagattttagcagggcatcagcagtatcttctaaatggggaatgtcatttttaaaaatttgtatttagtatactacatatagtagtattcactttttctggtgtacagttgcatgcattttatttaacatgtgcatagattcttgtaactaccactgcaaacaggaaatagaacaattctaatatcccaaagaatttccttgtgtctatcctttgttgttagactcttcccctatccctaactcctggcaatcattggtcttttctctgttcctatagtgttgccttgtccaaaatgtcatataaagggaattgttcaattatgtagtcatttgctggtttaggtttcgagctatgaaaccttacaagctattataaaagtgcatccagactaggctatcaaaagtaagctaagctcagattcagtgggagacaggattagttttggccaaccatatgctttctgttcattctttgtgacatgaggttgacaagataatgttctaataaatgctttttttttaaattaggcctttcttaagggcatcagtagctttctttcatcaatggractaagctttattccataatcc

SEQ ID NO: 297421 - DNA, 582 bp, Homo sapiens
tgacctttgtgctttatccccatccatttcctctctatatactgctgtctctacacaggtggcccctgaagactggtcactttaagaaaacactccccagtaattctgcttttgcctgataaacaaagcaatccccacccctggatcagcaatgccattgccttctgctgtactggggtaactgggcccttatgaagaaagctgcatgagcaaggaagggtggttcaaagagcctcagtaacagccacttaccccatttccctctctcccttctcagttttctacttccaaatattcccaatggcaacccctttgaaaacaaatgtatacttactcttcttactctcccttgagtrtgtatagttggagatgaccaaggtctgctttaggagaggttaacaaaaagaaacagacacaatagaattgttaattaaaaagtgtaaaaagtagcatcaagtgattcaaaatacaaaaattggcctaataagtaaagcattttaataagtaatagttatttttatgttgtatgtaagaaaataaaaaataatcaagaaccatgtccttaggtagtaagtaaaattt

SEQ ID NO: 297422 - DNA, 396 bp, Homo sapiens
atgtatacttactcttcttactctcccttgagtatgtatagttggagatgaccaaggtctgctttaggagaggttaacaaaaagaaacagacacaayagaattgttaattaaaaagtgtaaaaagtagcatcaagtgattcaaaatacaaaaattggcctaataagtaaagcattttaataagtaatagttatttttatgttgtatgtaagaaaataaaaaataatcaagaaccatgtccttaggtagtaagtaaaatttcctcttttgtaaagagcagagtgaaatatggatagaaagatgataaatgagtacagcagctgctacattggtttgaaaactagtaatgcaatagtaatgagcccaaaggatgaacccaatgggctttcacaggttg

SEQ ID NO: 297423 - DNA, 396 bp, Homo sapiens
atgtatacttactcttcttactctcccttgagtatgtatagttggagatgaccaaggtctgctttaggagaggttaacaaaaagaaacagacacaatagaattgttaattaaaaagtgtaaaaagtagcatmaagtgattcaaaatacaaaaattggcctaataagtaaagcattttaataagtaatagttatttttatgttgtatgtaagaaaataaaaaataatcaagaaccatgtccttaggtagtaagtaaaatttcctcttttgtaaagagcagagtgaaatatggatagaaagatgataaatgagtacagcagctgctacattggtttgaaaactagtaatgcaatagtaatgagcccaaaggatgaacccaatgggctttcacaggttg

SEQ ID NO: 297424 - DNA, 396 bp, Homo sapiens
atgtatacttactcttcttactctcccttgagtatgtatagttggagatgaccaaggtctgctttaggagaggttaacaaaaagaaacagacacaatagaattgttaattaaaaagtgtaaaaagtagcatcaagtgattcaaaatacaaaaattggcctaataagtaaakcattttaataagtaatagttatttttatgttgtatgtaagaaaataaaaaataatcaagaaccatgtccttaggtagtaagtaaaatttcctcttttgtaaagagcagagtgaaatatggatagaaagatgataaatgagtacagcagctgctacattggtttgaaaactagtaatgcaatagtaatgagcccaaaggatgaacccaatgggctttcacaggttg

SEQ ID NO: 297425 - DNA, 646 bp, Homo sapiens
tgattcaaaatacaaaaattggcctaataagtaaagcattttaataagtaatagttatttttatgttgtatgtaagaaaataaaaaataatcaagaaccatgtccttaggtagtaagtaaaatttcctcttttgtaaagagcagagtgaaatatggatagaaagatgataaatgagtacagcagctgctacattggtttgaaaactagtaatgcaatagtaatgagcccaaaggatgaacccaatgggctttcacaggttgtctgatcataaaatattgaataaatatgatagccattgcccctccccaccagacagatagacatctgtgcaagtagccatctggcagrctttggtggatgaaattgtcatgctttactatcttggatttggtgagatcccaacaaaacacccaccaacccaatcactctccaaacaactatttttacaatacaagatgattatctgacatctctgctccacagatccctaacgtttagtcaggtaataccaattcattccaagtgtggtgtttgggattgtaactgacattgtcatgtgaaggtcatttgtttggtgtcagttgtccctattttgccagaaaaataaaaggatactttttgataatgataaccagttctattttt

SEQ ID NO: 297426 - DNA, 516 bp, Homo sapiens
ctacatcacaggaatgctatttattttttatttaacaaatgacatttaraaataccaatctgtgctatcactatgatttcaataaaaaatatttcaatgcccctggaaactagaaaaaatacagaacaaacagccctcctaaaaatgaagatctagcaacaatatctgaaccatgccatctatgtttttctcatttcactgaagacctatgaaaatgtagtacagataaacactggcccacaggctggcatttgaaaactcctctttgccatacccaacctatctcaaactctctttaagagcctccaggttgggaggccaaggcgggcggatcacttgaggtcaagagttcgagaccagcctgaccaacgtggagaaaccccgtctctactaaaaatacaaaataagctgggtgtggtggcgcatgcctgtaatcccagctgctcgggaggctgaggcagaagaattgcttgaaccggggaggcagaggttgccgtgagccgagatcatgccatt

SEQ ID NO: 297427 - DNA, 543 bp, Homo sapiens
ttgggttctataggtttactccagtggaggactggatctacttttcttttgcaaatgatttgttgtaatctacagacctatgtcccgcacgtggaaaataaaattaaataggaagaagaggccatggagaatctattgcattgttcagacttcggctgaagatggctgaaggtttcagtcrtctacttttggttagtcatttgagatgctgagtgactccaggaagtgatggtttatgggtaatgaaagacaaatacttctcctggggattgtgaatcctttacattcgagtaattttaattttttcatctggaactaaataatgcaaaattaatttcatatttttatctcttcatcatcctgtggtatttaaacacttttttaaaagtgtcttatttataagcctgcttcttaggagaaatctttactgatttagaatttataaaccaaaagaaggggtgcacaaccacaaaaagagtataagagaggaacaatagaagtgaccatgaccatccagactcaggaagatggacatgtacatct

SEQ ID NO: 297428 - DNA, 547 bp, Homo sapiens
ctccaaacaactacatataaagttttcttttaaactgtgacttggatattttacctaagtgacaaaccagagacttggaagcatcccaacatcttatattttcatattttattttttacatttaatgtcacatcactgtcattatcaatatttaagtcattgttataatcaataacttctattagaattctgggcagggcctgcttgctttctgacagctaattctttttgaaaatctgttctgattctaattcttttttttttkttttcccctctgtcatccaggctggagtgcagtggcgcaatctcggctcactgcaacctctgcctcctgggtttcaagccgttcattctcctgcctcagtcttccaagtagctgggattacaggtgcatgccaccacacccagctaatttttgtatttttggtagagacagggtttcgctatgttagctaggctgatctcaaactcctgacctcaagcgatctgcccacctcagcctcccaaagtgctgggattacaggcattgattctcactttttatagg

SEQ ID NO: 297429 - DNA, 1053 bp, Homo sapiens
atcccaagatttctctcttagaaccaaagtctaggctttcagttgaatgtcaagtcaggacatagaaaaagaaacatgacactcacgggtgtgctgctgtcggagaaggtgttcatgctgacagagctgctcagcttctctgaggagacagagggtggggacgggctcctcttccccaggggctcctgccgctgcaggtactctcgccatgctcgctgaatgctgaaaaaacaaaacaaaacaaaaaacagcacacacatgattactgttggatcatggyccacagactcagaaactcacaaggagtctgaaggaattggctttggtgccaagggaagtagaacatacagaatgtgatgtagtgaatcaggagacctgaactttaacttcaatccagccatggagactgtctccctaccttactggtttgactttcacagacttgactgcactcaaccggcctaaaagagtcaacttaataataaaattcatcagtcaaaacaaactagtttgcacaggtaaatgtwatcccaagatttctctcttagaaccaaagtctaggctttcagttgaatgtcaagtcaggacatagaaaaagaaacatgacactcacgggtgtgctgctgtcggagaaggtgttcatgctgacagagctgctcagcttctctgaggagacagagggtggggacgggctcctcttccccaggggctcctgccgctgcaggtactctcgccatgctcgctgaatgctgaaaaaacaaaacaaaacaaaaaacagcacacacatgattactgttggatcatggtccacagactcagaaactcacaaggagtctgaaggaattggctttggtgccaagggaagtagaacatacagaatgtgatgtagtgawtcaggagacctgaactttaacttcaatccagccatggagactgtctccctaccttactggtttgactttcacagacttgactgcactcaaccggcctaaaagagtcaacttaataataaaattcatcagtcaaaacaaactagtttgcacaggtaaatgt

SEQ ID NO: 297430 - DNA, 1104 bp, Homo sapiens
tttccctttaaatcgtcttcattattcagaacatacaaaaacaaaatatagtggccatttgagatactacattttagcttgttgaacaccagagggcggtgtgacacctctaaagaaccaaataacattgggcaaaactgagatgagaggtttgcaaaggaatttgcacttaaacatcctcttctccctcctggttttatggaatttggaaattggcataccagttctccttaagtcagatattaagaagacaayattattttcttcctagttaatggatatccttttcttttctaatttataaggtgacaatattaagtacttttaaaatatgtatttaaaacatctgtgcacccactgactttcttaatacaggagctgtttttttgtaatatttattttatagtcatccacatatgtgaaaacaatttattacacgatcttattatttttaaaacatactatgatatatatatttctcattactacttgtccttcataattacagttttgaggactagatgataagctggacaagtctttaaattagcatttggggtcaaaaaatgacagggccatcatgtcacaccaggctattacccaaaattgctacattgttttttaatgatggaactwaggcaggaagcaggaggatcccagagaagagcagtaagtctgaggctacaaagatggcaagaggctctcagaagccacctggggtcaggctgggggcagactgtgcagtggggcacagactgggcagtgtgggcaaccctgctttggtgcagttgataattggtttcaacttttcaagaacagccagaaatcttgawtttttatgagaaagtactattttttatatgttaccaaacaattataaaaaattcaaaatacattataactcaagtaggctgaatttagggatggacaaaagaggacaccatcagagaggatacattgaatctgagtatcttggaaacaatagctgacatacatagagctcttttttgtgttgattctctcattcaatccttaccacaagtgaactgtgagggaggcaccatgattatcacatgggtagattttgcgtgcccaatattaatt

SEQ ID NO: 297431 - DNA, 544 bp, Homo sapiens
agattgcatactagtctggcaattatttgtcatgagaaatgtattaagaatgatggataaytttaaggtccataaaaaatatgaggcctgttgtagtcctagaattccagagctaaattttcttcaagtcaaattagtattttgtttctgtttcttcttttggtgcagttgaggtatcctaataaatattcggcttagagcattccacttaaaatttttaatctttgtagatttatagtattgcgattccactgtcaaaatgacagatactgatatgtattttaaggtaatcttatatgattatttttcagtgcactgtatcagtcaatgccctgacaggtcataaaatgttacagctcataaagaaccagtatatactcaattttcaaggtacagcagaagaactataaattaaattgattacataactataaaataattagtccagtatttccagacaactttttaaaagaacttccctgccacagatcactgtttgaaaaggaactggtccctattaagtctgtccagttttgtacactgt

SEQ ID NO: 297432 - DNA, 544 bp, Homo sapiens
agattgcatactagtctggcaattatttgtcatgagaaatgtattaagaatgatggataattttaaggtccataaaaaatatgaggcctgttgtagtcctagaattccagagctaaattttcttcaagtcaaattagtattttgtttctgtttcttcttttggtgcagttgaggtatcctaataaatattcggcttagagcattccacttaaaatttttaatctttgtagatttatagtattgygattccactgtcaaaatgacagatactgatatgtattttaaggtaatcttatatgattatttttcagtgcactgtatcagtcaatgccctgacaggtcataaaatgttacagctcataaagaaccagtatatactcaattttcaaggtacagcagaagaactataaattaaattgattacataactataaaataattagtccagtatttccagacaactttttaaaagaacttccctgccacagatcactgtttgaaaaggaactggtccctattaagtctgtccagttttgtacactgt

SEQ ID NO: 297433 - DNA, 544 bp, Homo sapiens
agattgcatactagtctggcaattatttgtcatgagaaatgtattaagaatgatggataattttaaggtccataaaaaatatgaggcctgttgtagtcctagaattccagagctaaattttcttcaagtcaaattagtattttgtttctgtttcttcttttggtgcagttgaggtatcctaataaatattcggcttagagcattccacttaaaatttttaatctttgtagatttatagtattgcgattccactgtcaaaatgacagatactgatatgtattttaaggtaatcttatatgattatttttcagtgcactgtatcartcaatgccctgacaggtcataaaatgttacagctcataaagaaccagtatatactcaattttcaaggtacagcagaagaactataaattaaattgattacataactataaaataattagtccagtatttccagacaactttttaaaagaacttccctgccacagatcactgtttgaaaaggaactggtccctattaagtctgtccagttttgtacactgt

SEQ ID NO: 297434 - DNA, 555 bp, Homo sapiens
aattttacaagttttgcagttgatagtcttagatattccaggtagagtttcatactccttataaaaaaattataatttgctctccttctttccaatatttattccacattttttgcttttttattccactgcctaatcatcatcactgaataatgaatgtgtaccaggcattcttttcatgttctttacttcaagcctagyggaaattaccttaatattttgtcattaactgaataatttcttatgtttctaatagctcttctatttttttcagaaataaatttatatggcaaaaatggcaactattgagataactgaattttctgtccactccctttaaagtctatactgatatcacttgatattacttagagtaagcactggtatgtggatggtgtattacagggatcagcaaactacagctcagcccatggcccagtttaagctcaccaccatttttgtgtataatgtgtgtatctgtttgtgtggtgtgtgtgtaagaacacatgctcaattatttatgtatggtgtttgaccattatgcactgcaatggc

SEQ ID NO: 297435 - DNA, 501 bp, Homo sapiens
ttgctgcaaccacaggaatttcttgagctgacttaaatgaaagagaatttgataggcttaggtggtgttgatgcagggaggggacttgcagaattaacgggaagcctggagacctaggaagcagaagccccaaccaccatcctccagcaggaagggacaggttagggtgtgagcactaagtaatctgattgtttggtccttgtgtcgcccagctcaagattcaaagtcctggaagagaacatctaattcattgagcttcagtcatatgcctttctcctggctgtactcggacagagaggaaaaggatatggcttctggcatccctgrcatagcaagactacactcaagactacatcacatctttactgatttctaaaaagcttcctggacagatgaggggagaaggctagtgttggtcgcaggctgagggcggggtcccacctgtggctgagctgagtgagatagaagtgtgtagttgggggaggtgattaaagaaggaaa

SEQ ID NO: 297436 - DNA, 501 bp, Homo sapiens
ttgctgcaaccacaggaatttcttgagctgacttaaatgaaagagaatttgataggcttaggtggtgttgatgcagggaggggacttgcagaattaacgggaagcctggagacctaggaagcagaagccccaaccaccatcctccagcaggaagggacaggttagggtgtgagcactaagtaatctgattgtttggtccttgtgtcgcccagctcaagattcaaagtcctggaagagaacatctaattcattgagcttcagtcatatgcctttctcctggctgtactcggacagagaggaaaaggatatggcttctggcatccctggcatagcaagactacactcaagactacatcacatctttactgatttctaaaaagcttcctggacagatgaggggagaaggctagtgttggtcgcrggctgagggcggggtcccacctgtggctgagctgagtgagatagaagtgtgtagttgggggaggtgattaaagaaggaaa

SEQ ID NO: 297437 - DNA, 554 bp, Homo sapiens
tgtcattaacaaaatctctttctcctggctattttctcttacccagaaattaaataactccttttcctccttcattcaagatgtaagctcctggtgtcattggaggatttagggagggagttttcccttttcttgggtcatctagtatggagttgtttactgaagggactcagagcatggatttgagcatgtcagcagcagttatggagagtgtggtctgtgaggtgattgtgctccctttaaaggtgaggaaattgcagctcagtgagctgaagagtgataagaattcaaatttacagcagtaatgggggctggatattctgggtcttaggtcttctggtttagtgtgtgctccttctgtgacagcatggccacaaacatcacactcaattccactccctttcccagccgtctaccccatcaccaccctcccctcctaagaggtttgaaatttctgtcattagaagtaactcatgcatcaaactctaaaggtagcctcrtagtctccacaaggcactgttaagtgtggattgtagctgaaaagagaaagacag

SEQ ID NO: 297438 - DNA, 496 bp, Homo sapiens
gagccccaacctaaattacactgaaggtcttcctggagtgtccagccccaaccccaataatattgttactaatttgactaactcaagggcctcagccaaataaagattacctcacagcagctgaaggcaaaggccagacatcttttttggtagggttaaatcctttactacacagtctgataaagagaaggcagcaagctrtgtggaggggtttgcttcatgtgagtactctttgtgacatccaggaattaggatgacatgtttctctgtggcaggcaaattctggcaaattgactgtttctgcttccaaattataaaatgcttcaagtttcttttccttctccatctgcttctcctgtttctgttcttcttttcagtgttctctgcagccccctacccaaccctggacaccacctttcacttgtcagaaacattaagagaatgaactgagtgggcagtgccttaatttctctctgccacagatttttcttctttt

SEQ ID NO: 297439 - DNA, 622 bp, Homo sapiens
tggctttacaggcaaaaattttgaggtcaggtaggccaaacatcttgctcaagatcgcagacctaataaatgatcaaatcaggatttgaactcaaatcygtctcccaagtccatattctttccattaaatcatgttaatttttacattgtaatgctctagatacttcttctatttcactgtttatgaaattaaatggccttaatctttttatttttctagaaataaatgtgttcacaggtggcatctagaaattcaataaatattcagtctccaggaatatgagccctgcaaggtttggtgtggagcctgctgagaagagcctatgactttctagtggaatttttatgctttgggttagatcatgggaatgaatatccatggttagtttgtgatgcatctaagctgtggaatttcaatgagtatccatcagtttgacagtcaaaaggatatatatgagggccttgggggtgggcagggtgaagcaatttggaaatataagcagtaaattttcacacatcactgattgtgacagtgaaatgattatccatcaattacaaagcagttaagtagatatgtttctgggtttttactgcactgtttatgtatccagttctcctggaa

SEQ ID NO: 297440 - DNA, 622 bp, Homo sapiens
tggctttacaggcaaaaattttgaggtcaggtaggccaaacatcttgctcaagatcgcagacctaataaatgatcaaatcaggatttgaactcaaatccgtctcccaagtccatattctttccattaaatcatgttaatttttacattgtaatgctctagatacttcttctatttcactgtttatgaaattaaatggccttaatctttttatttttctagaaataaatgtgttcacaggtggcatctagaaatkcaataaatattcagtctccaggaatatgagccctgcaaggtttggtgtggagcctgctgagaagagcctatgactttctagtggaatttttatgctttgggttagatcatgggaatgaatatccatggttagtttgtgatgcatctaagctgtggaatttcaatgagtatccatcagtttgacagtcaaaaggatatatatgagggccttgggggtgggcagggtgaagcaatttggaaatataagcagtaaattttcacacatcactgattgtgacagtgaaatgattatccatcaattacaaagcagttaagtagatatgtttctgggtttttactgcactgtttatgtatccagttctcctggaa

SEQ ID NO: 297441 - DNA, 555 bp, Homo sapiens
ggcagctaggttaattccatgtcgtttctattgtgaatagcatggcaatgaacatacaagtgcatgtgtcttttttgatatttttaatgaatatctattggatattcctcttaacacttaagttattgctgtatgcacttaagaattatgctggatgctaaaatttatgatacttgatgtatccaggagattataatacaagctcagaaaacccagcatctactgggtctgataagcaatcaagtgtagaagtaagctttcccttccctaaacagtgatgcctgcttcatacaatctcacacagaaagaaggcattagacatagatggatttcaccttcctccctgacaagygatgaggaaatataataaaggcctatggcatttaaaagaagaatgctaccttcacaagtacttttttaaaaactttatccattgtaaatagaactcatactattacatactttctagccatattaatttaaaaattacacgatattcactttctgtcttatccagggtagtgtttgtcaacttctccacccagaaatctcaaa

SEQ ID NO: 297442 - DNA, 575 bp, Homo sapiens
tcatttctgctataagaccttggacaagttacttattctcctaggtatgttttcttatccaagaaatgggaataataatggcatattttgctatttttataaggcttctgtgataatttttaagagataattcatgcaacatgcctggagcctagtaaaattcaattaatgttagtagtaataaaaatagttcaaagaaatgacatagaattagttgcagaaggaaatactaaaatatataaaatcacatttcaaatgaattttgaagaatttcagaaggtataagagaagcaatcctgtggctagggagttaggaatgtttttaatcccgaagattgtttttgtttaagttagcagtagtgtttatgagcagaagagttaaattattggagatggrcccggcacggtgattcatgcctgtaatcccagcactttgggaggccaaggcaaaaacattgcttgagaccaggagatagagaccagcctgtataaccctgtctctacaataataaaaataatgttttaaattgttgaatatgtacttaaagaaaagcaattaggcagcacaatgaaat

SEQ ID NO: 297443 - DNA, 575 bp, Homo sapiens
tcatttctgctataagaccttggacaagttacttattctcctaggtatgttttcttatccaagaaatgggaataataatggcatattttgctatttttataaggcttctgtgataatttttaagagataattcatgcaacatgcctggagcctagtaaaattcaattaatgttagtagtaataaaaatagttcaaagaaatgacatagaattagttgcagaaggaaatactaaaatatataaaatcacatttcaaatgaattttgaagaatttcagaaggtataagagaagcaatcctgtggctagggagttaggaatgtttttaatcccgaagattgtttttgtttaagttagcagtagtgtttatgagcagaagagttaaattattggagatgggccmggcacggtgattcatgcctgtaatcccagcactttgggaggccaaggcaaaaacattgcttgagaccaggagatagagaccagcctgtataaccctgtctctacaataataaaaataatgttttaaattgttgaatatgtacttaaagaaaagcaattaggcagcacaatgaaat

SEQ ID NO: 297444 - DNA, 612 bp, Homo sapiens
aagcacctcttcaataactcattttgggaataagcacatcaaagtgagtaagttaccatccctgaccttgaagagctgagtgggggaggcaggtaaagagtaaataytaaaaataaggatcaccagaggttgctgaggaaggagggtggggtacccaactttctttttgggttagaaatatctgcttgaaggaggggaaaattggggtcttcccgaaagaagaatggtgtggatcagtagaagagttagaggcatgttgtcactgaaatgtccagtgggcacgtgagttctgggattttgttatgaatcatttgactgggctcagagaagaagtgtgtgcaggggccaatgaggtggagtggggagaggcaggctgggctttgtcacacagaccttggctgaggagtttggaatctaacctgacagcaacagggagctagtagaaaaatggcattgtcttctagtaagaaaatgatattgccagatataaaatcagagacaaatgggactagcaagagaaaccaatgatggggtagatctatttgtgtttgcttttaatagtaaaataaaacaaagctttctcaaaggatgaaactatgagtgaagatctgt

SEQ ID NO: 297445 - DNA, 615 bp, Homo sapiens
taactgagaccaaatagtgttcactaattaaggtcctattgagtttggtaacttctttatgcatcaattccatatgtcctacactgtagacagtatctctgccacaacactagattttagaaagaaatgagaccttatccgagaccttatcctcacctgttcaagtcaccgtaattattaagataagaattagcagtatttttccatagattttacactttctcctcaactctgctttgatatttctgaagattttctttccagaaaaatatttgttttaatgtctccagtttgatagttgaagcaacacacttgtaagccagaagtaaatcataaatcattcgtctgtaagtttacaccacaatctttgatatttgaagagaggttatacatacacatacacacatgcaatcagatgtctttcccagaaaatgttaraacaaaatttgtcttaccagtctgggaaagttggcttctgtgggcattatgaaagctggaattgctttgatgtgattctgaatccaaatggccttttaatctaagcctctctatcatctccatctatgtgtttgtaataaatacatcaatttatgtgggatacattctttttatact

SEQ ID NO: 297446 - DNA, 561 bp, Homo sapiens
attagatggcatagaagaatatttttttttatgacagaaagttctcttggacaattgtgccctagaagtatgaggatgaccaatatttgactcctgcccttgaggaatttatggtcttagaaggcagaggaacatgtaaggaaggaagaaagttagtggggctgtgacagaagtatgtcagcacactgttgtgggaactgaggatagggtgatgaggcctaaaagagacagtggtcaaatatagtaggatgaaggaagaacagcttttcaaaaaggctatgtagagggtggaacatgatcagagtcttaaaagatatgtagttttacctcaggtggaaaagggtggaaaaaggcattataagcaaaagtagaagtgcgaaccaagaagggagatgcagtgtggagcgttgggagaaatgcccctgttgtagcctggctggagtgtgctgccagagctaagccccaagaggcagrtgggccaggctgggtgtttgggcaccacaccaggggtcaagacttgtcttctgggctgtgagaaatcagcgaatggttttaaacaag

SEQ ID NO: 297447 - DNA, 600 bp, Homo sapiens
ctacgcaccagggcctatgctctcttggctctttccataggtctcttctcaaatacccataactttgcagactgtcaagaatgtcaatgttctcacacatgagaatttgggcaatttgggtcctggatctataacactcttttctttatgaggactgagaaggtgcttcagaaataatgcacccagggttactgagtctaagaaagaaaatagtggtcctgcaatactattaaacatccaaaaagaagagtatcagattaggctaatccaaatgcttcttttcaaacaagtcctcttcccccactagaatgtaaaatccttgagggcagtgaccactccacagttctgggatatatgacaagtaggtgattaacaaatgtaattcttctaacattgcatcccagaaatagctcaaagaagaaaaagttttatctcatgataaagtrtgcttagagtcatagaggttcttgcctagtttacctctcatgagctgtagctttagacaaaatactaaacacactggcctccctctttcttatccataaaataggagtaagaataacttctttgtaacccctgcaagaagtcaaggataatgta

SEQ ID NO: 297448 - DNA, 361 bp, Homo sapiens
acggtcataaatatttttgaaattgcttccaaggtaattataacaggccccttctctacttaaaatggttttagaaggttaatattttgttctataataaagtctttctcaatttggatcttgttagtttcattttgttaatattgagatgttgttagcactattttaaggtaatagtcatttataatgggggaggaggcttacatttgggtatcttaacagacaataagaagaaaaggataagaagtgagaaaaraagaagagaagaaacattttcccaaaataattgaaaagaagctgaaatagaaagaagaggatttttaaaagggtgtgtgtgtgtgtgatacatagatggcttgag

SEQ ID NO: 297449 - DNA, 536 bp, Homo sapiens
tatcaggctattatgggctgtctcatttaatgctctcaataagactgtcaagtcaagactactattctcatttttaaagataagtatagtggggctcaagatggttaaamattttgtctggactgacaaagctaagaaagagtagaaagaggcatcagacccaaagttttcaattttccaggatattttttaacaacatttcagatgtatggtcatttacactcttcttgggcacttccagtatcttatcagctactggggctcagcacatactgtaaagtatggtgtttggcatgctgagttctttgaaccgaaggagaaaaggcctcagaagcaaagtcactttctctctgaccttctcttgcccttctgtccctgtccctctttcttccatgatgcaagccataaaaaccagaattcctcttccacaaggcaggtcatagaaactagaacccttctcccccaaacaagctacaaaaactaaaaatattcctctaaccttcccctgcttttctgtgtaaaatctggtcataaac

SEQ ID NO: 297450 - DNA, 562 bp, Homo sapiens
agttcatttacattcaggtgtatggtcaattaatttttgggtatggtgtgtggtaagaattgagatcaattyttcttcatatgaatatgagcataagtctactaaatggggcttccatataaactattgtttttctgataccaaaaaaaaaaaaaaaagattcagctggcatgtggcttttaatgtttggtcttccttcttcttcctgcctggatcatagtagtgaaatccagggtgcaaaagccattgtgcctataaggaggaaaaccacacattaaagataataaaatagaaagaccgaaggtacctgggaccctgatgaaaccatggagctgctgcttcaactctgatctaccaacatctgaacatgcttgtcatgcaagatcaacctactaatttcttgattcatcatagttaaacaaatatagataagtgatgttttcttcttcataattcagtggttttccatcacttttggaatgaaatccaaactcatcaccatggcctatagagccgtatgtaacacgaacccccacctatctctctgacctcatttcctgcc

SEQ ID NO: 297451 - DNA, 634 bp, Homo sapiens
taggtatgtacaccataggaatcaaaagcattatctgggcctctatattagcctacagccaagtgtcctgcctgaggcactggtcagttccacaaagttgtttggggataataaatacaaattttagtcataaaatatctaagaagttaaatagaaaaacatattaaaggtaataactcatcataattttaaattttacatgtttacttttcaaattacagttaaataatttattaataaaatgtctgttaatgaaacagcaaaaaaattggyatttatttatatttttgttttttagagagagagtttcactctgtgcagttgtatgatcataactcctggctaattaaaaaaaaattacaaagatggggtcttgttgtattgcccaggttggtcttgaactcctgtcttcaagaaatcatgcagccttagcctcccaaagcactaagattaacagagtgaactactgtgtctggccacagcccagcatttattattctcccttgccattacctggttataactttatcacaacagctttcttttcaattgcgtcgcagtgctgaaatgaaaagcccttaattttgttgttgtcactgttcctgtcatccctaacaagatgccatacaatgtg

SEQ ID NO: 297452 - DNA, 587 bp, Homo sapiens
tagtcgaagcagtccttccctgattaagtttgtcattcatatttcagcctgtactgtatgacagtaattcaatcctaacaaccaccttggagagccatctgtagaaatgaaaggcagtgaaaacacttgattaaggagaattatttcctgcatttattcatctcctttgatccacttaaaataatttatgagattgagtttcattgaaataatataattaaatataatattaattttcactaaactttaaaaggaacaagaagaccacatctgttttgttggactctatatcatatagaagacactgtgttaatatttacagacctctaaratgattatttttcactctgctacttgttttcttgtgatcctgggctgctgacctctgtgagcctcaatttactcatctataaaagtggatatatgacagtgaaccaacatagctattcaattaatgttacaatctcagaatacaattggtagattcaagcaaataaggatctatctactaccgaatacgtgacctagaacaagttacttgaccttatttgtgctttttaagaaagttttaattatgtatagtgatt

SEQ ID NO: 297453 - DNA, 587 bp, Homo sapiens
tagtcgaagcagtccttccctgattaagtttgtcattcatatttcagcctgtactgtatgacagtaattcaatcctaacaaccaccttggagagccatctgtagaaatgaaaggcagtgaaaacacttgattaaggagaattatttcctgcatttattcatctcctttgatccacttaaaataatttatgagattgagtttcattgaaataatataattaaatataatattaattttcactaaactttaaaaggaacaagaagaccacatctgttttgttggactctatatcatatagaagacactgtgttaatatttacagacctctaagatgattatttttcactctgctacttgttttcttgtgatcctgggctgctgacctctgtgagcctcaatttactyatctataaaagtggatatatgacagtgaaccaacatagctattcaattaatgttacaatctcagaatacaattggtagattcaagcaaataaggatctatctactaccgaatacgtgacctagaacaagttacttgaccttatttgtgctttttaagaaagttttaattatgtatagtgatt

SEQ ID NO: 297454 - DNA, 587 bp, Homo sapiens
tagtcgaagcagtccttccctgattaagtttgtcattcatatttcagcctgtactgtatgacagtaattcaatcctaacaaccaccttggagagccatctgtagaaatgaaaggcagtgaaaacacttgattaaggagaattatttcctgcatttattcatctcctttgatccacttaaaataatttatgagattgagtttcattgaaataatataattaaatataatattaattttcactaaactttaaaaggaacaagaagaccacatctgttttgttggactctatatcatatagaagacactgtgttaatatttacagacctctaagatgattatttttcactctgctacttgttttcttgtgatcctgggctgctgacctctgtgagcctcaatttactcatctataaaagtggatatatgacagtgaaccaacatagytattcaattaatgttacaatctcagaatacaattggtagattcaagcaaataaggatctatctactaccgaatacgtgacctagaacaagttacttgaccttatttgtgctttttaagaaagttttaattatgtatagtgatt

SEQ ID NO: 297455 - DNA, 637 bp, Homo sapiens
tagtatcatgcatgtaaagagttttttaattttaatatttggtgagcaaattaaaacagggaaaaacatcaggaaaacgtctttgagatggcaagatggcaagaggagatgcatccaatgtataatcatcagtgcttctaactagacggcaagataaatctctctttgcaacctaaaataaggcaaatagattaaagcatacaagtcaagtcctattttgaggctttcctaaagtaaacaaccaaaaagtcatctcttaaataatacacacgaatagtttttctaatggttatgtaaaatgttcaacaaactgtttcacttctaaatgtaacatattataagtcaacagagtaacagctaactaggcacttgataggatcttgctgttttctcctcatggcatttgctctaaattagctctgaatgccgtatgttattaaatttcttaagaaaatatggttaatatgctgtggacaaaaatataaagtatatgaaaatatttacttgatcaaaacaaatgacagcaacactattccttgggctaatttaatraatgctaaatgcattcgtgtgttgtatgcatacagtcctaagagaagcctttcattcatcttgtgtcctactcaattctgagaat

SEQ ID NO: 297456 - DNA, 547 bp, Homo sapiens
agagtgtaaggtctgtatttatactcatttttttgcatgtgaatgtccagttgccccgcatcatttgttgaaatattatctttgttccatcatatttcctttgctcttttatcaaagatcacttgactataagtgggtatatttctaagctctctactctgttccactggtttattagtctattattttgctaataccacactgccttgattacagaagacttataagtctcaaaatcatatagtgtcagtctactcactttgttcttttccttcaatattgagttggctatcctggatattttacctcttcacataaattttaggatcagtctgtctacatccacaaaataatttgctgggagtttaatcaggattgtattgaaactacagatcaagatcttgggaagcactgatgtcttaacatatatgagtctacttatttatggacatgrcatatcgttccatttatttagttcttctttgatattagttcatttctaaaacgtcttttagttggaattatagagtatgtagcattttcaaac

SEQ ID NO: 297457 - DNA, 525 bp, Homo sapiens
ccattattcatattattctgaaaataaacatgacatttgtggggcagagataaatacattattataattattatactcatccccagcaataacagatcttccctttacctcatttcttttctcctggggcratgtgatgatagcttatcctatacattctgggttttgaattacaggtaaagaaccatgtttgcttaatttcagaaaagttttcttcaattatattttgaattgtttttttcaggttttccctgccaaccccaattatgcatattttaggtttgccttttcctataattcatatctataatttttcactttaatatactgttttttctttctttatatttgtatcattgtattcacatttttctattctctatgttctcattatgttttgtgtcatgtctattttcttcagtctttcttatttattcataattttaaaaaattataaagatttttcagaacccattttacatttcattgtactttactcatcatgttgcacttattatttgacta

SEQ ID NO: 297458 - DNA, 540 bp, Homo sapiens
ccagaagtggattctgtctcaagaaaccacttcgtttgtatatccataagaagcaactcttcatctgttcaagttttatcatgagattgtggcaattcaatgacatcatgatgctccacttataatttgaattctctcactatttccacctcatttgcagtgactgcctccactgaagtctttaatgtctcaaagttattcayacattttggaatccacttctaaagtcctgttaatgttgatattttgacttccttccataaatcacaaatgttcttagtgacatctagaatgttgaattctttctgggaggtggtcaattttctttgcccagattcatcagaggaatcagtaactatggcagctatagctttacaaaatttattttaaaaattataaaacttgaaagtcaaaattatttcttgagccatgggccaaagaatagtttttgttagcagacattaaaacaacattaatcttattgtacatctgtctctaccagagctttggagtgactggatgcattattaatgagcagta

SEQ ID NO: 297459 - DNA, 614 bp, Homo sapiens
gtatttttccttattaaaaacacatacgtttttgcatattttatatactgagttgtttgcttcattcacycttattatttctagtttagttatatatatattgattatatttttaaccattaataactaacttccttttacagagaaaaccaggaagtagaaaattgtcatttactagcattctctagcagagtaacaaatgtatgcatatactattttataattaaaggggcatatacatttccaaagtataatttttagatggcataaaactgtttattaacagaacatatataatcatagtctctgtattccataagatgtcaaaagtatgtaatcttgaacatatgttagtaattaagtttcagtagtttactttatttagaaatggcccagacatttaataaatatctattacttaacttggcatagctttagttacaagttattttaaaaattatctttaggcagacatatgataacattaaacaaagctaactctcatctcaagttatttccctgttaagtattttatagcacttgcacggtatgcaaagcatcacaaaagcataaacctaaaaagttaaatacgtgaagttttgtttatttttatt

SEQ ID NO: 297460 - DNA, 614 bp, Homo sapiens
gtatttttccttattaaaaacacatacgtttttgcatattttatatactgagttgtttgcttcattcacccttattatttctagtttagttatatatatattgattatatttttaaccattaataactaacttccttttacagagaaaaccaggaagtagaaaattgtcatttactagcattctctagcagagtaacaaatgtatgcatatactattttataattaaagrggcatatacatttccaaagtataatttttagatggcataaaactgtttattaacagaacatatataatcatagtctctgtattccataagatgtcaaaagtatgtaatcttgaacatatgttagtaattaagtttcagtagtttactttatttagaaatggcccagacatttaataaatatctattacttaacttggcatagctttagttacaagttattttaaaaattatctttaggcagacatatgataacattaaacaaagctaactctcatctcaagttatttccctgttaagtattttatagcacttgcacggtatgcaaagcatcacaaaagcataaacctaaaaagttaaatacgtgaagttttgtttatttttatt

SEQ ID NO: 297461 - DNA, 661 bp, Homo sapiens
tacttagtgataaacatattcattgattcatctgtctggggagtttctattaagtgtmagtaagtgtactagccagtacgtgtactattattgatgacttttatatagaatatcaatagctatataaaaatattgtgtaaattcttattagtttattttactattttactatttactagtttactattaaacaaatatttacattagccattgtgataacttccagtgataacaataaagacaaattctgtgctattgagtaactctagctcaagtacattgcattcaaatgcattgcaatatattaattgctttgtcagagttgtactgaagatattatgaaagcctagaggctaccttaccctaactgatcaaagaacggctttagaagtagaaacagtcaacatgattctgaagaattaaataggaaacctccagcatacagatgggtaatgcatttcaagtgaagggaaaatcaggccagaagtgtcaaagtttatggaatagtcagacatatagggagtatgatgtctacagaggagtttaagtttaatgtttcatgattgaggatcatggaatatgagatcatagaggtcggacaggttaagttagtatgaaactgtcagatttatgttaacttaagaggttaaagtataattta

SEQ ID NO: 297462 - DNA, 608 bp, Homo sapiens
tatcatttaaggcacaagtagttgctgcagaatatataacacaatgcaatactgttaattagaatgtgatgcatatgtgtacattattggtgattatagtatatgccaactatgaaaatgtaatcagttaataaagataaattgtttgcataycattgcaagacattgacaaaagattttagcaataatgcaatgctagcattttttggaccttatcttttttctgcatacctaaaattttatttaaaccattcagcattcaggaattatttggttggcacaatagtaattgtggttttgccattaaagcatggtaaaaactgcagcaactttggcacaaacctaatatcttcattagaacgtttcttccaaaaatacatgatggggaagcataaaatacagtcttctcatttcagctctaacatgtaagaagtattcactatcatccctataacaagaaaaaagctgaacaaactgtaaatccacaactttatttggactcatcagagaactgagtttgcaggacagattgccatctgaattgcaaagagacaggtaaatttaaagagtcccagctaaaaattgctttacttgagcagaggtcacta

SEQ ID NO: 297463 - DNA, 1213 bp, Homo sapiens
tatcatttaaggcacaagtagttgctgcagaatatataacacaatgcaatactgttaattagaatgtgatgcatatgtgtacattattggtgattatagtatatgccaactatgaaaatgtaatcagttaataaagataaattgtttgcataccattgcaagacattgacaaaagattttagcaataatgcaatgctagcattttttggaccttatcttttttctgcatacctaaaattttatttaaaccattcagcattcaggaattatttggttggcacaatagtaattgtggttttgccattaaagcatggtaaaaactgcagcaactttggcacaaacctaatatcttcattagaacgtttcttccaaaaatacatgatggggaagcataaaatacagtcttctcattycagctctaacatgtaagaagtattcactatcatccctataacaagaaaaaagctgaacaaactgtaaatccacaactttatttggactcatcagagaactgagtttgcaggacagattgccatctgaattgcaaagagacaggtaaatttaaagagtcccagctaaaaattgctttacttgagcagaggtcactawagttgtaaaattgccccgtagctaccacctaaatcattgccttaggacgccctggctgcagagatatcaaggaggttttttctgggatttagagaaaatgattttttttggaaggttttgccttgtaactccctttctttgcttctatcttagtggagtattaagawatagagtcaaaatattaaacagtgtgctctaagaggagcagtcaaagggtttattaggctctgctgtatgatagaagggatctttaagctctaaggttcatctaaggcagaaaatccacctaagactttagaaataaaagttagaattctaaattgtttgattgtgttgtatgtctttgtgcacttcttgcatgaatttgtggcaaccgaggatagtatagaagatatttgcataccagttcttagaatagtctttacatctcctttaaagaagaaaggtgacatactacatacatgtgaagcacatattgcttcattgcttcagtccctattttggctgtcataaatctgtcacataaaatacactttctagattaaggcattcataaaattattttcttgtagtatttatgttgaaaagcaaattcaaatgtatt

SEQ ID NO: 297464 - DNA, 586 bp, Homo sapiens
gtcaactactttgacatgaaaagaaaacacaattctatacaagtctgaaagagaatatttgcaatttctaaaactaattatacattaayataatatattttaatcctgaaaaaaactaagaaaaatagtaaatatattagaaaaatgttcaaaggatgtaaatggccagtatgtaaaaggtaaacaggtataaaagatgtctgacaatattcttagagtaataagcaacacaaatatgagcaacactaacatagcaccttagcctgttaggattaaaagaagtaaaattttggtaataccaaataatcacaatgatatggatatttgacaacactttccctttcctgttatgagcagatgactttgacattaatgtaaattctctacgtacttactatctcaaaattgtatttatatgcttaaatttagtaacagatcattttaggaacagatattaatatattcatgataccaataagaggggtggcagaaatttagatataaggtctatcagtgggagtatgaataaaagtaaagtgtgctgggtatgtaaaatggaatgctgtgatgcaggcaaacacaaata

SEQ ID NO: 297465 - DNA, 481 bp, Homo sapiens
tatttcatttattttcaatctttaaaagtataaacctgttagcttgcaggtcatatcaaaaataagaggtgaacaagatttagcacacaagctgtggtgtgcaattcttgtgctaagacaaaggaagccgtctatatatagcttaatttaaatttaatttaatttaatttaaaatagttttaaattatataaaatacaaaatkaaagcattataacatattacatatataataacattatagaataacttaaaattaaaaataaaattactctttctatattccctgaaatagatggtgtcactttatttgttgtttatttaaaaaatccaatgtacatgcacacatattcgttttaaaattatagtacaaatagtattgtaatcagaagcagcaaatcaaacacgatgtctcatcattgaatctcctggtactattcttgttattcattgttctgtcttagaagaaatattattgtgata

SEQ ID NO: 297466 - DNA, 617 bp, Homo sapiens
atctgctatcatttgttacggctactgttttatgaacctcatatcttcttgttttaatttatttcmttgatttgttagaaagcatcttctagtagcttcctatgaaaatatgcttaagaggtagatttttctgaatcatatcctgtctttattttgcatttacctttggagtgtgtaactagacataaatggtacactaaaaatcactttcccagtgtattagaccattttcgtgctgctgataaagacatatacaagactgacaatttacgaaagaaagaagtttaattggacttacagttccacattgttggggaagcctcacaatcatagcgggaggcaaagaggagcaagtctcatcttacatggatggcaccaggcaaagacagaatgaggaagatgcaaaagcagaaaccccggataaaaccatcacatcttgtaagacttattcactaacaagaaaacagtatggggaagccatcctaatgattcaaattatctccgctgggtttgcccacaacacatgggaattatgggagtaaaattcaagatgagatttgggtggggacacagagccaaaccatatcattccacctcagacccctccaaatctaatg

SEQ ID NO: 297467 - DNA, 617 bp, Homo sapiens
atctgctatcatttgttacggctactgttttatgaacctcatatcttcttgttttaatttatttcattgatttgttagaaagcatcttctagtagcttcctatgaaaatatgcttaagaggtagatttttctgaatcatatcctgtctttattttgcatttacctttggagtgkgtaactagacataaatggtacactaaaaatcactttcccagtgtattagaccattttcgtgctgctgataaagacatatacaagactgacaatttacgaaagaaagaagtttaattggacttacagttccacattgttggggaagcctcacaatcatagcgggaggcaaagaggagcaagtctcatcttacatggatggcaccaggcaaagacagaatgaggaagatgcaaaagcagaaaccccggataaaaccatcacatcttgtaagacttattcactaacaagaaaacagtatggggaagccatcctaatgattcaaattatctccgctgggtttgcccacaacacatgggaattatgggagtaaaattcaagatgagatttgggtggggacacagagccaaaccatatcattccacctcagacccctccaaatctaatg

SEQ ID NO: 297468 - DNA, 617 bp, Homo sapiens
atctgctatcatttgttacggctactgttttatgaacctcatatcttcttgttttaatttatttcattgatttgttagaaagcatcttctagtagcttcctatgaaaatatgcttaagaggtagatttttctgaatcatatcctgtctttattttgcatttacctttggagtgtgtaactagacataaatggtacactaaaaatcactttcccagtgtattagaccattttcgtgctgctgataaagacatatacaagactgacaatktacgaaagaaagaagtttaattggacttacagttccacattgttggggaagcctcacaatcatagcgggaggcaaagaggagcaagtctcatcttacatggatggcaccaggcaaagacagaatgaggaagatgcaaaagcagaaaccccggataaaaccatcacatcttgtaagacttattcactaacaagaaaacagtatggggaagccatcctaatgattcaaattatctccgctgggtttgcccacaacacatgggaattatgggagtaaaattcaagatgagatttgggtggggacacagagccaaaccatatcattccacctcagacccctccaaatctaatg

SEQ ID NO: 297469 - DNA, 572 bp, Homo sapiens
gggacagtcagcttgtaggattcactgcattacaactgctgcagagtaaactactttaatgaggtatcccccagattttagtagatggaagtctttyctctatgctctttgctttcttcttataagatccatttgataagttgctttagaaagagctaccttagtgtctgtgttccgcataaggtggagaaatctaattattcaatacattttcttttaaattggtgtttaatgtgcatgcaataaagtacatgaatatttaccatatggctcaattaattttatgtatcaatattatttactgtcaccatatacattaggagagattagtatccaagaaagctgtagcacatcaccctgtagacaatatgtcacttaaattaaccacttacctgacctctacaaccatagatcaattatttctatatttgaatgtagtacaaatacaatcttacagtatattgtcttttatgtctgtcttctctcattcagcattatttctgcgaaattcatccatgctgttgtttcaccagtggtctattctttttcactgatatgtagtatgacattgt

SEQ ID NO: 297470 - DNA, 572 bp, Homo sapiens
gggacagtcagcttgtaggattcactgcattacaactgctgcagagtaaactactttaatgaggtatcccccagattttagtagatggaagtctttcctctatgctctttgctttcttcttataagatccatttgataagttgctttagaaagagctaccttagtgtctgtgttccgcataaggtggagaaatctaattattcaatacattttcttttaaattggtgtttaatgtgcatgcaataaagtacatgaatatttaccatatggctcaattaattttatgtatcaatattatttactgtcaccatatacattaggagagattagtatccaagaaagctgtagcacatcaccctgtagacaatatgtcacttaaattaamcacttacctgacctctacaaccatagatcaattatttctatatttgaatgtagtacaaatacaatcttacagtatattgtcttttatgtctgtcttctctcattcagcattatttctgcgaaattcatccatgctgttgtttcaccagtggtctattctttttcactgatatgtagtatgacattgt

SEQ ID NO: 297471 - DNA, 544 bp, Homo sapiens
agcacatggatatggaaagacaccctggaaaaaaaatttttgtactgggccctcacaacctaggatcagtcctgacacacacacacacacacacacacacacacacacacatacagagacagagagagagagaatagagtgcaattgatgaaattagtttattttataattattattaatgaataaaatattttgtgctgggataaaaattgatatggtgaggctgttgtgaattttagataccctttaagatacattatctgatagctctatttctttccttattcccctgaagccyaattttattgattattctgagttattgaaagaccaagttgtatagtaagaattgatttgtgtatagtgataaaactcttattacttgagtttatgtgagagtatctctcttttttattattatgctataagttctgggatacatgtgcagaatgtgcaggtttgttacataggtatacacgtgccatggtggtttgctgcacccatcatcctgtcatctacattaagtatttctgctaatttgtac

SEQ ID NO: 297472 - DNA, 542 bp, Homo sapiens
tgctatagaaatttgcataagtgatgaggaccagaatgttaattaccaagacaataaggaaaatgtcttcaggacatgacagagacctttgtggcagcccctaccatcactggcccagagccctaggagaaaaaaaaaaatgcttttgtgggcaaggtccaggtcccgtctgctgtgtgcagcctagggacttggtgccctgcatcctagccactctagccctggctaaaagggaccaaggtacagctcagaccatggcttcagagtgtgcaagccccaagccttgacagcttccttgtggtgttgagcctgctggtgcagtctggaattgaggttcgggaacctctgcctagatttcagaagacgtggaaatacccgaatgtgcaggcagaagtttgctgcagggrtggagtcctcattgagaacctctggtagggcagtgcggaagggaaatgtggggttggaactcccacacagagtccctgctgggacactactagtggttctgggaggagagggctaccatcctctagacccaagaa

SEQ ID NO: 297473 - DNA, 542 bp, Homo sapiens
tgctatagaaatttgcataagtgatgaggaccagaatgttaattaccaagacaataaggaaaatgtcttcaggacatgacagagacctttgtggcagcccctaccatcactggcccagagccctaggagaaaaaaaaaaatgcttttgtgggcaaggtccaggtcccgtctgctgtgtgcagcctagggacttggtgccctgcatcctagccactctagccctggctaaaagggaccaaggtacagctcagaccatggcttcagagtgtgcaagccccaagccttgacagcttccttgtggtgttgagcctgctggtgcagtctggaattgaggttcgggaacctctgcctagatttcagaagacgtggaaatacccgaatgtgcaggcagaagtttgctgcaggggtggagtcctcattgagaacctctggtagggcagtgcggaagggaaatgtggggttggaactcccacacagagtccctrctgggacactactagtggttctgggaggagagggctaccatcctctagacccaagaa

SEQ ID NO: 297474 - DNA, 573 bp, Homo sapiens
gctaatactttttcctgctataagctagcttcaagttaataatatattcatttctactttattagcaattattgtgtacagtacacaatattattatcaataattcacataaaataggcttgtttaatatcaccacaaacacgtcagtaatgcattgtgctatgacattatgatgcctactttgtcaatagacaataggaatttttcagctccactataatcatatcagaccaccatcatatatacggtctatcattgacctaaatgttgttatgtggcacctgcctgactgtacaatgctaaatatttttcctgtttcacagttccattctccaatgcaaattaactttaaatgatatggtgcatatttctagataactgtcagtctgttgctgtcttcctttctttctgtgtctttcatatgcatatcatctttcagaagaaatatttttctatttgtgaatggcataatatgcttatttatgtttagtatttttcttcctttttatttatttatttattttttttgagatggagtttcgctgtttcrcccaggctggaatgaactggcgt

SEQ ID NO: 297475 - DNA, 583 bp, Homo sapiens
gtgcttagtctgtgggctgtcttggcgaatgtgtgactcagcttggcctgggaacaatcgggctgaggtgatgattcatagaggccagacttacagtccaaataaaggaaagtagagtgcccactggaacccaccggagcccactgtgcccatgcccacaaaaggagaagaaactttttctgggatcccactgactatacaaaggacaaaggcatttctgtgcctggccttgttcccttatctgagttagctggaggtttgtgcaagtttttatccaaatgggctggaggtttttctatctgtgcagccgtgggcatgtctctaggtayaacaccccgtgctagttcccttattggtacctgccgcttgaattttttctcaggctgctttttatgttatgtggggatgaggcactgacccacaggcgggggcctctctgggacccttcccttgttatctacctaaggcaagctaactaactcctttcagtatatgaggtaaggcatatattaattatcttgatctggccactccacaatgtatacttatatcaaaacatcatgctgtacaccataaatatata

SEQ ID NO: 297476 - DNA, 604 bp, Homo sapiens
cagcttggttaacaacatggtgaaagagtgagcaacatcagtgggtgtacagagggcagagtctcctgctctgaatgctggcatcccaggtagctttacagaggacatacactggggctgagaaggctgaattatgctgttacagactaaggaaatgaattctgccttgtaactgcctcacatggcctgggggacactattgctataagcgttttttktttgtttgttttgttttgttttttaaagaattgggctaggctgtttgtgttctattttattactgtgagatgtatgcctgcacattaattcaatcaattaattcaaaatttattcactataaattgtaagactactctttctacctagctaacttaatgaatttaacacatttatatataattaatacaattatatattaaatgtagaggcgtaaatgtcatttatgtgctgctggctcctaaatttatttgacatctctacttggttatctaggcatctcaagcatagcatattcaaaacaaaactatcttttctgcctgcccccaaattgtctttgttagttgcaacaatattttctgattgctcaaaccaaaactcttggaat

SEQ ID NO: 297477 - DNA, 591 bp, Homo sapiens
cacctccatatgcatgtattacatcaatccgcacaccaccaccaaaagggaaagtggaaaaaagacgttcttagtccccattcctttgattttctacatccctggggcccttccccacagatgcagtgtaatgcagggggagaaccacaggccaacaaccagacatcttgccagcaagatgatctgggttttttaattcaaaaaaattttcctgaccaggcatggtggctcatgcctgtaatcccagcactttgggagggcaaagtgggcagatcacctgaggtyaggagttcaaggccagcctgatcaacatggagaaaccccgtctctactaaaaatacaaaaattagccaggcatagtggtgcatgcctgtaatcccagctactcgggaggctaaggcaggagaatcacttgaacctgggaggctgaggttgcagtgagctgagatcatgccattgcaccctagcctgggtaacaagagccaaaccccatacaaaaaaaagaaaaaaaaattccttatttcctattaatctcttactcaagctcttacaaataattatccacatttctcttagtaccaatgagatgat

SEQ ID NO: 297478 - DNA, 580 bp, Homo sapiens
attttatatgatgatgaatayggcgttataagcccatggatttagggacatcctagtctcagatctgttttaaaattgccaacaatgaagaaaatcttcatttattgatgaaaatgatgataccttattgactgcttggacaaatttataccatctcccacttctcccaggagttgtcttattcttaattcaccaaaccaaaagtggcaattaaaataactcattgttgtcaaaatttaaaaatgtgtgataaatgaagcccagtaaatagtgaaaatatgagaaaggtgattaaatctgacaattttcttgtaaaagacttgagatgataaatatctcctgtgattagttattaatttagtgcaagggattttgcttcagcctaaaatattttatgaacagtggcatatagaaatattttagaagataggtacacacatgcttaaccataggagaaattgctggaacttgattggtaataattaaaaatggcagacatgacatgcaagtgtctgggctattttctgtatgacagtcctttcagagattaggaaagggaagtgtttcctgaagacatgaa

SEQ ID NO: 297479 - DNA, 605 bp, Homo sapiens
agacaatatgtaaacatagatgtatacacatatatgcatagaaatacagacaaacacaaataatgacatgataaccttgactttaaaagtttagctgtgagaaaggtaaaactcactagtttgaaaggacagttggggtcagatgcggtggcttaagcctgtaatcccagcactttgggaggccgaggcgggcagatcacctgagatcaggagttcgagaccagcctggccaacatggtgaaaccccatctctactaaaaataccaaaaatttgctgggcgtagtggcgggcgcctgtaattccagctactcaggaggctgagacaggagaattgcytgaacccgggaggcagaggttgagtgagccaagatcaagccattgcactccagcctgggcaacaagagcgaaactccatctcaaaacaaaacaaacaacacgggattcaaactgtgcttttgtgtaactggaaaaagtaaagtttatctgtttcacatgattgaagcccttatggaattttagagaaaacagtggcaaatttacatctcaaagcacagagagtgatggaaagtttaagcttaaagatgattttgtgttagttagagga

SEQ ID NO: 297480 - DNA, 578 bp, Homo sapiens
gaatttaatcacaaggaagcaatcagacaaatcaagattatggatgtcccacaagacaactgatacagattcttcaaaattgtcattgtgatgaaacacaagagcaaaaattaaaggagaatgacaattaaatgcattgcatgatcccttgttgcatcttggattgaaagaaatctgttaagaacatgattgggggccaggcatggtggctcatgcctataatcccagcactttgggaggtggaagccagaggattacttgagctcaggagtttgagatcagcctgggcaccgtagggagaccctatctctgcaaaaagtaaaaaagttagccaagtgtggtggcatgtgcctgtggtcctagctactggggtggctgaggtgggaggatcacttggacctgagagattgaagctgcagtatgattgggacaagtagagatagactgtatctgagaaaaaaaaagattgtatcaaagttaaatttcttgggtatgataatgataatgtgatttaataggagactgtcctastacttaggagatgcatgctgaatacttaggggtaacatgttatgatg

SEQ ID NO: 297481 - DNA, 594 bp, Homo sapiens
attattctgtttaaatgactcaaaattaataattatacatttgttctatgtgtaaaagttctaaaaatagaagaaactgaaatggatatttcttaattaattatgccttaattctgatgcacattttcttttgaaaagccaattttctgaagaatagttacacacagcttcattcctggcatgactatttcaagtgtagtgtttagggattatgtcagattagacggatatatggtatagaatgattctggggatagactttccagattaacaagaaaagagaattttaaaatacctaaatttaggtattttaccaatttaggtrtacctaaaattggacatttttaatgtgaggagtgtttagttcaatggggacatttctcagagagatttactactttttaatggtgcctctgagagtccttcagtagctgtcctccatcggagaacatctcagaattactttttttctgtccacttgcccataattttcatttactttactggatttgctcacatttattacccccattcatatttccttccattctcgatacactggaagaaaaatttatttatatatatatatgtgta

SEQ ID NO: 297482 - DNA, 580 bp, Homo sapiens
ctactgctgccctccataggaaaggagatcagtgatgccctttttccctgctcccctccttgtttcatgcacaaggaaggctctggagcaaagggctttacagcactgtctggagttctcccatctattgattgaggtcagtggtactgatgtggtcatacttcctgaatgtagactctcccttaccaggaggaacatacatagagctgtactgaaaaacacatgctgagagtggtggaggtcaaaattaaggtgaggcctcaggaatgaatggcctttcaacccacttttgatggctcaaaccatgtacaacttaggcaaaaggagttctgccaatggtttagcccagctcattaaacactttctttgtgaacagarctaataggttgacaggatggcccacagcccccaggagctgtagctggcctccaggcccttactcacattcattctctctctcttccaccacagattgtgccccatggatggatttaaatgtatctttggaatgagtgattagaagaagacagaaactgggtaattccgagttttctgtcaaatactatattcctaatatcat

SEQ ID NO: 297483 - DNA, 494 bp, Homo sapiens
atatattttaaaaaactcccttttacaaaaaaaaaaatctacaataaaattaaaagataagaaaagaggttaagattgtttcttttgattcctaaattgcaagtattcccaaggtgatgctgtggcaagtccacatggcttgagcacatgagttggatacactgggtcctctmttctccaattttcacagtggtccaccatgagcaaggctcttctgtttgtggaagacctgatatcagggagcatctcagacacttgagctgataactagtaaactgcaacttctcacctggaatggggactgtcttacattgtctaatttttgcagggatttccaatagcccttgacctcagggctccctctcttaaaatattttgctgctgttgtagtaaattttttactttaggtgaatttcttttctggaactctctcataaccctccctatcctcccatcaacatgtgctttagttgttagtggtttttttttttttt

SEQ ID NO: 297484 - DNA, 458 bp, Homo sapiens
cttgtttttgaagattggctcagtgccaggacactcattcaatgcttagccagaattgctaggagactatggaccaaccagaggttaaagctgagggtctcctcaggtttttttcttagcatgattcttgctttggacatgcacatgtttttctaaattttttcatatacattgatgcttttgaatgttctaatttcctgaagatcgccccagcatttgctttcaggttcttagagggtctaatgtatatgtcaaccataaacttttgctccaggtgtcttgggtagtcagtttgacgtgcagagtttcaaaacaaggccagccccatttctggcccgagttgagttaggcaaaaaatgacaagcaacataaacactacayacatatttattgtaggaatgaattcccattgccttttgtcatctgcacacctaccaacatataaaacaatatggtat

SEQ ID NO: 297485 - DNA, 621 bp, Homo sapiens
cgtgaaccaccgcgcaagaacttaattttatgggccaaggaaagaattgaacatgtctgagaaataaagttatagaggcagaaaaagacattaggaagttttatctggcaggagtgtgtgggatggatttttgagggaaaggcaagagaaaagatcgatttggcacttgtgtcaagtaggctgaaatttccctaagactgagccatgaaacactagtgagctgagagtcagtcactactgccatcggggtggaactaatccaggttttccagagaactgaattatatgaaaattaggsagtcttctttaataaatagaacacaaaaccctgaatgaaaaattatgcaagtaaaggggcaccgaaattaagcttctgcctctgatggcaatattgtataatcagaacctttgtaaactatatttttttatcaatagaaagttttttcagtgcttgagatttgctgccccaaattctcatcttttagtcttccagatacagccagttaaataaacagagggtaatgactttaagtcacagttgttcctccttacccaaggaaaatattttctgagactcccagtggatgactgaaattgcagatagtacaaatttctatataa

SEQ ID NO: 297486 - DNA, 597 bp, Homo sapiens
tagggtagtgaaaatgctctgtgtgatacagtaattatagatatgtgtcactgtacatttgtccaaacccatagaatgcatatctccaagagagagccctaatgtaaactgtgggttttgggtgataatgagctgtcagtgtaggttcatcaactgtaacaaatgtatcatgctggtggggaatgttgataatgtatgtggggcgggtggcagggggttttgggaaatatctgtaccttcctttcaacttcgctgtgaacttaacactgctctaaaatataaatgtttaaaacaacaacaacaaacatgaataatatagtgggatcccatgttcccttcacctagttttaacagttatcaactcagacagtattatttcacccataatctcagtccatgtttcccctgcccaataatttcttttaaattaagtcctaaacaccatgttatttcatgcataaatattaaatgttatatttaaaatctgatgactctcctaaataacaaaactaaaaccataactagaacaccatttgacctgcaataataaaactgtcaataattsttcagtttcataaaatgcccccaaactgtgta

SEQ ID NO: 297487 - DNA, 1207 bp, Homo sapiens
ctatccacacttgtatttatggatcagaatttccaggatggggagggacagttgtattttgataatacaataaatacataaataaagctactcaagtagttctagtaagcttattcttaggaaagaaaagtaaatgctggcctccttcagatgttatgaaaacggaaactgttcacagcctgttttgtctctattttctagattccattatgacattagtctctggtcacaattatctgaagccttgcaggtaaggagtttaccttcaccttctttttctgtttaatgtctttcctggctagtccctcaaaagtatatacttgttacctggtgtgtaggggtacactgaataaagcacttggtattattctaattattgagacagatggttctcatgtttgtttttcatttggatatgacaaatrtttaatgctgatactaaattattggaatagacaaattgttagatacatcacagactatgttaatctagtgagtagtaagcaaagacatgtttatataattatatcttaccttagctctatacaccagaaaaaccgaagcctgttatattccttgaaattaagaatgatttcactatttctgtgatacagttccgcctccaccatttattattggagttatataagcawtcttgtgctgattttcaaggggaatacttccatcttttgcccatttagtaagatattggctgtcattattattttgagacacgttcctttaattcctaggttattgagaatttttaacatgaagggatgatgatttttattgaaggccttttctgcatctattgatgtgggtatttagtgctacaaatttccctcttaacactgctttagctgtgtcccagagattctggtatgttgtctctttgttctcattagttttagagaacttcttgwtttcttcctaaattgcatcattcaccttggagtcttttagaagcaggctgttcaatttccatgtagttgtgtgggtttgagtttctttgagttctaatttaattgttctgtggtctgagagactgttcattatgatttcagttcttttgcatttgctgaagaatgtttccttccagtatgtgatcaattttagattaattgccatgtggtgccaagaagaatgtatattctgttggtttttggtgaagagttctgtagatgtctatcatgtccacttgatc

SEQ ID NO: 297488 - DNA, 615 bp, Homo sapiens
acaagtgaaacaagcaaacaaaaatgctacttaattttgtaaagtaaaagtaataatgaaaaaagttaatccttgcaacgttctttttttatttaataaaatgaacttttaattttggaatagtttcaaatttagagagaaatcttgaagtgcacagataattgctatgactaacacctaaatcctgcttttattaatattttccattgatatggtacatttgtcacaattaatgggccaagattgataaattattaactaaactccatatctcattcagattttttttggtgttataggtagaataatttttcttatattagtcttcttagatttctaaaattaccacaggttaggtggactgagtggcttaatcaacaggtgttcattttctcamagtgctggaatttcgaagtccatgatggcagtgtccacagattcagtatttggtgagctctcttctgggtttaaagatagccacctcctcgctgggtcctcacatggcctttcctaggtgcatgcatgttggcaaagagacagcaaaagtgagatcttcgatatctctccttatatggcactaatcttatcagatcaggcaccacccctattacctca

SEQ ID NO: 297489 - DNA, 622 bp, Homo sapiens
aagggaatggatcttgagcctgatatgctccagccactgtgcttatctctgcatacttcacatggtttaatctccatccagagggaagtatggattgaaagtgatgcttttattgccagcttgaagcatctcttttccattatttttatcccttcctcctctccttgggtcaagtttgtgatagctgctgtatgtccttgggctgtgttctctaaaccccactgttctcatctgtaaaataggcattataattcctgttgtacaggtttgttgtgaggaacctatgaatgcttgcttttttccttgtaagaatttggaacagctaagttggagactagcttgaaggggcatccatatgaaagattatttctgtygagtccttcttgatgaaggagttcattaagcagtgcctttaggggcctgcttaggaaggaatgaagctgaggtttttcttattaccatgtctagctgtcactgttagaaagttgtccccgacaacttccctgttctgcaggtaactttggtgctcagtgtataaatctatggaaactggtctcttcccatctcaccccaggcacaactaggctttgaggtaatcttaaaatggttaacttcccgttaa

SEQ ID NO: 297490 - DNA, 403 bp, Homo sapiens
tactagtgaaaaattcatgctccttccacttatcattctaagtgagtctcagtagggctgcatcttaggcctagttattccatataacagttagtatgctttagaaaaaaaatcacctaaaatttctaacatttagtgtccataactgtaaaaatgattaaaaaaatgctatctccttcacagcaataactattcaggagaagtattacatgaagtttatttataaattgtaatgtgataaatgttcattacaactgtatcatcattattattaagatttattgtgaagaaacaaatttctctttttaagtcaggtcaattgagatataatatagagcacagtaaagtttgcccttttaatatgtasactgatgaagctgacagatatatacagccatgtact

SEQ ID NO: 297491 - DNA, 512 bp, Homo sapiens
gggtgcagcccacagagcaggagtagaagcagggtggggcgtcgtctcacccaggaagcacaagaggttgggaactccctcccctagccaagggaagccctgagggactgtgccatgagggactgtactatccggcccagatactgcacttctcccatggtttctgcaatccacagaccaggagattccctcgtgtgcctacaccaccagggccctgggtttcaaccagaaaactggacagctgtttgggcagagaccaagctagctgcaggagtttttttttttttttttttttttttttttcttgtaccgcagtggtgcctggaacaccaatgaracagaaccgttcactcccctggaaagggggctgaagccagggagcctagtggtcttgctcagcgggtcccactcccacggagcccagcaagctaagaaccactggcttgaaattccattgtcaacttagtagtctgaagtcgacctaggatcattgagcttgttgcggggggggc

SEQ ID NO: 297492 - DNA, 1256 bp, Homo sapiens
gggggctgtctttttgatctggttttaatcattccaaatccatacctggatttcttttctacaaatgtaacaaacgtatgtccctgtttgatcataattctgtagaaagtcagacttgacatccctgtttctcaagcttcttggtgttaggggaattaaaatgttaaacacttgcaaggtttgagatgaggtaaacccccagctctcttgctgcattctttttcttagcaagggaaaaagaagtcactggtagttatgtcatatcttgtgaacatttctctactgttctctctagtctgtttgttttatttgtcagtgttttcctgttgtccttgaatytgttgctatagccatctgtaaagatttatttgcacaagattgagagcttaagggaacacatattatgaattcaactacaggactaacttcagtgcaagaagaggcaagaaaacctacttaagcccgtatttaaggaattttatgaagttacttttgctggatgtaagggttaggctgaaatgccatgaagaaagtattatatgacagtgggattttatgcaaagatccaagaatatttaaattctgacccaaccagtcctcctatcctacctgccgggcaaaaaagawtatcataaaattaataaacttaccttttgttttattgaattactatcttatttacccgacaaaatataagcatggttaaaataatctctttattatttaatatttatatgtcagtctttttgaagcctatttaaagtgagctaacttatcttctgcatggcaccatggagattctgaaagtgactcaggctagattcagggagaaccaggaaagtgggtcaaatggtatctctagggttggaaacacaattatctgacctgataaaaatgattgcagctgttgtctcttaatgtgtaacgtatgttccacagttcttagagcaaccctgagttgaaagagaagttctaatatgagaaatatcwaaatgttattttattttaagaaaaatataaactgtattatttgcctattccttgtcaccattatagtatcttttctcttttctgtcttttttggttgttgttgttgcttaaacttggaagaaatatcagattcctcatgtaatgcaaagcactttcacaaattcccctaaattgtggacttaaagacaacaggactgtgcatcttctccaggattccagacatttctctgtggcatttctcttcagctcaccatgttttattccag

SEQ ID NO: 297493 - DNA, 631 bp, Homo sapiens
tctatgcttactaaagcctagttttctgagaatttttaaaatgaagacacttttattttagatccaagtcattaggttggtcactttatctttatacataaaatagcttaaaaagtcctggcaaggatgtcgtattctttccctaaatttgaatacacggtactctcacctgtgcagaaagaccactgggtgcaggaacttgtgtttccttatagtttatcaacagataggttgcagaacagtgatgactgctttgaagcacaactttaaagtgtggttttaaattgggyaatcattaataatagaattctcaacttggagctttaaacacagtgtacaaaagcaaataaacgggcttgaaaagccattatggagaggaagcatattatattgaaatgaacaaaatatattagcactacttgaagcactatgtagtaggcagatatttttcatataaacaggtgagggagtagcctgtcttcactctgtagtatagaatacatggcattaacaaactctcaaacacttttttcttgaggttgttaactaaaatatacatacatatttcttatggcattttgccccaacgttctactctattgctcaaatttttatgattacatgaaaatgt

SEQ ID NO: 297494 - DNA, 631 bp, Homo sapiens
tctatgcttactaaagcctagttttctgagaatttttaaaatgaagacacttttattttagatccaagtcattaggttggtcactttatctttatacataaaatagcttaaaaagtcctggcaaggatgtcgtattctttccctaaatttgaatacacggtactctcacctgtgcagaaagaccactgggtgcaggaacttgtgtttccttatagtttatcaacagataggttgcagaacagtgatgactgctttgaagcacaactttaaagtgtggttttaaattgggtaatcattmataatagaattctcaacttggagctttaaacacagtgtacaaaagcaaataaacgggcttgaaaagccattatggagaggaagcatattatattgaaatgaacaaaatatattagcactacttgaagcactatgtagtaggcagatatttttcatataaacaggtgagggagtagcctgtcttcactctgtagtatagaatacatggcattaacaaactctcaaacacttttttcttgaggttgttaactaaaatatacatacatatttcttatggcattttgccccaacgttctactctattgctcaaatttttatgattacatgaaaatgt

SEQ ID NO: 297495 - DNA, 512 bp, Homo sapiens
tttatcttttgggtttcagcctaaagctactgttatagacacatatggatgtatactgaatatatatatatatatatatatakagagagagagagagagagagagagacatatatacagcatgtgtatatttacatatttatattttatatttcttgggagctatctctgtacatgtgctttattcacattgagacccatgttgccctgcattaaaaaaaatgccagagcccaactaaaatttccatatgctactttaatttcatcatttccttttcagggatgattcaacaatgtttaactcaacaaatatgtgttgagcactttctatgggacaggtactctaaatcctacaagtataacacttaacaaaacagacaaaggtccgtgttctcataggactaatgtccttgtaaggagtaacatgtaacaaacaacagacctactgaataagctaatgatgtggtttagtagaagctgataaaagctgatgggaaagaaaaaggtgagcag

SEQ ID NO: 297496 - DNA, 445 bp, Homo sapiens
aaaccattaatgcttggtttcccttctctaatggcacttaacagatctgatatggtgataagtatttttcaastatgttataacaatcactacatacatgcatttattgcaaatatactatattcttcttaaacacaagaattgttttttactcatctctgtgtctcacatacctaaatgagtacctagcgcaaagttagcattactttaataaaaatttgctgagttattttgaatggaataatctatcattattaccttccttaaggcaacaaaggcaaaattaagcacagagtagttaatgaaaattatctgttgcattgagtatatttaaaaatcctgagctttatatttttttcctctcagactttgagtcaactttggttctcttttaatttctcatagccacataaaacaagtccaaaaaaattgtttattttgaagt

SEQ ID NO: 297497 - DNA, 318 bp, Homo sapiens
cacttggaatactgttgttacctggttagaaaatatagcattaaacatctgatttatttactcatcttcaaacataaggaattatcaaaaacggtttgaaagtctttggaccattcaaaaaccagttgaacatstttatgtttcatagatagaacagaaaactcagattaagaaggggttaaagtcaatgaaatgaagttctctagggaagaaagcagaagagatatctaggaatggaaactttaaaggaaaatggaatgaaatcacattataaattgtagagtgactggaacctaatctatgaaaacggatagggct

SEQ ID NO: 297498 - DNA, 604 bp, Homo sapiens
tatacaaacaaatgtgaaaatttatctgttgaattaaagtgacacctgtgcataaatcagcataatgcaccaatgtgatgatgtgcacaccgtcagatgtgrcacacaccctccgtctccttgaggaatatggtggtcagccctgacaagctttggtaaccatccaacaatgccctctttatttccaaatccaatatatggccacacccttatcctcaggagaagtaggattcaggcagcatgcacgaaacctgccttcaccctgacattagtcttcatattcatcatctcaggaatgaaaatggatttgcctccaaatgattcaagccccctataggaaaggttactggtaatggcatctttttgctgactgcagtagaactatttccagatgtgagcacttagttatctcacagtaagtgaattaaatttgaaatcccttttattaaagcaaccaaatagcttcagtgtccagtcagtaccaagccctgtttctagcagctcctttgccaatgccccccaccaccactctacagggaacatgagcagaagactcttatcaggaatccctggcagcccttttgcccaagctccactggctccc

SEQ ID NO: 297499 - DNA, 604 bp, Homo sapiens
tatacaaacaaatgtgaaaatttatctgttgaattaaagtgacacctgtgcataaatcagcataatgcaccaatgtgatgatgtgcacaccgtcagatgtgacacacaccctccgtctccttgaggaatatggtggtcagccctgacaagctttggtaaccatccaacaatgccctctttatttccaaatccaatatatggccacacccttatcctcaggagaagtaggattcaggcagcatgcacgaaacctkccttcaccctgacattagtcttcatattcatcatctcaggaatgaaaatggatttgcctccaaatgattcaagccccctataggaaaggttactggtaatggcatctttttgctgactgcagtagaactatttccagatgtgagcacttagttatctcacagtaagtgaattaaatttgaaatcccttttattaaagcaaccaaatagcttcagtgtccagtcagtaccaagccctgtttctagcagctcctttgccaatgccccccaccaccactctacagggaacatgagcagaagactcttatcaggaatccctggcagcccttttgcccaagctccactggctccc

SEQ ID NO: 297500 - DNA, 389 bp, Homo sapiens
tttctaggagtcaatgactgtgagagagaaaaacatcttcatgattttctaattctagcagttggattttctgatatcaccattttttttaaatccctaagggtttcactcaatatcatatcaatatagatcttatatgatatgatatatatkatatatatatatatatatatatatatatatatatatatatatataacactgactcagtgttaattgtgtgttgtcttagtcggtgcgggctgccataataaccaaagaaacagtgttaagtgtgtgttgtattagccagtgcgggctgccataataacataacatagtctgggtgtctttaacaacagacatttatttttctcagttctgaaggctgaagtctgagatcatggtgc

SEQ ID NO: 297501 - DNA, 537 bp, Homo sapiens
ttgaaatgtatgtttttgttcattactgttcttgggaggggtgaagaataaggtggttcgtgtctaggagtctgcaagtacataagcctactacatacagtgctttgggtaaaaactgacatcaaatttgctttggsatacacctgtattgtcctcaacaactgccttaaaatttggctttcccagtcattaccctcactcagcatctccttgatctctcctctccatattcaaacacattttgaaggcttcctgtcttctctctctctctctctctctctctctgtatacacaccccattctcagggaagaaaactatcttgttaacctgacaaccttacctaaacttattggagagagcagaattcaaaccctatggcaatcttttggcaatgtcctggaggatttgtgtccccaagacagggatttcagaaaggggaatatacaaatctagcagtaagatactttttctcagcaggagtttctagtctctttcaaataccttgcaatagaggatggcttgctccaatacacacc

SEQ ID NO: 297502 - DNA, 529 bp, Homo sapiens
aattccactcctaatgttcaggattcagtcatttaagaattataactataccacagactttgaaaattaagcaagtaacttatggtatgatttagacatttaacaatgtgctttaaaagtaaaaattaaaaacactctaaaattgatagtttttatatttaactgtcaaataccacaggtcagggatgaatacacagaatgatagctttggagaaaccgttgcttctgacccattagtgcccaaaattcagttgcagcagatattgcaattatatgaagaaatattttcaggcatttagaacaacagatcccaaacattctcctctataatagattactcactaatattctaattttgaaacaagaaaaattaccaagtccaaatttgttgtgaatgagtgatttgtgtctttgtccaatcatggggttagtgacctctttttggtaaggtacaagtcrtttgatggggtcctgaagagtaacgtgctgtaagttgtggtgaaagaatgctttcataaaaaggttattt

SEQ ID NO: 297503 - DNA, 648 bp, Homo sapiens
aatacaataatagtaggggacttcaataccccacttttagtaatggacagatcatgcagacagaaaatcaatgaagaaacatcagacttaaactatactgtagacaaaatggacttaactgacatttatagaacatttcatccaacagctgcagaatacacattcttcttaagtggatatgggacattctctaggccagatcatatgttagctcacaaacaggtcttatcaaatttaagaagattgagatcatgtcaaatatcttttctgactacaaggtgtaaaactagaaatcaataacaggagaagctttggaaaatttacaaatatatggaagttaagtaacatgctctagaacaacccaatgggtcaatgaataagttaaaagtgaaattaaaaaatatactgggagaaataaacatgaaaacacaacatactgaaacttatggaatgcarcaaaagcagttctaagagggaagtttatagcaataaatgtctatactaaagaagaagaacaattcaacaaaaaagtatgttgcacctcaagcaactagatgaacaagaacaaactgaagcccaaaattggtagaagaaaggaaataataaagattagagcagaaataaataaaatagagactagaaaaatga

SEQ ID NO: 297504 - DNA, 648 bp, Homo sapiens
aatacaataatagtaggggacttcaataccccacttttagtaatggacagatcatgcagacagaaaatcaatgaagaaacatcagacttaaactatactgtagacaaaatggacttaactgacatttatagaacatttcatccaacagctgcagaatacacattcttcttaagtggatatgggacattctctaggccagatcatatgttagctcacaaacaggtcttatcaaatttaagaagattgagatcatgtcaaatatcttttctgactacaaggtgtaaaactagaaatcaataacaggagaagctttggaaaatttacaaatatatggaagttaagtaacatgctctagaacaacccaatgggtcaatgaataagttaaaagtgaaattaaaaaatatactgggagaaataaacatgaaaacacaacatactgaaacttatggaatgcaacaaaagcagttctaagagggaagtttatagcaataaatgtctatactaaagaagaagaacaattcaacaaaaaagtatgttgcacctcaagcaactagatgarcaagaacaaactgaagcccaaaattggtagaagaaaggaaataataaagattagagcagaaataaataaaatagagactagaaaaatga

SEQ ID NO: 297505 - DNA, 593 bp, Homo sapiens
tcatggctttgaaaatttttaagttagttcattcaattagggttgtgtttggcttcatttaacagaaacctgccaacagtggcttaagcagtaaagttttatgtttctcaaataagtaagtccagaaggaagcattacagtcattaagaaaatcatcagggattgaggttccttctagttttctgctccatcttccatggtgtttgattttcattattacaagatggctgctccacttctaggcatcatatctatattatcgtctggaagaagaaagtgcacagcaccaatgtgcatggcagctgaaactattcctttttaacaagaaaaaataactttcctgccaggagactctgactatagcgcactggccagaaatttctaacatgggccactttagttaaaagagtttcctgagaaattgaatcctgttctgttttgccacttggattaccccaataaaatcaggtctcctttgataaggaagaagggaggaaakagaggacgctgagtaggtaagtaggagctgttgtcatacatgaacaacctctggttatggtgaccaaacatattatcctgcattcttttttact

SEQ ID NO: 297506 - DNA, 546 bp, Homo sapiens
acatgacaattccatgaggtttggctttttgtttgcttttaaattttaatgaagtctgtctctgttacttcaaaaaagtatctatatatttcatcaaagaaatgaaatatataaacatcattatcaaatatatataatcagcatgtatttagtaaccacctaatccaaaaagtcctaccttttagggcttatgtccaaaagtaaagagcaagtgctggcaatcaaactgttcacaggacggctgtgtggttaaggaccttgactctagagatagatcaatggacttcagatttcagctcttccacccactagcctgcgcctctgggaaaattactcccctacctttctttgcctcagtttcctcttctrtgaaacgggaaatgtataacttacttcaaaagtctgttatgagaattaaatgagttagtacatgtaaatctcttagaatagtgctcaacatatagtaattgctcagttgttaccatgcattatattaaagctctaagaattgcctgggtatagtggctcacacctttaatcccacca

SEQ ID NO: 297507 - DNA, 525 bp, Homo sapiens
tatataatcagcatgtatttagtaaccacctaatccaaaaagtcctaccttttagggcttatgtccaaaagtaaagagcaagtgctggcaatcaaactgttcacaggacggctgtgtggttaaggaccttgactctagagatagatcaatggacttcagatttcagctcttccacccactagcctgcgcctctgggaaaattactcccctacctttctttgcctcagtttcctcttctgtgaaacgggaaatgtataacttacttcaaaagtctgttatgagaattaaatgagttagtacatgtaaatctcttagaatagtgctcaacatatagtaattgctcagttgttaccatgcattatattaaagctctaagaattgcctgggtatagtggctcacacctttaatcccamcactttgggaggctgaagcaggagaatcacctgaggcaacataaggatacttcgtctctacaaaaaataaagtaaaaattaggctgggcatggtggcatggccacccagct

SEQ ID NO: 297508 - DNA, 596 bp, Homo sapiens
acagtactttcatgatgaaatgtagcaggatgctatgtcattgctaagaattaagcactagaggaaaacaagtacattaaaaaagagcttgatactcagaatgaaagctgcatcaagagggagatcctttacattgcctgccgcctcatccccacaacagggagcctgtgacccacagcccctgccctatcaacccaccaaatgaattgggtctgttgccctctaagttctcgctgtcttccatgggctctctcagaagactgaagaaagaatttckcccctagtttttgccactggccacatgcagttctctcctcaatactgccccctcctggggaagggagctccgtccccaaactgttgtcctggttaaagctgccttcttcctaaacgaggagcagaaggcaatcctccttagaaagacacccaaaataaagaggagaaaaagaaagaccttaagttattttttaggtgaatcttttctctgaatacagtaaggagaaaccaagagggttggtgttggtccctcacttagggaggaaagcagattggggaaagaattaaagagaattccaacaatgaaacatttatgaata

SEQ ID NO: 297509 - DNA, 586 bp, Homo sapiens
gagggaactggaagccactccttggtgagggagagctgaaggcactgaggatgctggaactgagtttaggagatcaagtgctgtttcgtctgtcatctgggattctgttgtctctagtgttcacttaatgctttgcatctctaattgtttcccataaggtcacttagcctaatagaaggttattttatttatttatatttttctagaaacgaggtcttgctctgtcacccaggctggagtgcagtggcacaatcagagattactgcagccttgaactactgggcttaaatgatcttcctgactcaggctgtggagtagctaggactacaggcgtacactaccacacctggctgcattttattttttgtacaggtgaggtcttgctatgttgctcaggcttctctcaaactcctgggttcaaacaatcctcacttcagcttgccaaagagctgggattacaggtgtgagccactatgccyagcctagaaggatattttaaataataactattaggatgatgataacaagaataaaataaataaaaaccataactgtattagttatctattgctgtgtaacaacttta

SEQ ID NO: 297510 - DNA, 576 bp, Homo sapiens
ctgctcttgccccttgccccaccccgtcactgccctttttcaggttcattttcctccttgagcctctgacacactaatttatcttccccatgctgccagactcatcctttttaatagagtgtttttagtcttatagtcaataaatacacattcattctagaaaatctgraaggtaccccaaaaatcatttcagaggaaaaaacaaaatcagattttggataatttccttccaattattatgacaggaacatcattgtgatagctagaattaagttatcagttgctactaaggcaggaggccactggagcccagggagataggagctcagaggaggaaggcaaaagagaaaccgagtcatccttcccacctcccccacccacaaggaaccaagatgtggggcattatagttaaatgtttttttctatgtacagccagagtgtccctaaaaccaggaggaggaactctcagtggaagactattatttgttcaaaatattttcttgaatccatccatgcaagaagactgtacttcccactgatataacgtttgaccatgtgatttgctttggccaatca

SEQ ID NO: 297511 - DNA, 587 bp, Homo sapiens
gtttttgcaagagagagagagttgctgggaagctactgaggcagttcccagaaccagggacgggaatatggcagttcttgggaacacgaacttcagaagccagagcctgaaaaacaacgggattctttctaacctactcttagagctacctctttggaaaatagcttctttcttttctgtttcagcctcacccagctgccatcaactctcaagctctcatacctcatatttcaaccacctggaaagggtcgtctcagtttcttttccagaaaccctgtggaaaagacttcgatatggtgcaatctgattcatgggtccatatctaagtggtggacagtagcctggcgtgtggtcatgttgcacacgtggcaacgtttatgttactgaactcgtgaagtggaaggttccaaatgaacagctgaggatggggcgggcaactccataaagsttcaattgacatgtgcaccagagaatatctggaccaaacaaaataatttgaaccaaacacaaagaatcctatcttccagaggcaacaaactggaatatcctagtatgtttctttattattattattattattaatatta

SEQ ID NO: 297512 - DNA, 591 bp, Homo sapiens
tactccctgcccttcaaggtcaagctagtgggtggagaacaggctgcagagatcaggcccatgcatcacaccctacagctcaaatgtgatagaagaagcatgggcgagtccactggggtctcttttttctcttttctctctccctctatcccttctttccttccctcctccttttctccctgtctccctccctyccttccttccttccttcatctctctgatattttctgagcatgatcaaaagccaggtgctgtgcttggtataaaaggaaacataaagaagcagcaggcacattcttcatcctcacaagctggtgagatgatgaggagaagcatggagcagaagtccaccacagcagggcagaggcatgtgcagccatcagggaagctggaggggccggcagatggggaggccctccaacagagcttgccaggcacagtcaagaagactttaccaacagggttccatctgatctggatcttaaagtggcacagtcagagcaaggactcaaaaaatgcaaatataccgaggcaacagccaactctgtgcaggaccattgcaaacagttctgcaggttgctcaccacacaa

SEQ ID NO: 297513 - DNA, 476 bp, Homo sapiens
atataattagtacatgtggaaattaaaaaagctattataaatacattctgtatatttaagaagatagagaaaacatgagcatgttaaatggacatgtaaaagatatgacaaagatccaaatcagacttctagagataaaaaatacctgagatgtaaaatacatgagatgccaytaatagctaattagaggctgcagaggacaagattagtgaacttgaaaaaaaagcagtagaaaacatttaaaataaaacaaaaaaatacggaaaataaagtgaacattgatgtgcattatcccatcagtgtgccatggtgtagtttcacaaggtctaagatatgtgtaattggagtcccagagaaaaaggggaagacaaggatattcaaagaagtctgttcaaaatttttacaaatttgacaaaaactataaacccctaaatccaagaagcccagagaactctccaagctgaagaagcttgaag

SEQ ID NO: 297514 - DNA, 476 bp, Homo sapiens
atataattagtacatgtggaaattaaaaaagctattataaatacattctgtatatttaagaagatagagaaaacatgagcatgttaaatggacatgtaaaagatatgacaaagatccaaatcagacttctagagataaaaaatacctgagatgtaaaatacatgagatgccattartagctaattagaggctgcagaggacaagattagtgaacttgaaaaaaaagcagtagaaaacatttaaaataaaacaaaaaaatacggaaaataaagtgaacattgatgtgcattatcccatcagtgtgccatggtgtagtttcacaaggtctaagatatgtgtaattggagtcccagagaaaaaggggaagacaaggatattcaaagaagtctgttcaaaatttttacaaatttgacaaaaactataaacccctaaatccaagaagcccagagaactctccaagctgaagaagcttgaag

SEQ ID NO: 297515 - DNA, 524 bp, Homo sapiens
gcctcattgcctgaattggatcatctctttcatcatcatctgccctcagactggcatatgcaccataaactccattggttctcctgccttcagacttggcctgaataacaccactgtctttcttgggtctctaccttgcagatggcagacagtgggacttctcagccaccataattgtgtgagtcaattctttataacacatctccacatattctattggttctgtgtttctggasagctgtgactaacacaccctctaagaacaggttttcttctaatctgggaagcttggctggatccagcccttgtagccttattgcccagcttgcctctgaagttgggttgaggacatggtgaggacactaggagacactgatacagtgtcagagtggcttgggatggtgatgttgtggtgtcatgtgagtaagcatgtctcactctgtagggtacagctgtggcatgctcaaggcagtaggatggggataattcagatttcataggatgaaataggtcatgcatgtaaa

SEQ ID NO: 297516 - DNA, 461 bp, Homo sapiens
cctcactgtcctcagcatggcacacagtttaaaacagcaattgtttatttctggaattttccatttaatattttctgaccacagttgaccaagggtaactgagaccacagaaagtgaagcctcagagaaggggcaactactrtaatgcttgactctgtgccaagcatttttctaagcattttacattcatttattcattttatcctcatcttaaaaggtaagtactatgattattaccattgtttctatgagcaaactgaggcattgaaaagttaataatcctaatactaagttctgttactaagaaactagtaattgtcagatactggtgtttcagtttcaatcagtaaaaaagtcaactcacacatagtcctcctgaaatgaaaccaataatccataagttctgactacccgtaaagagctcacaataatcttttttatgattcactcacttcgtactt

SEQ ID NO: 297517 - DNA, 505 bp, Homo sapiens
ggcggggcatggtggttcatgcctataatcccagcactttgggagaccgaggcagctggatcatctgaggtcaggagtttgagaccagcctgaccaacatggtgaaaccctatctctactaaaaatacaaaaattagccaggcatgatggtgcatgcctgtaattctagctactcaggaggctgaggcaggagaattgcttgaacccaggagggagaggtttcagtgagccgagatcaygccactgccctccagcctgggtaacagtgggagactccatctcaaaaaaaaaaagaaatgtaaatcacttggccagcacatctggtgagctgctcaacaacacatgtctgagcccagagtcctcatccccatcctctgtgctctgcagcttccggtgccaagcagggctgcatttcagttttccttttctgatctctcactcaatctctcaggttaaagtgctaagttttgaatgccatcaaagtatgatatagaacatttttgat

SEQ ID NO: 297518 - DNA, 505 bp, Homo sapiens
ggcggggcatggtggttcatgcctataatcccagcactttgggagaccgaggcagctggatcatctgaggtcaggagtttgagaccagcctgaccaacatggtgaaaccctatctctactaaaaatacaaaaattagccaggcatgatggtgcatgcctgtaattctagctactcaggaggctgaggcaggagaattgcttgaacccaggagggagaggtttcagtgagccgagatcatgccactgccctccagcctgggtaacagtgggagactccatctcaaaaaaaaaaagaaatgtaaatcacttggccagcacatctggtgagctgctcaacaacacatgtctgagcccagagtcctcatccccatcctctgtgctctgcagcttccggtgccaagcagggctgcatttcagttttccttttctgatctctcactcaatctcycaggttaaagtgctaagttttgaatgccatcaaagtatgatatagaacatttttgat

SEQ ID NO: 297519 - DNA, 507 bp, Homo sapiens
actgatagttgatgttgcacgtaagaccattgagacacagagaggcaaattaattttcatggactcacccagtgagttactggaacatctacgaggaaaacccatttctgtggattcttaactcaatgctgtttcattgatttcatccattctctcaaaagaggttacaactaacgtcacttgtttccacactctgtctttccaattagacctacattgtctaataccataaccaccaacatgtggctgttgagagtttgaaatatggctagttcaaattcagataggctgcaagtatcaaatgcgcactgatttttgaagacttgatgtgggagaaaaagaacacaaaatgcaaaattaatagcttttgtagtaattacgcattgaaatgataacattggattaatggatcaaataaaatttgtaattaaatttaatttcaacyatttctttttacattttaatataactccccccaaatcaaaaattacatatatggcttgtatt

SEQ ID NO: 297520 - DNA, 309 bp, Homo sapiens
tggggatcaaatttcaacatgaggcttggcagaggaatgtctaaatgatagcaaccatctataacttrtctatccattctaccatttaatgctcagcaggtccttccttaaatcctacctaaatttctccactgctgctgaacgtataaaccagcaacctaccatgtgacagtggccccaatcggaaatgtgtagagtctcatgagtagaacatttgctctgagctcacattggtctactttataacagcttgactctgagtatgtcactcaaatctcttgagcctcaattttgtccttttaaaacggg

SEQ ID NO: 297521 - DNA, 549 bp, Homo sapiens
atctagcttccaggagcagcagggccagcagttcaggtgactcctgtagcaatgatccacttggagttgcatgtcagtagtgtcctcaccagacagtccctaaggcatggttttgtctttggacctgctgcccggcttctgtttctacttggccaggacgagctcaggcactagataaaactgagcccgaatcactcactgcctggagcagagagaagctgaaggtccaggctaataagtatgaactccaggaggacagacaatggctgatgtatctttgtgtccttggcacccaagacagtgcctgggtccagactttgggagctaggcagttctgcatcaggagttcactcacatggtttgcaaattgstgctggttgttgttgggaggcctcagctgcactccgtgtggaattctccacagggtggcttgagttctcgtgacatagcagctggattcctacagaataagcaatccaagagcctaaggtgaaaacagcaataccttttatgatctagcctcagaagtcacccattgtcactctgcca

SEQ ID NO: 297522 - DNA, 585 bp, Homo sapiens
gctcttgtcttccctcaggtaggaaagaaaagttcaagtcacctcctgggtatttccctttgcatttcaaatktaaagtatctaaaaccaaagcttacttttttcccaaagccagtttcttctttagaatggggttctataatgataccattttcttctcaacccttggacttgaaaccttttgactttgtcttcaatccccacttttttttgatatccattatattcaatcactaaaatcagattttgttgatttcccttttgaaaagttttcacctttcctttcctgcttttattaccttatgttcagtctttgctatttcattcttgaactagtttgtgattaccttcgaaaaattatctggtctctgcccactgcaactaatttaatataattccaattccactaggtcagtcttcctaaaacattactttgcccataccacattctttacacaaagctgccaatggcttttaattggcattaagatgaaaatccagactcgaattattaatgtctaaggtcctcccaaatctgtttccaaattacatttccagccttatcttccatgacttctccaagaa

SEQ ID NO: 297523 - DNA, 564 bp, Homo sapiens
ggttgaagaccaaatatatatttcataatatgacattggtggttttattgactgcagattcagttacccatggtcaaccatggtccataaataaaatttatgtatacacatcataaggtttaaattgcctaagattctgagtagtatgacaaaatttgagcccttacatcccagtctgcccaagatgtgaatcgtccctttgtcaagtgcatacamattatatatgatatctgctcactagtcattgacataaatctgtacctaacatccaaccaacaatatcatcatggttcacggatccaagatcacgtgaagcagatgatcttctttctgatatatagtcaaatagaaggtcaatagtagcctaagactacatggcaatgcctactgcatttgcctcacttatcacatagccattttatcatctcacatcagtgcagaaagtagggtgactatagtacatgatattttgtgagctcacattcacataacttttattacagtatattgttacaattgatctactttaccattagatattattaatctcttattgtgcctaat

SEQ ID NO: 297524 - DNA, 572 bp, Homo sapiens
gactccagttttataaagtacaacctcttgagattgtccctttccactgctagtctatctggacccatctcacagaaaaggatgatccagttagtgctgtgtagtacacagcatgaagtcattttcctcaaccctccccattatgtggcaaatgtctatataaattatgctttttcaacatgtaaagcatatgccattaaatcctacattaataaactaaaagcaaaaaagcayaatggatagcttaattgaatacattcaattatcttggaaattatgttttgtaatattgaaaaagatatccactatgttatccttaatatatgactatgctggacatatcaaaactatggggacagcaaaaatattagtagttgacaggggttaattgtgagggaggaataaaaaaagagacaaatttcagggcagtgtaagtattctaatggcgggtacatttattatacatttgtccagctttatagaaggtacaataccaagagggaacttaaatataaactatggactttggatgattatgatgcatcaatgtaagcttctcagttgtaacaaat

SEQ ID NO: 297525 - DNA, 572 bp, Homo sapiens
gactccagttttataaagtacaacctcttgagattgtccctttccactgctagtctatctggacccatctcacagaaaaggatgatccagttagtgctgtgtagtacacagcatgaagtcattttcctcaaccctccccattatgtggcaaatgtctatataaattatgctttttcaacatgtaaagcatatgccattaaatcctacattaataaactaaaagcaaaaaagcacaatggatagcttaattgaatacattcaaytatcttggaaattatgttttgtaatattgaaaaagatatccactatgttatccttaatatatgactatgctggacatatcaaaactatggggacagcaaaaatattagtagttgacaggggttaattgtgagggaggaataaaaaaagagacaaatttcagggcagtgtaagtattctaatggcgggtacatttattatacatttgtccagctttatagaaggtacaataccaagagggaacttaaatataaactatggactttggatgattatgatgcatcaatgtaagcttctcagttgtaacaaat

SEQ ID NO: 297526 - DNA, 1145 bp, Homo sapiens
gactccagttttataaagtacaacctcttgagattgtccctttccactgctagtctatctggacccatctcacagaaaaggatgatccagttagtgctgtgtagtacacagcatgaagtcattttcctcaaccctccccattatgtggcaaatgtctatataaattatgctttttcaacatgtaaagcatatgccattaaatcctacattaataaactaaaagcaaaaaagcacaatggatagcttaattgaatacattcaattatcttggaaattatgttytgtaatattgaaaaagatatccactatgttatccttaatatatgactatgctggacatatcaaaactatggggacagcaaaaatattagtagttgacaggggttaattgtgagggaggaataaaaaaagagacaaatttcagggcagtgtaagtattctaatggcgggtacatttattatacatttgtccagctttatagaaggtacaataccaagagggaacttaaatataaactatggactttggatgattatgatgcatcaatgtaagcttctcagttgtaacaaatwgactccagttttataaagtacaacctcttgagattgtccctttccactgctagtctatctggacccatctcacagaaaaggatgatccagttagtgctgtgtagtacacagcatgaagtcattttcctcaaccctccccattatgtggcaaatgtctatataaattatgctttttcaacatgtaaagcatatgccattaaatcctacattaataaactaaaagcaaaaaagcacaatggatagcttaattgaatacattcaattatcttggaaattatgttttgtaatattgaaaaagatatccactatgttatccttaatatatgactatgctggacatatcaaaactatggggacagcaaaaatattagtagttgacaggggttaattgtgagggaggaataaaaaaagagacaaatttcagggcagtgtaagtattctaatggcgggtacatttattatacatttgtccagctttatagaaggtacaataccaagagggaacttaaatataaactatggactttggatgattatgatgcawcaatgtaagcttctcagttgtaacaaat

SEQ ID NO: 297527 - DNA, 564 bp, Homo sapiens
tcttacagcgaaggtcatgttccagaccagcagcatcagcatcagcatcagcatcactcaagaacttactacaaatgaagaatctctggcctgctgaatcagaaagtgcagcttcgacgagccccccgctgatttatttggggaagagaacttcttatctatctggactgaacatgacattaaatctgttttcaaaattacctgtcctagatttttctccatccttttttyctctggctatattcaaaacagaatcttccttgacacttgtagcctgaatggaatttgaaatgaaataataaataaataaagtatgtttcatagaccatacattaactagttcacaatataaatgagagtttcattaccttcaaggctggtggtttctgagaagacactgaaaagcaaaagggattcataatcactcatatgtaaatatgacaaagatatccacacattcatgcagtgttagcatcaaactctgtcctcctgcctgtattagcgtaggctttgatggcttctactttgtgtctgcggactagaacgtgacagaaatgcactgag

SEQ ID NO: 297528 - DNA, 581 bp, Homo sapiens
gttgtgtcctctagtttaggctacagaaaggttcttcatccactcgtggcaacaaatataatacataaaccttatcaaaaagtataataaatgatcaaatttgacatacttatacaaaataaagttgctacaagcattagatatgaataacctttgacatttggaaatccctccaatattcattgaaaataagaattttaaaagtcaattaatgaattcaccattatttttttttctaaaatagtctggtataaaatatcatgttattctctaaagcattttcattaaattgytatttttatccaaaagttagctaattgaaaagcaaagccaatatacgcatattcatgtttatctcatttgaataactaatatcaacaaaacgtatatctctgatgcccaacagtaacaaagaggagtaatgagtcactgtggtttatcccagttctagtactccttcctgcttccactgtttcctaaagcagccaaaatcaaagcttcttttacaaaaatgttcgaatatgcaactgaactcaggtttcctcagaagaaaccccaaaattacataaataacttcttat

SEQ ID NO: 297529 - DNA, 581 bp, Homo sapiens
gttgtgtcctctagtttaggctacagaaaggttcttcatccactcgtggcaacaaatataatacataaaccttatcaaaaagtataataaatgatcaaatttgacatacttatacaaaataaagttgctacaagcattagatatgaataacctttgacatttggaaatccctccaatattcattgaaaataagaattttaaaagtcaattaatgaattcaccattatttttttttctaaaatagtctggtataaaatatcatgttattctctaaagcattttcattaaattgctatttttatccaaaagttagctaattgaaaagcaaagccaatataygcatattcatgtttatctcatttgaataactaatatcaacaaaacgtatatctctgatgcccaacagtaacaaagaggagtaatgagtcactgtggtttatcccagttctagtactccttcctgcttccactgtttcctaaagcagccaaaatcaaagcttcttttacaaaaatgttcgaatatgcaactgaactcaggtttcctcagaagaaaccccaaaattacataaataacttcttat

SEQ ID NO: 297530 - DNA, 581 bp, Homo sapiens
gttgtgtcctctagtttaggctacagaaaggttcttcatccactcgtggcaacaaatataatacataaaccttatcaaaaagtataataaatgatcaaatttgacatacttatacaaaataaagttgctacaagcattagatatgaataacctttgacatttggaaatccctccaatattcattgaaaataagaattttaaaagtcaattaatgaattcaccattatttttttttctaaaatagtctggtataaaatatcatgttattctctaaagcattttcattaaattgctatttttatccaaaagttagctaattgaaaagcaaagccaatatacgcatattcatgtttatctcatttgaataactaatatcaacaaaacgtatatctctgatgcccaacagtaacaaagaggagtaatgagtcactgtggtttatcccagttctagtactccttcctgcttccactgtttcctaaagcagccaaaatcaaagcttcttttacaaaaatgttcraatatgcaactgaactcaggtttcctcagaagaaaccccaaaattacataaataacttcttat

SEQ ID NO: 297531 - DNA, 546 bp, Homo sapiens
aaccccctttcccctttgttttccttcctttctatgcagatccaggggatattcagctgagagccaggcacccttttgggtccgataagaaacattttacaatctgctctctctgaagtctgctgagagattcctctgcacagtaaaacttggtccccacaatcatttatcttaacctgaacatttctttccattaatcccaggtcttcaaataaactcaagcaattgtcaaccagaaaatgtttaaatttacctacagcctggaagccccagctttgacgttggcctgcctttctgaaccaaaycaatgtatttcttacatgtatttgattgctgtctcatgcttctctaaaatgtataaaaccaagctgcaccccgaccacttcgggcacatgttctcaggacctcctgagggctgtgtcgggggccacggtcactcatatttggctcagaataaatgtcttcaaatatcttacagagtttgactctctttgttgatattagaaaataaaacattcatatgttggtttattatcctaataaagt

SEQ ID NO: 297532 - DNA, 546 bp, Homo sapiens
aaccccctttcccctttgttttccttcctttctatgcagatccaggggatattcagctgagagccaggcacccttttgggtccgataagaaacattttacaatctgctctctctgaagtctgctgagagattcctctgcacagtaaaacttggtccccacaatcatttatcttaacctgaacatttctttccattaatcccaggtcttcaaataaactcaagcaattgtcaaccagaaaatgtttaaatttacctacagcctggaagccccagctttgacgttggcctgcctttctgaaccaaatcaatgtatttcttacatgtatttgattgctgtctcatgcttctctaaaatgtataaaaccaagctgcaccccgaccacttcgggcacatgttctcaggacctcctgagggctgtgtcgggggccacggtcactcatatttggctcagaataaatstcttcaaatatcttacagagtttgactctctttgttgatattagaaaataaaacattcatatgttggtttattatcctaataaagt

SEQ ID NO: 297533 - DNA, 505 bp, Homo sapiens
ttacaaaacttctccttatacgtctttaatataaaacaaacagttcaaacatttatttaaaactaggtcatacctcaaactacagagttctttttccaattcaagtatttcatgctttaactgcgattttatttcttctttttcagatattctcttttgtagtacactagccttatttttcagttttcgaatttttactctaagttgctcacagtggttatctttaagttttattaatcttttccataaacaaaatgtatttttaattttcaataggtgaacacaatctgtaaccaggaaaaaacaaastagagataaaatacatgagtagatttttggatataaaggactgtgcatttttaacatgtattcattcatacgttgaacaagtatgtacatattgagtgcctacaaggtggaagatattatagtaaggtctgcagataagacaacacctctgctattgttttagcttaaagtatagtgaagaaccaagataaaaagg

SEQ ID NO: 297534 - DNA, 994 bp, Homo sapiens
ttacaaaacttctccttatacgtctttaatataaaacaaacagttcaaacatttatttaaaactaggtcatacctcaaactacagagttctttttccaattcaagtatttcatgctttaactgcgattttatttcttctttttcagatattctcttttgtagtacactagccttatttttcagttttcgaatttttactctaagttgctcacagtggttatctttaagttttattaatcttttccataaacaaaatgtatttttaattttcaataggtgaacacaatctgtaaccaggaaaaaacaaactmgagataaaatacatgagtagatttttggatataaaggactgtgcatttttaacatgtattcattcatacgttgaacaagtatgtacatattgagtgcctacaaggtggaagatattatagtaaggtctgcagataagacaacacctctgctattgttttagcttaaagtatagtgaagaaccaagataaaaaggwaaaaaacatttgaaatgattccatcggggaaaaacaacaacaaaaaagaataacaaatgcctatggcaattatgggactcaatcaaacaacccaactttcatataatawcagtttctgaaggagaagaaaaagaaaaaggcctagaaagcatatttaatgaaataatgactaaaaatttcccaaacatgaagaatgatgacaacattgaggtatgaaaactgcagaggtcatgaatccatttcaatccaagaggcatttatcaacacacatcacaatgaagttattaaaaatgaaaaacaaagaatactgaaaacagcaaaaaaacaagaaatacatcacattcaagggagcttcaatatggctttcagtggatttctctgcagaaaaccctacagtccacgagagagggatgatgtattcaaaatgctaaagcaaacaagcaagcaaacaaacaaaaatgccaatcaacaatactgttcccggttgg

SEQ ID NO: 297535 - DNA, 488 bp, Homo sapiens
aaaaaacatttgaaatgattccatcggggaaaaacaacaacaaaaaagaataacaaatgcctatggcaattatgggactcaatcaaacaacccaactttcatataatatcagtttctgaaggagaagaaaaagaaaaaggcctagmaagcatatttaatgaaataatgactaaaaatttcccaaacatgaagaatgatgacaacattgaggtatgaaaactgcagaggtcatgaatccatttcaatccaagaggcatttatcaacacacatcacaatgaagttattaaaaatgaaaaacaaagaatactgaaaacagcaaaaaaacaagaaatacatcacattcaagggagcttcaatatggctttcagtggatttctctgcagaaaaccctacagtccacgagagagggatgatgtattcaaaatgctaaagcaaacaagcaagcaaacaaacaaaaatgccaatcaacaatactgttcccggttgg

SEQ ID NO: 297536 - DNA, 576 bp, Homo sapiens
atcattccattctttgataatttctgccctttcttcactgaaatctaggatctgctaccatctcacctggctcatcgacatgtaaatcccttcagtactgatcaatttctaccagtctttagatttgaagaccaaaatgctaatgaccatgatggatggttttggaaaaagacaagtagagcctcaatgtctggcacctatggctgatttaattttaaactcagggaaatgaaataggtactgtgcataaaaaatattcaggtgattttatttaaagcatttttactaaattcaaactaatcaaaaaaacctttatttaaatgacaacttatttcaataatttttaaattttcatttttaatcaatatataaaaattkcacatatgtatgacatacgatataatattttgatacatgtataaattgtgcattgatcaaattagggtttgacaacctcaggcttcataatttatgaaatagacctctgccatttaaaaactttatatctaaacttaccaactagtaattaactgaacatatcaaataagatattatttaaaagagcctaaattaata

SEQ ID NO: 297537 - DNA, 539 bp, Homo sapiens
atgttggggtggttgttaatattctagattctatattcataggtagccatttgctttacattttcagcttcatcctctgaatgctagtcttgctcaaatgtctcattattttccatttattgcctattttaataaataaaagatcagacattttcccaagtgtggttggtagaatatcagttgctttttttaaaagagggggaaaaaaacattcctagggcctcactattgaacaagagcctcctggggtggggttcaggagcatgcattttaaacaatgtctagaggagtcttatatgccctagaatttaaggagcaccaaaggaggcttctgggtattggctgctggtgcagatttgctcagcttctgtaggttagtgcactaccgaatgaagccctactctctcctcctcctcatgccatctttcctctgcasagggctgcctgcaagagttatctgtgctgtttgcacgaggtgagcccagaggaccatgccacaacctgcttcactatatgttggccttgattggtgttcctga

SEQ ID NO: 297538 - DNA, 539 bp, Homo sapiens
atgttggggtggttgttaatattctagattctatattcataggtagccatttgctttacattttcagcttcatcctctgaatgctagtcttgctcaaatgtctcattattttccatttattgcctattttaataaataaaagatcagacattttcccaagtgtggttggtagaatatcagttgctttttttaaaagagggggaaaaaaacattcctagggcctcactattgaacaagagcctcctggggtggggttcaggagcatgcattttaaacaatgtctagaggagtcttatatgccctagaatttaaggagcaccaaaggaggcttctgggtattggctgctggtgcagatttgctcagcttctgtaggttagtgcactaccgaatgaagccctactctctcctcctcctcatgccatctttcctctgcagagggctgcctgcaagagttatctgtgctgtttgcaygaggtgagcccagaggaccatgccacaacctgcttcactatatgttggccttgattggtgttcctga

SEQ ID NO: 297539 - DNA, 525 bp, Homo sapiens
ctggaagaataatgaaccctgccttttttatttcttagtgttttattgtattctttagaatgcagttacagaattttagaaagaaaaggtcttaaagaccagctcaaacytattattttacagataaggaatggaggcacaaccaagttaaattattttccaaatgtttacctaactaattagtggttgttattttgaaacactgataaggggctgggtgtggtgggttcatgcctggcatctcagcactcaagaatccgaggcaggaggatcacttgaggccaggagttcaagaccaacctgggcaacacagcaagaccttgtctctacaaaaaaaaatttttttttcaattagccaggcatggtggcacatgtttgtagtccccactactggggaggcttagacagggggattgcttaagcctaggagttcaaggttccagcgagttgccatcacaccactgcattccagactgtttgtcataatttactgttttattgattattcatgtgtatcagctgttt

SEQ ID NO: 297540 - DNA, 525 bp, Homo sapiens
ctggaagaataatgaaccctgccttttttatttcttagtgttttattgtattctttagaatgcagttacagaattttagaaagaaaaggtcttaaagaccagctcaaacctattattttacagataaggaatggaggcacaaccaagttaaattattttccaaatgtttacctaactaattagtggttgttattttgaaacactgataaggggctgggtgtggtgggttcatgcctggcatctcagcactcaagaatccgaggcaggaggatcacttgaggccaggagttcaagaccaacctgggcaacacagcaagacyttgtctctacaaaaaaaaatttttttttcaattagccaggcatggtggcacatgtttgtagtccccactactggggaggcttagacagggggattgcttaagcctaggagttcaaggttccagcgagttgccatcacaccactgcattccagactgtttgtcataatttactgttttattgattattcatgtgtatcagctgttt

SEQ ID NO: 297541 - DNA, 525 bp, Homo sapiens
ctggaagaataatgaaccctgccttttttatttcttagtgttttattgtattctttagaatgcagttacagaattttagaaagaaaaggtcttaaagaccagctcaaacctattattttacagataaggaatggaggcacaaccaagttaaattattttccaaatgtttacctaactaattagtggttgttattttgaaacactgataaggggctgggtgtggtgggttcatgcctggcatctcagcactcaagaatccgaggcaggaggatcacttgaggccaggagttcaagaccaacctgggcaacacagcaagaccttgtctctacaaaaaaaaatttttttttcaattagccaggcatggtggcacatgtttgtagtccccactactggggaggcttagacagggggattgcttaagcytaggagttcaaggttccagcgagttgccatcacaccactgcattccagactgtttgtcataatttactgttttattgattattcatgtgtatcagctgttt

SEQ ID NO: 297542 - DNA, 561 bp, Homo sapiens
gttttacatttgttttttggaagattatatttgtatatgtatcatcataaaatatttaaataaaaagtatctttagagtgaccctttccccatagatttttatttctctattatattttacaaggaatataactcagtttgttagrgagagtgccttaaaggcaggtgtttcttggactttgttatttaattagatctgcttgcaataaaaaaagttgtcggttatctaaaattcaaatttatcggggtacttggcattttcattgtccaactctggcaaccttgttcctaaggaagtgaaggttgctctctgcccagagtaacactggagaaatctgttgggtctggcagaagaaggctagtatatctaacccaaagagatgaaatcattctaccaatgtttgagaggctgttttaattgcttgttatagtttagaagggaaaagatcagagttgctgctataagagaagaaaaacaaattttcttctaggtccccagctggggctctgtaacaaaacacagattaacaagagaaaaacaaacattagtctgttaacatg

SEQ ID NO: 297543 - DNA, 561 bp, Homo sapiens
gttttacatttgttttttggaagattatatttgtatatgtatcatcataaaatatttaaataaaaagtatctttagagtgaccctttccccatagatttttatttctctattatattttacaaggaatataactcagtttgttagggagagtgccttaaaggcaggtgtttcttggactttgttatttaattagatctgcttgcaataaaaaaagttrtcggttatctaaaattcaaatttatcggggtacttggcattttcattgtccaactctggcaaccttgttcctaaggaagtgaaggttgctctctgcccagagtaacactggagaaatctgttgggtctggcagaagaaggctagtatatctaacccaaagagatgaaatcattctaccaatgtttgagaggctgttttaattgcttgttatagtttagaagggaaaagatcagagttgctgctataagagaagaaaaacaaattttcttctaggtccccagctggggctctgtaacaaaacacagattaacaagagaaaaacaaacattagtctgttaacatg

SEQ ID NO: 297544 - DNA, 561 bp, Homo sapiens
gttttacatttgttttttggaagattatatttgtatatgtatcatcataaaatatttaaataaaaagtatctttagagtgaccctttccccatagatttttatttctctattatattttacaaggaatataactcagtttgttagggagagtgccttaaaggcaggtgtttcttggactttgttatttaattagatctgcttgcaataaaaaaagttgtcggttatctaaaattcaaatttatcggggtacttggcattttcattgtccaactctggcaaccttgttcctaaggaagtgaaggttgctctctgcccagagtaacackggagaaatctgttgggtctggcagaagaaggctagtatatctaacccaaagagatgaaatcattctaccaatgtttgagaggctgttttaattgcttgttatagtttagaagggaaaagatcagagttgctgctataagagaagaaaaacaaattttcttctaggtccccagctggggctctgtaacaaaacacagattaacaagagaaaaacaaacattagtctgttaacatg

SEQ ID NO: 297545 - DNA, 536 bp, Homo sapiens
tctgttggttttttggttttctccactcttgtttcctgacttcttttgtgtactgcatgctttaggattccactgtagcacctctrttgacctttcacctacacccgcttgtgtttactttttaattggttgctcttactgaggaaatataactaacaacaaaatttcctctcaacctaaaaaacctttccacaaagtaaaggagaaagaaaacagtgtcatcattgaataagcattaaaccctgaaggtgaggcacatcacaggtagctcctaaagaaactgcgggccgggcacaggggctcacgcctgtaatcccagcactttgggaagccgaggcgggcagatcacaaggtcaggagatcaagaccatcctggctaacatggtgaaaccccgtctctactaaaaatacaaaaaattagccgggcatggtggcgggcacctgtagtcccagctactcgggagaattgcttgaacctgggaggcagagcttgcagtgagccgagagcacaccactgcactccagcctggacaaca

SEQ ID NO: 297546 - DNA, 536 bp, Homo sapiens
tctgttggttttttggttttctccactcttgtttcctgacttcttttgtgtactgcatgctttaggattccactgtagcacctctgttgacctttcacctacacccgcttgtgtttactttttaattggttgctcttactgaggaaatataactaacaacaaaatttcctctcaacctaaaaaacctttccacaaagtaaaggagaaagaaaacagtgtyatcattgaataagcattaaaccctgaaggtgaggcacatcacaggtagctcctaaagaaactgcgggccgggcacaggggctcacgcctgtaatcccagcactttgggaagccgaggcgggcagatcacaaggtcaggagatcaagaccatcctggctaacatggtgaaaccccgtctctactaaaaatacaaaaaattagccgggcatggtggcgggcacctgtagtcccagctactcgggagaattgcttgaacctgggaggcagagcttgcagtgagccgagagcacaccactgcactccagcctggacaaca

SEQ ID NO: 297547 - DNA, 220 bp, Homo sapiens
ggccaatggatttacgaataacacactcagcctgctgtgggctatcttaaagaatagatgttgactttttctgaaatattagattcaactaagcatatgttgaattctcactatgtgcagagccctatttagtggctttaaaattactcaaagatgagtaaggcccagmccttgccctccagaggctcacaatatagtggaggaagtagttacaaacagc

SEQ ID NO: 297548 - DNA, 591 bp, Homo sapiens
ctctcctcgccttcatcttcttcttctccctctcttcgtcctgtctgtacttcatctatgtggccccaggcatcggtaagcaccgagacacaccctcgcttcccctggtcacaccacagccagcgcaggctgttatccgatgttacttctgggatttggaagctgttyaaacaggggcccgcagaaaagcgttttgttttaaatgttatttcagacgtgtcaaactgcttcagggcatggctttggtatgtgagttttgttaatgcatgcattttgttaatgcatgtttgttaataacgtaaaagattgcattaaatagacgtagcaaaattagtgtgatggcccgggatgccctagtcgctttcttgagtgttcatgacagctttatccatttaatgttaagtctttaagcctaaactgagtgcttaatcgtagttttattcaaacactctcgggtataataactggttgtaaaaatatggaggagccagcagcagggaatgtgattgagtccaacaatgtgtgttttctagggtcctaggtcgcttttttagaatggggtcagtggaccccattctttttgtgccatac

SEQ ID NO: 297549 - DNA, 591 bp, Homo sapiens
ctctcctcgccttcatcttcttcttctccctctcttcgtcctgtctgtacttcatctatgtggccccaggcatcggtaagcaccgagacacaccctcgcttcccctggtcacaccacagccagcgcaggctgttatccgatgttacttctgggatttggaagctgttcaaacaggggcccgcagaaaagcgttttgttttaaatgttatttcagacgtgtcaaactgcttcagggcatggctttggtatgtgagttttgttaatgcatgcattttgttaatgcatgtttgttaataacgtaaaagattgcattaaatagacrtagcaaaattagtgtgatggcccgggatgccctagtcgctttcttgagtgttcatgacagctttatccatttaatgttaagtctttaagcctaaactgagtgcttaatcgtagttttattcaaacactctcgggtataataactggttgtaaaaatatggaggagccagcagcagggaatgtgattgagtccaacaatgtgtgttttctagggtcctaggtcgcttttttagaatggggtcagtggaccccattctttttgtgccatac

SEQ ID NO: 297550 - DNA, 543 bp, Homo sapiens
caatctagtacaaagcaaactcaggcaaagtcagactcagaccaagattttctgaaaatccaaagcccatactattcctcctacattactttgcctctcaagtgaaatattatttctttgcctagcagccttcacttacagccagggtgggtgtggacagatctgtatatggctctagtataagaaagtggggagatgtttagaaggctcaaaaaattgttgacaccaaaaattcaaactatcccctgtccacagaagtcccagctgagtttttaaatcaatattccctcagctgaccaygataagacagagatttcaaaaatcaaatatgcacagacatgttccacttactcactcatgtaaacttcttaaaaactcggcaatgaattaccatatggagctccaagtacaaatgctgtgtctatcgcctttgaggtctccaggcagaggtgagcagtgaaggaaggactctaggggatgggcataatgcatggtgggcagcttacccatctcaggaactggcttcagccccatggcaccaca

SEQ ID NO: 297551 - DNA, 1675 bp, Homo sapiens
ttccaaacccacaatatcaactgatatttcctcaggagccaagtaagccccataacagaggaatgaccttgcagaaatctaaaagtctattttttaatgccattaaaaagatcttaatcctgtaatagtgagacataacttacaacagtaagacagaaataaattttatttaatggctttgttctaagtttattaccaccaagtattccttttattattttctgtccactagggacaccgtgctcttaaatatttgggtatcaaactgaataaattaaatcataattaatggttttctagttgtattaataagaagtatacacagattgcaaytgaaaaaagaaaaatgtacttgttaatgagatggatgatattttacttagtctgtgctgactgagtgaggatgaacaatatacactgtgttttgaatttgcttgtgagcatggtaaaataaaaatatctaatttttttcagtgaattggggggaagaaatgaaagaaaatagtgtatagaatctcttttatggtagwgccattgtcttctctcttccagtgctgcttttgagaagtctgttgaccatcctgatggcagttactgttcatggaccagttttttctggagacttttgggatctttttgtatttttaaattttacaaagagcatcttggagctttgtttttcttctcttgctgggagcagtcctatcagtatggaatatcttacccttcatttctccaaaatatttttatattatttctttgataatttgtcttcctattattttcctttctttttggawctcctattatgtattatttctctctcgtttttcaattctttttctttcctttctatctttctgggagattgctctgactttactacaatgctttgatttgattttttaaattttggcaaacttatttttaagaattcttttttttttcttttcttactgttactgtctccctcaaataagaatgccttatcttcctttccaggaatattgaagataaataagtaactctaaggtgtaaatcaatgaacttgactagacactgtcawtgtactttatagaccaatttacataatttctcctttgaaacaatatctattttctatacagacatctatctatgtagaaaacaattttcataaccggaaagaatactcagcaaactctcagtagaggtgaggttacttctgaggaaggaatggggagccagcactggggatggtggtcaaaaaggactggcttaatcaggaacattataacatattcaaaaggagactacacattaattgctctcttaagcactgttttaaaagaacttggacataggtaagccgaagtattagtttttaaaactggttgggaacaatatgggtatttgtcattttccccctttgtatttttcttcagcttttcaatcatcccccttcaaaawgcgctttgccaaaaaataaataaataaataaaagttcaaataacatgctgcataatataaacatttgcacccaggtgcacatgacctgctcctgctgcactcaaatcatgtggtttttatgactgtattgtaacacaagtaaacagttaagtcaaaattagatgacgacttacgcatataaggcagcttttctggacaggggaggtatggtgagtatgtgaagttt

SEQ ID NO: 297552 - DNA, 609 bp, Homo sapiens
tgtactttatagaccaatttacataatttctcctttgaaacaatatctattttctatacagacatctatctatgtagaaaacaattttcataaccggaaagaatactcagcaaactctcagtagaggtgaggttacttctgaggaaggaatggggagccagcactggggatggtggtcaaaaaggactggcttaatcaggaacattataacatattcaaaaggagactacacattaattgctctcttaagcactgttttaaaagaacttggacataggtaagccgaagtattagtttttaaaactggttgggaacaatatgggtatttgtcattttccccctttgtatttttcttcagcttttcaatcatcccccttcaaaatgcgctttgccaaaaaataaataaataaataaaagttcaaataacatgctgcataatataaacatttgcacccaggtgcacatgacctgctcctgytgcactcaaatcatgtggtttttatgactgtattgtaacacaagtaaacagttaagtcaaaattagatgacgacttacgcatataaggcagcttttctggacaggggaggtatggtgagtatgtgaagttt

SEQ ID NO: 297553 - DNA, 541 bp, Homo sapiens
tttattattactgaaattagtctccctgagcattctgggattagagtttttaaagataatttggcgagtaggggtagggtaagtggggagtgccgtttgatcaggtaggagatggaatcatagcggatcaaagtgagtttctcttgccgtcctctgctcctggatagatgtggcagaactggtcgagccagattaccagtctgggtggtgtcagctgatccatcaagtgcagggtctgcaaaatatctcaagcactgatctttggttttacagtagtgatgttatctccaggagcaatgtggggaggttcagactcttggagccagaggctgcatgactcctaaactgtaatttctaaacttgtagctaatttgtyagtcctgcaaaggcagactggtccccaggcaagaagggggtcttttcagaaaagggctgttattaattttgttttaaagtcaaaccatgaactgaatttcttcttaaagttagtttggcctatgcccaggaatgaacaaggacagcttaaaggttagaagcaaga

SEQ ID NO: 297554 - DNA, 571 bp, Homo sapiens
gcagacaaatccgtatgtcattacaactragcatgaagaaagcttgcattaataagtcatgtgctttggaaacacacagcaagacacaaagcccagactgggaaagtccagaaagattcctgatagaagtgaaaggtgacaccagaaagtctctcttcaccttagcaagcagaagctgtccagagagaagagacttccaggcagagagagaaaaaatactgaggcctaaggtagcagctggcagaaactgcagagaggaaagcctgactagagcatggaatacaagagagaaggagacagagaagtgggaggggcatctgatcagaagcatccattacagtagactcatctaccgtcctcctggaaggaaacataaatgaacttttaaagtcagtccatcttggtgattcagtgatgcaactccatgtaaaagatctctcctcttaataccagaacagtaattctttaatccctttgagaatcttatttatgtatggatctctcctcactcccatctcaactgcgcccccaacaaagaaaagcatgcactcataaatacacaaaaattctt

SEQ ID NO: 297555 - DNA, 582 bp, Homo sapiens
gtcggggggcagtagggtcaatgttcgagtaatgcagcatgagaacgaccccggtagctattgctggctttgaagataagggaaggaaccacaagacaaagaatgccaatggctctacaagctggaaatggaaaggaaacagtttctcaccttgatttggcccagtgaatccattttggacatctgacctccagaactaaagataacagatgtgttatctttggtaacttacgacaatagcaacaggaaacgaatgcagccatgaaggcaaaacagataacagactacatgagcagtctaggtttgctacatgaatagtctcaatattgttttgcatcgcaatctattatagtttggaataactttactactgaaaatacatagatcattaatccctaaactaaatcatccacttgtgagttttctacctatcaatcatcttagactaaaacaaagaaatcatacccaaaataactgtttcattttcactaattccacaacatatcaaagttcacattattctttcaatttaggggaaaaaaactattccktcattatgcagaccttgcttaaaatctataa

SEQ ID NO: 297556 - DNA, 530 bp, Homo sapiens
aatatttagtgaaatccagtatactctaatactgtaataatggtgtgtaaatgacttttaattctagtacaaaagttaaaagaccaaagtattaaaaataactrtaactacaatttgctgataaataaacaaaatagaaagatgtaaaatataacatcaatagcctaaaatgtggtgaggagcgaaatagaagtgtgggttttgtatgctattgaacttaagcttttagttcaaaatagaatgttataacaataagatgtttcgtaaaagtcctgtggtgaacacaaagaaaaaataaacctctagtgaatacacaaagataacaacaaaaaaaaaccaaagcatgcacttcaaaaatctaacaaattacaaaggaggaagaaaagaatggtataatggaaaaaaggaatgatgaaacaattagtaaacaacaaaatggcaaaagttcttacatattgattattactttacatgcaaatgaatatattttccaatcaaaagacacagtgtttaaatggattaaaaaatat

SEQ ID NO: 297557 - DNA, 629 bp, Homo sapiens
cccttttctttccactctgggaaccccaaactgaccatttttagcccatgtgtttcatttggggtctcatttctgtaacggtagtggagttgatggtgcatgccagaatgggctgaaaccaattaaaagcatctcattctcttggccacagtgatttgttcaatgatgggccctgtcccaagcacagttaatgagatayaatgtgtgttttgcttggactggatttaatgtgagcaggtatacatccaggagttgtaacagccatcttgcaatcaaaaatgaaagcttgtttaaaaatcgaggcagcattcaaatagtggagagttgagtaatagagaaccagttttcaattatttctactgaagtcgtgatcgagccatgtctaaagttcgtcctattcctacacttaacatctataagagaaataaataaatgcttattttgggcttaagccagattaggactgggttttcagtaacttgcaacagaaaagtgtctctgatgatattcagccacatacttaagtgggtaagtttctctatcagttaactaaccatgcattaaaagcctttcaaatgccaggtactcaatttataaatatctcagtaactgaatttttcctaagtata

SEQ ID NO: 297558 - DNA, 492 bp, Homo sapiens
gcttgtccaacccccagtccacaggctgtatgcaacctaagacagctttgaatgagacccaacacaaatttgtaaatttcctaaaaacattgagttttttaaatgattttttttaagttcatgagctatcaatgtattttatgtgtggcccaaggcagccaaaagattggacacccctgtactaaatgaaaattggtctgacattttgaacagaaggaagatggaggctgggkagcaaaaccatgaattgtccactagggaagatctgttcatagtctaggaaaaatgagcattttatttccttatatttaacatgttgtcaaattatctagataatttgtacctcaggaaaccctacattgatctcaagttgtgtacattcctcaaaatattcaaacattgcatattttagccattaaattttgaaaaaagaaaaattctctaacctgcggtagtctagaccggttgcactgtcagcctgctaccacttcc

SEQ ID NO: 297559 - DNA, 493 bp, Homo sapiens
ggagcattaacatttttaaacaattttacttgtatacagctattaagatttcactttgacagaaagtggacaaaacggaatagtttgttggctcaaagatgattcaaagaaaataaatcaatcaagtaaatgttctaaaattctactgaattctcttaagcattataaagcatacgtatgtatatatataaagattgaaaacacatgaatttaactratatatatattttttgcccagacaatagaactgaaatgataagtttagttttagaaaacatatctgcttattttacttcttttccaatctgaagtggtaccagcagtgttgagaatgacagtacatatgttatgactgtttgaatttcagaaagcctttggttaaattctgcataattggttcctgcttaagacaaagctcgcaagaatccaggaggagacatgggagtagataaagaatgagtggaagaaacaaaaaacagacactcctggtaag

SEQ ID NO: 297560 - DNA, 547 bp, Homo sapiens
  misc_feature (1)...(547): n = A,T,C or G
nnnnnnnnnnnnnnnnnnnnnnnnnnnnnnntttgacaataaagacaaaataaatcgcagggttaaataagtatttagcaacagcaattatcagaaccccaaaatatactaagttgcaaatcacaatagaaggaattgccataataattgactattagatacatttccaaataatttcttaactattcattttaggaatcaacaatcagccattaagttagtatttaaaggctaaagttactcttcctcttatatccatttcgtggagggaatcttagtttttggactttgccaactcggttgcaggtactttcttttctagcatagcacgaggattttccactaatcctttggggcataatgctgccagtcactcagaaccaaarctgtgacttattatgtccagtctgctcttttatttatttatttattttctcttttttgagacacagtctcactctgttgtccaggctggagtgcaatggcatgatcttggctcactgcaacctccgtttcccaggttcaagcaatcctcctgcctcagcca

SEQ ID NO: 297561 - DNA, 609 bp, Homo sapiens
tatgtccccaaagtcctccagtgtcttccataatcctatamatcgaagaaagaaagaacctgcaattttgacaactgtgttattttattaaaccaaacatactttgttttttaaggatgaggaataaaaatagttcacattggttttaaaggtgaatcagccagcttacctgcaaaatgtaggtgtcccctctgcgttgttccagctgtggattccctggagtgttcatctttaccccaaccactgcaacagagcctgtcacactgctggttgtacagggtatctctttagcctcacaggcatcctggatcagaaggcattgcagggagggttttgcagaaaagcaaggtgtgaaactgggggattagctgacatgttgcctgcaggaacaggtgtgcagtccccacttgcaggaagactaaatggtccatggcaagagcaaatgaagtgtcattttcaagaaaaccagacagagagctggcaagtactctgggctgagtaatatcgaataacaccacctccttttccttatagtggttcttccatcagcctgattccagagactgcccaggaattagcacctctggacaattcctctagttcagaatc

SEQ ID NO: 297562 - DNA, 482 bp, Homo sapiens
tatacatcgaagaaagaaagaacctgcaattttgacaactgtgttattttattaaaccaaacatactttgttttttaaggatgaggaataaaaatagttcacattggttttaaaggtgaatcagccagcttacctgcaaaatgtaggtgtcccctctgcgttgttccagctgtggattccctggagtgttcatctttaccccaaccastgcaacagagcctgtcacactgctggttgtacagggtatctctttagcctcacaggcatcctggatcagaaggcattgcagggagggttttgcagaaaagcaaggtgtgaaactgggggattagctgacatgttgcctgcaggaacaggtgtgcagtccccacttgcaggaagactaaatggtccatggcaagagcaaatgaagtgtcattttcaagaaaaccagacagagagctggcaagtactctgggctgagtaatatcgaataacaccac

SEQ ID NO: 297563 - DNA, 591 bp, Homo sapiens
tgtcttagaagtaaagcatatggttctttgcaagacagtaaagaacttctctrtgaaataagagcattggactagatgatttctgggttttcttccagctctggggacttatgatgttcgttatgtatattgcccttctttttttttttttttttttttttcattggggggctagcagcaccattctttagtgcggtgtgctctattttcaccactcaactaacacatttataaaggataccctgtctgcattaccacaacttaatgagtttctgtgaaaatatagcatgcagaagcacactgtggactacaaacactgcaaatgcaagatggtggttctactgtccaagacacaaactgcctcaaggaagtgtaacttaggggttgaaatgtgtggcctcaagtgcctaactcagtttaaatctttattttctcaaaaccactgagtctcagtatgtaacttggaaaagaaggatgcaggtaccaaccttatgagatcactgggagaacggaatgaaacaatgtatgcacagctcacattacacggccttgagtgtgataagtgtttaataaatgctggtgactattctg

SEQ ID NO: 297564 - DNA, 577 bp, Homo sapiens
ctagcagcaccattctttagtgcggtgtgctctattttcaccactcaactaacacatttataaaggataccctgtctgcattaccacaacttaatgagtttctgtgaaaatatagcatgcagaagcacactgtggactacaaacactgcaaatgcaagatggtggttctactgtccaagacacaaactgcctcaaggaagtgtaacttaggggttgaaatgtgtggcctcaagtgcctaactcagtttaaatctttattttctcaaaaccactgagtctcagtatstaacttggaaaagaaggatgcaggtaccaaccttatgagatcactgggagaacggaatgaaacaatgtatgcacagctcacattacacggccttgagtgtgataagtgtttaataaatgctggtgactattctgtgtacactcctggcatgcatctgggcagtgatcataaaataaataattaagaaaataaaacagagaaaaataccaaagtttactaatttctaagtgtggccttttcccagggattgttctaacaaaaaaggaggcagaactaagtaaaattaaagct

SEQ ID NO: 297565 - DNA, 550 bp, Homo sapiens
tcgtctccctgcagtgtggctgaatctggggtttttataggcacaggatgggggagtgcatgctgattggtttgtgagtatgaaaaaaaggttaaaacaaaggcaccagtcaaaggtgggcatggcagtgtaaaaacaattttagggaagagtaggtgtattagtccattgtcacactgctgataaagagatacctgaggcttggtaatttataaagaaaaggaggtttaatggggtcacagttccatgtggctggggaggcctcacaatcatggcagaaggtaaaagatacttcttacatggtggcaggcaagagacaatgagagccaagcaaagggggaaacccctcataaaaccataagttctcgtgagacttattgactaccatgagaacagtatggggaaaccacactcatgattcagttatctcycactgggtccttcccacaacacatgggaactatgggagctacagttcaagatgagatttgtgtgggaacatagagccaaaccatatcattccaccactggcccctcccaaatctcatgt

SEQ ID NO: 297566 - DNA, 634 bp, Homo sapiens
tttggtgatgggagggtaggagagatgggataaccattgcataaaatttacacatgcaagaatgttaatgtgataaaactgttacacaataccagtctcttgttgcttcaccaaaccttatcctgactttatccatttttatggcctcctcctctttttcacccaatcagatctctggtcaaatgattgtgaacatgttataggtttctcattagacttaattagtttccctcaaacttatgaatactgcccaggcatcttctgtattatttggacccaaaaagcagaaagggagccacatccctaatgtctttctggtttgtcattaatataaacaaaatattcagaactattatttttagtgggsgttcattcagatgttcaagaacatagagatatttccattttacctaaaggaaaaaatatatctgctatataatactaaagatagaacttaattgagcctatcagatgatgatgaagaaacagtgcaacatttcagatgatttaactgcatgctttgtgctcagcctttttccctcagcaccctgtggatttcttctacagccattcccgtctttgaagtcagtgggagctctgagcctagaaatgtcacccagagtacagaaaggca

SEQ ID NO: 297567 - DNA, 641 bp, Homo sapiens
ttggcaaagatgcctcatgatgaggaacagaatgaaggtaagaacagcaagcataggcaagactataaagaggatatccatggaagattaattattgatacttatcttttgtgatttttagcttgaggtccccaattttctcacattggtactttggatgctcttctgggttgacagaggtaactgcttcagcttcccaggactttactcaagtataatgaatccaataatcaattccagtgacctttactgttgtagaagtaggaagaagtacaatgtaaagtcccttccaatctgggcctagagagggagaaagaacagggagtgcctttaccagtactagatctcctgggttgaatagaggtggccctagttcttgggattgggcctcygacagttttttcagttcctgttggaagcagaccaaataggttatatgtttaattaagtcagaggtctcttggtttagcaagaaatcattggtgagaaagggttgtccttacatcatttcaaagggatttaaactcagctttgaaggggtgtctctaacacatagtagggctacgggaagaagagtagttcaggggagatgagtttcttgagacagtttcctgagttgccttttgataatatcatttgtc

SEQ ID NO: 297568 - DNA, 528 bp, Homo sapiens
tctcctgggttgaatagaggtggccctagttcttgggattgggcctccgacagttttttcagttcctgttggaagcagaccaaataggttatatgtttaattaagtcagaggtctcttggtttagcaagaaatcattggtgagaaagggttgtccttacatcatttcaaagggatttaaactcagctttgaaggggtgtctctaacacatagtagggctacrggaagaagagtagttcaggggagatgagtttcttgagacagtttcctgagttgccttttgataatatcatttgtcttacctacctctcccaaggattttggtctctaagcacaatgaagaaggtattgtatggctagtgcctttgaggcctccgggtgacagctgttttgaacaaagggttatcatcactctggaggtacttagggagtccaaagtgacgaattaactcattaattagtacttttatcacctcagaggctttctccgtctgacatggaaatgcttctacccagttaatgaaggtat

SEQ ID NO: 297569 - DNA, 652 bp, Homo sapiens
gtctcttggtttagcaagaaatcattggtgagaaagggttgtccttacatcatttcaaagggatttaaactcagctttgaaggggtgtctctaacacatagtagggctacgggaagaagagtagttcaggggagatgagtttcttgagacagtttcctgagttgccttttgataatatcatttgtcttacctacctctcccaaggattttggtctctaagcacaatgaagaaggtattgtatggctagtgcctttgaggcctccgggtgacagctgttttgaacaaagggttatcatcactctggaggtacttagggagtccaaagtgacgaattaactcattaattagtacttttatcacctcagaggctttctccgtctgacatggaaatgcttctacccagttaatraaggtatctacccataccaggagatactggatgccgcttgtctttggcaaaggggtgaaatctatttgtcagccttcccctgggtagcctcccattctttggattccagtggggagaagccattgattgaggagatcactcttaaggaaagtcttgcaagcattaacaacctgtttgatcacttgtagcagatttttacctgagaacaacctctgggccaattgataggttttatccttacc

SEQ ID NO: 297570 - DNA, 616 bp, Homo sapiens
ctgtttctgcaggagaatatttagtttttatttatggagccctttcagattagaggggcttatggagccctttcagattagaggggcttcaagtgggtcagaattctgrggccctcttcctgctgacttagctgcttggtctgccaatctatttccttcagctatttcatccaccccttttggtggccttacaatgtattactgccacttcccataggaggaaagctgagcataatagtctgttagtttcctgatagtatttaatgggagacccattagctgtgaggaagctcctctctttccagatagtggcatgtgcatggaggactaggaaagcatactttgaataagtataaatattaactgcttttcctttgcttaattcaagtgccctcataagggcaattaacttgactagtggagcacttgtgcccaaggagagagatgcactcacaaccatatcatttagggtaactattgcataccctgctttatggatcacttgttctacacagaaacttccatgtgtaaagagaatccttcctctgggaggaatgtggctggatttagagaaggacaggttcttaactgaacttaaaattcctctaatagcaga

SEQ ID NO: 297571 - DNA, 616 bp, Homo sapiens
ctgtttctgcaggagaatatttagtttttatttatggagccctttcagattagaggggcttatggagccctttcagattagaggggcttcaagtgggtcagaattctgaggccctcttcctgctgacttagctgcttggtctgccaatctatttccttcagctatttcatccaccccttttggtggccttacaatgtattactrccacttcccataggaggaaagctgagcataatagtctgttagtttcctgatagtatttaatgggagacccattagctgtgaggaagctcctctctttccagatagtggcatgtgcatggaggactaggaaagcatactttgaataagtataaatattaactgcttttcctttgcttaattcaagtgccctcataagggcaattaacttgactagtggagcacttgtgcccaaggagagagatgcactcacaaccatatcatttagggtaactattgcataccctgctttatggatcacttgttctacacagaaacttccatgtgtaaagagaatccttcctctgggaggaatgtggctggatttagagaaggacaggttcttaactgaacttaaaattcctctaatagcaga

SEQ ID NO: 297572 - DNA, 546 bp, Homo sapiens
ttgctaggttttataaggggattttcctctgctgccctgtgaagaggtagcttccaccatgattgtaagtttcctgaggcctccctggccatgtaaaactttgagtcaattaaacctgtttcctttataaattacccagtcacagttattttttcatagcagcatgagaatggactaatayaataaactggtaacacaaagagtggggcgttgctgtaaagataccaaaatatgtgaaagtgactttagaactagataacaggcagaggctggaacagtctgtagagctcagagaaagatggaatatgtgggaaagtttgagacttcctaaagaattattgaatggctttgaacaatgaaattcaggctgaaatggtctcagatggggatgaagaacttgttgggaactggaggaaaagtgactcttgctatgcaaagagactgaagcattttgcccctgccctagagatttgtggaactttgaacttgagagaaatgacttagagtatttggtggaagaaatttctaagtggcaaagcattcaag

SEQ ID NO: 297573 - DNA, 335 bp, Homo sapiens
catctgaaaatttgccaagatcccctttaatttgccttaagtccagtagagagaaaggtacctgcaccttactggggccatattcaccagacatctgttatagggacaggagtgagactggggcttgtctraaatgaggatttctagaatggggcaagtgagagagaaaaactgggtggaacgatgaggtggacttggagtagcagggccaaaaggagctggctctcgtgctgaaggagcctctgcggtttctctagttccctggcgttgccccttgcagcctctcctgagacggccagtaggggagggctgtgttaatcctacaatgtcaggaa

SEQ ID NO: 297574 - DNA, 515 bp, Homo sapiens
tttgcagggctatgtgaaatcctgacatggtggaaaaaaagaggaaaaaacaacaacaacaaaaaacagctttaatgcagggagggaaaggtgcctggggggaagaaggctcttgctctatgcaaattgattttttcaacagggagaacaaaaaaaaaaaaaaaaaaaaacacctcttaactgttgctttctccctgcttctaagaatagatgaaaaccatgttgttctgaattacatttttgatgactgtgccaagtgctcatcctacccagtaatatctgtgtagtctgcaacaacactcttaaccttataaaagaagagataggaaccattataatccatgamagaagtgggagaaatgccatagaaaagtccgggggtcttggccgaaaccctagtgggtggtcaggaactggagccagtctgggagccttcagaaaacaccaaggtgtggccttggccagatgccttcagttgccccaaaaccttattccaatcctgcaacaactagacc

SEQ ID NO: 297575 - DNA, 585 bp, Homo sapiens
aaatcaaaaccttgagacagagacttgcatttttaaaccggtcagctgatgctcataaaaataaccagaaatgataagagaaaagaaaacttgagatcagattaaaggtctggaattattttcacaaacattgattcacttctggaatgatcctatataatccagcttaaagttaaagatatattctgcttaattttgagcaaacaaaattacaggccacaatcaaattgcgtacattctctacttggagaaataagaccagacctagatagcaaataggttttatcttttttgctggttctcaggaatgtattagaaacatctcaaggttatttctaagctccttagtaaaataatgccttgggtaattatcactgtttcttggagggaatgttggtaggttttttgttgtcttggagttaagtgtacaacttttaaatgcacaaattctccttttattactatttgttagrgaagaattgggtaagtgttatttctctgtaggaccattgacttgtattcactgaaaaaaattacctgtcccaactcttcctagtttaatgtattttcagaaataccaccttt

SEQ ID NO: 297576 - DNA, 571 bp, Homo sapiens
  misc_feature (1)...(571): n = A,T,C or G
aagggttaatattcacaatacctgtctagggcaggaaattgaactacgtctctgaagttctactgtcaattcatcaggataaagaagagtctgcaatccagcacattccaaatgagaaacaggccttaggctgcttctgccgtatttcattagcaacttttctgatcacagggtaatacctaaggaaaaatatgtatgtcacataatgcattgaggaccaaaacaggtgaccagaaagaaaaagaaaagaagaaaaaaatcctcaatcacagttttctgattcctgtagtttatgtgaaagaaaaagaactagattacantataatatataataagttaatatataaacaaaacatttattcttttacttgtttgtttttaggttagaatgaactagaatgaaccattctacttaggacatttttgttattgtttctttcattttatagtcacttattaagtggcctataaaatataagtgcttatgttaaatatttgagatkaggtggcaattaaaagaagatcatgatctttgagtccttcccgcaagttgaagggatttgttgtgtgc

SEQ ID NO: 297577 - DNA, 558 bp, Homo sapiens
taagatttatgcatctcttgcataaaaactctcaagcagttaaaagtaattatgacaaataatggtaagatcaatttagccacaaatgataaggatacagtagtcattatggaggtaaaataattaaagataacacaacttcctgtctcttcaaacacaaaataaayatattgtgcagtgaccaatcatgagaggaaaaatctcctaagtatttttctagactgacctatttatggtccaaaacctagtaagttgtttggcaataaaaatatcactaaggtacaagatttcattaatataaaacttctaataaatccaattgtggtgttcttacaggtgctttgagactccattattatgaatttgaatttgtctcaatttatgtaaatcagcatttgaaacttttgtcatggctaaggattatgactatgtcctcagttataaattcctttttttttaatatttaaaataatttctatgacaacttgaagcagagtttagtaatacatacttgtcaggattactgtaaatctagagattaataatagaaacaaccaa

SEQ ID NO: 297578 - DNA, 558 bp, Homo sapiens
taagatttatgcatctcttgcataaaaactctcaagcagttaaaagtaattatgacaaataatggtaagatcaatttagccacaaatgataaggatacagtagtcattatggaggtaaaataattaaagataacacaacttcctgtctcttcaaacacaaaataaacatattgtgcagtgaccaatcatgagaggaaaaatctcctaagtatttttctagactgacctatttatggtccaaaacctagtaagttgtttggcaataaaaatatcactaaggtacaagatttcattaatataaaacttctaataaatccaattgtggtgttcttacaggtgctttgagactccattattatgaatttgaatttgtctcaatttatgtaaatcagcatttgaaacttttgtcatggctaaggattatgactatgtcctcagttataaattcctttttttttaatatttaaaatmatttctatgacaacttgaagcagagtttagtaatacatacttgtcaggattactgtaaatctagagattaataatagaaacaaccaa

SEQ ID NO: 297579 - DNA, 598 bp, Homo sapiens
ttccagcttccatttaaaaggtcagaggtggcctccaagtccaggttctgttaatgttttctcatctccccatcccaggaaaggtgtcctactgttacygcactatctactataggtccttcaggtcttctatcacctggctaaccagttctatctatttagtcctgatacccaagcattttccatttccttgctagatcctgactgagaagtggtttttcagatgtctaatttttggtcatatcatttatgtattgtctaatatgattttccttatagagaatgaatatccagcaaatttttaatgcagacagttaacactaaagttgacatggaaatcttggtatttgatagtatgtttagaaagtcctatatttttatgctttatttactggagatactagagatgacagcatatttttggcctatgttaggaagtgtagcacctttttaggaaagtcttgcatgagtagaaaattaaaatgtattaagctgttcccctttcacttttcagtatggtgcctgaggtgaactcttaatgagttcatgtattcactccaaaagttaagagatttgaatgttgtagggttgactaagt

SEQ ID NO: 297580 - DNA, 532 bp, Homo sapiens
ttcagggacttgtattatgtaaataaggtgaaatgagggcaggtgtgaatataaaatgatctttactgtagttcccataggaagtggcataaatgatcacacagtccatcacatgaacaaaatccataaatggttttctatgatatttctctgtatcttcccatcttcctcgtacccagcagtttatacacttctttccctttttttatccacactgtgtctgcagcaccttgcaggtcatttttactcccatccttgaccaagtggaggggctggagcatcacctgcctagaatcccctgaacagccagactcttctagtctaacaacatttctgcagaagtcaacctcagtraaacaatgctgattaatgaaaccaccagccccatcccaaaggaaataacctaagatgcaaataagcaaacagtgtttaagagctgtatggatagtggttataaatctttcttactaatttcctatattttataatgttttcaaatgaatatgtgttgatgttacaattaaaataaaac

SEQ ID NO: 297581 - DNA, 454 bp, Homo sapiens
cctccacatggctgccatctgtcaccttggggccatgttctagtggctccacccaagctgccacctgcactgytaaagactccctgccttgaagcctcctccgacatctcctgctggtttttgctattgggcacattttcctaacttacctctctttgctgcatttaatcaatggtccactggtggccactgctcatactctctctttgaaccttcctttaaacaggaaaaaaattcccttctcttatacaaagctttgaaatggcaagcgcttagatatcagggttttagaactctcagctttgcattttcctattgcttttcctctagggtgtgcgtgctatgttctgtggctaaatagagtttgattcaagtaaagatgaatacacaatgctcagacccattagcctactctgatcttcaacctctgtcgctgactccagcttgtgttgag

SEQ ID NO: 297582 - DNA, 1168 bp, Homo sapiens
atgcaaacctgaatgaaagctcacacccctgtattaatatgagacaaagtagaattcagaggaaggagtattagtagtatcagagggattcttgcctaatgataaaagactcatttcacaaaaagacatggcaattaatatataataaacatatatgtacctagcaacagagattccaaatacacgaagtagatctgatgaaacgacttcacaaaactatttgtttctcatcaggttaaataagtaytcacttcatcatctagcaatctcactcctgattatttaccctagagaaataaaacttatgttcccatggaaatctgtataggaatgtttatatcaacaccattcgtagtcaccaaaaactggaaacagcgcaaatgttctccactaagtgaatggataaagaaactgtggtatatccgttaagtgaaatatcactcaacaataaagggaatgaactgctgataccccaaataacttggatgaatcttgaatgtattgtgctcaaatggctgcatactgtaacactcctcttatatgtcattcttgaaaaggtcaaaatatagtagtgaaggactcaccattgattcatgaattttaggccaggagaaagcatwcccagctactctggaggctgaggcaggagaaatgcttgaacccgggaggtggaggttgcagtgagctgagatcgcgccactgcactccagcctgggtgacagagcgagactccgtctctaaaaaaaawatataaaataaaataaataaaatagtacagcattaatatttttcaaactgttcttaggcccatggattatcctacccccaccccacatgcattacatgcccagtatttccaggatgtgttatctccatttcttatctactgatatgggaactaggcattttctctgcctagattcttttactctccactgatctcttttctccacctgacaaatattgaagtcagaataggagttatcttttgggagaaagggaacatttatatatgggaactcttgaggcttctggagtgctgataatgtttgttatcctcatcatggtagtatttaacacagttgggtacattttctataaattcatcaagtaatctgtgctgttttctgtatgcataaaaaaggcatcaagtgaaacttttaaaata

SEQ ID NO: 297583 - DNA, 548 bp, Homo sapiens
cccagctactctggaggctgaggcaggagaaatgcttgaacccgggaggtggaggttgcagtgagctgagatcgcgccactgcactccagcctgggtgacagagcgagactccgtctctaaaaaaaatatataaaataaaataaataaaatagtacagcattaatatttttcaaactgttcttaggcccatggattatcctacccccaccccacatgcattacatgcccagtatttccaggatgtgttatctccatttcttatctactgatatgggaactaggcattttctctgcctagattcttttactctccactgatctcttttctccacctgacmaatattgaagtcagaataggagttatcttttgggagaaagggaacatttatatatgggaactcttgaggcttctggagtgctgataatgtttgttatcctcatcatggtagtatttaacacagttgggtacattttctataaattcatcaagtaatctgtgctgttttctgtatgcataaaaaaggcatcaagtgaaacttttaaaata

SEQ ID NO: 297584 - DNA, 640 bp, Homo sapiens
ctattctggatttactatatggtgatctccagcaatgtgtcttaggaatctttattttgaacaagctccccaggttattaagaaaacactgatttaaatcttgtgttgtacatttgtttaattccaactattttttgctataataaattactccaagtcattatatctgttcattgtgttctggcctgattcgtttcttagtttsaattccaagtggaattacttgctcaacgagtgtgtgcattttaaatctttcaccatattgccaaactattctcactaaaggctctaataatttatatctttacaactgcacatggtacaacactagctgtcaggatcaaaggtgattggatgcaagacatttgtgtgcgctccttgttggtggcattgtgcttccagaacaagtgatgagcaggacttttcaccaccaaatcagttatgttttaaccactgcaactagcagtaaacatttgaagataaattctaaggcaatttcaacgtattttgtagaaagtattaagcagtaagctagaaaataattccttgttcacctcttccactcttccaaatgctatactgtattttaaaccatcactgttgtcaaaggtgtttgaaccagagcgactccatcttgaat

SEQ ID NO: 297585 - DNA, 421 bp, Homo sapiens
agctggagcacatggaatgatcccggaagatcaggcaggaagggggsaactgaagggctttaaagagcatcaaatattttaaaattcaacttccaagcctgaaatctttaagggtttctctattctggattaccaagtaaatttattctcagtgcctactcactttttcttattcttccttatcttccagactttaaaatatatatgattctggactgagttatattactgagttaggtaggttcctaaacaaatacgtataattattgtttcaagaaaagctgtaaagttacatttagtctggataagcaatttgacctgttcgcttgggattactcaggtgaaactctcttttctacgatatacatctcattaatgtttcagcattttaggagcatttcaattttgagccaatatttcc

SEQ ID NO: 297586 - DNA, 545 bp, Homo sapiens
gcaaagttactcatctaattttgctccacaatgttttagacatggataacttggggagattcctgacactgactaggatcaatggaaaggtcataggtctagtgtcactagatgtaactgtttttcaagatttcccttgcgattcaacaattgacatgcccagtaagaggttcccttctgcattctagcctgggcgtggcctggtgcattgggttctgtcgtgtgatgtcttttccttcaagaaccactctgctttcactttacagcaaagggtccacaaggagcctacacagggctcaaaaagcttccttgtaaatttcaggtaagtatttaagggccctttccagttactcattggctgataaatctgtcagatgatcagttgctacaacmaaaggcaagagcaaagtaagataaaattaaaatatggattacttaatttggcacagatcattgcgttgtgccccaatatccattctttccttttacagattagtacgacttctgatttatggctaggtatgtagctgccaagaaactagatc

SEQ ID NO: 297587 - DNA, 639 bp, Homo sapiens
ttaattggtgagctatacgatgctacatggttctgagcttttgagaacttgggatcatctgttttcaaagtgccacaattctgtgactcaaaaatcatacagaacactatcttttttttttgttttaaaattaagagagtatatttgagctttatgtactgcagagagtggctaatctcctatccagataaataatgcaaaccaaccctggatatttttctgaaaaattgaaacaggaattatctaatttcctgaaacagcatgcatggatttgttgtagaaacggtcttttaaccagtctcagagtaggagmactcatgaaaggcccttctccttgtgccctgcatatgagtgtaacattgcaagatgcactaggcatagaatgaacttctttattattttaaaactaatcgttgttgttttataattttattaaatccaaagagggacaattttcatattcattatacaatttataaatttattataacaattttctagcagatggagttttcaatagatagatacattagggctattttccacaaaagggagtcaattttatactattgagatagtatataattgtgtgtaggtattccttagggatttgtttcaggaacctgagtggataccaac

SEQ ID NO: 297588 - DNA, 618 bp, Homo sapiens
gaaaaaagtagaatggatgcagagagtagccattttatcacatatttattgtaaattaaattaagatgtatatcaatacatttaagtaaattaaatgtatatcatcaatacatttatgcattctaaattgaatattataattttaaatactagtttaataactgtgctttataacaaaaagtatataaaaataagaaaaattatgttttttaagcataacactttacttgcatcttaattttttccagttttacaaatgagaaaataaaagatctaagaagtataatgacttgaacaaaattatccgtatgtttaaggggtcgatccttgactagaactcaagtttctgaggctttgttcagtattctttctctattacatcactcttcttgtctgtaagcacatacctaaggatggccatggagaagtaagatttatttaaaaaatgaaatttaaatgtcctctaaaagtttagtaatggtacttaaatgttttcattcgttgcttaataaataaagaatgtttcttgggaacatagaaaaayagagttatatgttcatactgatgattttttttaacttttttttttaagttcaggctgtttttgatgcataacct

SEQ ID NO: 297589 - DNA, 551 bp, Homo sapiens
acatttagcacaattgtttgaggaacacagatggcataaataaataacattaagaataaaaaaaggaacacaaactgtaaggaacttatttcatccacacacttctgtaaagtattgtccattaattattattggtgaattgcatctttgcacttcaatgaaattctgcctttcatttgataactaggttagatattcctactagcttattcactaatcacattattatattataattttctgcttatccctattttaaatagaccataacagataaaatcaaagtgttgrgtgtttttacttttttgagacggagtttcgctcttgtggcccaggctgaagtgcagtggcataatctcggatcactgcaacctctgcctctcaggttccagtgcttctcctgcctcagcctcccaaatagctgggattacaggcaagcaccaccacgcccggctaattttgtatttttagtggagatggggtttagtgtgtgtgtgtgtgtgtgtgtgtgtgtgtgtgtgtgcgcgcgcgcgcgtgtgtgttttatagct

SEQ ID NO: 297590 - DNA, 561 bp, Homo sapiens
ggacctctcttgtggttttgtagttgaatgaattaattcatgtataacctgcagaatcactaaaagaattaaataaggaaattctctmaacagcataaagcactaggcagtaaagatgttactcaagttttcttaatgtttataattttctgcaccaagaaattacagataaggaaaacgcagtgcaacttttttagctactcagcatttcagaattctcagaagagtatcataattatcatatttttatatggttttgcattaaaacataaagtcaaaatcgtgattattattatcaatattgacaaaacagctgtagcagtatctgcctgactgcttacccagaagtaatgtatacctgggccattcggtaaaaattcatgttatgacatatattctttattcatgtattgtctttttctccttgaggtaagtgtctaagaataggcttccagggtaaaaaaaaaattcatcctggtttgcctggaattttctgttttaacactaactttctatatctatgtacccatgaggtctgagcaaaccagaaaagttgattgg

SEQ ID NO: 297591 - DNA, 529 bp, Homo sapiens
tcaagtttaaaatgtaacgttactgcctcatggaatttttctctgacatttcaaagtaaatcagcctctttccttgtcctggtcatcatattcctctgctttttcaatctagtactcactactatctgatacsatcatatttaaaactctcaataacatcattagataaagattattatgactgtccttatatagaagttgaaattgtacttcaggtttgttgaataaattatctaagattaatatttaatcagcagtgctctttgttttccaaaattattattattgcaatttgccactttgacttcccaaattagatctctctctctgcctctctctgtctctcttctactcactctctctctctcacacacacacacacacacacccaaaaatatttactttactttactcaagcagatctaggcaagcctgctttattttgagaagtaaagtgctccatgcaatgcatctttacatctttgtaaataagagaaccactcaaacttcgttcaagatataatcaata

SEQ ID NO: 297592 - DNA, 583 bp, Homo sapiens
gggtctttttgctctcatgaaacctacatattagtgagatgcaataaaaaatacacaaacaaatgtgcagattattgcacaaggaattataattggctatagtaggaagggactgagtaacttacgattccaatttaaaagataataataagttatgaaattgacatgaggaaatgacattttattcagagacttcaaagcccaytgtaaaggcttgtaggtaaaagtgagtttgactaattaaaatctaaaatagagccacaatattggagcataatcaatataacagaaagtgatagggaatgaaatctgacatacaggcttcatgagacgaagtaagaatttggggttttatttgaaatgcagtagtaaggcactgacatatttttacatagaaagcctactggattccttttttaaaaaattatttttttaaatttaagagccaaagtctctatgttgctcaagtttgagtttagtggcatgattatagctcactgtaaccttaaactcctgggctaaagcaatcttctcacctcagcctcctgagtaactgggtctacaggtgcatgctatcattcct

SEQ ID NO: 297593 - DNA, 583 bp, Homo sapiens
gggtctttttgctctcatgaaacctacatattagtgagatgcaataaaaaatacacaaacaaatgtgcagattattgcacaaggaattataattggctatagtaggaagggactgagtaacttacgattccaatttaaaagataataataagttatgaaattgacatgaggaaatgacattttattcagagacttcaaagcccattgtaaaggcttgtaggtaaaagtgagtttgactaattaaaatctaaaatagagccacaatattggagcataatcaatayaacagaaagtgatagggaatgaaatctgacatacaggcttcatgagacgaagtaagaatttggggttttatttgaaatgcagtagtaaggcactgacatatttttacatagaaagcctactggattccttttttaaaaaattatttttttaaatttaagagccaaagtctctatgttgctcaagtttgagtttagtggcatgattatagctcactgtaaccttaaactcctgggctaaagcaatcttctcacctcagcctcctgagtaactgggtctacaggtgcatgctatcattcct

SEQ ID NO: 297594 - DNA, 521 bp, Homo sapiens
ggggaaacaagatggtcatacctggaacaaatagagtacaatataatcaatgtgtacttctatgcttacttttataatatttactaaatcttcaggaatagaacagaataaccaggaaaccagatttctactggggggaggtaaatatggatcttaagacatgggtrgaacttgagtatatggagaaggcagaaagtgcaggtagtttaagtagaagaaagaaaatgagttaatacagaaatgaaaactgtgacagtaaatgagaccaacagcataattggagttccttggagggtagcatgaaattagattggaaaaaccaagatgcagtcctgctactgaagggtttaagaacatagagtaggtgctttctcaaatagtacagactgtcttgacttgtattttccctgtgcattttagactgtgtatttattgtcattcataaaggaacaatgacttaaacaaaacaagttttggcagcctatcaaatggtgaattctctgagagcacagtgcatgcct

SEQ ID NO: 297595 - DNA, 552 bp, Homo sapiens
tagtctctagcatggcacagaatgaacacagtatgtgaaaagctagtagaagagtartttaaataattgatccacattctagtccgatcatcttgtctgtggtgatcttcattgaccagcaatgagctgagagggacagattgagcagactctagcatagtgaggctgatttttacccaacacacacacacacactcacacatttacatacacatgctcacatatgcccttctcttggcctctgtcatctggagcataagcgtaatattttcagcctgtctgccctagatttgatgagataatatttataaattgctttgagaaacatgaaagttgtcctactaataaaaaaaatattttcctgacctcacatttgatttgaaatgcttgaaaattgtctatgtacacttagggggttattgtaagcaaatggtacaatttcagtactcaggaaagaagaggtagagctggccttatgtatccctctgcatattctctttgttgattttacaaatatttcagcattgatttcaaaacaagcaatgtgcaagg

SEQ ID NO: 297596 - DNA, 637 bp, Homo sapiens
caaatagactttaatttgtgagattcaagtctgtttctcctaccatgagaacaaaggtcaatgttagtgtctattttctattatgtccactgggaatcctggaaatagtagacactcaataaatgaatgaaattaccacttacagaagacctattgcattacataccagtgattgtcaaattttaacagtcatacaaatcgcctgaagaccttactaaaaggcaagttttgattcagtggtttggggtgggctggggtaagattctacaattctctaacaagctcctgagtgatgtcgatgctgctggaccacaggtcacactttgagaaggaaggggttgacatttatgagacaatacaggaaagctgggaagctaagtaacttgtccagtttacccaacaggttagaaggaaaccctggattctaaccctgaccctgagactcaggtttgccctgagttctcaagtgtgctatttgctttagtcaactacagtcattcttaaatttgaccacacagttcctctgtcatcttttcaaaattgtgcctgcttttctggactcctgaaaatacygcaaaagaaacatgcattgtctgcccctgactcaggagaaatgcaggttatcatgaacagagat

SEQ ID NO: 297597 - DNA, 555 bp, Homo sapiens
atctactcatgtgcgtaggaagactaaattaaaaatatggcagctggggccattcttggtagttcccaaagcagaagagatgagtttgattctgcactagggatttaagaaatatgttgatgagacccatagcactgtggtcaractgaatgtttacaaatgagtgcacacacacacacacacacacaggctataatctgtataacacgagtgtgtcttgttatctcaagactgtgtgttctaagggatttgtatgccttctttaccatgtgcctagaaataaagtctatatagtgatttcaggcctcttatttgtgttccatgttgtgatttggttgtgattatttccctgaccttgtaaacgccccgagagtggagatttaaaagtggagatttggtcttgcttagcaagtacaactaccataatgctcggcacctaggatagactcaaaggtaacttgctcaacgatttggttacagggtcacccaaattttatctacaaactcttcagatctgcttaaatttctactataagcaattacctgtagctatca

SEQ ID NO: 297598 - DNA, 562 bp, Homo sapiens
atgtttgttaaatgtaatttttctgaatagatgataagcacattgagggtaatcagataatggatatgttccctactggggtaggccgaaaactaaatcataataggaattccatagcttgcaatttatttcgtgaatatcaagtgactggagttccatttttgaaaatgaataaacagaatacatatagttttctactcaaagagagtgagctgattaaaagtaaaatggatgtgaaggtggcactttacctccgtttccttgtttgcagtgtatatactgaactcaggttaatttgattytttgctcctctagtttattctctgtcttcaatagagagtaagattattcacatgtactgatttcaagaacttctaaagtaatttctctgactcaaggcagaacaaggaattcaatgatgcaaaaatatgactgcaagttctattcaatttcttttatttttcccatgaagagtatagataagatttgtgacagaaaactaaagggcctttattccttcattcctctccactaattttaaataacatgtaaagaagaaatt

SEQ ID NO: 297599 - DNA, 610 bp, Homo sapiens
ttcttttttttttactaattttggatttggtttgctcttgcttttttagttctttaagatgcattattaggttgtatatttgaagtctttctacttttttgatgtaggtgcatatttctataaactttcctctttgtactgcttttgatgtatgtcacagtttttggtatgttgggttacaatttttgtatgtttcaaaaaatttttttaatttttcttcttaatttcttcattgaccctctggtcattcaggagcataytgttgaatttccatgtgtttgtacagttttcaaagttcctcttcttattgatttctagttttatttcattgtattcagagaagatacttgatatgatttcaattatttagaattttttaagacttattttgtggtctgtgatatggtctgtctttgggaatgatctatgtgctgaggagaagaatgtgtattatgcaaccactggatgaaatgttctgtaaatatcaattaggtccatttggtctacagtactgattaagttagatgtttctttgttgactttctgcctgtatgatttagccaatgctgaaagtgaggtgttgaaggttctagctattattgtaatgggg

SEQ ID NO: 297600 - DNA, 607 bp, Homo sapiens
gtaggcaccgtgttggttgtacactgattgtgggctactatcctgcccagagaatttcagtctttgtttcttcataccactagatccccaacaaacattttccagatgctgctctaagtgcagcgaacacaggggaacagtgggatccttgggagttgcaagatccttggatatccagttcacagcatgggctgctgctgggagaaggcacagtgcagcccaccaaaacaccctttagaacaaaggaaaccaaatagaaagctctctcctgcctgagagccccctacttgtgtccagtgggtgactgtgcccctcccagaagagtgatgggtgcagtggttgtctctgaaggggaaaagtgttgttctgcccaagcagacaggcaacaccagtggctggaaatggatgaggggaatcttctcccactcccccagtcyactgttgtggacagagccaaggtttttcccactgtgaattggcataagtgcacttagagtgaggctttccagcatgattccaggtggttacacccccactgaaagtgtacctgcctcctggaattgcataaaggtggagcacatctccccctccctacacagagctgctg

SEQ ID NO: 297601 - DNA, 561 bp, Homo sapiens
acgggttgggctatcaatcctttaactgtctggtgaaagtatctcagaataacgttttaaatacatcaaataaaatgtataggattactaaggaaaccagttatatcaaaatacagttatcgaaataattttagaaaacagatttgtaaacagcaatatatgtgcttctttattaatacactaaaattttgaaatgtagtggtgggtctaataaccatcttcatttcaaaataatgatgagtttaaatatttggagatctctccaacaactgcaatacaatataaaaattcttataattactactgctgacaaagtcataaatacttctaatattggtgtgggttggttacttgcattcaaattggaaggmaacatcaactttcagttaggggaaaataaaaataaagaagtaacattttactccaagttgcagaactcacttgggttacaggaatccccaggagatttcttaaaaaaaaaaaaaagacataattacaccctacataatctagtaacagagtctcagcatctggattggtctgtgagtcaaagaaatgaaa

SEQ ID NO: 297602 - DNA, 559 bp, Homo sapiens
tttggagatctctccaacaactgcaatacaatataaaaattcttataattactactgctgacaaagtcataaatacttctaatattggtgtgggttggttacttgcattcaaattggaaggaaacatcaactttcagttaggggaaaataaaaataaagaagtaacattttactccaagttgcagaactcacttgggttacaggaatccccaggagatttcttaaaaaaaaaaaaaagacataattacaccctacataatctagtaacagagtctcagcatctggattggtctgtgagtcaaagaaatgaaagatttcaattcctaaytggtcttcagactaaagttggaatttggcattgggaggaaggtccctttgcacttctacttaactgtttggtgctttagatttttagcattgctccctgctcactttgcaggcagaaggccttaagcaaacagctcagtccaacatgcatcacctgtatgacaaaatccaatttataacccttccacctttgcccactactggtaagccatggactctacactcctttcct

SEQ ID NO: 297603 - DNA, 524 bp, Homo sapiens
tgggaggctgaggcagaagaatcatttgaacagggtaggcagaggttgcagtgagctgagatcactccactgcacttcagtccatgtgagagagagagaccccacctcaaaaacaaacaaacaaacaaacaaacaaamaaaacggtgatatatccatataaaggattgaacatggtacaacatgaataaaccttaaaaacattatattaagtgaaaaaagtagtcacaaaggatgacatattgcatgatttcatttatattaaatgtcaagaacaggcaaatctatagagaaagaaagtagattggttgttgcctagggctggggttataggaggactggatgatgatgactaaggaatgtatggtttctttttggagtaacgaaaaacttctaaaattgattgtggtgatggttgcataactttgtgaatattctaaaagccattgaattatacactttaaatggtaagttgtgtggtgtgtccaacatgcatcgcccaaatgtatggtaatagtaagtctct

SEQ ID NO: 297604 - DNA, 1049 bp, Homo sapiens
tgggaggctgaggcagaagaatcatttgaacagggtaggcagaggttgcagtgagctgagatcactccactgcacttcagtccatgtgagagagagagaccccacctcaaaaacaaacaaacaaacaaacaaacaaacaaaacggtgatatatccatataaaggattgaacatggtacaacatgaataaaccttaaaaacattatattaagtgaaaaaagtagtcacaaaggatgacatattgcatgatttcatttatattaaatgtcaagaacaggcaaatctatagagaaagaaagtagattggttgttgcctagggctggggttataggaggactggatgatgatgactaaggaatgtatggtttctttttggagtaacgaaaaasttctaaaattgattgtggtgatggttgcataactttgtgaatattctaaaagccattgaattatacactttaaatggtaagttgtgtggtgtgtccaacatgcatcgcccaaatgtatggtaatagtaagtctctwtgggaggctgaggcagaagaatcatttgaacagggtaggcagaggttgcagtgagctgagatcactccactgcacttcagtccatgtgagagagagagaccccacctcaaaaacaaacaaacaaacaaacaaacaaacaaaacggtgatatatccatataaaggattgaacatggtacaacatgaataaaccttaaaaacattatattaagtgaaaaaagtagtcacaaaggatgacatattgcatgatttcatttatattaaatgtcaagaacaggcaaatctatagagaaagaaagtagattggttgttgcctagggctggggttataggaggactggatgatgatgactaaggaatgtatggtttctttttggagtaacgaaaaacttctaaaattgattgtggtgatggttgcataactttgtgaatattctaaaagccattgaattatacactwtaaatggtaagttgtgtggtgtgtccaacatgcatcgcccaaatgtatggtaatagtaagtctct

SEQ ID NO: 297605 - DNA, 587 bp, Homo sapiens
tttgttcatctcatgctttatcttcccccaccctctaataatcttaccaatattttgtcctatgatggagaaagatcaaattggcatggaaagccaataaagacactccactattgatgggaaagtgcttcargtgcactggaggcagcatgggcagaacacggacagcagggatattttcataaaagcaaagggctcagtagaatctccaaagtcaagaacaaagcaggaaggggaatccccacaactcccatgtccttctgctccagccaaaggtcttatcatggacttcacagtatattgtgcaacaatagttcaatttaaatgaggtgaacagcagggatactagaagcagtctctggagcaggtgaagtgctcaggtgaattctgaatcattaggggggatcttgagctgtgcttcctctcagaaggttcccaaatggttataaggagggcagaaaataacatgcagttagcagtcacatctctgtttacaggtcccatcatgaattcttacatgtcttctctttggagaagcattgtattgttgcaattaagtatttggtttctgaaggaaaaaatactag

SEQ ID NO: 297606 - DNA, 573 bp, Homo sapiens
gccatttttacataaaagactagtgaaattaaagagtttgaaaatatcaaatgttagtaaagatataactaaatagaacctgtctttgatgggagtgtaaattaatgcaaccttttaatagggaagttggcaatctattgatatttaaaagaaatatatctttagacccagaaattaagcctcaagaaacttttccttcatgtatgtctgacaagggcacaagcatgcatatttaaagacgttcactgtggcactgttttaatgtctaaagattaaaaataacctttgttagtccatttacattgctataaaagaacacctgaggctgggtaatttataaagaaaataaatttgttttggctcacggttctgcaggatgtacaggaagcatggcaccatcatctatctgctcctggtgagggcctcaaaaagcttccactcaaggcagaagagggaggaagcatgtcataaagggagataaggagcaagagagagtgggraggcaacgtcaactcagagtgagaactcactcattatgcggaggagggcaccaagctattcatgaggaatcag

SEQ ID NO: 297607 - DNA, 573 bp, Homo sapiens
gccatttttacataaaagactagtgaaattaaagagtttgaaaatatcaaatgttagtaaagatataactaaatagaacctgtctttgatgggagtgtaaattaatgcaaccttttaatagggaagttggcaatctattgatatttaaaagaaatatatctttagacccagaaattaagcctcaagaaacttttccttcatgtatgtctgacaagggcacaagcatgcatatttaaagacgttcactgtggcactgttttaatgtctaaagattaaaaataacctttgttagtccatttacattgctataaaagaacacctgaggctgggtaatttataaagaaaataaatttgttttggctcacggttctgcaggatgtacaggaagcatggcaccatcatctatctgctcctggtgagggcctcaaaaagcttccactcaaggcagaagagggaggaagcatgtcataaagggagataaggagcaagagagagtggggaggcaacgtcaactcagagtgagaactcactcattatgsggaggagggcaccaagctattcatgaggaatcag

SEQ ID NO: 297608 - DNA, 594 bp, Homo sapiens
tttgctgaaactaaattgccatttgaaatatgattgagagattgacttcagaccatttttttgaacctcacatggctatactaccatctaactcaggtcttccaccatttttctcttacatcttttggcctttagagcagcagtccccaacctttttggcaccagggactggttttgtgaaaggcaatttttctacaatgaactggtgagaatggtttcaggatgactcaagtgcgttatatttgttgtgtactttatattattattatrttgtaagatataattaattatacaactcaccataatgtaaaatcagtgggagccctgaggttgttttcctgcaactagacagtcctatctgggggttatgggagacagtgacagagcattaggcattagattctcataagaagcatgcagcctagatccctcacatgtgcagttcacaataggactcatgcttctataagaatctaatgccgccgttgatctgacaagagcccgagctcaggtggttatgtgagcgatggggaatagctgtgaatacagatgaagctttgcttgctcaactcctgctgtgcagcccagttccta

SEQ ID NO: 297609 - DNA, 594 bp, Homo sapiens
tttgctgaaactaaattgccatttgaaatatgattgagagattgacttcagaccatttttttgaacctcacatggctatactaccatctaactcaggtcttccaccatttttctcttacatcttttggcctttagagcagcagtccccaacctttttggcaccagggactggttttgtgaaaggcaatttttctacaatgaactggtgagaatggtttcaggatgactcaagtgcgttatatttgttgtgtactttatattattattatgttgtaagatataattaattatacaactcaccataatgtaaaatcagtgggagccctgaggttgttttcctgcaactagacagtcctatctgggggttatgggagacagtgacagagcattaggcattagattctcataagaagcatgcagcctagatccctcacatgtgcagttcacaataggactcatgcttctataasaatctaatgccgccgttgatctgacaagagcccgagctcaggtggttatgtgagcgatggggaatagctgtgaatacagatgaagctttgcttgctcaactcctgctgtgcagcccagttccta

SEQ ID NO: 297610 - DNA, 1150 bp, Homo sapiens
tttgctgaaactaaattgccatttgaaatatgattgagagattgacttcagaccatttttttgaacctcacatggctatactaccatctaactcaggtcttccaccatttttctcttacatcttttggcctttagagcagcagtccccaacctttttggcaccagggactggttttgtgaaaggcaatttttctacaatgaactggtgagaatggtttcaggatgactcaagtgcgttatatttgttgtgtactttatattattattatgttgtaagatataattaattatacaactcaccataatgtaaaatcagtgggagccctgaggttgttttcctgcaactagacagtcctatctgggggttatgggagacagtgacagagcattaggcattagattctcataagaagcatgcagcctagatccctcacatgtgcagttcacaataggactcatgcttctataagaatctaatgccgccgytgatctgacaagagcccgagctcaggtggttatgtgagcgatggggaatagctgtgaatacagatgaagctttgcttgctcaactcctgctgtgcagcccagttcctawgtcactttccacagaattgtagtacaatactcctctccgatcttaattttgagagtcagtggattatgcaggtactaagaatcagttgccaattatagatatgctggaccaaagaggaaactgctaacattgtttcccacagtctgatttggcaagaaagaataagtattacgtgatttgaagtggtctacaattcttacggtgagtgagggggaaagtgcattaaaacaaccacaccctataaacattctcactcatccwttcccctctattatttctactttgaataacttcaaaataaaatacgatacaagatcagatttgttttagtaaataggctaacaagatataaaatggaacgtaaaagagaggagaaaggtgacctattgctcatttcactgcttaggttctgaccacgttttattgtgtctttattcttagccaacacaagacccttcctcttccagctgaggtgctgaccttgcctctatccctgacattaagagaaaatctgaaaaacagattgagaatctgacttccaatcaagaatctctc

SEQ ID NO: 297611 - DNA, 555 bp, Homo sapiens
gtcactttccacagaattgtagtacaatactcctctccgatcttaattttgagagtcagtggattatgcaggtactaagaatcagttgccaattatagatatgctggaccaaagaggaaactgctaacattgtttcccacagtctgatttggcaagaaagaataagtattacgtgatttgaagtggtctacaattcttacggtgagtgagggggaaagtgcattaaaacaaccacaccctataaacattctcactcatccattcccctctattatttctactttgaataacttcaaaataaaataygatacaagatcagatttgttttagtaaataggctaacaagatataaaatggaacgtaaaagagaggagaaaggtgacctattgctcatttcactgcttaggttctgaccacgttttattgtgtctttattcttagccaacacaagacccttcctcttccagctgaggtgctgaccttgcctctatccctgacattaagagaaaatctgaaaaacagattgagaatctgacttccaatcaagaatctctc

SEQ ID NO: 297612 - DNA, 555 bp, Homo sapiens
gtcactttccacagaattgtagtacaatactcctctccgatcttaattttgagagtcagtggattatgcaggtactaagaatcagttgccaattatagatatgctggaccaaagaggaaactgctaacattgtttcccacagtctgatttggcaagaaagaataagtattacgtgatttgaagtggtctacaattcttacggtgagtgagggggaaagtgcattaaaacaaccacaccctataaacattctcactcatccattcccctctattatttctactttgaataacttcaaaataaaatacgatacaagatcagatttgttttagtaaataggctaamaagatataaaatggaacgtaaaagagaggagaaaggtgacctattgctcatttcactgcttaggttctgaccacgttttattgtgtctttattcttagccaacacaagacccttcctcttccagctgaggtgctgaccttgcctctatccctgacattaagagaaaatctgaaaaacagattgagaatctgacttccaatcaagaatctctc

SEQ ID NO: 297613 - DNA, 555 bp, Homo sapiens
gtcactttccacagaattgtagtacaatactcctctccgatcttaattttgagagtcagtggattatgcaggtactaagaatcagttgccaattatagatatgctggaccaaagaggaaactgctaacattgtttcccacagtctgatttggcaagaaagaataagtattacgtgatttgaagtggtctacaattcttacggtgagtgagggggaaagtgcattaaaacaaccacaccctataaacattctcactcatccattcccctctattatttctactttgaataacttcaaaataaaatacgatacaagatcagatttgttttagtaaataggctaacaagatataaaatggaacgtaaaagagaggagaaaggtgacctattgctcatttcastgcttaggttctgaccacgttttattgtgtctttattcttagccaacacaagacccttcctcttccagctgaggtgctgaccttgcctctatccctgacattaagagaaaatctgaaaaacagattgagaatctgacttccaatcaagaatctctc

SEQ ID NO: 297614 - DNA, 1165 bp, Homo sapiens
aatctttcttgaactcccacatccatttcattttataattttctgctttaatttcttctatttgtccaaaacctacctgcatatttctaggctgtctttgtttacaaagtaattaaaataaaaataataatgctaataaattgtagagttttgttttattcttttactcatgtttttcaacaaatttgagtttgaactcaaaattttaacaaatttttattcagcactcagcatgtttcagacttcgtttaggccctgaagacaccttggtktataaaacagataaatttcttaccccatagaatttacattctagtgataaaacagataataaaaagatacttcaatcctccagtggtttataaagtatacgtgtttagaggactagcgactgaagagttctgtctctgctaccagtcagtctgtgccttatctggagaaagactactccacaacgacaactgtctaaatctcacattattcacctggtgtatgagaactgcttgatagcaaaggtataaagaactcccagtcaagtataagtggggaaattatggggaactggtataaagaacccaaagawaatctttcttgaactcccacatccatttcattttataattttctgctttaatttcttctatttgtccaaaacctacctgcatatttctaggctgtctttgtttacaaagtaattaaaataaaaataataatgctaataaattgtagagttttgttttattcttttactcatgtttttcaacaaatttgagtttgaactcaaaattttaacaaatttttattcagcactcagcatgtttcagacttcgtttaggccctgaagacaccttggttwataaaacagataaatttcttaccccatagaatttacattctagtgataaaacagataataaaaagatacttcaatcctccagtggtttataaagtatacgtgtttagaggactagcgactgaagagttctgtctctgctaccagtcagtctgtgccttatctggagaaagactactccacaacgacaactgtctaaatctcacattattcacctggtgtatgagaactgcttgatagcaaaggtataaagaactcccagtcaagtataagtggggaaattatggggaactggtataaagaacccaaaga

SEQ ID NO: 297615 - DNA, 582 bp, Homo sapiens
aatctttcttgaactcccacatccatttcattttataattttctgctttaatttcttctatttgtccaaaacctacctgcatatttctaggctgtctttgtttacaaagtaattaaaataaaaataataatgctaataaattgtagagttttgttttattcttttactcatgtttttcaacaaatttgagtttgaactcaaaattttaacaaatttttattcagcactcagcatgtttcagacttcgtttaggccctgaagacaccttggtttataaaacagataaatttcttaccccatagaatttacattctagtgataaaacagataataaaaagatacttcaatcctccagtggtttataaagtatacgtgtttagaggactagcgactgaagagttctgtctctgctaccagtcagtctgtgccttatctggagaaagrctactccacaacgacaactgtctaaatctcacattattcacctggtgtatgagaactgcttgatagcaaaggtataaagaactcccagtcaagtataagtggggaaattatggggaactggtataaagaacccaaaga

SEQ ID NO: 297616 - DNA, 606 bp, Homo sapiens
tgaacacacacaagagggagtagaaaggagaaacaaagaactgaaaaataaattagtgctggatcctcattaaagctcagtgaaggaagacctgatactaacagaagcatagtaactccctctagttgctaatagcccaggctagtgcagcaaagagcgatatgtgagtggcagcatctatagaacccatgagacagactttatattttggacagagcgctggacagggaggtgtgcttttcagattggttactgacactatctattttgtcagaaacagcctctgtctggttttccggtcagtgatttctaggttaaaattatagttttggttttgtaaggcaggagaaagatcttagactccaatgagtggtgagacacagcaagcccatggsgggcagaacaaggcctcaaggttcagagctcatttggtggtaaagtttgaagaaatggcaggccaggagacatgcccaaggggatttattaaaatcccatttcctggagcaatattttcaggggaggtcatgtcagctgagagggtgagactatgaaccctcccccaggacaggcctcactgttggcgcagagacagtaaggctgggcatt

SEQ ID NO: 297617 - DNA, 580 bp, Homo sapiens
gttaaaattatagttttggttttgtaaggcaggagaaagatcttagactccaatgagtggtgagacacagcaagcccatggcgggcagaacaaggcctcaaggttcagagctcatttggtggtaaagtttgaagaaatggcrggccaggagacatgcccaaggggatttattaaaatcccatttcctggagcaatattttcaggggaggtcatgtcagctgagagggtgagactatgaaccctcccccaggacaggcctcactgttggcgcagagacagtaaggctgggcattggtgggtctcttttaagcagctcttcttatacctcttttctcacattcctgctgtgctcctcttttatcatgaaacacagcatgaggggaatatatgaaatctgaggacctggacttaagaactcagctagaaccattccaaagcagtaaggactttctcgcaaggacagtgaatgagagaactttggaagagattcagctcctcacttctgcaggatcctgccctaggttctcagctgcctgtctgcatctatctctacttccagagaggacttgcagtgccagtg

SEQ ID NO: 297618 - DNA, 616 bp, Homo sapiens
catcaaatttctcatcaaaaacaatacaggtaagtcaaaatgaagcaagacttttatggtattcaagagaataacaatttttcaacctgaaattctacacttggaaaaatatctttcagaaagaaagggaaataaagatgtcttcaggcatacaagacctcaaagatttatcaccagcagaacccacaccatgagaaatattaaagaatgtcctgttggcagaaagaaaaatgatacacgggccaggtgtggtggctcaygcctctaaatcccagcactttgggaggctaaggcaggcgactcatttgaggtcaggagttcaagaccagcctgtccaacatggcgaaaccccatctctactaaaaatacaaaaattagctgggcatggtggcgtacgcttgtaatcccagctactccggaggctgaggcagaagaattgcttgaacctggaaggcagaggttgcagtgagacaagatcacaccattgcactccagcctgggcaacagagggagattctctctctcataaaaaaaaaaagataccataggaaaatctggtatttaaagaaatggagaccataaaaatagtagtaatataagtaaatatatttaaaaa

SEQ ID NO: 297619 - DNA, 569 bp, Homo sapiens
tttatcccaggggccatacggagtaattgaaagacattaagcaggtaagtgacttaaccagagttgctggttaagacagcaactggtaagacagttgctgataagacagatcacatacaaaccaaggatggtttgaagagaatgaaccagaagcaggttcctaccatactctaggccagagaaaataaatccagaacctaaaggcagtggtggtagagctggagaaggtgacactgaattagtgtttaggagtaaaaataatcaaatttggggcacaaattaaaggattatatcccagttcctggcttgtactttggggtggtgccatttactgaaatggggtatctacaaagaggaggtttgaggtggaggaagcagacaagcacatttatatctcttatcattgtttcagtccgtgtgaattgtatgatgctatattatattcttttgtgcctttgtctaaattccttatgaatggggctcactgtacytactttgtgtctgtgtagatgtttccctgattatttaccacattttcttcattatctattaaattattcaataacaat

SEQ ID NO: 297620 - DNA, 591 bp, Homo sapiens
ggggtttacttcctgcacctgccaaccccacatataggcatgacacacatgccttgcctacatggttccaaactatattcattcattatacatattcatagccatcatgcactagatactgttcctgcccatggtaataaaaggatgtaaaagaaaatctgatcctgtcaccatggtgcttatagtctaatcagggagacagagtattgatgaaacaactgcactcagccactagttcaatgtggacactgaccacagtaaatttgaaaataaacctagaaaccattatgttttgataggtgatatgttcccaaaacaaaaattcctagtttcttatctccttgccttgtaacacacgctagaatgatatctcctgggcctctgctacctaatagagatcttatcaaaaagtcttgtgttgcttttccrtaatgaagcctgtgcttccttgattggaaccttgtctatgcaaattacaaagggacagacaatagtggacccagctctatcctgtattttatggccctgtcctgcagaaatccattttctagcttgcaacctattcctctctctcctcttggactagttaaa

SEQ ID NO: 297621 - DNA, 388 bp, Homo sapiens
ataccaacaacatatttatacaaatatagcacaaagaaagccaaaccccatttcctgtttggctatgcttcttgtatgatttttggcaccaaataaaccaaattttacttttatattagtgtattattatgtaaaactcaattttttttctcagtatctatttcagtggttataccttgtcttcaagtatctactttggtagactaaacatagtggcattcatgtacctacataaaactgacctttctggtaaaatggaaactgaattccctatcattttgtccctgccatgcccctaccacaagatatgctctttctccgtcrtttctcatcttaaaaatgaggactcccatctattttgttgcttatgccagaaatatggttatag

SEQ ID NO: 297622 - DNA, 619 bp, Homo sapiens
agacttctcattttttcagtcccttgcttcagctccctgcagctaactttggctactcaccaagacacaagtgcatctccttggcctttgttcttgcaaaacttctagcagttgactccagattttatggttacttttggcacaattagcagcagagacagaaataactaggctgtggatgacttgatggacagaagggtctgtcagttcacccttttcttagcatgcagggcacacttcacagatgttaatgtctgagtgcttcctggagtccaaagcagtggtggggcctcttgtcactgaggaggaattattatcctatagcttcactgtttgctgtcattactctgcgttccttcctgttctagctgaaagcctagagggctctacactgcaagtcgtctcatctaatttgtactattcaaatcctgggtgtagttcatattccagcagaggtaatattttacattcctrtaatgaagacaaagcagctttagaaatgttttcaaatgattttttatgtttattattatgtataatttgcccatagttttcttttttttccaactttattgagatatggttgacaaatatgactagaatgtatttaaggtataca

SEQ ID NO: 297623 - DNA, 569 bp, Homo sapiens
ctgtattaaaatggaaggaaattcatataaatacgtgtaggaattatctctactcagccttgccttccaaacatgatatactactactatactttctgaacctagtctcagttactgttttaaattactataggaattgatttaaaaagcgttagcgaatcttcaaacagcaatatcccccaaaagagtgtcatgtaattagccatatcattttatattatttttaatcttcaaaatgcaactcacagcttttgttcacatcttttsttttcaatattctcagacttatagacaaactaatagtagtgcagcataattaagctggtgagaaaatgcattatgttgtcctctccatctttagcacaaacacacagacacactgacttaaatatccacacccaccatgcatgtgaacactgcaatggttggaatgttacaagatagccttggataatggaaaatcactattttgcttgtttgtttttgtattagcaagaaataagcaaagttgtttatcatgaaccttgcttatggactaccttcacctcctattttcttcattttattaa

SEQ ID NO: 297624 - DNA, 550 bp, Homo sapiens
tgactctctaaagtaaatgttctttctgtggccccttcaaggcaataccccaacctaacattcaagtttctgcacaaggcagggcaggaaaactggggactgggcaggatcaaaggcctgacgcataggtgcgggacagtggggactcagggaaggcgaacttgggtaagtgcgccctggtcaataagaagaggccatgggctggaattagactggagagcctggaagctgcagccacatcctatggaacatccacaagagtttctggaatcttttaatctaacatkcaagccccttcttcagctctaagcaacacaggcatcattcatccaacatttattgagcaccaaccatgtgccaggcacttttcaaggctgaggcggggtgaaggagagggcagataaacatactggcatataagtgctttgacagctggaactcaggcatcgaagagaggcacctgccccagccgagggaaggcttccaggaggaggtgatgcgcccaagtcctggggagaagggtctgactggcccctgagctttggccagg

SEQ ID NO: 297625 - DNA, 1163 bp, Homo sapiens
tataataataagtgttatattggtatatcttttttgcattatttaaatttttaccatgtctgtttttaaaaaaatcacaatacacatccttagaaaaacaaaggtattctagaaataaagagataaatcttaatcagaggtaggaagggatatctgcagtcaagagcactgattaccatttatttgacttaggcctaggtttatggtgagtgtacttctgtaaataattataaatcaactgtacaatgcttcacattaaaaaaaaatagaacaaagttaatgcagtcatttattctcactagaagtgatgcatttctccagtccctgatgggcagccctcttgtgccatacacctcatgtttatgtgcctctcatgatgacctgcctgcacacatcaaaatgaccttttaaaagtgagtaatgccttagcttaaacctctttcatgacccctcctcactatctggataaaaatctaaactcctaaacaagactatggcacagactgttaattgtcccttaacaaattactgattcttcttcaataaagtaatatccaaaaggtagctaggcaartgaccaccctgtcccaaaaacctawgcctgtggtaatgataaatatttaataatacaatacttaataatgaatgcttattttctcttggtgattgtgtatattagctgatagacattaagtctataaaatttacctgtacaaattactaaaaagaaatgtataatgttagcaagaattttcaatggatgatttatcttcaaatcaataattgacctttttttttttttwaaaaaaaaagaggtttttatggtccctaatagtttagcgtcaaaataaagcataaaaagagatggacctattattatagacatatatagaagcatttgtacaaacaagtaaaaagaaggagaggaagtgttagaagtagtagtttgacaatatctgataaccaaatttagtgcttcattttcccccaaaatatttctttactcaatttgtcttatgaaaactcacggatatggtctgtgggattgtacattaaaacaccctagtatggaacacaataaaataaaaccatgcaatcacatgactcatggtaatgtgaatttggatgatagcaattgactttttttttttgttttttttttt

SEQ ID NO: 297626 - DNA, 612 bp, Homo sapiens
acccaactattagagattatcagaaagagagagggaaggattagagaagggagaacgatcaaaaacataatatataaacacatctcaaaacaaaaacaaatgatgctcaatatatacttactgaagtattcatatatgcattctttatctcatgtacaccaatcataattattgatcatatattacctgccagaatatatactagctactgaaaagaaaaagagaaataaaatgatatttctgatttccagtctccacccatccctctgctcacttattttttatgttaactcaggcctgtggtaatgataaatatttaataatacaatacttaataatgaatgcttattttctcttggtgattgtgtatattagctgatagacattaagtctataaaatttacctgtacaaattactaaaaagaaatgtataatgttagcaagaattttcaatggatgatttatcttcaaatcaataattgaccttttttttttttttaaaaaaaaagaggtttttatggtccctaatagtttagcgtmaaaataaagcataaaaagagatggacctattattatagacatatatagaagcatttgtacaaacaagtaaaa

SEQ ID NO: 297627 - DNA, 371 bp, Homo sapiens
tgactagaactgactcatactagctaaaaatcaatcatattttttaaaaattttgtgagctggttggttgttaaacacaacagttactaaaagtgaaactgggctgaagcgagtggatcatgaggtcaggcgtttgagaccagcctggccaacatagtgaaatcccgtctctttttgtattttgtaaaaatacaaaaaattargtgggtgtggtggtggctgcctgtaatcccagctacttgggaggctgaggtgggagaattgcttgaacctgggagatggaggttgcggtgagctgagatcgcatcactgcactccagcctgggcgacagtgtgacactccgtctcaaaaaaaaaaaaaaaagtgaaac

SEQ ID NO: 297628 - DNA, 576 bp, Homo sapiens
aaaataaacgtatttctgtgttagccaagatagactaggctgtatgctatggtaacaaataaccccagtatctcaaaaacatctgagttctttgttaygaactctgtcagagttcaccctgagcctgggagaatctttagagcaggagtctcacaagtagtcattaaaaagtaaagactgtgttgactctgggaatccaacattctcattgaggatcatcacaacatagaaaggggcaactggagaatcttactggcgcttttacatcagttaagatttatgcaccaaagattggtgctttgacgcccttgcatgtgtcattggccaaaactagtcacatggtcttgtttgtagtccccttgcccagaaatggaaggagatgtgcatatgggtgtgggcccaagtcatacccatcacagtttcaaaggagtaattttttagtgtttgaataatttgaatattttatagactcttgaagactttgttttctttttatattacctaatgttcacttaacctcaccataaactaggatgccattttattttaaacacagatagaaatgagtctactata

SEQ ID NO: 297629 - DNA, 576 bp, Homo sapiens
actttttattggcattactgattatgaacctgttcatattaatttgatgcaatgttctaaatgagtgagcattcaaacagaatcagtcctatttaatgtataaggcactgtcattgccagccttgttttgatgtgaaaattaagagtggatacaacactttatgcaattatattttaatgttctagggcacaaaaaagagtcctactaaaggagcagataaatgccccttgcattttctgtcttttctgtcagtggtgcaaatccaatgatrtgctggtaaattttaacaactagcttttcaggggtggaaacaagccttcatctgtagtttttttatgagttccatggtgttaatatttccaccatgcctgattgcaattaccaacataatatcactgaatgtggacttgagaaaaagtatatacaattggtttctatgaggtggtacaagccagatccagcacaccactgtgacaacagcaatccccaaattttattggaattgaagctcccaatcattatatgcaaggcttctcctatagtttaagagcatgtgaagaactatgaagatttct

SEQ ID NO: 297630 - DNA, 576 bp, Homo sapiens
actttttattggcattactgattatgaacctgttcatattaatttgatgcaatgttctaaatgagtgagcattcaaacagaatcagtcctatttaatgtataaggcactgtcattgccagccttgttttgatgtgaaaattaagagtggatacaacactttatgcaattatattttaatgttctagggcacaaaaaagagtcctactaaaggagcagataaatgccccttgcattttctgtcttttctgtcagtggtgcaaatccaatgatgtgctggtaaattttaacaactagcttttcaggggtggaaacaagccttcatctgtagtttttttatgagttccatggtgttaatatttccaccatgcctgattgcaattaccaacataatatcactgaatgtggacttgagaaaargtatatacaattggtttctatgaggtggtacaagccagatccagcacaccactgtgacaacagcaatccccaaattttattggaattgaagctcccaatcattatatgcaaggcttctcctatagtttaagagcatgtgaagaactatgaagatttct

SEQ ID NO: 297631 - DNA, 555 bp, Homo sapiens
tggaattgaagctcccaatcattatatgcaaggcttctcctatagtttaagagcatgtgaagaactatgaagatttctaattcccattcttgttccctctattccagaattacatattttagtttactatagatttttgaatacaaatatctactgtccacatatatctctattttttccagggaaatattctatcagattcatgcacagaacttgttagattctgagatctgttgacayataaagtataacttatacctcaattttctcacaaatgggaaacctaaatgccatattttaaacatgtgattaaagggctcatatttaagacaatcctgttctggtgtataatttatgctttaatcatactcctcaatattcatagatgaccaaacaattaactctaatgaccatatgaacagtttttagactaagtaaagataattgagtccagaggcaataaaaagagcaaaagattctcagctgagcattgcgataatttaaacatagatgatgtggtagtgctagaaagatcatctcagggtaaataacaat

SEQ ID NO: 297632 - DNA, 653 bp, Homo sapiens
cttgttccctctattccagaattacatattttagtttactatagatttttgaatacaaatatctactgtccacatatatctctattttttccagggaaatattctatcagattcatgcacagaacttgttagattctgagatctgttgacatataaagtataacttatacctcaattttctcacaaatgggaaacctaaatgccatattttaaacatgtgattaaagggctcatatttaagacaatcctgttctggtgtataatttatgctttaatcatactcctcaatattcatagatgaccaaacaattaactctaatgrccatatgaacagtttttagactaagtaaagataattgagtccagaggcaataaaaagagcaaaagattctcagctgagcattgcgataatttaaacatagatgatgtggtagtgctagaaagatcatctcagggtaaataacaattttgttttccatatgcatgaagcataattttgactctctatttgatcagttcaacagacatcttatatttcataccttcacttattctttttaaactcaacatgctcatggcttccaaactatcctattaccttaagttagttaatcaaactatctcagttttcttttttacactgcttaccattg

SEQ ID NO: 297633 - DNA, 630 bp, Homo sapiens
aggtggtacaagccagatccagcacaccactgtgacaacagcaatccccaaattttattggaattgaagctcccaatcattatatgcaaggcttctcctatagtttaagagcatgtgaagaactatgaagatttctaattcccattcttgttccctctattccagaattacatattttagtttactatagatttttgaatacaaatatctactgtccacatatatctctattttttccagggaaatattctatcagattcatgcacagaacttgttagattctgagatctgttgacatataaagtataacttatacctcaattttctcacaaatgggaaacctaaatgccatattttaaacatgtgattaaagggctcatatttaagacaatcctgttctggtgtataatttatgctttaatcatactcctcaatattcatagatgaccaaacaattaactctaatgaccatatgaacagttttyagactaagtaaagataattgagtccagaggcaataaaaagagcaaaagattctcagctgagcattgcgataatttaaacatagatgatgtggtagtgctagaaagatcatctcagggtaaataacaattttgttttccatatgca

SEQ ID NO: 297634 - DNA, 630 bp, Homo sapiens
aggtggtacaagccagatccagcacaccactgtgacaacagcaatccccaaattttattggaattgaagctcccaatcattatatgcaaggcttctcctatagtttaagagcatgtgaagaactatgaagatttctaattcccattcttgttccctctattccagaattacatattttagtttactatagatttttgaatacaaatatctactgtccacatatatctctattttttccagggaaatattctatcagattcatgcacagaacttgttagattctgagatctgttgacatataaagtataacttatacctcaattttctcacaaatgggaaacctaaatgccatattttaaacatgtgattaaagggctcatatttaagacaatcctgttctggtgtataatttatgctttaatcatactcctcaatattcatagatgaccaaacaattaactctaatgaccatatgaacagtttttagactaagtaaagataattgagtccagaggcaataaaaagagcaaaagattctcagctragcattgcgataatttaaacatagatgatgtggtagtgctagaaagatcatctcagggtaaataacaattttgttttccatatgca

SEQ ID NO: 297635 - DNA, 1212 bp, Homo sapiens
cttgttccctctattccagaattacatattttagtttactatagatttttgaatacaaatatctactgtccacatatatctctattttttccagggaaatattctatcagattcatgcacagaacttgttagattctgagatctgttgacatataaagtataacttatacctcaattttctcacaaatgggaaacctaaatgccatattttaaacatgtgattaaagggctcatatttaagacaatcctgttctggtgtataatttatgctttaatcatactcctcaatattcatagatgaccaaacaattaactctaatgaccatatgaacagtttttagactaagtaaagataattgagtccagaggcaataaaaagagcaaaagattctcagctgagcattgygataatttaaacatagatgatgtggtagtgctagaaagatcatctcagggtaaataacaattttgttttccatatgcatgaagcataattttgactctctatttgatcagttcaacagacatcttatatttcataccttcacttattctttttaaactcaacatgctcatggcttccaaactatcctattaccttaagttagttaatcaaactatctcagttttcttttttacactgcttaccattgwgggaaagcataaatgatatactgaacaaatggtatttaaggtattctgtgctatataagcaccaaattaaatcttcatttatttactttgaaaatgcatatagccttgcagtaagattctcaaataatagatgcaggcttcaaacataatcaccgacatatgatttcaaagtaatatgtggctgctataagaataagtagagtaaacaatgccaaaaattaggcacttgagtgcctggactgcaggttactcctgcccagatgcagaaaagcacgccatccagcttgacagacagatgaagcatttcgctgtagagtctgaataaattctcttcttgaaaataccaacataaattcccaagagaaaacaaaactagaaagctcaagttcatatttgattccwaatcacccccttatattcattgctaaaataaggataccatatgggaatttagtatgatctggacaggtataattgccatcaatggagaaaatacccttaacatcacttcataattatgtcatcaaaatttaataactttaagaattctctccttaa

SEQ ID NO: 297636 - DNA, 603 bp, Homo sapiens
gtattttaaaaaaatcaaaatactatggggtattgaggaaagttgtgcagacgttactgtctccatattccctccctggatgacctttaaactgtcagtcttaatgtttacccacagctgcactgccacagaaggcttacagaggaaaagggcaattgtgatttcttgacatccacagataattactactgctgtttgaatccaaaggatataatctttgctctgccttttctttgtttagtagaaaagaactatttacatcccaactttccttatattttcaatgtaaagygttatcagcaactaccaaaatcacatgcagtctatggaattctcttattcactatattcagtactgaactgtgtaaaaaatacttttaatggcataaaatgaacaaccttagtgccaagtacaaggcaagtgtttagcataataatctcccctctttcccgagacctttccaaaacattggcatgactacgtcacccacagctctggagtctcagagaggatggattaataatatgctgcaagtggaatctattaatttccttccttagatggcaggggttcttctgccttctcactatagtattcattca

SEQ ID NO: 297637 - DNA, 1065 bp, Homo sapiens
tgtgcagacgttactgtctccatattccctccctggatgacctttaaactgtcagtcttaatgtttacccacagctgcactgccacagaaggcttacagaggaaaagggcaattgtgatttcttgacatccacagataattactactgctgtttgaatccaaaggatataatctttgctctgccttttctttgtttagtagaaaagaactatttacatcccaactttccttatattttcaatgtaaagcgttatcagcaactaccaaaatcacatgcagtctatggaattctcttattcactatattcagtactgaactgtgtaaaaaatacttttaatggcataaaatgaacaaccttagtgccaagtacaaggcaagtgtttagcataataatctcccctctttcccragacctttccaaaacattggcatgactacgtcacccacagctctggagtctcagagaggatggattaataatatgctgcaagtggaatctattaatttccttccttagatggcaggggwctttttcaagataaaaggatgacatgttcacctgtcatgtttcaaatgtttgtcttcaaaatatttattgctactgaaattatactatatatwttttttttaattttcatatgtcctccaccagaatacagataccattaaggcttgaactcagtttattagtcattaaagcttagaagaatgcctggtatgtggtagactcttcctatgtatttgatgaaacaataaatgagttacatggaaatttaattatgccctgagacgttgtgctaggaaagtccgggatattaaaagagcataatagatgtgcaggtaggggagatatctgaaaggtcccctgaaggagtgacattgtgacaggtaagtttaggtctgaagaatgtcaaagagttaaacaggcaaaacaaaaaattatcatgattcatggaatctatatgaacataaatgtaatgagtgatttaatcagtctctgaaaatcgtaatataaaatcatgtaaaatcagtagctaatatttattgcgaattcacaatgttcc

SEQ ID NO: 297638 - DNA, 554 bp, Homo sapiens
cctgcctacctaaagctgaaccctcataactcattggtaggagagtcctgattatattctaggttcacccccatgcactatgtaatccatggatgagtgatggctttcctggaccaggggaaaccatggattgtaactacgtattgtagttcccttctatttctaacaactttaggtataggtggtagacacaatgttggccaattagaatataagggaagcctgctggatggcttctgaaaaatatttaataagccttaaaaaacacacacaagaaagaattgactactgctcctttggagactttggagtctgcatgagatatctataacaggggcaatgacttagcaattgtcaagggagttgaaataaagattaaaaagataggtttcttgcctatattatttgctcctgaaccaccattcccagagttgtstgtcttcttggtataaaggataattaattttctctatgtttaagccagtatattggtgttttctgatacgtgaagtcagaggtgtcctatatgacatagattttttccacttaattaa

SEQ ID NO: 297639 - DNA, 584 bp, Homo sapiens
gggcctttttccttttaaaagtcaaatgccatcatctttctagattattaccaggcaagaagaaaaggactgcatatgtgacagacagcactgtcattttgttttcagccagtggataagtagaaaataaattgaagatacacgggtgtaagaagtagctttgtgatttctatgcaaatatcttctgcatgagattattaatcaaatcatcattttcatcaggttattcatgagtttctttagacggtttcaaaaataaataatgaaggataactagaaaaaatcagaaacaatgactagatcagaactaaaatatatgcaactataaaatttcctttcagaattatttttttcctctggctaaagacatatacaagaatctgccactagttagaaatccttattttattaatacrtgaaaagtggaggagctagtaaatagttaaaccttaaagtgtttgtactttttcatccattaatctataactgaaaatgtattccaaattattagtgtagaaaaacattttttagtaatatgttcatcacagcattataataaaacaacttaacatcaaaatacttgt

SEQ ID NO: 297640 - DNA, 584 bp, Homo sapiens
gggcctttttccttttaaaagtcaaatgccatcatctttctagattattaccaggcaagaagaaaaggactgcatatgtgacagacagcactgtcattttgttttcagccagtggataagtagaaaataaattgaagatacacgggtgtaagaagtagctttgtgatttctatgcaaatatcttctgcatgagattattaatcaaatcatcattttcatcaggttattcatgagtttctttagacggtttcaaaaataaataatgaaggataactagaaaaaatcagaaacaatgactagatcagaactaaaatatatgcaactataaaatttcctttcagaattatttttttcctctggctaaagacatatacaagaatctgccactagttagaaatccttattttattaatacgtgaaaagtggaggagctagtaaatagttaaaccttaaagtgtttgtactttttcatccattaatctataacygaaaatgtattccaaattattagtgtagaaaaacattttttagtaatatgttcatcacagcattataataaaacaacttaacatcaaaatacttgt

SEQ ID NO: 297641 - DNA, 537 bp, Homo sapiens
tgttaagccttgcatccatttcaggaactatgccagccactggtggtaccaggcagattaaaaygcaattttgtctttaaagggctagggctggtgatacagttgctgaaacagctggggtaggaaagaagaaaaacatgtaaaaggttgataaagtgctaatgctccacaaatatctgatgctggtttatggagtagatagtggaaatatatgtatgtttccttggcaaaatgagaagagttaaaaacaaaagaggtggaattcacttgattcgaagaacaagaggaaatcagagctgctacctgagaaaatcagtcacataggcaggaagacagatctctgctggtcataaagtcaaggagggtggcagatttggaaaagggtttgacaaagaaagaccccaataaatatatgttgagtaactgtagcaaagatgtgggagaaaatgatttagtgagaacatttcctcatgttggagaatttctggagatgcttttttctaagctctcctgatttgttgttgttgttgctgctgt

SEQ ID NO: 297642 - DNA, 537 bp, Homo sapiens
tgttaagccttgcatccatttcaggaactatgccagccactggtggtaccaggcagattaaaacgcaattttgtctttaaagggctagggctggtgatacagttgctgaaacagctggggtaggaaagaagaaaaacatgtaaaaggttgataaagtgctaatgctccacaaatatctgatgctggtttatggagtagatagtggaaatatatgtatgtttccttggcaaaatgagaagagttaaaaacaaaagaggtggaattcacttgattcgaagaacaagaggaaatcagagctgctacctgagaaaatcagtcacataggcaggaagacagatctctgctggtcataaagtcaaggagggtggcagatttggaaaagggtttgacaaagaaaraccccaataaatatatgttgagtaactgtagcaaagatgtgggagaaaatgatttagtgagaacatttcctcatgttggagaatttctggagatgcttttttctaagctctcctgatttgttgttgttgttgctgctgt

SEQ ID NO: 297643 - DNA, 519 bp, Homo sapiens
tttcaaatataaatctggtttttgatacaggagaaccacttggaaaaagattgcttatgaaagttaaagtgcattcacatgctttcatggcactctaaatatgttcttatttattaattgtactattacatatttaaatgctcaaattgttatagtagtcatatactattaatcttaacaattattaaccttaaaattatcatataaaaagatgtactatgaaacaaacagaaaaggaggaaaaactactgagygaaaggccctggttctagctctgggtcactgtggagctatggaaacttgggcaagctacttactgcctttcggactcagattctttgtccacaatacgaatggtttaatcacacaagttttaaaattaaaacttcacaaattttctgattttcaatttctatttcccacatataatatggattttactattttttaaaatggagaactataaagatcaagaaaacaatgttatcactttatatttactatttcttattaagaaaa

SEQ ID NO: 297644 - DNA, 519 bp, Homo sapiens
tttcaaatataaatctggtttttgatacaggagaaccacttggaaaaagattgcttatgaaagttaaagtgcattcacatgctttcatggcactctaaatatgttcttatttattaattgtactattacatatttaaatgctcaaattgttatagtagtcatatactattaatcttaacaattattaaccttaaaattatcatataaaaagatgtactatgaaacaaacagaaaaggaggaaaaactactgagcgaaaggccctggttctagctctgggtcactgtggagctatggaaacttgggcaagctacttactgcctttcggactcagattctttgtccacaataygaatggtttaatcacacaagttttaaaattaaaacttcacaaattttctgattttcaatttctatttcccacatataatatggattttactattttttaaaatggagaactataaagatcaagaaaacaatgttatcactttatatttactatttcttattaagaaaa

SEQ ID NO: 297645 - DNA, 557 bp, Homo sapiens
ctcttatgcactacaaggcttgcctctataataaaagcaggactttgtacagcacagcttcaggcagcttcagacttggtggccaagtgtgtccaatccaagagagatgtatctataggactatatggcccagatcgcatatctaagttttatgagtaataaagtgacatactgattaatatccttctgctgaatgtttgggtaaatctcaaatagttcttaacttaatcagcttggggtagtagtattaatttggcaagctaaaatcatggcaaacatcrcattagatacctcatattgttttcattcctttattcagtcttcatccaaccaatagttaatcaccagaaaatgaaagagacagacatgattactactctacactgagtctataatctggtgggagaaaacagaaaaaatcaagtaaattataaattaaataattgtagttgtgttaggcacaatgatggctctccaaagatgcccacattctaatccccatactccatgaatatgctgttatatggcaaaggggaattaaaattgcagatgaaata

SEQ ID NO: 297646 - DNA, 587 bp, Homo sapiens
tgttttcattcctttattcagtcttcatccaaccaatagttaatcaccagaaaatgaaagagacagacatgattactactctacactgagtctataatctggtgggagaaaacagaaaaaatcaagtaaattataaattaaataattgtagttgtgttaggcacaatgatggctctccaaagatgcccacattctaatccccatactccatgaatatgctgttatatggcaaaggggaattaaaattgcagatgaaataaaagttgctaatctactaaccttgagatgggaaaaaatttttctgcattatccagtgagaccaatataacaaragaattttacatgttgaagaggaaggcagaagacccagagtcagagtgatgcaatgtgagaaagacttaaccagtcttttgctggctttgaaaatggaggaacagaccatgggccaaggactgcaggctgccattagaagctgaggggggaaaaaaaaaagagtggattctccacaaaggaccagagccctactaactctttgattttagtccagtgaaacccattttagacttctgcgtataagaattataaga

SEQ ID NO: 297647 - DNA, 533 bp, Homo sapiens
ctaaacatcactaatcatcagagaaatgcaaagtcatcagggaaattcacatgataaaaatatatcatttcatccaagtcaaaacggcttttatcaaaaagacagaaaataacaaatgctggcaaggatacggaaaaaggggaaagctcatacactgttggtaggaatgtaaattagtacagccaccatgaaaaatagtatagagaagcctcaaaaaactaaaaatagaactaccacatgatccagcaatctcactggtggttatatatccaaaagataggaaatcaatatattgaagacatatctaygctcctgtttattgcagttcacaatatccaagatatggaatcaacctaagtgcccatcatggataaatttataaagaaaatgtgatatttaaatacaatggaatattattgagcaataaaaaatgaaatcctgtcatttacagcaacatgggtgaaactggagattattatgtcaagtgaaataaatcacgcatagaaagacaactatcctatgttctcactcat

SEQ ID NO: 297648 - DNA, 619 bp, Homo sapiens
tttagttgtgtttaggcaataaacaaatttcctttgattctcagaggatggtgttataaagatgagtaagaggttattaattctctgaaggaacttttaatgtagtcagttggataatgattagcatttgaacagagctttccttagtaaagcattttcacacacacagattcaattggtaagtatttgcagcttgtagtttatgggtgtttgtttgatctccagataaatctgatggcttaatacagatacatgtttttcttctgtaatcaaactgtgaccctgcacgtgagacatgttttaaaaatatatgtcattgagcataaaggaaacaaggaaatgtggcaagttgagtgtaaaacctatcatgattcctcaaaaacctactcaagttatgttctcatactgtgggcttttttgtatcttcttattggaagaataagcaaatgcttacggtggagtttttaaaacagatttgggatgttgattaattctgcacaggccaaaaatgtaaatgcacatttgtcaygaattcaggtttggtacactcccctccaacaaattcaaatcattttctgttattttccaatggccaatgccaagcctaaatttcagacat

SEQ ID NO: 297649 - DNA, 589 bp, Homo sapiens
ggatcaattgaggtgaggagctcaagacaagcctggccaacatggtgaaacgccatctctactaaaatataaaaattagctggacatgctggcatgtgcctgtaatcccagctactcaggaggctgaggcaggagaatcacttgaacccaggaggtggaggttgcagtgagccaagatcatgccactgcactccagcctggggagcagagtgatactctgtctcaaaaaattaaaaaattaagtctgaaagayaacagatagtataaggtcagacttcatgaaattggagaaacaagaacaatccaaacccaaatccagcagaagaaaagaaataacaaagatcagagcagaactaaatgaaattgaagcaacagcaacaacaaaaatacaacagatcaatgaaacaaaaagttagttctttgaaaagataaaattggtagaccattagcaagattcaccaagaaaagaagagagaagatccaagtaaactcaattagaaatgagaacaggagatattgcagcagatagtatataaatacaaaaaaatatgcaaggctactatgaacatctttacatacataaactaga

SEQ ID NO: 297650 - DNA, 589 bp, Homo sapiens
ggatcaattgaggtgaggagctcaagacaagcctggccaacatggtgaaacgccatctctactaaaatataaaaattagctggacatgctggcatgtgcctgtaatcccagctactcaggaggctgaggcaggagaatcacttgaacccaggaggtggaggttgcagtgagccaagatcatgccactgcactccagcctggggagcagagtgatactctgtctcaaaaaattaaaaaattaagtctgaaagataacagatagtataaggtcagacttcatgaaattggagaaacaagaacaatccaaacccaaatccagcagaagaaaagaaataacaaagatcagagcagaactaaatgaaattgaagcaacagcaacaacaaaaatacaacagatcaatgaaacaaaaagttagttctttgaaaagataaaattggtagaccattagcaagrttcaccaagaaaagaagagagaagatccaagtaaactcaattagaaatgagaacaggagatattgcagcagatagtatataaatacaaaaaaatatgcaaggctactatgaacatctttacatacataaactaga

SEQ ID NO: 297651 - DNA, 581 bp, Homo sapiens
gacacatagaggctagaagaatttcagtaatggtagtcaatatgataataccactgtgaaccaggcactgtttgaaatgttccatttattgacttatttaagtctaacaaggtcatgagattctattataatcccattaaaagacaaagtactctgaggtagctctttctcaaagacatgttgggatttacaaccaggccatctgcagcctggctccacagtctagctgtgagctacagctctgcactttctcttttttaaacacagattcacgcacaggcaaacacacacaatacacatgcrtagcaacacatataccctaacacactcacacacagcctatggcgtgatgattatcttagcaatgtttctactttgatttatctctctgtttttctgattgggaagaaaagggaaaaattttctcactcttcaatttataataatggccccaatataatgaatcatctaatctaatataggaagatgttattttagaggagttgaggtacatattttatatgattgaagccaatatcttatctgtgcaattaatttcatggagttctcaaattattaca

SEQ ID NO: 297652 - DNA, 580 bp, Homo sapiens
tatgcttagagactggctgcatgtgtggggctaaggggacagctgrggagatttacgtttaacagttgattaactgacctactagccaatttacctaggcatgcttcatacattcaagttttattttttacctttttagttaatttgatatgtaaattaagcacaccaacttttactcctctaagaaccaatgccattaaccaaacttccgtaaatgtgtgagctgcattttcaattagattgcatctgatgtagaaagcttcatcctttagaaaatgcttcagtctccagtagaaccaatcatatcaatgattctcaaggtgttgtaagatggccagtggtagatattactgtgaaaaaggagcaacattgtgtgttaactaagaaagctacccttggcattctgtacccacaatgaatgcctgcagatacataatctaatattaaagtgacaggcattgcttagtcaaaagcaagaggtacatgtagaataaggcgctttttagagcctaggcttttaatctgtttatagaaaacaatttaaggaaggaagagaaagatgaaggaaggaaggaaggag

SEQ ID NO: 297653 - DNA, 580 bp, Homo sapiens
tatgcttagagactggctgcatgtgtggggctaaggggacagctgaggagatttacgtttaacagttgattaactgacctactagccaatttacctaggcatgcttcatacattcaagttttattttttacctttttagttaatttgatatgtaaattaagcacaccaacttttactcctctaagaaccaatgccattaaccaaacttccgtaaatgtgtgagctgcattttcaattagattgcatctgatgtagaaagcttcatcctttagaaaatgcttcagtctccagtagaaccaatcatatcaatgattctcaaggtgttgtaagatggccagtggtagatattactgtgaaaaaggagcaacattgtgtgttaactaagaaagctacccttggcattctgtacccacaatgaatgcctgyagatacataatctaatattaaagtgacaggcattgcttagtcaaaagcaagaggtacatgtagaataaggcgctttttagagcctaggcttttaatctgtttatagaaaacaatttaaggaaggaagagaaagatgaaggaaggaaggaaggag

SEQ ID NO: 297654 - DNA, 580 bp, Homo sapiens
acattaaggcaattgtagtaataaaaggacaaagcagagtaggagcttaggaaaaggatctactagtagtttttttatcttgctactttgctgaatttgtttaccaattctaatagtgttttsgtggagtttctagtcttttctaaatataagatcatatcatctgcaaataaagataatttaacttcttattttccaatttggattccttttatttctttctcttatctaattgctctagctaggacatctgaattccactctaatgacacctctatggtgccattacctttattcattgcagtttaagatttatagaagtaatataaactgaatttggatttccacaaataacttagattatataattatttaatttcttcttaatctgcttttctgttttgaaattagatatatttatccatatgtgaaaatattgagattgaaatattgaaatattgaaaatattgtgattcctaactcatatttatcactatttttaattattccacagtctactatagcttccttgtatacatggtttaaaaaacctcctgggattgtcaaacacaacatctgc

SEQ ID NO: 297655 - DNA, 580 bp, Homo sapiens
acattaaggcaattgtagtaataaaaggacaaagcagagtaggagcttaggaaaaggatctactagtagtttttttatcttgctactttgctgaatttgtttaccaattctaatagtgttttcgtggagtttctagtcttttctaaatataagatcatatcatctgcaaataaagataatttaacttcttattttccaatttggattscttttatttctttctcttatctaattgctctagctaggacatctgaattccactctaatgacacctctatggtgccattacctttattcattgcagtttaagatttatagaagtaatataaactgaatttggatttccacaaataacttagattatataattatttaatttcttcttaatctgcttttctgttttgaaattagatatatttatccatatgtgaaaatattgagattgaaatattgaaatattgaaaatattgtgattcctaactcatatttatcactatttttaattattccacagtctactatagcttccttgtatacatggtttaaaaaacctcctgggattgtcaaacacaacatctgc

SEQ ID NO: 297656 - DNA, 545 bp, Homo sapiens
atcctcacataccaatattgaacttgaatggaaatggactaaaaactccactcaaaaggcatcaagtggcaagttgaataaagaagcaagaccaactgtatgctgtcttcaatagacccatatcatctgcagtgaccctacaggctgaaaataaagggataragaaggatctatcaagcaaatggaaaacaaaaaggacaggggttgctattcctgtttcagacaaaacaaactacatcgtcaatgataaaaaaggacaaggaaggatattacataataataaagggttcaattcaaaaagaagacttacatatcctagaaatatatgctcccaccacaggagtacctagactcatgaaacaagttcttagagacctacagagaattagataaccacaaaataaccatgggagacttcaaactccactgacggtgttagacaaatcatggaagcaaaaaattaaaaaaaaaaatttgggacctaaactcagcatttgaacaaatggacctaacagacatctacagaatactacacccaacaacaa

SEQ ID NO: 297657 - DNA, 594 bp, Homo sapiens
gatctactggctttctttttcttttgctatatagtaaaagaaaaataatgtggtgtttgaaatcaagaaaataatttaaatttattttgtcgttattatatgaktataaatactccttgacacaaatatttctaaacacagaatcatgatattcttcatttaattttaaataataaagtaataattatagataataccagatgaattgagatcataggtttggtgaattggcgatgtgtaactaatggcaaatataaatctcttactgcttttattttgagaaattgtagtgactgatatactcaaaatgaaggtgatattgctagcctcgatttaaatagaaaaatggaactatagttttcatattcataaccattctatgaagattttgacaaatgcattggagtaaaaaattatcattaacctatgatttatgagataaataaggagtgagtaattacatgtaaatttagaatgtaaaactatttttaatatggctacttttgtaattttattgtcaagacttcattaacatgttactctattattcttgtaactttattgttaaaactttattaacattattaactattt

SEQ ID NO: 297658 - DNA, 594 bp, Homo sapiens
gatctactggctttctttttcttttgctatatagtaaaagaaaaataatgtggtgtttgaaatcaagaaaataatttaaatttattttgtcgttattatatgattataaatactccttgacacaaatatttctaaacacagaatcatgatattcttcatttaattttaaataataaagtaataattatagataataccagatgaattgagatcataggtttggtgaattggcgatgtgtaactaatggcaaatataaatctcttactgcttttattttgagaaattgtagtgactgatatactcaaaatgaaggtgatattgctagcctcgatttaaatagaaaaatggaactatagttttcatattcataaccattctatgaagattttgacaaatgcattggagtaaaaarttatcattaacctatgatttatgagataaataaggagtgagtaattacatgtaaatttagaatgtaaaactatttttaatatggctacttttgtaattttattgtcaagacttcattaacatgttactctattattcttgtaactttattgttaaaactttattaacattattaactattt

SEQ ID NO: 297659 - DNA, 509 bp, Homo sapiens
gagtttggtcctcaggtttttcaatataatcaggttccggttttgtggaaattgttcagctcttccttcagatgttttaacttcacsctggggactgagtctgtcccactgtaccacagtatccagatgaagtttaggtaccttatgtaggaaaagaaaaagactttcccataagcttcagcaggttccttctcatattccatgagcccaaatcaagattgtataagtaaattgatcacaatggccgatggattaaaaaaaaaaaagacaagagataaaaaaaatagaacatctggaatgagacagataaatggatggatgaagagatacagagataaaattgtaagtcataaaaaggctgtcctatttcccatctttagttatgataagaacattctgcaagtttcacaatcactgctcatcttttgatttgctatgaaaacctcaaactgaaaatgtgcttacaaaatattacattttgacaggaaatatattaggtaattttaacg

SEQ ID NO: 297660 - DNA, 623 bp, Homo sapiens
tgtcctccacccctattcctgcccccaaggtccccaggccttcaagctataggactgtgtctggaatgaaataagctcaccttcgtgctgggccttgcctaggaggatcatcaatcttagacatgagagaaacacgttaagaaaagttaccacacttttcaggtccagtggaagttcttaagcagagctttttaaattaaacatagcaagatgaaaagaattggcaaggtgactctataaacactrttgtgatatggtgtgcggaaggggagaaaagaaagaaaggaatacatagtgcaaaatgcagatgaagagctgtttggaagagaagaaaaatttccctgagcgttttgtgctacaaaaatacataagatatacacttattaaaagggaataaaatagaagaggaattgaagagctaaagaaaaaaactgagttccagaatagtactactgacaaactaataaataatatgcatgaagtaagatggagaatagacatgattgcaactgagttatcgtcataatcactgtgactacagaagggaaaaaatcagatatttctcacacagacctgttcctaacatttccaaagcctatggtaagagtaaaatacaatatatc

SEQ ID NO: 297661 - DNA, 623 bp, Homo sapiens
tgtcctccacccctattcctgcccccaaggtccccaggccttcaagctataggactgtgtctggaatgaaataagctcaccttcgtgctgggccttgcctaggaggatcatcaatcttagacatgagagaaacacgttaagaaaagttaccacacttttcaggtccagtggaagttcttaagcagagctttttaaattaaacatagcaagatgaaaagaattggcaaggtgactctataaacactattgtgatatggtgtgcggaaggggagaaaagaaagaaaggaatacatagtgcaaaatgcagatgaagagctgtttggaagagaagaaaaatttccctgagcgttttgtgctacaaaaatacataagatatacacttattaaaagggaataaaatagaagaggaattgaagagctaaagaaaaaaactgagttccagaatagtactactgacaaactaataaataatatgcatgaagtaagatggagaatagacatgattgcaactgagttatcgtcataatcactgtgactacagaagggaaaaaatcagrtatttctcacacagacctgttcctaacatttccaaagcctatggtaagagtaaaatacaatatatc

SEQ ID NO: 297662 - DNA, 1216 bp, Homo sapiens
tgtcctccacccctattcctgcccccaaggtccccaggccttcaagctataggactgtgtctggaatgaaataagctcaccttcgtgctgggccttgcctaggaggatcatcaatcttagacatgagagaaacacgttaagaaaagttaccacacttttcaggtccagtggaagttcttaagcagagctttttaaattaaacatagcaagatgaaaagaattggcaaggtgactctataaacactattgtgatatggtgtgcggaaggggagaaaagaaagaaaggaatacatagtgcaaaatgcagatgaagagctgtttggaagagaagaaaaatttccctgagcgttttgtgctacaaaaatacataagatatacacttattaaaagggaataaaatagaagaggaattgaagagctaaagaaaaaaactgagttccagaatagtactactgacaaactaataaataatatgcatgaagtaagatggagaatagacatgattgcaactgagttatcgtcataatcactgtgactacagaagggaaaaaatcagatatttctcacacagacctgytcctaacatttccaaagcctatggtaagagtaaaatacaatatatcwcttttagttcatcttggtttgtctcattaggtgtccctgtctctctgctcactgctatttgctaaatagcctcttgcagtatggagctatctgctaaaagctatgattactgacactcagcacaaatcagtcagtcactctctgatgaagtccaatcaagtcggtacacaaatgcacctaccaagataataggccaaattttgaactctgtgcttaagaagagaaatctaagataagctgtgaacccgtgaacttttaaaatggtttggttttatatgttcataggtttttactagtttaaaagggctttgtaacacatgcaaaaatcattccctcactttcagccataatgatgatgttattaaagttattaaatgaacaaagtggaagggggtcgtcatgtaaatattaaaacttgaaaagttaaaagcaagtttctaataattaagaaaaaatgtgaaataaaaatattaaataaaaawtttttttttcattaagaatatcatatctaggttggaaaccccagatactaggctggccaggttattttcatttgtatacccaccctccaacttaatgaaatatttaactt

SEQ ID NO: 297663 - DNA, 447 bp, Homo sapiens
aaaaaaaaaagaaagaaagaaaaaactaagagagggagcagttccaacaarttctatgagatcagcattattctgaaaagtcaggtaaagctattacaagaagagatgtacaaaatactagcaaactaaattcaacaacacattaaaaggattatacactatgatcaaatagtatttattcctggaatacaagtatggctcaccatataaaaatcaatcaaggtaacgcaccacattaacagaataaaggacaaaactcacataattatctcaattgaagcaaaaaaaaattgacaaaatttgacaccctttcataaaaaaaaaaaaaaaaaaaaaaaaaaaaaactcaacaaactaggattaggaggaatctacttcaacccactaaagccatatttgtaaaagccacagctaacaccatactcaatggcgaaagactgaaagttt

SEQ ID NO: 297664 - DNA, 447 bp, Homo sapiens
aaaaaaaaaagaaagaaagaaaaaactaagagagggagcagttccaacaagttctatgagatcagcattattctgaaaagtcaggtaaagctattacaagaagagatgtacaaaatactagcaaactaaattcaacaacacattaaaaggattatacactatgatcaaatagtatttattcctggaatacaagtatggctcaccatataaaaatcaatcaaggtaacgcaccacattaacagaataaaggacaaaactcacataattatctcaaytgaagcaaaaaaaaattgacaaaatttgacaccctttcataaaaaaaaaaaaaaaaaaaaaaaaaaaaaactcaacaaactaggattaggaggaatctacttcaacccactaaagccatatttgtaaaagccacagctaacaccatactcaatggcgaaagactgaaagttt

SEQ ID NO: 297665 - DNA, 604 bp, Homo sapiens
aaaaatgtaactcaacaattaacaataacccaatttaaaaatgggcaaaggacttgaagagacatttttttcaaagaagacatacaagtgaccaacagctgtaagaaaagacgctcaacctcattatcaaagaaatgaaagtcaaaagtacaacgaaatatcacctcacacttgttaagttggcttttattaaaaaatcaaaasaaaacaagtgtcagtgaggatatgacaaaattagaacctttgtacactgttggcaggaatgtaaattggtacagtcattagagaaaagagtatgaagtctcctcaaaaaattaaaaacaggactaccatataatccagcaattccgcttctgggcatatatccaaatgaattgaaatcagtaagtcaaaaaaaatctgcattccaatgttcatagcagctttagtcgcaataaccaagaagtggaaacagctcaacatctactgacagattaatggataaagaaaatatggtacatacatagaatgaaatattacttgacctttaaaaaaaggaagttctgcaatagaaacaacagggaatggaaaatgagaagttgttcagtagggtataaagtttcag

SEQ ID NO: 297666 - DNA, 934 bp, Homo sapiens
ttattgaaacttcaactttcattttttcattttccatctactgctttccactgactaagctaaataactatctcgtaatgagtattttccctacttgagctaaattgatttataaacctacgaagaaatagaaacttataaccaaatatcattctttaaacttctgagctagatataaaagaaataatatatttatgactttttatcctgttacacaatctaggaatatagaagttaataattgttggtctcacataatggtatcatttcacataggaaatttttaaggaaaatcttattttcccttttcttttgggtctcactaagtcagtttggtctaagcacaaataagcctaatcagtgcatagataaacagcaagatgagaaaatgtctctcatgtacaaatgttaggccccttactgtccctcctcaccttcaaaaaaacaataaacaggttatgaagcmaggtttctctgttattgtgtattatttccccgctttcctcaggcccgcattatctccactgttatctattctgtaacccatcatwaacctccttttgtcatattacctgagttggttttctggtttcttctcatttaggtagtctctgtcagagggaaggtctagggccgaaggctgttattcagattcttttgtctcatggggwgttccttttatgaagtactctccccctttttgtattgatgtggcttcctgggagccaagctgtagtgattattatctctcccctggatctagctacccagcaagtctgccaggctccaggctggtattggggactttcttcacagagtcctatgatgtgaaccatctgtgagtctgtcaaccatagatacaagcacaatatttgggatgtctctcaggtcctgcaggagcaatttgcttccttcagcaggggtctgtgggtcc

SEQ ID NO: 297667 - DNA, 488 bp, Homo sapiens
gacttgctcaatattcaaacatacaaaaatcaatgtacttcaccatattaacaggctaaagatgaatatatatatatatatatatatatatatatatatatatayacaagcatatctcagatattgcggtttcagttccacacaactgcctaaagcaagtatcgcaataaagtgagtcacataaatttttctgtttcccagtgcatacagaagttatttttatactatacttcagtctcttaagtgtgcaatagcattatgtctagaaatgtacataccttaatttaaaaatacttcattgttaaaaatgctatctgagccttcattgagttggaatgtttttgctagtgggaggtctttcctcgatgttgacagctgctgactgatcagcgtggtggttcctgaaggttggagtgctgtggcgttttcttaaaataagacaacaatgaagtttgcaacatcaatggattctcatgcaagatttctct

SEQ ID NO: 297668 - DNA, 588 bp, Homo sapiens
ttactttttttgcagctattgtgaaaggggttgagttcttgatttgattctcagcttggttgctgttggtgtagagcagagctactgatgtgcgtacattaattttgtatgcagaaactttgctgaattcatttatcagttctaggagctttttggatgagtctttagggttttctaggtatataattatattaccagcaaacagtgacagtttgacttcctccttaccaacttggatggtcttcattactttcacttgctctggctagaacttccagtactatgttgaagaggagtggtgagagtaggcatccttgtcttgttccagttttcagggggaatgctttcaacttttcccattcagtagcatgttggctgtggatttgtcatatatggcttttattacatyaaggtatgtctattctatgctgattttgctgaaggttttaatcataaaggatactggattttgtcaaatgcctttccttcatctattgagatgatcatgagatttttgtttttaattctatttatgttgtgtaccaaggagccctttgactgtcattcaagtctattcacttatattaa

SEQ ID NO: 297669 - DNA, 1105 bp, Homo sapiens
caccttcctcctcactcctctctccagctgcagtttcttcttcatagtcagcctcagccaccagggagaactttaacttttatgccactgaaatggggaggagggcagaatttggatggcatggamcagcatccctcttctcccagaataacacctctggctctttgagcaggggagagagtaggtaacccctggttctcagcttgccccaggtttggaatctctcgacagggagtttgaggtggggcattcagggttccagtgttctcagcctgctgtgcccagggtagtgttttaccccaggagtggagacttggtgggataaaaggagcttcatttttcctggttgctgttcagaatagaacttacacaacacagggctgggaggtgatgagaaatgcaaatggtatgcttctttctttcagggtagcctgggaactagagagagagggaacccccatcttcttggccacctgcctggactagatagagtttctaaaatatagagctgtagtggcagggagaaggaaacaagggaagggwatgtctaatcagttccattgcccattatttccttaaatactaggcagttaatttatataacaactaggtggaagaggttgacacaagatggcagaatagaaggctgcaacaattgtcctccaggcaaaaacaccaatttagcaactwtatgcaaaaaacaaacaaacacatttttaagaacgaaaaatcaggatcaaaaatcaggtgagcacttacagtagcttcttttacctttgttttgctaaacgtggcattgaagaagcaattaaaatagtcttgaatcgctgatgccactcctcccccgaccccacagcagcagtggcttagtgcagaaagctgtgtactgcaaataaggagagtgcagcaattgtgagacattgaactcaatgctgccttattacagcagaaggcaaaataggaccaaactcacttgttgtctgccatagaggaagcatttaaaccatccatagccagaagggaattgccaaacccagcaatcagaactagagttcctgcagcctaatcactttaagctaaactgttatggtatgctaaataaact

SEQ ID NO: 297670 - DNA, 562 bp, Homo sapiens
atgtctaatcagttccattgcccattatttccttaaatactaggcagttaatttatataacaactaggtggaagaggttgacacaagatggcagaatagaaggctgcaacaattgtcctccaggcaaaaacaccaatttagcaactatatgcaaaaaacaaacaaacacatttttaagaacgaaaaatcaggatcaaaaatcaggtgagcacttacagtagcttcttttacctttgttttgctaaacgtggcattgaagaagcaattaaaatagtcttgaatcgctgatgccactcctcccccsaccccacagcagcagtggcttagtgcagaaagctgtgtactgcaaataaggagagtgcagcaattgtgagacattgaactcaatgctgccttattacagcagaaggcaaaataggaccaaactcacttgttgtctgccatagaggaagcatttaaaccatccatagccagaagggaattgccaaacccagcaatcagaactagagttcctgcagcctaatcactttaagctaaactgttatggtatgctaaataaact

SEQ ID NO: 297671 - DNA, 562 bp, Homo sapiens
atgtctaatcagttccattgcccattatttccttaaatactaggcagttaatttatataacaactaggtggaagaggttgacacaagatggcagaatagaaggctgcaacaattgtcctccaggcaaaaacaccaatttagcaactatatgcaaaaaacaaacaaacacatttttaagaacgaaaaatcaggatcaaaaatcaggtgagcacttacagtagcttcttttacctttgttttgctaaacgtggcattgaagaagcaattaaaatagtcttgaatcgctgatgccactcctcccccgaccccacagcagcagtggcttagtgcagaaagctgtgtactgcaaataaggagagtgcagcaattgtgagacattgaactcamtgctgccttattacagcagaaggcaaaataggaccaaactcacttgttgtctgccatagaggaagcatttaaaccatccatagccagaagggaattgccaaacccagcaatcagaactagagttcctgcagcctaatcactttaagctaaactgttatggtatgctaaataaact

SEQ ID NO: 297672 - DNA, 533 bp, Homo sapiens
atactattttaaaaaacttttataatcattacgtttgtatttgtttgcagtcctaacatttacttattatatatttatgatatatcacatctttaagcaacttagatgtattaacattttcaagttgcatagtacaccacttgtaccaattataaatcaggctctactctaaaagttttatatataatatatttgcttttaatgctaacatatgtggttcataactttttgaaataaatgtaacttactagaacattatttgtcaaattgtatatcgaaaaaaatttctctttattctttagtaatatgcaacaaaaccaagagaggaaaatcatgagagctctgtatacagcttttaaaacttctagaaaaacatagaaaaaaaatcaytgtgagcttggtttagacaaagacaaagatttcttagctattacacctaaaactcaatatgttactggaattttttaaaatgtgctcttccaaagttacagacataatgaaaagacaaatcacagactggaagaaaatagtgg

SEQ ID NO: 297673 - DNA, 595 bp, Homo sapiens
gaagctttagtgataaaaatgctaataagattatattatgaacattactatcagactagttttgaaaacataactgataatatttttagaaaaataacttaccaaaatgagctgcaatgatttccaaatactaataattgtatatgcattagagaaataatgtaagcagtttaaatctttcactttcacagtaacttcttatctaattatatcaaatatccaagaaacatttaagcataatcttatttaaactatatgtgaaaataaaaatggaagtaattaaatcaatataaaatttttataaacattatttaacattaaaatattttaagytttaggaaggcacattattatgaaaaatatttaacagtgcaaccttataaatgttgagcactgtgttttttaaaaaattaattataagtacattgttatcattgtaagtttgtgttcttacttgtgaattcaatacaaagctgtggatatattttcaaaacttatttttaattacttcaatataagacaatattttattgctcaagatacttcacagtgtttttattactttaattaatttattatgaaaaaaatactttac

SEQ ID NO: 297674 - DNA, 566 bp, Homo sapiens
tctaaaagctgtcaggaatatctattttatcaattatgaaaaacattttaataataatctaaaatcattaaataatatcaaatatattttttcactaatatgatttcaaaagtttaaagtagcataagttcattcaaatgagtggctcatgtctgtcacaacatatgccaagttttagcaaaacctctgaaacagtaatgaagaaacaacacataagtggaagaaatagaacttttattaaccactatataaaaataatgagttcacacagctttatattctaaaagatattccctgacaaaaattgctagctgtttctttattacatggtttactttcttgggtcatagtaatttatagaaggttgtatctgctagttttgaaaataaagctaaaattgatttatttcttctctatttagtctgcagtctttattattggcagctcctttttctacatggaattgaaaattacaytgagactatggctacattttagaaggtagaaatttcaaaaaagtctgtatgtagacaatcaactaaatacataaaaaagagaaagcaata

SEQ ID NO: 297675 - DNA, 609 bp, Homo sapiens
tgcaattgtttgtagaggctgtaggtcagccttgttgggatargaatgctgggagttttggggactgggactggcttccttgctcctcagactgcagaaggcctattgtgggacttcaccttgtgatcctgtgcgtcagtactccttaataaactccccattcatatatacatctatcctattagttttgtctctttagagaacactgactaatacagagactcagtaagatttaaagattaaggcatgccatcactacaaattttatcagtgcaatggaatttcttaaatgctgttctaagtatgcaaaataaaaccaagtatcttaaggtggatattaataaggacatgggaagcatatcttattcttataccataaaaaggaaggtcctaatgtcttgcaaccattgtatgtctttctctcagatccgaactaaatagagagagagagacagagagagagagagagagagagcctcagcaattgtgcttgttatgagattgattttgtgaaattgaatttgaatcttcaaatggtaatatatgggacttggtgttggattaattcaaaaccttaaagtacctgatgaggatgctgaagggggaaca

SEQ ID NO: 297676 - DNA, 603 bp, Homo sapiens
atgcccccactcagcaagctgtgggcagcaggactgaatgagagctaaaacacttcctggtggcttaaaccttgggactccctgagaaaaagctgtaacatcccttggggctccatggttgctggtatctgagagtttttggtcgctgtcacatccccttcatccaaacaccggcacccaasacagaaactggtcatggcacacccagatcagctgtaggctaagcccggagtcacggtgggtgcaggatcccggctggtagcaatagccaagcacagcttgcccgactgagtggacagagtgagcccagcaagcacgagcaaagcccgggcagagacaccaccgaccacagagatttctggctggcaaagcagcaccaaatcctgtgtcatttctattcccgttagtatttttaccaaatgcattttcagtactaatatttcattgtgcagcccatttaatttgctatatagtaaaactaatgattttattaggcaaagcaaattatgtattttattagttttagatttacaaagtaaatatttacaaaaaggatttttatgttatcaatatcacttattgcattataaatttcttaaatct

SEQ ID NO: 297677 - DNA, 603 bp, Homo sapiens
atgcccccactcagcaagctgtgggcagcaggactgaatgagagctaaaacacttcctggtggcttaaaccttgggactccctgagaaaaagctgtaacatcccttggggctccatggttgctggtatctgagagtttttggtcgctgtcacatccccttcatccaaacaccggcacccaagacagaaactggtcatggcacacccagatcagctgtaggmtaagcccggagtcacggtgggtgcaggatcccggctggtagcaatagccaagcacagcttgcccgactgagtggacagagtgagcccagcaagcacgagcaaagcccgggcagagacaccaccgaccacagagatttctggctggcaaagcagcaccaaatcctgtgtcatttctattcccgttagtatttttaccaaatgcattttcagtactaatatttcattgtgcagcccatttaatttgctatatagtaaaactaatgattttattaggcaaagcaaattatgtattttattagttttagatttacaaagtaaatatttacaaaaaggatttttatgttatcaatatcacttattgcattataaatttcttaaatct

SEQ ID NO: 297678 - DNA, 456 bp, Homo sapiens
aaaaagaataccttatgacagtaggtaataaagacaatcctggcttttcacacacctgatctgtttatttacatggtctcagactatgaagataaatacttacactaaatatgacacctcaaacaagcccaaggctctttgggcagacaactgtttagaattttaaaaagtaccatatggggaagcagagcaagatggccaaaatgaagcctctagcaatcatcccatacacaggaacagcaaatttaacaactatccacacaggaaagtaccttcataagaaacaaaaattgggttagtgatctcagtacctggtttttacatcatatcaagataaaaggattgcaatycctgggcaagtcatggtgctctgctgggctcagagccagtggatttggggtgcacacaacctagtgaggcatgagttggagtggccaagggagtgcttgcatcacc

SEQ ID NO: 297679 - DNA, 549 bp, Homo sapiens
aactacagtttcagggagagaaagtttggtctaataaatcatatatttcataaagagaaaaataaggatgttcaaatggagactgcagaygcagttgcttaaatgatttcttgtctaatattaaatacttttagctttcaaatcttcatgtatagattaaatcccataataagaaacaaataaaatatgtaaaatgttacataattttcttcagtgtacacaaataaaattttctttttaagatgtatttttattaaataggtgaacataattaattgttgattccaaaatttgtaaaccggaatgacctataagccaggaatacttgatagattcctttgtttagctcagtataatattgtagaaagcatcgattgtcccatagattattgcctgtgcctttgtaagtatcactataaaatagaaaaactagtgttaaatgttactctggcttaagaagtctcattactgaaaataagaaatgggaatcatctgctaactctaaatggaagtgagaaatacataaacagaatttatatactgaagaat

SEQ ID NO: 297680 - DNA, 580 bp, Homo sapiens
gtgctcttgactgggtattttgatcttcattgtcaaagagccatctacccttattatcaagaacttacttataatgaaatccatttaactagcttttacaaattcataaataatcactatatacttggaatatattcttcttttcctgtatatgacagagtattaataaaatgatttagataaatacacttgcactaattttgattaaacagtttaaatttgtatacatttttgacctcacaaaattctttacggatttaaattcatcataatttaactgtcagttaatcagaaatgtaaaacataaactctgaaaatatgacaatttcaacacttttttgattcatgytttaacttatgtaatcctatatatatgataatataataaataccatgatttataaaagagcaacaactgagtccaaccttaaatatcatttttttcacccatctaatattatcataagtgccttctttgctaggcctgggatgtatattagtggacaatacagaaaaaatgcttacccataggcaggccctcctttattttatatgccataaagggagtagatggtatatg

SEQ ID NO: 297681 - DNA, 576 bp, Homo sapiens
cgagtctgcaaatgcaaatatttttaggtaaaagaagttaaattagtttaagaaactgaaagaagttgtgtgtggctggagcagagtgaacacaaaataatgtagagcagaaaaaaaagtggataatgagacagaagccagggcatgtaaggcatttaacttcatggcaagaagtttggattttcgtttttgtgtgggttgtaaagcctttgaacacttctaaattaagttaattttgttttttttgttttttttttaaatgcttaggactccagaatccagaagrtataatcagagtgagtggtgggaggtgaggctccagagttagacaggtgctagattataccaagtagtgcaggccactatattaaggatattagaactgattcttggacccactaaaggttttaaagcaataaaatgggcttatcagattcatatttatttcaaacacagaacatgaagatgcatattacaatatttttcatgtggcaaaaatgagactccctgtaagtaacatctatggctaaccgttaaaattacttacattcaaatattttgctaagtgtatgtact

SEQ ID NO: 297682 - DNA, 478 bp, Homo sapiens
gtgggaggtgaggctccagagttagacaggtgctagattataccaagtagtgcaggccactatattaaggatattagaactgattcttggacccactaaaggttttaaagcaataaaatgggcttatcagattcatatttatttcaaacacagaacatgaagatgcatattacaatatttttcatgtggcaaaaatgagactccctgtaartaacatctatggctaaccgttaaaattacttacattcaaatattttgctaagtgtatgtacttcccttaagacttgattgatggaagggaacacaattataacatatgatgacgtgattctttctataatactacaactccattttatgtcactatatacaaattacttaagaaattgaaacattaagttaccaaatatttgacaagagtaaaggaacactgatatggttcagctttgtatccaccaaaatctcatcttgaattgat

SEQ ID NO: 297683 - DNA, 591 bp, Homo sapiens
attccagtttttgtctattcagtatgacgctggctgtgggtttgtcatagacggctctcattattttgaagtatgttccttcagttcctaatctgttgaaggtttttattataaaaggatgttgaatttcattgaagactttttctacatctattgagatactcatgtggtttttgtctttagttctgttttcgtgagtgaaacacatttatttatttaaatatgttgaaccaaatttgcatcacagaaataaagccttgaccatggtaaattcgctttttgatatgctgctaaatttggtttgctggtaccttactgcacattttttgtgtctatgttcattgggaatattggccaaatatttttttttgattctgtctttcccaggttttggtatcaggaygttgctgacttcatggaattagtttgggagcaggccctctacctcaattttttggaatcattttagttgaatcagtttttctttgtgtttctgctagaatttggctgtgaatccatctagttcagggttctttttagttggtaggtttttaattactgattcaatttctgaatttattatcggtctgt

SEQ ID NO: 297684 - DNA, 571 bp, Homo sapiens
tatgactcttgttcttttttttttttttttcattttactggtggggccattctccatttgtttccatggagcctgtgtgtgtgattatatatgagttgcacctcttgaagatagcagactgttgggtcttgtcttttgccaagcttgcaacattacgccttttaagtagagcattaagacaatttatattcaggkttagtattgatatgcaagattttgtttttgccattgtgttgttggctctgttttgtagaattaattgtgtagttgctttattgtgtctgtgggccatgcgcttgggtgtattttttaggaaacaggtttcaatcttttgtttccatgtttagtacttgtccaagtacctcttgtaagggtggtctggttttaataaatttccttagtgtctacttgtctgagaaggaccttattccttctttgcttaagaagtttagtttggtggggtatgatattcctggttgaaaattgtttttcttataatattgaaaagaggctgccaatttcttcgggctattatgcttcctgctgatgataagacagtgtgctgagaaag

SEQ ID NO: 297685 - DNA, 515 bp, Homo sapiens
aattcatgactttcctgaatcttccatgtcctggctgctggaatttgttaaaaagtccccttcttctttagcaaatacaatcacagaatagtgakggaggaaagtttctgattctgggagactggggggagagaaatttatggaggagtggtggaattgattttatattaaagattgtcagatggtttttattttattccttactataatgttggctcaacaggatagagaggatatcattaaaatacacacacacacacacacacacacacacacacacaactttgccattaatcactatatgtatttacagaggcagtttctcttccccttaaacatgaaggcatggcaaattccccaaaacatcattttgttctttgatgactgaaacagtagtgtctaatttctcagggaatgttagtaggttatctttgagggtaaataaattttttgtgaccaaatatattttaagacaatgtggtaaacagttgaattttatttactgcaacatttat

SEQ ID NO: 297686 - DNA, 460 bp, Homo sapiens
ctctgtcactgaggctggagtgcagtgagcaattatggcttactgccttctctacctcctgggctcaaatgatcctcctaccttacccttcccagcagctggaacaatgggtatgtgccaccacaccaggctaattttttattttttatttttttctatacagagtctatctatgttgctggggctgggaaaagtgttgaaattctcaagctcctgggctcaactgatccttccatcttgactttctggtgttaggattacaggtgagaaccaccacacctctcaatattgtatttttataggtggaatacccaaggtatgatcactagacttctaaactccagygcattcttcatacatacctaagtgatagttttacagcataaatcacattatgtaacagcaacaccaggaaacacttccaaccccaacccaaacatctgctttatattgcagagat

SEQ ID NO: 297687 - DNA, 619 bp, Homo sapiens
ccaccacctaattctcatttatcagctcagaatcaattgtgtttcatctctaaatcctacattatacccatacccaacagattatgttgaagtccattgtagatattatattatattatctttaaatatttcagtatttatcagtggtaatctttattttgtccccttatattttttactaaaaaaggtatattattaagtcctttacattattatttgaaaaaaatgtttcaggcatatcttktactgttctaccagacctagaatctgttatgtctccaaggaaacctagaattcttttgtgatttacatgctttttaaaaatatcattttgaataccacttcataaaatttgttcctttaaatcattcaagtttaggatatgactttgtcctgatgggatttttatttttaccacattgtgtaaattattagtggcttctattcaagtagttcattcatttgtccattcatttagtatttatcaatgctaaccataatgccaagtggggtaccaggtgctgggaatatgattatgaaaaacaaaataaaattattttttttttcatggtgctgtcattcttgtgaaggatttctttaatttgaatacacattggaa

SEQ ID NO: 297688 - DNA, 545 bp, Homo sapiens
agccagctaacaacacaattacaagagcaaatctcaaatatcaatattaatcctggatgtaaataggctaaacacccacttaaaaggcacagagtggcacgttggattgagagaaagacccaatcagtctcaatctgctgtcttcaagaggtccatctcacatttaatgatactcagaggccacctgtaatctcagcactttgggaagctgaggcaggtagatcatgaggtcaagagatcgagaccatcttggcygacatggtgaaatcccatctctattaaaaacacacaaaaattagccaggtatggtggcacgtgcctgtagtgccagctactcgggaggctgaggcaggaaaattgcatggaccccagaggtggaggttgcattgagctgagatctcgccactgcactccagcctggtgacagagtgagactccatgaaaacaagaacaaaaacaaaaacaaaaacaaaaacaaaacagcagtagctattcttatatcaggtaaaacagattttaaagaagtaaaattcaagaaagacatt

SEQ ID NO: 297689 - DNA, 1095 bp, Homo sapiens
catgtgcccacccctgcaggcggccttcttcatcaacttgctgtctgggacatgaactaacaactgtagtcacagcccatacagtataaaactttctctaacacttcacaatttgcaaattaccttcctatttgatccttacaatagccatgaaggcaggtattattatcactattctacagatgtggaaactaaaatccacaaatatgaagcaactggatgaagatcacccagctaacaagtgaaagagttggaactggaacgcaagccttcaaaccccaaatccctactgatgatacacaatttgttcaacggtgctttcaaatcatcacaacagtgagctacttctgaacacaggcctgagttatctctgattttagcactcagcctcatctacaaaggcagcattccygaccctgtgagttgagggcctccagagcgcatgtcccacaagaaagagaaaaagcttcacattctgcacctactaaacaggtcgctcaattcctatttcacccaggcaaggagttggcctgcagtacgagtcagtwcatgtgcccacccctgcaggcggccttcttcatcaacttgctgtctgggacatgaactaacaactgtagtcacagcccatacagtataaaactttctctaacacttcacaatttgcaaattaccttcctatttgatccttacaatagccatgaaggcaggtattattatcactattctacagatgtggaaactaaaatccacaaatatgaagcaactggatgaagatcacccagctaacaagtgaaagagttggaactggaacgcaagccttcaaaccccaaatccctactgatgatacacaatttgttcaacggtgctttcaaatcatcacaacagtgagctacttctgaacacaggcctgagttatctctgattttagcactcagcctcatctacaaaggcagcattcctgaccctgtgagttgagggcctccagagcgcatgtcccacaagaaagagaaaaagcttcacattctgcacctacwaaacaggtcgctcaattcctatttcacccaggcaaggagttggcctgcagtacgagtcagt

SEQ ID NO: 297690 - DNA, 520 bp, Homo sapiens
atagtgtttcaatgaacataagagtgtatgtctttttggtatatgaatgcgttttcctcggatatatattcagtaattggattattgggttgagttgtagttcaacttttggttctttgcaaaatctacaaacttctctccaaagtggctgaaagaatgtacaatccaccacctgtacatgtgtcccctattctctgcagcctggtgaacatctgttatttattttttaagagaagccattctgattcatgtgaaatattatcttactgtggttttgatttgcatttctgtgatgattagtgatgttgaacactttttttatgtttgttggtaacttgtgtgtcttctttagagaagtgtctgtgttttgcccacaatttaatrgggttatttatttatttattttttgcttgttgagtgagttccttatagactctgtatattaggccttgctcagatgcatagtttgtgaatatttttgccccattctgtaaagagtctgtttactcccttgataatt

SEQ ID NO: 297691 - DNA, 520 bp, Homo sapiens
atagtgtttcaatgaacataagagtgtatgtctttttggtatatgaatgcgttttcctcggatatatattcagtaattggattattgggttgagttgtagttcaacttttggttctttgcaaaatctacaaacttctctccaaagtggctgaaagaatgtacaatccaccacctgtacatgtgtcccctattctctgcagcctggtgaacatctgttatttattttttaagagaagccattctgattcatgtgaaatattatcttactgtggttttgatttgcatttctgtgatgattagtgatgttgaacactttttttatgtttgttggtaacttgtgtgtcttctttagagaagtgtctgtgttttgcccacaatttaatagggttatttatttatttattttttgcttgttgagtragttccttatagactctgtatattaggccttgctcagatgcatagtttgtgaatatttttgccccattctgtaaagagtctgtttactcccttgataatt

SEQ ID NO: 297692 - DNA, 520 bp, Homo sapiens
atagtgtttcaatgaacataagagtgtatgtctttttggtatatgaatgcgttttcctcggatatatattcagtaattggattattgggttgagttgtagttcaacttttggttctttgcaaaatctacaaacttctctccaaagtggctgaaagaatgtacaatccaccacctgtacatgtgtcccctattctctgcagcctggtgaacatctgttatttattttttaagagaagccattctgattcatgtgaaatattatcttactgtggttttgatttgcatttctgtgatgattagtgatgttgaacactttttttatgtttgttggtaacttgtgtgtcttctttagagaagtgtctgtgttttgcccacaatttaatagggttatttatttatttattttttgcttgttgagtgagttccttatagactctgtrtattaggccttgctcagatgcatagtttgtgaatatttttgccccattctgtaaagagtctgtttactcccttgataatt

SEQ ID NO: 297693 - DNA, 570 bp, Homo sapiens
ttttgcaatcaacaagtacacatttacttacttaagacaaggatatagttacataataagaaataacattcaacaattgaaaatgaaaaattaaacataatccagaaagtagtataaaacaatgtattgaatacaatgtgtataacatagactcaaatactctgaagagatttacttttagcctagattgaaagtggaatggagaacactggatagttcttcagttggccttagaccaacttgattagttytctactctttattgcttgtggttctcaagaataactatagaattgatacggaggcggggagacagggaagtgctgggtagagtagggtggaggtcctggcgagggttccaccttcaggcctgtgcccacggacctaagtaaggacaagcatttctgtttttgtgccagaaaagctgcgttttggcctgccacaacccccatcctctgcccatgtaagcctgagacctttaccaggcagacacaagcaactggactcgaaaggagcagaagagcacagcagcagacaaaggcaggccatcgaggtgggacaacatggaat

SEQ ID NO: 297694 - DNA, 574 bp, Homo sapiens
aatcttgtcaaggtaagaaaagaacagaaggtaattcagattttttctggtgtttttggatactggaacccatgtgataatatttccagatccctttagaggaaaaattaaactgatgacattgggaagtttgggatacacacagtgactcatggtgcttatctacagaaaataggggtctttgtgtcattttagatgccagtgaccatggttcccactgctaaatgcattataggcactaacattttggttgctgtggcatataacatttctgctgcctgaggaggtatgcaccttaactactaagaatttgagccataatagtgggtcataatcttctcttgcctaatatctaagctacctaatccctaaagggtcattcatcaaaacagtaatgtgtattaaatgaaggattcctttttaaatttagracttggtacaaactgcccagtcatggcagtaacagcccagtatggctggtcaaaaaggtgtctggggctttgagactaacaatggactatcacagactgaatgccaaggccacttgggtgggtagccaaaacaagtattccag

SEQ ID NO: 297695 - DNA, 586 bp, Homo sapiens
agcaaaggggaaaactttccttataaaatcatcagaactcctgagaactcacttactatcacaagaacagcatgagggaaccacctgtgtaatctaatcatctcccrcgaggtctgtccctcaacatgtgaggagtacaattctgattaaaattcaagattcaagatgagatttgggtagggacacagagccagaccatatcattcctcccctggcccctctcaaatctcatatttctcaaaagtaaaaacacaagtatgccatcccaacagtttcccaaagtcttaactcattccaacattaactcaaaagtcctagtccaaagtcccaactgagacaaggcaagtcccttctgcctatgagcctataaaatcaaaagcaagttaagttacttctgaggactaagccctgatttttttttttttttatcttgcccaaatttctacctaaggggtctagggagttgtgcccttcaaaatataaatcctcatcacatgggtttatttgaccctacatatcatgacttacttttcaatctgactcttgcataacattatgaggcaataaaaaatatctaacctcaaaa

SEQ ID NO: 297696 - DNA, 261 bp, Homo sapiens
tggttttcctcttcatacattaaataaacgggaatgctctaggagtatcaactcaaaaatatggtgacaatcacaggccaatttgttatttcagtcaacagatccagttgcaggggggcacactccttgtatgagggctacatcagctacagccaccttatgcaaaaatgycaaagaatttgtcccagtgtcccttctaacatctatgccccttactcggtgagatctcttctaagtgctcaccacacttgacactattct

SEQ ID NO: 297697 - DNA, 663 bp, Homo sapiens
acactaaagaagcaaaaagaaataatctagctgatgctgcagcaaaaaatgctgctccaggaaatatagcctattctgtacaggaatgtatctttcatcctccaaataccctaacattctttttcaatatcaacaagcatctagccctcaagagaaacacacctgtcagcagaagggaggcatgtttgaaccatttaaggaattatggctagagcctaayaaaaaactgacagttccaataggtacacaattgcctttccttaagtttattcacgacatgacccatggggcccctgaaaaaaaaatggtatcatgaggaagacaatacttttgaaaaccatcccccatggtagcccaaaatgtatactctcaatgtactattatgctcaaaacataacctgacaagctcttacgtggctcccaaagtcattttcctttgccaataggacctcctgaagtatggccgttggattttatccagatgccaccatctcaaattttcaaatgcattctggtcttagtttgtatgttttcttattgggtagaagcatttctttgttggagagctaccgccttaacagtagggaaagattttgttagaatcattccagcttgggtaactccttctgagctgcacagtgattgtgggactcattttactgg

SEQ ID NO: 297698 - DNA, 663 bp, Homo sapiens
acactaaagaagcaaaaagaaataatctagctgatgctgcagcaaaaaatgctgctccaggaaatatagcctattctgtacaggaatgtatctttcatcctccaaataccctaacattctttttcaatatcaacaagcatctagccctcaagagaaacacacctgtcagcagaagggaggcatgtttgaaccatttaaggaattatggctagagcctaataaaaaactgacagttccaataggtacacaattgcctttccttaagtttattcacgacatgacccatggggcccctgaaaaaaaaatggtatcatgaggaagacaatacttttgaaaaccatcccccatggtagcccaaaatgtatactctcaatgtactattatgctcaaaacataacctgacaagctcttacgtggctcccaaagtcattttcctttgccaataggacctyctgaagtatggccgttggattttatccagatgccaccatctcaaattttcaaatgcattctggtcttagtttgtatgttttcttattgggtagaagcatttctttgttggagagctaccgccttaacagtagggaaagattttgttagaatcattccagcttgggtaactccttctgagctgcacagtgattgtgggactcattttactgg

SEQ ID NO: 297699 - DNA, 663 bp, Homo sapiens
acactaaagaagcaaaaagaaataatctagctgatgctgcagcaaaaaatgctgctccaggaaatatagcctattctgtacaggaatgtatctttcatcctccaaataccctaacattctttttcaatatcaacaagcatctagccctcaagagaaacacacctgtcagcagaagggaggcatgtttgaaccatttaaggaattatggctagagcctaataaaaaactgacagttccaataggtacacaattgcctttccttaagtttattcacgacatgacccatggggcccctgaaaaaaaaatggtatcatgaggaagacaatacttttgaaaaccatcccccatggtagcccaaaatgtatactctcaatgtactattatgctcaaaacataacctgacaagctcttacgtggctcccaaagtcattttcctttgccaataggacctcctgaagtatggccgttggattttatccagatgccaccatctcaaattttcaaatgcattctggtcttagtttgtatgttttcttattgggtagaagcatttctttgttggagagctaccrccttaacagtagggaaagattttgttagaatcattccagcttgggtaactccttctgagctgcacagtgattgtgggactcattttactgg

SEQ ID NO: 297700 - DNA, 663 bp, Homo sapiens
acactaaagaagcaaaaagaaataatctagctgatgctgcagcaaaaaatgctgctccaggaaatatagcctattctgtacaggaatgtatctttcatcctccaaataccctaacattctttttcaatatcaacaagcatctagccctcaagagaaacacacctgtcagcagaagggaggcatgtttgaaccatttaaggaattatggctagagcctaataaaaaactgacagttccaataggtacacaattgcctttccttaagtttattcacgacatgacccatggggcccctgaaaaaaaaatggtatcatgaggaagacaatacttttgaaaaccatcccccatggtagcccaaaatgtatactctcaatgtactattatgctcaaaacataacctgacaagctcttacgtggctcccaaagtcattttcctttgccaataggacctcctgaagtatggccgttggattttatccagatgccaccatctcaaattttcaaatgcattctggtcttagtttgtatgttttcttattgggtagaagcatttctttgttggagagctaccgccttaacagtagggaaagattttgttagaatcattccagyttgggtaactccttctgagctgcacagtgattgtgggactcattttactgg

SEQ ID NO: 297701 - DNA, 531 bp, Homo sapiens
gccacacaaaaaactaaagcgtgacctcgctggaggagttggagctgggctaggcatattgaagcaatctgagttcatgactaacaaagagagacattctttagaaaaaactttcctatcaaaaataggccacatagaagaaatgccattccaggaagagggaaaaagatgggaagctgctttaaaagataatgcagcactcatcaaatggatagaagaaaccagagaaaccatgaaaacatgctcccaaaccaaagatgggaacaaggatgtactcttccccaaaaggggttcatgtctatttaatcacaaatggaatctgacgtggctatgaagcaatggcctataatcctcagyactgaggcacaatccaaactcctgtgcaaaatatatggtcccccaaacttatgaagatttttggatgttaaacgtgaccttcaacattgtgttctcagagcacagacacagaagttaaatgaggctcaaaggtactctgtcatccaacgggcaggaattggggctacagtaaac

SEQ ID NO: 297702 - DNA, 531 bp, Homo sapiens
gccacacaaaaaactaaagcgtgacctcgctggaggagttggagctgggctaggcatattgaagcaatctgagttcatgactaacaaagagagacattctttagaaaaaactttcctatcaaaaataggccacatagaagaaatgccattccaggaagagggaaaaagatgggaagctgctttaaaagataatgcagcactcatcaaatggatagaagaaaccagagaaaccatgaaaacatgctcccaaaccaaagatgggaacaaggatgtactcttccccaaaaggggttcatgtctatttaatcacaaatggaatctgacgtggctatgaagcaatggcctataatcctcagtactgaggcacaatccaaactcctgtgcaaaatatatggtcccccaaacttatgaagatttttggatgttaaaygtgaccttcaacattgtgttctcagagcacagacacagaagttaaatgaggctcaaaggtactctgtcatccaacgggcaggaattggggctacagtaaac

SEQ ID NO: 297703 - DNA, 605 bp, Homo sapiens
ttatttagaactaaaaattgttttaacatttaaaaaaaaatagtgcaataaacacacatcttatgattattagatagatgcagaaaaataccaaaaatctattctatgattaaaaacacttygaaaattaaaaagaaaaaaactctcttcattttataagcacatcaaaactctaaagcatacataatgattaatgatataatatttcaaccttttccagtgaagttagaaatttaaaaaaaggattttcattatcatcacctcaatgtaacattaaactgaaatacactgctagcaaaataagggaaaagaaaatagagtttaagaaataaaaatgaatgtgctattcaaacttatagatgttattgtagaatattaaaaaaatacaataattaaatttataacatcactacaaaaattaattttactgatatctaacagcaatatgccaatacaacaaatttttttgtaggtaataatatttacaattgcatcaaacccaaacatatttataaataaatgcaacaaaaatgtacaagatttctacacagaaaataacagaccattacttagcaaattaagaaaacctaaattaatagagaaac

SEQ ID NO: 297704 - DNA, 605 bp, Homo sapiens
ttatttagaactaaaaattgttttaacatttaaaaaaaaatagtgcaataaacacacatcttatgattattagatagatgcagaaaaataccaaaaatctattctatgattaaaaacacttcgaaaattaaaaagaaaaaaactctcttcattttataagcacatcaaaactctaaagcatacataatgattaatgatataatatttcaaccttttccagtgaagttagaaatttaaaaaaaggattttcattatcatcacctcaatgtaacattaaactgaaatacrctgctagcaaaataagggaaaagaaaatagagtttaagaaataaaaatgaatgtgctattcaaacttatagatgttattgtagaatattaaaaaaatacaataattaaatttataacatcactacaaaaattaattttactgatatctaacagcaatatgccaatacaacaaatttttttgtaggtaataatatttacaattgcatcaaacccaaacatatttataaataaatgcaacaaaaatgtacaagatttctacacagaaaataacagaccattacttagcaaattaagaaaacctaaattaatagagaaac

SEQ ID NO: 297705 - DNA, 530 bp, Homo sapiens
agccagaggaagagacacatagaatgaagtctgagaggggtccaaagatgagtcttctggtcatcctatccctatggagtcctggatggcattacctccttccagctacaatgtgtactgataagtgttgcaatccagggaagctcaccttagcctttggtttccagtgtttttcttggggtttgataatatactgyccacatagctgacctttgtctttctgcccttcttgctggtttgtctaatactgtttgtctgccatttccccagaagtcaaaactgagatagcatgcctcaaagcactcatcataaatcatgttatactgtcgggtggccatccaaagcacccagccaaaccaagacactgttattgggcaggacattccagaggcctagagtacccccagtgggcctcccagtacccaaggtaaaggcaagacctctctttgggtgaagttaatttatcactatacaggaatatactttgacttactcattctttcgttgatgggtatctgtattgtttctac

SEQ ID NO: 297706 - DNA, 577 bp, Homo sapiens
catgttgaattttatcagatgctttttctgcatctattgagatgattatatggtttttgtcctttattctgatgtgatgtatcatgttaactgatttgcatacattgacccatctttgcatccctggtgcaaatctcacttgattgtggtgtattatcattttgctgtgctattggatttggtttgttagtgcttttttgaggatttttgcatctacctttgtcagatatcagcctttagttttctttttatgttgtgtccttctctggttttggtaataggatgatcctggccttgtagaatgaaytggggagaattctctcctcttttattttttgaaatagtttcaggagaattggtattagtttttctttgtatggtataatttggctgtgattccaagtgaccctgggcttttcttggttgggacactttttattactgatttaatctcactacttagtggtctgttcagattttatatttcctcctcattcagtcttggtaagttttatgttttcaggaatatatctgttttccctaggttttctagtttgtcagtatatagctgctcgta

SEQ ID NO: 297707 - DNA, 1118 bp, Homo sapiens
catgttgaattttatcagatgctttttctgcatctattgagatgattatatggtttttgtcctttattctgatgtgatgtatcatgttaactgatttgcatacattgacccatctttgcatccctggtgcaaatctcacttgattgtggtgtattatcattttgctgtgctattggatttggtttgttagtgcttttttgaggatttttgcatctacctttgtcagatatcagcctttagttttctttttatgttgtgtccttctctggttttggtaataggatgatcctggccttgtagaatgaattggggagaattctctcctcttttattttttgaaatagtttcaggagaattggtattagtttttctttgtatggtataatttggctgtgattccaagtgaccctgggcttttcttggttgggacactttttattactgatttaatctcactacttagtggtctgttcagattttatatttcctcstcattcagtcttggtaagttttatgttttcaggaatatatctgttttccctaggttttctagtttgtcagtatatagctgctcgtawtattattgtaatgcagtctctctctttagatctagtaatatttgctttatgaatctgggtacttcagtgttggctgcatatatatttagaattgttatatccactgctggtttaatcactttatggttatataatgaccttctttgtctttttttttttttttaactctttttgacttaaaawctctttaatctattagaaatatagctactcctgctcacttttggtttcattttcatggaatatctttttccatccttttactttcagtctatatgtgtcattaccagtaaggtgagttttttataagtaggatatttggggatctttttaaaaaaaaaatccattcagccattctctattttttaagtgggaaatttaatccatttatattcaaagttattattattattatgagatggagtctcactctgttgcccaggctggagtgcaatggcgggttcttggctcactgcaacctctgcctcctcagttcaagctattctgcatcagcctcctgagtagttaggattacaggca

SEQ ID NO: 297708 - DNA, 524 bp, Homo sapiens
cggtgtgacacacacttgtagtcccagctacttgggaggctgaggtgggaggatccttgagctcaggaggttggggctgcaatgagccatgatcaccactccagccttggcaacagaatgagaccttatctcttataaataaataaacataaaataatgaagtgaaagtcgatacaagaggtggtggagcttgtagcagatgacaaccatgtcccctgaggtgactgatacctccagtgttagaggtggaagarcatcacctctaaataaaaatgatcttctgcgctctcctagttgggacactagtctttggggacaagcaagtactataagagggacttgtatctatacaaagacttgtacaactggggttgaaattttcattaagcatgtaaatgttatcctactttcttgggaatctttgattattgctatggtttgaatatttgtcgcctccaaaattcatgttgaaatttagttgccattataacagtattaagaggtggaacctttacaaggtgatt

SEQ ID NO: 297709 - DNA, 524 bp, Homo sapiens
cggtgtgacacacacttgtagtcccagctacttgggaggctgaggtgggaggatccttgagctcaggaggttggggctgcaatgagccatgatcaccactccagccttggcaacagaatgagaccttatctcttataaataaataaacataaaataatgaagtgaaagtcgatacaagaggtggtggagcttgtagcagatgacaaccatgtcccctgaggtgactgatacctccagtgttagaggtggaagaacatcacctctaaataaaaatgatcttctgcgctctcctagttgggacactagtctttggggacaagcaagtactataagagggacttgtatctatacaaagacttgtacaactgggsttgaaattttcattaagcatgtaaatgttatcctactttcttgggaatctttgattattgctatggtttgaatatttgtcgcctccaaaattcatgttgaaatttagttgccattataacagtattaagaggtggaacctttacaaggtgatt

SEQ ID NO: 297710 - DNA, 539 bp, Homo sapiens
agtacaatgattgtccttgagatgcagtgtgcagtgtgcagtgtacagcagtaaggttaggggtagtagcaggagagaatgtcaggcaggaargccatgggtaatctcggtttggaaccaggatgtactggctgtgaggattcctggaactgtggtttcatgcattgtgtatctgggtaattgagccctgctgaggctgctgagagcctgctgatcctgtgggttgtctggctcagtgctggtcattctggagagtctttgcagaatgaggttttagttttagttccaaaggccccagttctgggatatacgaacaaagcccaggaagtggctggtgcatagaacaccagaatttattcctctatctctattaggcttgagggaggctggaaccctctgttgtagaaatctttgtccagagctgggcctgcccaggtatcctgtgctcctgggccttgagggctccctcaagtctttggggtgccttccatggctgagggtctcagtgatatccaggttgtacaaaagggagcccaggc

SEQ ID NO: 297711 - DNA, 539 bp, Homo sapiens
agtacaatgattgtccttgagatgcagtgtgcagtgtgcagtgtacagcagtaaggttaggggtagtagcaggagagaatgtcaggcaggaaagccatgggtaatctcggtttggaaccaggatgtactggcygtgaggattcctggaactgtggtttcatgcattgtgtatctgggtaattgagccctgctgaggctgctgagagcctgctgatcctgtgggttgtctggctcagtgctggtcattctggagagtctttgcagaatgaggttttagttttagttccaaaggccccagttctgggatatacgaacaaagcccaggaagtggctggtgcatagaacaccagaatttattcctctatctctattaggcttgagggaggctggaaccctctgttgtagaaatctttgtccagagctgggcctgcccaggtatcctgtgctcctgggccttgagggctccctcaagtctttggggtgccttccatggctgagggtctcagtgatatccaggttgtacaaaagggagcccaggc

SEQ ID NO: 297712 - DNA, 1107 bp, Homo sapiens
cacagggatcaggatgacaccatccatggcaggactgtgcctgcgatcacacccttgacttacttctttttcttattctgcttcctccattctcttacccctcttaytgaaagcacttccttaataaatcacttgcataggaatcctcatctcaaagcctgcttctgggaaacagctgaaaagaaagtccatcacacatcttgagtccatccccaacctttactctaaaatatttctccccagcctgctgcatttttatcaaatggtccaccggccagccagtttctttccataaaaacataggagttatcctttatctctttactcctcatctttcatatgaactcattatgttgaatcacctccaaaatgtatctgaaatctatcaatttctactgctgtgtctagtccaagccactattagtatgttttattctgtgtgttttgaggccattcacaggaactgaacctcttatgaagtttgaactctagaatggaaactctctaggcagtaactcatgtgtgtccaggtaaagaagaattcaccatgattwcacagggatcaggatgacaccatccatggcaggactgtgcctgcgatcacacccttgacttacttctttttcttattctgcttcctccattctcttacccctcttattgaaagcacttccttaataaatcacttgcataggaatcctcatctcaaagcctgcttctgggaaacagctgaaaagaaagtccatcacacatcttgagtccatccccaacctttactctaaaatatttctccccagcctgctgcatttttatcaaatggtccaccggccagccagtttctttccataaaaacataggagttatcctttatctctttactcctcatctttcatatgaactcattatgttgaatcacctccaaaatgtatctgaaatctatcaatttctactgctgtgtctagtccaagccactattagtatgttttattctgtgtgttttgaggccattcacaggaactgaacctcttatgaagtttgaactctagaatggaaactctctaggcagtaactcatgtgtgtccaggwaaagaagaattcaccatgatt

SEQ ID NO: 297713 - DNA, 574 bp, Homo sapiens
agtgtataaaatggggaaggtatctggtctacttcatgacatcaggttagagttcagactcaactcttgaggaagaagttgtgctatacatcttttgatatctcctgcatctaacacagtgcttaacatgtagaaagcttccaataaaatattaaagatggaatgaggtcacatgcacaatggcattttgacgaacacaaagcatgcacgacatcatgcgattattaatattgatgaggaaagagtattcaaaggaaatttccataggattcctgagagatgaataataaattgagggtctctggcaatcgttaacattgttgtcaaagttcaacaggcatttccttctcaaaaacaatgaagggaaacccattctactggttcctgctacaactggggatattatgccaaaagggcaagaggaatagagattcctatgtggccctttttgaatttcggaattgagacacactctacccttccccccacccagtctcccctaattraaaaaaaaatagcaatagcctttaatataagcaaacaggaagttttacattcaccaaatgctacagtt

SEQ ID NO: 297714 - DNA, 649 bp, Homo sapiens
tgaacttttagaaattggatttgtagcttatggttcttgaatggcacctcttaaattttgaaattgttgaaaaatatttcgtagcttaaaaataccatgtattgtgaaaactagacaggaaaaaaaaatactgtcttttctggcaccaaacgctctttcaatcagttayttgaattttttcctgtcatagaagagacatataagcagtaaaaaaattaaatgtttgcctggaaagtgagggttggtaacatttaactaatcctgctccagtcttgctttttcgatgatagtcctgggaccaatacactcactgtggttcaatatgtcttattccaacaggttggcttgggtccctgtctggtcatgctggggaagtcaaaagtcagggatcagcacaggattgcatgaacaccagtgaattgttcccctatacatttctccatttcttcttcctccacttccctattgtattcagacctgctctttggtcctttttagacgcctcatgttaaaaaaatctcgccataccaatatagtttattttttatctgcttatatgtttataatttgccaaaattgaatggaccttgatgagaccaaaagcagttttgtttcttctcttgacagcttccgcaaatattttacaagg

SEQ ID NO: 297715 - DNA, 649 bp, Homo sapiens
tgaacttttagaaattggatttgtagcttatggttcttgaatggcacctcttaaattttgaaattgttgaaaaatatttcgtagcttaaaaataccatgtattgtgaaaactagacaggaaaaaaaaatactgtcttttctggcaccaaacgctctttcaatcagttacttgaattttttcctgtcatagaagagacatataagcagtaaaaaaattaaatgtttgcctggaaagtgagggttggtaacatttaactaatcctgctccagtcttgctttttcgatgatagtcctgggaccaatacactcactgtggttcaatatgtcttattccaacaggttggcttgggtccctgtctggtcatgctggggaagtcaaaagtcagggatcagcacaggattgcatgaacaccagtgaattgttcccctatacatttctccatttcttcttcctccacttccctattgtattcagacctgctctttggtcctttttagacrcctcatgttaaaaaaatctcgccataccaatatagtttattttttatctgcttatatgtttataatttgccaaaattgaatggaccttgatgagaccaaaagcagttttgtttcttctcttgacagcttccgcaaatattttacaagg

SEQ ID NO: 297716 - DNA, 558 bp, Homo sapiens
ttctgcacacgaaaagaaatagagtaaacagccaacctaaagaataagaaaatatttgcagactgtatctccagtaaagtgctcatatccagaatctacaggaaactcaaatcagcaagaaaaaaaaaatcccattaaaaaggggacaagtgacatttacagacatttctcaaaagaagatacacaaatggccaataaacatattaaaaatgttcagcatcactaatcagggaaacgcaaattaaaaccrcaatatgatgccaactttaccccagccagaatggccattattaaaaagtaaaaaaaaaaaacaaaaccaaacaaacagtagatgttggtgtacatgtggtaaaaagggaatccttatatattgctggtgggaatgtaaattaatacaaccaccatagaaaacagtatagagatttcacaaagaactaaaaggagatctaccatttgatccagcgatcatactactgggagtctactcaaaagaaaataagtcattatataaaaaaagacacctgtgcatgcatgtttatcacaggccaattcacaatt

SEQ ID NO: 297717 - DNA, 1193 bp, Homo sapiens
tatttcatcaatattttgacattttcagtatagacattctgtacayttaccctttttataatcatataatgttgccttttatttctggtaatttttttctgaaatctttttctgattttaatagagtctcttcaggtattttttgactagcatttgcatgatatttttctcatccttttaccataacctagaaatatcattatatttaaagtgggtagatatcttgtagagaatacatccttaggttttatttttaaaaactttctctgacaatatctgttaaatagtgtgattagactgcatgtttatgtggtggattattttgggcttaggtgtaccattttatcattttcaatttgttctgtttttcattttttttggttttactcttctacttatttttggattatttgattttaatgctgtaaattatctgttgagattttttactctattgctttatatagttttttttttatgttttaagagatgaggtctcagtcagttgcccaagttggagtatagtagccatcatggctcatcacaggcttgaactcctgggctccagtgatcctcccacctcagcttctcaaactwtatttcatcaatattttgacattttcagtatagacattctgtacacttaccctttttataatcatataatgttgccttttatttctggtaatttttttctgaaatctttttctgatwttaatagagtctcttcaggtattttttgactagcatttgcatgatatttttctcatccttttaccataacctagaaatatcattatatttaaagtgggtagatatcttgtagagaatacatccttaggttttatttttaaaaactttctctgacaatatctgttaaatagtgtgattagactgcatgtttatgtggtggattattttgggcttaggtgtaccattttatcattttcaatttgttctgtttttcattttttttggttttactcttctacttatttttggattatttgattttaatgctgtaaattatctgttgagattttttactctattgctttatatagttttttttttatgttttaagagatgaggtctcagtcagttgcccaagttggagtatagtagccatcatggctcatcacaggcttgaactcctgggctccagtgatcctcccacctcagcttctcaaact

SEQ ID NO: 297718 - DNA, 550 bp, Homo sapiens
aattctgcttttcccagtctacccactatcattatttttggagtcctcagataactgctccatgctttctgtctagggtttttatttgcattcagtgagagagacagggtgaaagaaactgactctgtcttgccccagattggtcccaatcagtttaaatattcattcttggcttatgattccctggcaggcatacagggatctgtacccttaattacttaagtcccttactttttttttttttttttttttttgagagagagaggttttcactccatcgccctggctggagtgcagtggtgtgatcttggctcactgcaacctccacctcccaggctcaagtgattcttatacctcagcctccggaatagctgtgattataggcatgtgggcaccacgcctggctaatttttrgatttttagtagagacagcatttcactatcttggccaggcgggttttgaactcctgacctcaagtgatctggctgcctgggcctcccaaagtggttccttactgtttgatatgattcaggtctctcaagttgtaga

SEQ ID NO: 297719 - DNA, 565 bp, Homo sapiens
tttgcacatgctcattttacagttgagaatactgaggctcgcagagtttaataactgaaacctacctcatatggttgttatgggagttaaacgagatcattcaagtaaaaacacctggtacatagaaagcactcaatgagtgttatctgttaataaaacaattattatcaaagtggagacaagagattttagaagtcatgagtgcactggtaacatcagcaaattctaagtcctgacagctgatgatctttctatgtgtcaggatgttttaggcactgcagctacataaagaggtagtggtcagtgcsgtatagttgagagagtcaactgatgtaggattcaggaaaacaagctgggctgacaggggcagtactgggaaattgctgaatctcagagacataatgtagaaggtcaggtgaatcaattatgagactcctagaagtgttctattattaataataaaccctgaccatctcataagtctaatttgttgggagtatccctttggaaatcaggtagggatgaattttatttttatgagatggatttttagttcatagtcact

SEQ ID NO: 297720 - DNA, 446 bp, Homo sapiens
tggctcactgcagcctccacttcttggactcaagcctcccacctcagcctgytgagtaactgggactacagatgcatgccaccatgcctggctaatttttgtattttttttctagagacatggttttgtcatggttcccaggctggtctcgaactcccaggctggtctctgagctcaaatgtccaccctcttcagccttccaaagtgctgggattacaggtgtgagccaccacattcttttcttgtattttaagtcattaaaaaaaaagtttctctattgtagccacttccaaaatagagaacccatgactatgtcttaaagttgtagttttcaaactccagtttgcctggtagtctcctagaggacctattaaaacagatttctaggtcctatccgtagagtgtctgaatcattgtagcctgggaatttgtatttctggcacatt

SEQ ID NO: 297721 - DNA, 616 bp, Homo sapiens
ttgttgggggcatggagcccactcaaaggaaacagaagcttacctcagtgacctatgttaattgttaaaacctgtatttatgaatatatacagacagtccagaccaccagacatgtgagggaaatcaattctaaaggaggaccaagatgaacaaacrgaacattgactctggaagacagaaattaatcaaggaacaaaagaggattttagcaaagcctaattgtattagtgattctggccattttttaaaaggacaagctgcaatgaaagagaagaactcaaaaatagagtttttttaattaatgtttctaaacaggaggcagttgtgttccccagtggacttttaacaatgtctagaagacacttttggctgtgaccagtggggttgggggtgcaaatggcatagtgggcagacgccggggatgctgctcaacatcctacaatgcacaggacagcccccaaaacaaagaattatgtgtcctaaaatgtcaatattgccaagattgagaactcctgctctaaattaaaactattatttccataatgaaagaactgttctttaacatttagaagagatacattacgtctctcagtatggaaagccaaagatgtagag

SEQ ID NO: 297722 - DNA, 616 bp, Homo sapiens
ttgttgggggcatggagcccactcaaaggaaacagaagcttacctcagtgacctatgttaattgttaaaacctgtatttatgaatatatacagacagtccagaccaccagacatgtgagggaaatcaattctaaaggaggaccaagatgaacaaacagaacattgactctggaagacagaaattaatcaaggaacaaaasaggattttagcaaagcctaattgtattagtgattctggccattttttaaaaggacaagctgcaatgaaagagaagaactcaaaaatagagtttttttaattaatgtttctaaacaggaggcagttgtgttccccagtggacttttaacaatgtctagaagacacttttggctgtgaccagtggggttgggggtgcaaatggcatagtgggcagacgccggggatgctgctcaacatcctacaatgcacaggacagcccccaaaacaaagaattatgtgtcctaaaatgtcaatattgccaagattgagaactcctgctctaaattaaaactattatttccataatgaaagaactgttctttaacatttagaagagatacattacgtctctcagtatggaaagccaaagatgtagag

SEQ ID NO: 297723 - DNA, 634 bp, Homo sapiens
tgagttgagttgtgcagacagatcgcaaaacttcttttcaamaactcctccctacacttcctttctcaccttgggttcttcttactcattcccagacattcagatttatttgctaattcattcattctttgtattgatttcttagggcagccaaaacaaactaccacaaacttggtggcttaaaactaacagttctggaggccagaggcccaaaatcgaggtgttgccagggtttgctcctctgcaaaccctgagggagaatctgtcccatgcctctctcctggctactggtgactgcaggctcttctccatgttccttggcttgtagactcaccactccaatctctgtctctgtcttcaagtcacctttcttcctttgtgtcataagtctttccctgcctttttcttgtaaatatgcctgttattgaatttagacaccaccctaaatccaggccaatcttactgagagatccttaatgatatctgaaaagacctttttctcataaggtcatatattcactagttccaggggtcaggaaatgaatgtatctttgggggtgggggacaccattcaatccaccacattcatcaacatatatttattccatcacttctagactattttgcttaggct

SEQ ID NO: 297724 - DNA, 1269 bp, Homo sapiens
tgagttgagttgtgcagacagatcgcaaaacttcttttcaacaactcctccctacacttcctttctcaccttgggttcttcttactcattcccagacattcagatttatttgctaattcattcrttctttgtattgatttcttagggcagccaaaacaaactaccacaaacttggtggcttaaaactaacagttctggaggccagaggcccaaaatcgaggtgttgccagggtttgctcctctgcaaaccctgagggagaatctgtcccatgcctctctcctggctactggtgactgcaggctcttctccatgttccttggcttgtagactcaccactccaatctctgtctctgtcttcaagtcacctttcttcctttgtgtcataagtctttccctgcctttttcttgtaaatatgcctgttattgaatttagacaccaccctaaatccaggccaatcttactgagagatccttaatgatatctgaaaagacctttttctcataaggtcatatattcactagttccaggggtcaggaaatgaatgtatctttgggggtgggggacaccattcaatccaccacattcatcaacatatatttattccatcacttctagactattttgcttaggctwtgagttgagttgtgcagacagatcgcaaaacttcttttcaacaactcctccctacacttcctttctcaccttgggttcttcttactcattcccagacattcagatttatttgctaattcattcattctttgtattgatttcttagggcagccaaaacaaactaccacaaacttggtggcttaaaactaacagttctggaggccagaggcccaaaatcgaggtgttgccagggtttgctcctctgcaaaccctgagggagaatctgtcccatgcctctctcctggctwctggtgactgcaggctcttctccatgttccttggcttgtagactcaccactccaatctctgtctctgtcttcaagtcacctttcttcctttgtgtcataagtctttccctgcctttttcttgtaaatatgcctgttattgaatttagacaccaccctaaatccaggccaatcttactgagagatccttaatgatatctgaaaagacctttttctcataaggtcatatattcactagttccaggggtcaggaaatgaatgtatctttgggggtgggggacaccattcaatccaccacattcatcaacatatatttattccatcacttctagactattttgcttaggct

SEQ ID NO: 297725 - DNA, 531 bp, Homo sapiens
tgaaaaaggatgacagtgacacaaattgggaccttcatgagaactggacatttggtctccttgaatgtgctcctttgtgcagaaaaaaccgagattgtgtcacagcactccagcctggacaacagagtaagactccatctcaaaaaacaaactataaactaatttcctcccaaagttagttcagcctacacccaggagtgaacaaggacagcttggaagttagagtaaagatggagttggttaggtcagatctctttcactgcctcagttacattttgcaatggtggtttgctctcatgagctaggccaaggctagacttcaccagatgctgcatccgtgttcaacrctttgccctccctaatctttgtttcaaagagtgctccctcagttaatcacatgcttctaaatccttgtcttaggttctgcttctagggaacctgacccttacgtatgtacatatgcatgaacatgcatacatacatgtacatatgtatgtacttacaatgactttttaattttcagctggaagt

SEQ ID NO: 297726 - DNA, 600 bp, Homo sapiens
cagcatgtcttaaaccagactcatatatcatctggtctctgccattcctaaattaatacttttctttaacttctctttttctcagtggtcatatcataagttcttccaacaactgagtttacaattttagggtggttttttatgatgcattgcctctttgacaatatccatataacctcaaaagtctgttaatcatgcttcttcagtatccctctgaaagaatttttatttctgctgatgtcattgagttcatattttattctcctgtattctcctcttattccaaatgtgcaagatggctccctaaagtgatcttcctgtccccaccgttctttcccctgatcacatcatgctcggaccaatatctgaaagcaagaatctttgtaagtcattacgttgttaaatgacatctctattgggtgtagaataaagccctgaagattcaractgcagccagtgtctttgccttcttttaccttacctcacctgcctccaataaatgtatttcctctacacagattagtcctctaattatttcgcagacacaccaggagtctttattttccattcttctttatgatgattttatgaggcttactg

SEQ ID NO: 297727 - DNA, 494 bp, Homo sapiens
agatcctataaaattccaactatatgacattctggaaaggccaaaactatggagagagtaaaaagatcagggatcaccagggattaagtgggagggaaggatggacaggtggagcacaaaagattttcagggaagcgaaattactctgtatgatgcaagtgatagacacgtgtgattatgtatttgtccaaagtcatagaatggacataaagagtgaaccctgatgtaaactgtgactttagatgataatggtgtgccattgtagattcatcagttataacaaatataccattctagtgtgggacattgataatgggagaggycatatgtatgtcagaagtatatggatatgtctctacctccctatccattgtactgtaaacctaagacttctgtaaaaaaaatcattatttatttattttattattttttatttatttattttttgagacggaatcttgctctgtcatgcaggctggagtgcagtggtgcga

SEQ ID NO: 297728 - DNA, 578 bp, Homo sapiens
agtttggccaagggcaaatgactgccaatggtgaagtcattttgcagaattttgcttacccaaacactacagctggaggaaataaatgaaatttaagcagtatattggactcccagagagaaacttgtaaggtagaaaaggaacccatttaaagaaccttagctcttcttagaaatccatggaattaatgaaatccagctctctctccctagttgacctcagtttcctcgtttcagtccaggcctggtaccgagaatcaggtttttagaagtattatctgagcctgcttagaagtcacttgattcttcttgctcacaagcaaggaagctaagatcaatgaatcttggcttcatgtcgttggaagctatatttttactcagaactgggaagartgctttagtattgtagctgcctggcaatggaacagactgccttgggagacaataataataatatcaggttaacatttattgagcatatactatgtgccagacactaggctaagtgtttcacatgcattatcttacctggttcatagcagagatcattttacagagaaagaaaccaaggtttagaag

SEQ ID NO: 297729 - DNA, 585 bp, Homo sapiens
ctgagaataattgcaagtcagtttggccaagggcaaatgactgccaatggtgaagtcattttgcagaattttgcttacccaaacactacagctggaggaaataaatgaaatttaagcagtatattggactcccagagagaaacttgtaaggtagaaaaggaacccatttaaagaaccttagctcttcttagaaatccatggaattaatgaaatccagctctctctccctagttgacctcagtttcctcgtttcagtccaggcctggtaccgagaatcaggtttttagaagtattatctgagcctgcttagaagtcacttgattcttcttgctcacaagcaaggaagctaagatcaatgaatcttggcttcatgtcgttggaagctatatttttactcagaactgggaagagtgctttagtattgtagctgcctggcaatggaacagactgccttgggagacaataataataatatcaggttaacatttattgagcatatactatgtgccagacastaggctaagtgtttcacatgcattatcttacctggttcatagcagagatcattttacagagaaagaaacc

SEQ ID NO: 297730 - DNA, 458 bp, Homo sapiens
ggtttctggggggggttgattactgacttctaagattaatgtatggtggacaagattaatgtatgctggtatgtatagtaccaattcgttgatgtgtgctgtgagttactgtcacctggtgtatgatttttacaaagtttcaatgtgtacttttttaaaaaagtgagaactttttaacttctggaacagggtcccatatgtaccctgtattgatcatatattttgtagcctcactgatatttgattaatctattggyatccacaggagacacgtttcagtttcctactatacttctacatttgaccatttctccttgcaattctgtccatttttgctttacatatttttgtgattatctttttatatgtgcattcagggtcaagtttccagtatctttctggttatttccttctgttagaattctataagtcctaataatatattttaccttatagtt

SEQ ID NO: 297731 - DNA, 247 bp, Homo sapiens
ggaggatcagttgaggctaggaatttgaggctgcagtgagccagcaccatgacactatactckggcctgagtaacagagtgatgagtgagactctttctttaaataataaataaaatgaatcaatcaatcaccctttcccttttccccaagtgcagtcacattttgaggtactggggttaggacttcaacatacaaatcaacatacaggttggcaaggaggcacaattcagcccttaacaggcaccc

SEQ ID NO: 297732 - DNA, 1053 bp, Homo sapiens
aaactttatttggtacaactgagtactttttgcccatgaggtgaggaactgctatgtttcattgatttctcatctttacttatgcatattccctgacttttaggaaacggtgctaagaaatccccctttctcttctttaccaagtataaaattgagaaccttcaagttcccccacttttgattcagaaggggagctagaaggtacagctctgaytttgtccctaagatgcactttccttgtagcatttctggtgccactgcctcatcggccttgggtagtgttggaggggtaattactcaatattttttcaaactttagcctaagtgtggatgaaagagtcttttctttataaccctagcatgatgaagacaatgctagaatggtcacattcagctttgctaaatgggatatcaacaccaaaataaagaggaccgtgaatgtagataatctgatttaccaawcactttccttgtagcatttctggtgccactgcctcatcggccttgggtagtgttggaggggtaattactcaatattttttcaaactttagcctaagtgtggatgaaagagtcttttctttataaccctagcatgatgaagacaatgctagaatggtcacattcagctttgctaaatgggatatcaacaccaaaataaagaggaccgtgaatgtagataatctgatttaccaagtatgaccctatgcacttcctgcttgtggctccatgtggctgaagataattcctgatttttcatctttctctaactctcaatatctaagagtccattcctagctatactaaatcttgtacaccatagtggaaacactgagtccaacagagagacccwcatctttattgttcacctaaaacccatctcttcgttggttgactgacaacaagaatgaaattcatatgaaactcatctcctttgcctccataggctaaggctgtactttaatgggccccaacagtttactctgtctcaaaaccgatctagaaacacaagctccatgcatataacagcagaagtctcatttccttacaaatat

SEQ ID NO: 297733 - DNA, 591 bp, Homo sapiens
cactttccttgtagcatttctggtgccactgcctcatcggccttgggtagtgttggaggggtaattactcaatattttttcaaactttagcctaagtgtggatgaaagagtcttttctttataaccctagcatgatgaagacaatgctagaatggtcacattcagctttgctaaatgggatatcaacaccaaaataaagaggaccgtgaatgtagataatctgatttaccaagtatgaccctatgcacttcctgcttgtggctccatgtggctgaagataattcctgatttttcatctttctctaactctcaatatctaagagtccattcctagctatactaaatcttgtacaccatagtggaaacactgagtccaacagagagacccacatctttattgttcacctaaaacccatctcttcsttggttgactgacaacaagaatgaaattcatatgaaactcatctcctttgcctccataggctaaggctgtactttaatgggccccaacagtttactctgtctcaaaaccgatctagaaacacaagctccatgcatataacagcagaagtctcatttccttacaaatat

SEQ ID NO: 297734 - DNA, 591 bp, Homo sapiens
cactttccttgtagcatttctggtgccactgcctcatcggccttgggtagtgttggaggggtaattactcaatattttttcaaactttagcctaagtgtggatgaaagagtcttttctttataaccctagcatgatgaagacaatgctagaatggtcacattcagctttgctaaatgggatatcaacaccaaaataaagaggaccgtgaatgtagataatctgatttaccaagtatgaccctatgcacttcctgcttgtggctccatgtggctgaagataattcctgatttttcatctttctctaactctcaatatctaagagtccattcctagctatactaaatcttgtacaccatagtggaaacactgagtccaacagagagacccacatctttattgttcacctaaaacccatctcttcgttggttgactgacaasaagaatgaaattcatatgaaactcatctcctttgcctccataggctaaggctgtactttaatgggccccaacagtttactctgtctcaaaaccgatctagaaacacaagctccatgcatataacagcagaagtctcatttccttacaaatat

SEQ ID NO: 297735 - DNA, 591 bp, Homo sapiens
cactttccttgtagcatttctggtgccactgcctcatcggccttgggtagtgttggaggggtaattactcaatattttttcaaactttagcctaagtgtggatgaaagagtcttttctttataaccctagcatgatgaagacaatgctagaatggtcacattcagctttgctaaatgggatatcaacaccaaaataaagaggaccgtgaatgtagataatctgatttaccaagtatgaccctatgcacttcctgcttgtggctccatgtggctgaagataattcctgatttttcatctttctctaactctcaatatctaagagtccattcctagctatactaaatcttgtacaccatagtggaaacactgagtccaacagagagacccacatctttattgttcacctaaaacccatctcttcgttggttgactgacaacaagaatgaaattcatatgaaactcatctcctttgcctccataggctaaggctgtactttaatgggccccaacagtttactctstctcaaaaccgatctagaaacacaagctccatgcatataacagcagaagtctcatttccttacaaatat

SEQ ID NO: 297736 - DNA, 570 bp, Homo sapiens
ataatcattgtaaagctgtttcacatctcatttccctaggctccaaamagctttatttcacccagttggtgtaacaataactctaatacaaggcagcatgtgctgtatcccatgtcctttaatgaactataaactctgggaggacccaggctgtgtttgaattaggttctgtgcagctgtgagtttgcacctgctggttactctgcctttaattgcttatggcaaacacttttcaactttgcttcccagcatctcaactttcttctacatttggagaactctacctgtattctactacagatgctgagaatgtcagaatcttgatttcccagattcccttgcagccagggtgtgaacacaggacccagggtgtcattcagacccacccacaatggactttcaaacaggacccagagggcccaggtgcaacggctcacacctgtaatccctacactctgggaggccaaggaaggaggatcacttgaggccaggagttcaacactagcctgggcaacatagtgagaccccatctctataaataatttaaaaattagccagttgtggcggtat

SEQ ID NO: 297737 - DNA, 580 bp, Homo sapiens
agatggcttacaagtcggctgmccttaagatggaactgtagcctgggtttttcaggtggatccagtattatcaccagagcccttaaatggggagggggcaggcagaaaagaatgagagatgacagcatgagaactcagctggacactgctggctttgaagatggaagaaggggccacagctaaggaatgcaggcagcccctaaaaaccgaaaatgcaaataaatacattctcccctagagcctccaggaggaggcagccctgccaacaccttgattttcaccctgtcagtctcattttggacttctgacccccaaaattgtaaaataataaatatattttgttttaagccactaaatttgtggcaatttattacagctgcaatcaataggaatctaatacagggtctttgtgagcaaatcagtttcaaaatatcctttttcaccaagtgcacgtattaagtaagagactatgcacagggtctcccaccaatgctagctactttctaacagagtagccaccaatgctagctaacttatcccttcccttggaaatatcacatcctgggagccttaaaaataa

SEQ ID NO: 297738 - DNA, 600 bp, Homo sapiens
cttattttaaaagctcctcaggtggtcaggagattgagaccatcctggctaacatggtgaaaccctgtctctactaaaaatacaaaaaaattagccgggcgcaggtggcgggcacctgtagtcccagttactcagraggctgaggaaggagaatagcgtgaacacgggaagcagagcttgcagtgagctgagacagcaccactgcactctagcctgggtgacagagcgaaactgtctcaataataaaaacaaaaaaacgcccccccggtaattcttaggtgtgataaggattgggaacacccacaggaaagctgctaaagagtcctttgacagcacaggtggggatgcctcagtctagccgagaccagagtccagtctcccctttttctgaccctacagttatctctatcaagcccacaacgtggcttcccaggtccttctcctagatacactggttttttaattttgtttctcattgcagaaagctcttatcaaaagaaagcggagtcacaagtccaacagataagagatgaaaatgggatttgaaagcctagaacccgtctgatgcattccacatctcctctgaaccaagttaaagag

SEQ ID NO: 297739 - DNA, 460 bp, Homo sapiens
tgagctgagcgagggggcacgtggcgcgtgccataatcccagttactagggaggctgaggcaggagaatcgcttgaacatgggaggcagaggttgcagtgagccgagatcacaccattgcactccagcctgggcaacaagagcaaaattctgtctcaaaaaaaaacaaaacaaaacaaaacaaaacaaaacaaaacaaaaaaaacaaaaacactatgtcatgttgccaraattttctttcagacctaagaaggaaacagaaatgcttaagaaagttgaactcaggaatttctcaacaggatgcacatctgaggtggctcgcgctaccaatttaaaaaaaaaaaaaaaaacagtgaataaatttgctcaagaaattagctgtcgatagcagggttataaaaacctagccagagatttttatgtttggctgaggatctcaaactgttttccagatagttgag

SEQ ID NO: 297740 - DNA, 460 bp, Homo sapiens
tgagctgagcgagggggcacgtggcgcgtgccataatcccagttactagggaggctgaggcaggagaatcgcttgaacatgggaggcagaggttgcagtgagccgagatcacaccattgcactccagcctgggcaacaagagcaaaattctgtctcaaaaaaaaacaaaacaaaacaaaacaaaacaaaacaaaacaaaaaaaacaaaaacactatgtcatgttgccagaattttctttcagacctaagaaggaaacagaaatgcttaaraaagttgaactcaggaatttctcaacaggatgcacatctgaggtggctcgcgctaccaatttaaaaaaaaaaaaaaaaacagtgaataaatttgctcaagaaattagctgtcgatagcagggttataaaaacctagccagagatttttatgtttggctgaggatctcaaactgttttccagatagttgag

SEQ ID NO: 297741 - DNA, 903 bp, Homo sapiens
gtttggctgaggatctcaaactgttttccagatagttgaggatcagtaaacttaacacatttttctcggcaacttttccccccctttaatttccaaactctgaaattataaaaarcaactttcatatgtgtgtttttcttaaattattagttgatatcaagcaggcaggtaagcattttctggttactcttagcagaaggattttcaagaaaccctattttggtatatttgattttccctatatttgaattgtacacacttctggcatgtggatggggagcatttacgcttgaaatcttatgagagatgcctctgctttcacagaggcagggagcccagtwgcactcactgtgtaatcccttttatatcatattcaaaaacaagcaaaattcatctatgctgttagaagtcaggaggaagattaccttgagggatggatggaaagtgagtgagggaatcttctagagacacttaacgttcactttcttgatctgggtgttggttacataggtgtatacagtttgwgaaaattccatgagctgtgaatgtgatttgtatttttttaatttatgtgatatcttaatcaacattcaaaaaacagagagagttgtatgacaaagataacccactgctctgtagcaaagttctttcccagccaggctgggcacttaccctttgccaaacacgcaaatctttttcatccctatttttgctcaggccatattctcaccttcaaattacccaactcaccatctctgtccattaaaacactttccattttttgaaacccagctcaagggccccacctccaaggaacctttccatttctgtagccagaagggaattcttgctgccccaaaccctagagtgcttggatagcatttctcggaccacaactctgag

SEQ ID NO: 297742 - DNA, 575 bp, Homo sapiens
gcactcactgtgtaatcccttttatatcatattcaaaaacaagcaaaattcatctatgctgttagaagtcaggaggaagattaccttgagggatggatggaaagtgagtgagggaatcttctagagacacttaacgttcactttcttgatctgggtgttggttacataggtgtatacagtttgtgaaaattccatgagctgtgaatgtgatttgtatttttttaatttatgtgatatcttaatcaacattcaaaaaacagagagagttgtatgacaaagataacccactgctctgtagcaaagttctttcccagccaggctgggcacttaccctttgccaaacacgcaaatctttttcatccctatttttgctcaggccatattctcaccttcaaattacccaactcaccatctctgtccattaaaacactttccaytttttgaaacccagctcaagggccccacctccaaggaacctttccatttctgtagccagaagggaattcttgctgccccaaaccctagagtgcttggatagcatttctcggaccacaactctgaggtcttttgagccc

SEQ ID NO: 297743 - DNA, 615 bp, Homo sapiens
tgcagtggtacatatctgtaatgacagttactttggatgttgaagtgggatgatcacttgagcacaggtcaaagctgcagtaagctccgatcactccagactaacaagaaagcaaaactgcactccacctgggcracagcgtgagacccccatctcaaaaaaaaaaaaaaaaaaaaattgtgaagacttccaaaatcagggagggatgaaggacagtttaggtgactggaattgtgagaagtgggttgtagaaaggctcagtgaggcatttctatccaggggaggcgggtactctatgcctatttgttttacagacataccattaactattttaaggactaatgcgagcagaagacaaacatatttagtttgggacaaactggttgggtgcttaaaaacatagaaggatcaacatttctgtgatttttttttttctttttaacttcctgggccatgtgatggatcgtactgctaaccagccagcaggtagaatttgaggcgctgatctttctctctgcagctggacttttccgctagagactttttctccctgtcactttgggcttcaccagtccctgcattattaccacaagcacagaggactgtgtgcttccc

SEQ ID NO: 297744 - DNA, 615 bp, Homo sapiens
tgcagtggtacatatctgtaatgacagttactttggatgttgaagtgggatgatcacttgagcacaggtcaaagctgcagtaagctccgatcactccagactaacaagaaagcaaaactgcactccacctgggcaacagcgtgagacccccatctcaaaaaaaaaaaaaaaaaaaaattgtgaagacttccaaaatcagggagggatgaaggacagtttaggtgactggaattgtgagaagtgggttgtagaaaggctcagtgaggcatttctatccaggggaggcggrtactctatgcctatttgttttacagacataccattaactattttaaggactaatgcgagcagaagacaaacatatttagtttgggacaaactggttgggtgcttaaaaacatagaaggatcaacatttctgtgatttttttttttctttttaacttcctgggccatgtgatggatcgtactgctaaccagccagcaggtagaatttgaggcgctgatctttctctctgcagctggacttttccgctagagactttttctccctgtcactttgggcttcaccagtccctgcattattaccacaagcacagaggactgtgtgcttccc

SEQ ID NO: 297745 - DNA, 615 bp, Homo sapiens
tgcagtggtacatatctgtaatgacagttactttggatgttgaagtgggatgatcacttgagcacaggtcaaagctgcagtaagctccgatcactccagactaacaagaaagcaaaactgcactccacctgggcaacagcgtgagacccccatctcaaaaaaaaaaaaaaaaaaaaattgtgaagacttccaaaatcagggagggatgaaggacagtttaggtgactggaattgtgagaagtgggttgtagaaaggctcagtgaggcatttctatccaggggaggcgggtactctatgcctatttgttttacagacataccattaactattttaaggactaatgsgagcagaagacaaacatatttagtttgggacaaactggttgggtgcttaaaaacatagaaggatcaacatttctgtgatttttttttttctttttaacttcctgggccatgtgatggatcgtactgctaaccagccagcaggtagaatttgaggcgctgatctttctctctgcagctggacttttccgctagagactttttctccctgtcactttgggcttcaccagtccctgcattattaccacaagcacagaggactgtgtgcttccc

SEQ ID NO: 297746 - DNA, 654 bp, Homo sapiens
agatagaatgctcctaaacaaattttttatttgtttgatttgcctgcttgggtcatatggtatagaagaatctttctccttctccgaaccatcaaggtttttagtagagttaaggttgttgatacgactttgaaaagcttttataccgctaggctattgaaggtaattagactgatgccttgccttcttctttgtttgatttttctcttggatgtttcttgattttgctycatttattaaaatcacactcaacagacctacgaaagcatccgcttgtaaggagaactcatatttagcttgaaatcagctaaggaaagtctcctccaaccacactgattgcagaatgcaacgcataattaagtgtttactgaaaaagccagcaaacagggcctgggggaatatgtcagagcagctctggtctccatagcaacatccaatgagccttccagaataatgaatgtgttctcaggatcactgatgcaaaatgacaaaacggcagctaagaagaacagaaaatcaactacatcattatgttcagagaattaaatatttaatatcttcgctttctctccagcattcaataatccacatttatttttggttgtttctaagttgcttaaatggagggcaactgacatctgttgagtacaccca

SEQ ID NO: 297747 - DNA, 1309 bp, Homo sapiens
agatagaatgctcctaaacaaattttttatttgtttgatttgcctgcttgggtcatatggtatagaagaatctttctccttctccgaaccatcaaggtttttagtagagttaaggttgttgatacgactttgaaaagcttttataccgctaggctattgaaggtaattagactgatgccttgccttcttctttgtttgatttttctcttggatgtttcttgattttgctccatttattaaaatcacactcaacagacctacgaaagcatccgcttgtaaggagaactcatatttagcttgaaatcagctaaggaaagtctcctccaaccacactgattgcakaatgcaacgcataattaagtgtttactgaaaaagccagcaaacagggcctgggggaatatgtcagagcagctctggtctccatagcaacatccaatgagccttccagaataatgaatgtgttctcaggatcactgatgcaaaatgacaaaacggcagctaagaagaacagaaaatcaactacatcattatgttcagagaattaaatatttaatatcttcgctttctctccagcattcaataatccacatttatttttggttgtttctaagttgcttaaatggagggcaactgacatctgttgagtacacccawagatagaatgctcctaaacaaattttttatttgtttgatttgcctgcttgggtcatatggtatagaagaatctttctccttctccgaaccatcaaggtttttagtagagttaaggttgttgatacgactttgaaaagcttttataccgctaggctattgaaggtaattagactgatgccttgccttcttctttgtttgatttttctcttggatgtttcttgattttgctccatttattaaaatcacactcaacagacctacgaaagcatccgcttgtaaggagaactcatatttagcttgaaatcagctaaggaaagtctcctccaaccacactgattgcagaatgcaacgcataattaagtgtttactgaaaaagccagcaaacagggcctgggggaatatgtcagagcagctctggtctccatagcaacatccaatgagccttccagaataatgaatgtgttctcaggatcactgatgcaaaatgacaaaacggcagctaagaagaacagaaaatcaactacatcattatgttcagagaattaaatatttaatatcttcgctttctctccagcattcaataatccwcatttatttttggttgtttctaagttgcttaaatggagggcaactgacatctgttgagtacaccca

SEQ ID NO: 297748 - DNA, 615 bp, Homo sapiens
gactaccttggagtttctatttctttctcagataggaagatggaaagaaggcctgagaaagttaagcaggacttttgcggtgaggtaaggctagactctgatcataagtggtgggttgaatttgcagaggggaggggagaggaagacaccccgaatttgggaaacagcatcagatcctattgagcaygacactttaacggaacaaagaagaacttggacaggctgaagaggaagctgtgcattagtaaggaaggacagcaatagcaagacctggcatttattgagcacttactgtttgccagtcactatttctagaactgtgcatgtattaacatcccacagcaactcaatggaaagtaaacaactcaagatccaacagctagctatatagaggcagagctatgattccaactcatttcttccgtggttaaaacccatgatgtttctggccaggtgtggtggttcatgcctgtaatcctagcagtttggtgactgaggtgggcagattacctgaggtcaggagtttgagaccagcctggccgaagtgggaaaccccatttctactaaaaatagaaaaaaaaattagtcgggcatggtagcacacgcctgaaatcc

SEQ ID NO: 297749 - DNA, 615 bp, Homo sapiens
gactaccttggagtttctatttctttctcagataggaagatggaaagaaggcctgagaaagttaagcaggacttttgcggtgaggtaaggctagactctgatcataagtggtgggttgaatttgcagaggggaggggagaggaagacaccccgaatttgggaaacagcatcagatcctattgagcatgacactttaacggaacaaagaagaacttggacaggctgaagaggaagctgtgcattagtaaggaaggacagcaatagcaagacctggcatttattgagcacttactgtktgccagtcactatttctagaactgtgcatgtattaacatcccacagcaactcaatggaaagtaaacaactcaagatccaacagctagctatatagaggcagagctatgattccaactcatttcttccgtggttaaaacccatgatgtttctggccaggtgtggtggttcatgcctgtaatcctagcagtttggtgactgaggtgggcagattacctgaggtcaggagtttgagaccagcctggccgaagtgggaaaccccatttctactaaaaatagaaaaaaaaattagtcgggcatggtagcacacgcctgaaatcc

SEQ ID NO: 297750 - DNA, 562 bp, Homo sapiens
ctatggcactcctgcccatgggaaacctccagcgtcatctccatcctattgggctcactgttctgcttcccagcaggccggctccatgggatctcatcttccaggcagcttcctctgttctagcaggttcttccttcctcttggaactggagatggattaggattcctgcgagttcaggcggggtgaatatacatttatatcccaggaagaaaatagaagaatagaaacaaaatggcaaaggcttcatgcaatttaacacttgtaagtccaaggcaacccagaagcactacaagttgagaaayttccacccttgggatgctttcccaagtgaacttagacacacatacaccattttttatttttgccttttttttttttcttttgagacagagcctcacttcatccctaaggctggagtgcagtggtgtgatctcggctcactgcaacctctgcctcccaggttcaagcaattctcatgcttcagcctcccaagtagctgggattatatgcacacaccagcacagctggctaattttttgtatttttagtagagacggagtt

SEQ ID NO: 297751 - DNA, 628 bp, Homo sapiens
tagctggatatagaaagaacagcgctacaatgtgggattctaattttggaactatttatgcattcaacaaatacttactgracttctattttgtaccagagaccattcttacccaggtggtggtatcaagacccctattgcccacaaatgtgttttcttgaatcctttttaagaaatgaaccttgaaaatttttctcactgctaacttttattctatttgtccccaaaagataccacacactgtattaatctgttcttgcactgctataaataaataactgagactgggtagtttataaagaaaagaggtttggttggctcacagtctcgcaggccgtacagggagcatgatgctggcgtctgcttggcttctggggagacctcaggaaacttacaatcatggcggaaggtaaaggaggagcaagcacttcacatggctggagcgggagacagagagagggaggggaggtgctacacacttttaaacaaccttatctcgtgagaactcactcactattgtgatgacagtaccaagggggaaatccgcccacgtgatcaaatcacctcccaccaggccccaggtccaatattggggtttacgactgaacatgagatttgggtggggaca

SEQ ID NO: 297752 - DNA, 628 bp, Homo sapiens
tagctggatatagaaagaacagcgctacaatgtgggattctaattttggaactatttatgcattcaacaaatacttactggacttctattttgtaccagagaccattcttacccaggtggtggtatcaagacccctattgcccacaaatgtgttttcttgaatcctttttaagaaatgaaccttgaaaatttttctcactgctaacttttattctatttgtccccaaaagataccacacactgtattaatctgttcttgcactgctataaataaataactgagactgggtagtttataaagaaaagaggtttggttggctcacagtctcgcaggccgtacagggagcatgatgctggcrtctgcttggcttctggggagacctcaggaaacttacaatcatggcggaaggtaaaggaggagcaagcacttcacatggctggagcgggagacagagagagggaggggaggtgctacacacttttaaacaaccttatctcgtgagaactcactcactattgtgatgacagtaccaagggggaaatccgcccacgtgatcaaatcacctcccaccaggccccaggtccaatattggggtttacgactgaacatgagatttgggtggggaca

SEQ ID NO: 297753 - DNA, 466 bp, Homo sapiens
taaatgaaaacattttaaataaaatgagattttagtaggtacagagaaatgtaacttgggaattacatcaagctytaaaagcacagctcttgctgtctgccttactgtgattcactgaagatctactgtatagaaaatctaaagaaataaaggatgaaggccaagtgctgtggctcatgcctttaatctcaacactttgggagactgaggcaggaggattgcttgagctcaggagtttaagaccagcctgggcaacatagtgagaccctgtctacaaaaaaaaaaaaaaaaaaacccaggtgtagtgactcatacctgtaatgccaactactcaggaggctgagatgagaggatcacttgagcccaggggttggagattgcactgagccatgatcgcaccattgtactccagtgtgggcaaacagagcaagatcccatctctttaaaaaaaaaaaaaaaaaaagaa

SEQ ID NO: 297754 - DNA, 466 bp, Homo sapiens
taaatgaaaacattttaaataaaatgagattttagtaggtacagagaaatgtaacttgggaattacatcaagctctaaaagcacagctcttgctgtctgccttactgtgattcactgaagatctactgtatagaaaatytaaagaaataaaggatgaaggccaagtgctgtggctcatgcctttaatctcaacactttgggagactgaggcaggaggattgcttgagctcaggagtttaagaccagcctgggcaacatagtgagaccctgtctacaaaaaaaaaaaaaaaaaaacccaggtgtagtgactcatacctgtaatgccaactactcaggaggctgagatgagaggatcacttgagcccaggggttggagattgcactgagccatgatcgcaccattgtactccagtgtgggcaaacagagcaagatcccatctctttaaaaaaaaaaaaaaaaaaagaa

SEQ ID NO: 297755 - DNA, 1065 bp, Homo sapiens
taaatgaaaacattttaaataaaatgagattttagtaggtacagagaaatgtaacttgggaattacatcaagctctaaaagcacagctcttgctgtctgccttactgtgattcactgaagatctactgtatagaaaatctaaagaaataaaggatgaaggccaagtgctgtggctcatgcctttaatctcarcactttgggagactgaggcaggaggattgcttgagctcaggagtttaagaccagcctgggcaacatagtgagaccctgtctacaaaaaaaaaaaaaaaaaaacccaggtgtagtgactcatacctgtaatgccaactactcaggaggctgagatgagaggatcacttgagcccaggggttggagattgcactgagccatgatcgcaccattgtactccagtgtgggcaaacagagcaagatcccatctctttaaaaaaaaaaaaaaaaaaagaawtcagcttgtccccagggaacttggtcttggagagcagcctgccgtaaccgccccccgactacagctgcccccaaagctgtgaactcagagtatatgacaaatggccaagcacaagagtgtgaggccctcctatcctgcagaggctgctccagccacacctctgcagccaggaggcagtgacagcccagtgtcctcaaggtccccccatctcccaggatgcttcctgaaggctcwggttaaactgcaccagtggctggtgagcaaaggctgcaggcccttttcacaaaacactctgaactggtccatgcagggcaccctccctgtcttcctcccaacctactgcctgaccgtccccccgccctgcctttgcccaggtcatcccttcagccaggaacaatcccgtccctcccagccacaccttcgacagggtctcagccccaacatttcttttttaaggatgcacaccctgcaaatcccaggacaggactacagctctttttggaatcccctttctcatgtctgggatcatttgatatccctcttcctcaccttacaagggtagtgactgtgtttttgtcaaaccctgtgtccccggcac

SEQ ID NO: 297756 - DNA, 601 bp, Homo sapiens
tgtcgggcgcgtctcggggctgggtggagctcccgaaggtggcctttctccctgggcttccacgccggcttcggccatcgatacgggccgtgttggtctcgttcaggagctgaggaaccctccatcactcctgtttcgaccccagggtttggacctcttccccttccaccccatcccctgtctygaaagaagcaacccccgtgcgggcccgagacgccgtcccgggtgcctgccgggcctggagaagcatcagaacaaagaaggcacgcgggctgggggctgggagagcctgtgacgcgcccccggggatcgcagcctctgctcccggtctccatggagcggtcccatggaagcgagatgcgcctcgctcagcaccgcggggtgggatgtgggcgcctgcaatgagccgaggagcgagagcgtggcctccggtctgcgggggttcttgccggtgctctccgcccgccggttcgcgaacaccccacctatacttcgcccgtggggacggattccccaaagtgccctcagtaagccgtccggagcacgcagcgccttgcttccaacggaactagagagacggcctgggccgaaggccagcctc

SEQ ID NO: 297757 - DNA, 594 bp, Homo sapiens
atgatttaaaaaaaatcagcaagaacttgttcttattgcatttcatgctatttctgagtttgtgagctctcagcagccttccrtggtgtcaacccattatatacctttaaaaaaaaaactgcctccattaaactttaagctgtcaaggattacaacgaaaagatgcaatttttttcactgcaggaaaggtctgatttagtaacaagctataagctaacagagcagcagaatccacatataatgttccattgaaaggaaaaaaaaagtgctgcttttttgtgtccttcatccttgttttttttctttttatattaaaaaatatgtggtccatttagctttcgaatacaatagagactacaaattgtgttcctcttacatttgtggctacgaatcttggtgttcaaacacatatagacgtgcaattcgtttacatgcctcctatattggaagggacaccatcgagaaaaaaaaattgttagtccacattgccgtctagcttacgtgtttaatgttgatttcattagtcatttaattccaaacacctttattatctacttgtttgaaaagcctatttattttcaccacaatgcatac

SEQ ID NO: 297758 - DNA, 657 bp, Homo sapiens
cttggtgataatataaataatttcttcccaatttattactaaatcggaaccatactctattcataaaatgagctctcccaatactgaaagattttatgtgtactttctaagcattattatttcagaataatgttaggcaaatatctatgtattgaagcagaagaggatgtcttgaaagcgaaaaaaaatgaatctagtagtttaaaataagaattctattttatgatctcaaaatatctccataatttgaaacataacacmcccaatacacaaataacacaacttcagcagatatctcgaaccttttatcaagaagatcccttgctgggtcttcaaaattgcagcatctgagctagtcttttactaaccacactttatataattaatgctaatcctaaattaagcaatttgaaaataaaacataaaagtctattgggtttataatcagtcattaaacaattgacattaagccattaaataaagcaaatacaatgctttactattatgacagaagtaaaacaaaaataacagaataaaacagtatttggaaatattgtttagctatctctatcttggaaataaaacacaggttctcaaaatgctgccaccttcctacctgttttcagctagcaatgaacatggaattataaaaatttg

SEQ ID NO: 297759 - DNA, 537 bp, Homo sapiens
tgacagctatcaaataataataacaataggtctacatcaggctggtttgtattcaatcttttcatctatgagggaaagattccatctctattaccaatgccctgaaccaaaagaaatcccaaagtagatttactcataactgaaccttggtgaccagaaatatgctaataaacgttaaactggaaaggtaggatttcataaagcttttgtctctaatcctccaagtagggaagttggttctgctgcagagttaattagcatacatgtggaagcagtttatggatgcggtttaatccmaaacaaatgtgaaaataagctcacattgttttgtagaatgatttacattcattatcatctacttaaaaaaaacccacatgctttaaaaaaatcattattccttccagaatatcagtgaataaagcaattccatatttgtacttttgaaaattatgtatttccagacaaggtcatatttcctcaaattgaaataaagtataaactttggtctcaagctatggtttccaaactttatccagg

SEQ ID NO: 297760 - DNA, 611 bp, Homo sapiens
tttgtagtatattctgaagtcagatagtgtgatgactttatctttcttctttatcctcagtatattttggcttttggtatcttttttggttccatattaattttaggatttttttctatttctgtgaagcatgtcattgatattttggtagagattatattaaatctgtagattgctttggatagtatggttgttttaacaaaattaacttttctgatccacaaacatgggatgtctctccatgtatgtgcctccattttctttcatcagtgttttgtagttttccttgtrgtgaaaactacacttccttagttaaatttattcttaggtatttttttctttcacttccttggttaaatttattcttaggtattttttgtagctgttataaatgagattacttttgatttccttttcagctagtttgttataagtgtatagattttgtatcctggaactttaccaaatttgtttatcagttccagcagttttttggtagagtctttaggtttttctatatataagatcatatcctctgcaaaaagggacaatttgacttccttttttccaatttggttgctttttctttatctctctggctaggacttcta

SEQ ID NO: 297761 - DNA, 501 bp, Homo sapiens
ccctggtgtgtgatgttcccctccctgtgtccatgtgtttcattgttcaactcccacttatgaatgagaacatgtggkctttggtttcctgttcctgtgttagtttgctgagaatgatggttcccagcttcatccctgtccctgcaaaggaaatgaagtcatcctttttatggctatgtagtattccatccctgaactttcagtctatatgtgcctttataggtgaagtcactgtcttgtaggcagcatatagttgggtcatgatatttttatccattcagccagtctctgtcttttaatttgggaatttaatccatttatattcaaggttattatttattggtgatgtcttattcttttcatcttcttaattgttttctggttgttttgtatatcctccacccctttctttctctcttattgtttataattatagttgggtggttttttgtagtggtaacttctgacttctttctctttctcatttagtatctgctttac

SEQ ID NO: 297762 - DNA, 1179 bp, Homo sapiens
gtgtagcaaactaaatcttttccctaatgaaaacacttccattttcttcaagtaaaatccttctgagcaaggctgtatgtcctcatttcccttttatttaaggaagacttcactcagaatagagccttttttttttttatcttcgatgaatatgctgctggcttccaaaatgcattagagctttcattatgatttataaagacacacatgcacaaatatatgtaatatattaaataaaaactgtaatacacttctatagacattgttatggcatagarttgagaggactaattttatttgacactgtcttttagcagagacaaaataatgttacactcagcatgccatgtgtaaagaattcagggtagagaggataaaaatatacaagagtaagaagccatgacagcatagtctcatgacacgctgctttattattattcttaatcagaatattgatagggtgggaagtattttggcactaaaatgtccatataattatcagctgcattatatatatataatatatatatattatatatataaaagatatatattatatatatatataacaagtgttcaacatgttttgwgtgtagcaaactaaatcttttccctaatgaaaacacttccattttcttcaagtaaaatccttctgagcaaggctgtatgtcctcatttcccttttatttaaggaagacttcactcagaatagagccttttttttttttatcttcgatgaatatgctgctggcttccaaaatgcattagagctttcattatgatttataaagacacacatgcacaaatatatgtaatatattaaataaaaactgtaatacacttctatagacattgttatggcatagagttgagaggactaattttatttgacactgtcttttagcagagacaaaataatgttacactcagcatgccatgtgtaaagaattcagggtagagaggataaaaatatacaagagtaagaagccatgacagcatagtctcatgacacgctgctttattattattcttaatcagaatattgatagggtgggaagtattttggcactaaaawgtccatataattatcagctgcattatatatatataatatatatatattatatatataaaagatatatattatatatatatataacaagtgttcaacatgttttg

SEQ ID NO: 297763 - DNA, 588 bp, Homo sapiens
acttattttcctcttgtgaaaacacatggaacayaatacgtcttcaatcaagactctactgtaactacccttaatcgaactgtcaaagtttttaccaacatcagcaaactctctgctatctcttccaccttttgcctccctcctcccagaggcagccagccagccctcgggctgtgtggaccagaggtgccagctgaacacgctggggtggaacattgttctgttggtgggtgcaggtaggtcattgcataccgatttatatccaacactcctagtgggaattttgtttttaaattatcaaatatgaggacatgtgaaatttctgaataattactgagtaattgaacctagtattggaattactgaaaaattggaacattcttgatgttaattttctcatcagtacgagcataaaataactagcttttaaagagccatcatatatccatttaccaaaacttcgcgtaagaaagaaattatcttctcagcatgttttttttttttaactcaaatttatttctttcactgaggagctctcccagaagtgaagatcttgaaaggaagcagagctcaacggcaaactcacaa

SEQ ID NO: 297764 - DNA, 578 bp, Homo sapiens
tttaagcacacaagtgtcttttttttttctgtgttagtgtttattgggagcccaccactgaccaagcactgagcaaggcgtttgcgagacamaaagtcacatgacacctcacaacagccctgtgaggtagggatgagtcccatggaatagtccagaaaactgaggctcccaggtgacctgccagctcacatgttagctagttgtgtggtacaatcagggactgaatgcagttctttttgactccaggttcaacccaactcttggttccattgttttagaaaatacaaaaggtttggtcctaatctacagaatcctttaactacatttccaggttttgttttgtaacccccaccatcataatcttttctgaagtttggaaaaaaataggatataatttaaaaattaatataggtgtgtagtttgaagttcggcaaatgagtacacatgttctgcatggttcagggttcctttctacctggttctctgacatgggtctttatactaaactttttagactaatcagaccaattcaatccccccttacaggcacacactcattaatatacagcctttctttt

SEQ ID NO: 297765 - DNA, 578 bp, Homo sapiens
tttaagcacacaagtgtcttttttttttctgtgttagtgtttattgggagcccaccactgaccaagcactgagcaaggcgtttgcgagacaaaaagtcacatgacacctcacaacagccctgtgaggtagggatgagtcccatggaatagtccagaaaactgaggctcccaggtgacctgccagctcacatgttagctagttgtgtggtacaatcagggactgaatgcagttctttttgactccaggttcaacccaactcttggttccattgttttagaaaatrcaaaaggtttggtcctaatctacagaatcctttaactacatttccaggttttgttttgtaacccccaccatcataatcttttctgaagtttggaaaaaaataggatataatttaaaaattaatataggtgtgtagtttgaagttcggcaaatgagtacacatgttctgcatggttcagggttcctttctacctggttctctgacatgggtctttatactaaactttttagactaatcagaccaattcaatccccccttacaggcacacactcattaatatacagcctttctttt

SEQ ID NO: 297766 - DNA, 1054 bp, Homo sapiens
ctagaaaagtataaaaattcaggacccagaatggataaagtgaactgttcagtttcttaaatcagttttctggaaacatacccagtggcttactttctattgaaagattaacttgatatttaaaacttgactttttaatattttgctattctaagtagagaatgatgacctaagccaaaaaaaaaaaaaaaaaaaaagtctgacaattgtatatcagtttaaagctagtcagttaaagacacaaggtcaaattccaaaagtggttcagtcatacctgttttttcaacccaacagtcttgttcctttggaccagcgacttgacttctctacttctcagtggactcatgcaaacacgggggaataatacttgccctacctatttcattaggttgattaagtatggaagtgagaaaatacattagaaagaatgaatggaagtgtattttcctaggtgacccaaacaagtaatgytttccttaggtgaggaaacctgtaawtgtattatgcctattcaatgaatcctctatatctcttacccttaccactgtactttccatccatttttcccttcattttcttctcatgtattttccattccactaactgtccctacagctgagtctaagctgctgttaaatctatctgttaaattcttgatttttgattaccttatttttgagtgatagaatgcccttttwgttcttttttatttttatttattgattttgagacagggccttgttctgttgcccaggttggagtgcagtgctgcaaacatggctcactgcagcctcaacctcttaggatcaagtgatcctcccacctctgcctcccaagtagctgagactataggtatgtgccaccacgtttggctaactttttaaattttttgcaaagacgaggtctcatcatgttgcccaggctggtctccaactcctgggctcaggtgatcctcctgcctcagcctcctgaagtgctgggattaagaccatgcctggccttgtttttatttttaatagtttcccattctctgcttaaattattaatcttttct

SEQ ID NO: 297767 - DNA, 621 bp, Homo sapiens
gtgggaattatgagagctacaagatgagatttgggtggggacgcagagccaaaccatatcattcttgttattatgtctgttcatgtttctggttgtttttattgataatacaaacaacatacacaaaattatttacagatataatttgaggcctaggataatatcattttcctctatagagcatttggggcactggcaattacctcaatttaatttcagtgatgaaaatgacaaagttaaactgctgtctattccatttcatcattacttttattgtgcagtttttagggacccaacacaatgcaaggggcttatctcctgggaagcccctaaaccctaatatctgttcttgtaactcatagactagcagggttgttgttcactctctcaaagtcttagctgacctctcatgtataaacaattttcccaagtggaaaagcagcctcatacactaggctctctccctacacctctgccctgggtaatacttcatsccttgttgcttcttcaaatatttgcccctagagaaggaatcagaaaataaaaaagacaaattcaggtattaagagatatagaagaggtagaataccataaagaattactgaggtaggggagggaaaa

SEQ ID NO: 297768 - DNA, 519 bp, Homo sapiens
actgccacgtctaaaggtcagcctctgggactgtttaattgtggccattaaagtgtttcagcggctgcttcatagcagtaatttggagcccaggagaaaccagaggcagcttcagtacaccaggtcatttgaaaagaggctggctgcgctccatatgcagcctggtagcagctgrgatttccagaagtacttaacctagcttagaggtcatggcctaagtaaaagtaagattccctttctcccaaagtaaaattgtagagtagttcatttgcctccacattccccctcatcacttcatgccctcctcatttttcatctttgacccaggactccagaaaccttactaatcaatccactagtcaatcaattaacaatcaattaacatgcattaactgagcaactgttatatacaaagcaatgtcaagatactaccacattttcactattcaccccctccagaccactctgttccattcctcatcaagcctgcacctcaaagatacagctagctcatcatga

SEQ ID NO: 297769 - DNA, 1025 bp, Homo sapiens
ctacaacatgaaatttggggggacacaattcagtccataatagctaactttatttattaaatagctaacattttataatggactaaagcaatttgagttcaactccaattaccatcaacatctttgttcccttccagcaaaactttttgaaagtgttgtatgtattctttcttctcatcttttcaaattaagcatctttttctactactccactacaatttctctccttaggatcatcagtgactgttctaaagtcaatcccacagttctttcccatgctttcttgactcctctcccattagacacagttgaccasacactctttgaagccctgtctcctgtaggctgaggttacgctatactctccctgttctcttccaccttctctgagaactcctctacagttccctttgcttgtgctcctgttttaccagcagacattgggctgcctcataggccccaacctgctgttctttgctagagcaatctggcccctggcaatcacattagctwctacaacatgaaatttggggggacacaattcagtccataatagctaactttatttattaaatagctaacattttataatggactaaagcaatttgagttcaactccaattaccatcaacatctttgttcccttccagcaaaactttttgaaagtgttgtatgtattctttcttctcatcttttcaaattaagcatctttttctactactccactacaatttctctccttaggatcatcagtgactgttctaaagtcaatcccacagttctttcccatgctttcttgactcctctcccattagacacagttgaccagacactctttgaagccctgtctcctgtaggctgaggttacgctatactcwccctgttctcttccaccttctctgagaactcctctacagttccctttgcttgtgctcctgttttaccagcagacattgggctgcctcataggccccaacctgctgttctttgctagagcaatctggcccctggcaatcacattagct

SEQ ID NO: 297770 - DNA, 478 bp, Homo sapiens
tcttttcaaattaagcatctttttctactactccactacaatttctctccttaggatcatcagtgactgttctaaagtcaatcccacagttctttcccatgctttcttgactcctctcccattagacacagttgaccagacactctttgaagccctgtctcctgtaggctgaggttacgctatactctccctgttctcttccaccttctctgagaactcctctacagttccctttgcttgtgctcctgttttaccagcagacattgggctgcctcataggccccaacctgctgttctttgctagagcaatctggcccctggcaatcacattagctttcatgaccttgcataaaacttacacgctgtttcagctcccacatctgtatgtttatgacatttccactttggtccaaatttttgtgtctaactgcatccttsacatctccactgagatgttaaaaggcatcttgaggacaga

SEQ ID NO: 297771 - DNA, 591 bp, Homo sapiens
cattcttaatttgcatgcacttagtaaattaatcatgtgactgtaacagacataatgagcatcttaacagaatcactgaatgaccaccggtggcttccctgacatctcccctcccaacccataggtcacattgtgaaaccaggacagctttcttcctttctttagcagtttcctctttaggcgttgtatggccaatggtgccatatacactagagcttcctggcagaagggggacccattcactgattccttgaatgaatctttcactatatattaaatgagtcatcacaccmtgcaggtgattgtgtgagatacaatgggcactaagaacataactgaggcatcatagaatgtttgtggtaatggatatagcagcctagtctcctttgctttgcataattggaaaaagtttcagatgattgaagtttggaggaaattaagaaaagaaatctcagtttaaataaccaaaaagtcctgtatgaaaagaagtggtgctgattcttatttggctctaacatacagtcaaactcctaagcacatgttttcaagtttcaaagttgaataaatgctgcaaacgtgaaagacattaat

SEQ ID NO: 297772 - DNA, 513 bp, Homo sapiens
acactcctaacatccctgagtgcttactgtgagcggacacggtcctaagcctcttacctgtatctttttcgtgtgatcctcataaacgccctatgaggtagatattattactatcctcactttctggatgagaaaaccgaggtgcaaagaacatgcctaaggtcatatagctaataagtgaaatagcagggatctaattctgcttctcattgaatcctcatacttttaaataaccattcacagggatactcccctatttctcatttcaagtttctctgtcggctaaataaccttcttccctctaagcctttctcctcttgtgacttcagtctgatatctcttctttaggtttctgatctccctaattaaatttttccccaatattctgtgaaacttctaatgtgttgttttaggtttaaatataggtcagcttgtatatgttataygtatatgccctatatcacattgttatatgttttttcagctggagtatcacctatctgatctgcatgc

SEQ ID NO: 297773 - DNA, 622 bp, Homo sapiens
ccatcctgcccagcattattctaaagcgaatgaataattcaggacatatatactggtagacatgtagtgaaaagttttagaacagttagccaaagctaggtcatttagatttgttgatctttcttcctgctatagcagagcaattccctgtagcatagtcttaagtgtttattagtctatttttaaatcactgaaactacttggctactaccacaacccatgaaagattgtcctacaatatactagacagaagttccaggaaatttctttttatgggttatacttttcctctaatcatttcaacaaacctcatgtcccataatttcattataaagaagtaatgtcaatgtttaattattatgcttagtgttcatagttatctcattgcttctaagttgtttgttcccctaaggtactataccataagcattcattcctttattcytgtaagatattagtcataagtagccaaactttagttatcattgaatctgtctgtgccttcatattgccttttatttattcaaagttatctggcaaactctcaaaaatgtaaatgtcacttcatctggagtaatgattttgataataaaaatgataaaaccaatagtaagtaaaagaa

SEQ ID NO: 297774 - DNA, 573 bp, Homo sapiens
tctttcaactcaggaaaaatctgtgttcagggcaatcacaccctggatctcataatgagttctactgtggggggcagcatttgtggaagacattggacatattattaatgacaaacttagagggatgcttggtcaatggacttctccaaatattatatagagaaacaaaaagcaaagaaaaaataggagatctacatcttcacattattcccgcagtagcttcttatcaatagagtggccargttaatgtctctcccagcactcctgcacccaaaacaaatagtcattttaaaactcaacaaaataaagtctcaactgccacagatgaatgaagtcatcaccaagaaggcatttttaacaatgaaaaaatttttgctttataacaggatttttcctaggcattcatgttttaactttttctttctccttcactcttgttccccttcctacacagccaatttcattctccaacttatcaatcatttttctacagtgcctctcctttcatccttttagatatccatttaccaccctaatcaacatttcatgacctcataactttcttgttttttt

SEQ ID NO: 297775 - DNA, 496 bp, Homo sapiens
ccaaagagagtcattctgtgacccagaacataatagtatgataagatgttgctttggaaatttgcagggaaaaacaatgtgttatacagctctgcttcccaaacttcaaagtactttcaaatcacatggacagcctattgaaaatgttttcttctgattcagaggcctgagagcctatatttttcacaagctcccggttaatactgatactgctggtccccagatcccactttgatttgcaaggttgtatagaaaggacaacatttaggacaattcaaagattacatttttttagaactaccaagtactgacatcaatcgaaaactaatctaaaggagtcgggaaacatcaytgagacctaaatgatgatgaagggaaatggccatcacattatctctggggaatgtattgctgggcatagcaagaaagacctggggaacaggcaccagcaagagacaaagaggatgcttaggttatgtttaaaattttttattct

SEQ ID NO: 297776 - DNA, 593 bp, Homo sapiens
gagccatatcttactgatactcctgcagattcattcccatccagactctggggatatatagaccactagctgggatgcttatctctccaacaccaatgaaccctgtctgtcctctcttattctacacatgcttcctattgtaatgtccagacttcttcccctattcctttcttctaagccagttccaattgttctttccctatgtctgaattcctgttgaaattcttttattctgagccccaatttgttttatttgtttgtttttaggacttgggagtagtatcttgacacttggattccacccaagctcaaatctcagacccttatacagtccttgtcacatattgtcacacctgaaactaatgactctcttgttgggaccagtgatgacaasagagatgattagtaatatcttcatgtataattataattatacatgaagttaattataattctcttcattttatggacaaagaaactgagtctcagaagggttaaatacactgtccaagattcactgtgaggaggtcgtgcagctagattcaaacccatgtctgttaatctctaagtcttcttttcttttcttttctttt

SEQ ID NO: 297777 - DNA, 473 bp, Homo sapiens
tgctttctagtttttttctaaacataattttcaaactttttccaaactttaaggaggttcttctackgctaatactccaggtaatgaatgctctgtccaccaaatccacatttgccattttattacctgttaaatatctctacttcacctttagctttccacaatgaaataccataattttacagtctatccccttaagaaagcctctattccctttaatcattttagttgtccttccctgcattgtctctgctgctggtccatttttattaaaatgtgatgagaagagtgcatgctgtaatgcagatttgtaaaaatagatgcttgtggctttgtacaaagtatagataaaatttgatttgtgtttggattctctttaataagagaattattgtctctgtgtgtgtgtgtgtgtgtgtgtgtgtgtgtgtgtgtgtgtgtgttatatgcctttcttggtgattaagattgct

SEQ ID NO: 297778 - DNA, 473 bp, Homo sapiens
tgctttctagtttttttctaaacataattttcaaactttttccaaactttaaggaggttcttctactgctaatactccaggtaatgaatgctytgtccaccaaatccacatttgccattttattacctgttaaatatctctacttcacctttagctttccacaatgaaataccataattttacagtctatccccttaagaaagcctctattccctttaatcattttagttgtccttccctgcattgtctctgctgctggtccatttttattaaaatgtgatgagaagagtgcatgctgtaatgcagatttgtaaaaatagatgcttgtggctttgtacaaagtatagataaaatttgatttgtgtttggattctctttaataagagaattattgtctctgtgtgtgtgtgtgtgtgtgtgtgtgtgtgtgtgtgtgtgtgtgttatatgcctttcttggtgattaagattgct

SEQ ID NO: 297779 - DNA, 1148 bp, Homo sapiens
ctactgctaatactccaggtaatgaatgctctgtccaccaaatccacatttgccattttattacctgttaaatatctctacttcacctttagctttccacaatgaaataccataattttacagtctatccccttaagaaagcctctattccctttaatcattttagttgtccttccctgcattgtctctgctgctggtccatttttattaaaatgtgatgagaagagtgcatgctgtaatgcagatttgtaaaaatagatgcttgtggctttgtacaaagtatagataaaatttgatttgtgtttggattctctttaataagagaattattgtctctstgtgtgtgtgtgtgtgtgtgtgtgtgtgtgtgtgtgtgtgtgttatatgcctttcttggtgattaagattgcttttgttactggagttatttgcccaaagtcatatcataggtttaaccgttgaccctcaaacccaaataatcttcagtctcctaaactcaactgctatttctattgtatcttcttgctttctctttatgaagataaattaacctctttcttagtgwgggtatgtcaggttgtcttaaagaaaatgggttgaggcaaagaatcctgaatattgaattctgagccagatggcatgtgactctctgcctaggtagcagacagctctgtggttctcctgattggttagatcctagtttacttggcaggttaaagaaagaagtccttggagatagcagtcacacctgacccttctcwtacctctcaacaattcaagggcttagggctgataccatgatagagaagttgtctaagaaatgaagtcttctaccttggtacatgctgcatgttttcaaacctactgccaataacagcagttttccaagaaagtttatagctctcagtatttctcagaggggatatatctgtctacagagaagctggggggaaatgggaagaatgttctctaatatccctttaaaggttaaactctttggatactctaacatcaatgtttgtgttattctcgtacatagagatacccacccattctcctaggtttttctgtaaccactggtgaatatcataacataaatgctaaaatggaaatgtataatagtaaactgaagttttattcattttcta

SEQ ID NO: 297780 - DNA, 583 bp, Homo sapiens
gggtatgtcaggttgtcttaaagaaaatgggttgaggcaaagaatcctgaatattgaattctgagccagatggcatgtgactctctgcctaggtagcagacagctctgtggttctcctgattggttagatcctagtttacttggcaggttaaagaaagaagtccttggagatagcagtcacacctgacccttctcttacctctcaacaattcaagggcttagggctgataccatgatagagaagttgtctaagaaatgaagtcttctaccttggtacatgctgcatgttttcaaacctactgccaataacagcagttttccaagaaagtttatagctctcagtatttctcagaggggatatatctgtctacagagaagctggggggaaatgggaagaatgttctctaatatccctttaaaggttaaactcttyggatactctaacatcaatgtttgtgttattctcgtacatagagatacccacccattctcctaggtttttctgtaaccactggtgaatatcataacataaatgctaaaatggaaatgtataatagtaaactgaagttttattcattttcta

SEQ ID NO: 297781 - DNA, 634 bp, Homo sapiens
atctcagtaaatacttcttgtgtcacagacatgatatgatgcatttctaagaagcaaatgtaaagggaaattatagtttaaaaatcagtgtttcaaatatgtgaaatttaaaattggaaacatttaacaaccatccatttaggatagtttcaatggtctttggatttagttttaccaatagaaaaaaaagttgtggtaaaaaattctcaaggttagaaacataccttggcatgacaacacaaggcaaaatatataacgttatctacagcttctgaattttaagcccaacaatgacatgtacatgttactatgggtaagtcactttaccagtcaaaatttgctctttccatcgctaaattgtggtgatgaaacccaaatgtccacccacatttcagaggatcaaagtgacttaatgcrcatgaataggccttaaaatcacaatcagcatgcaaatacaaacgattactattattcagcaataaaattaatgcatatcaaaaaatactcatgtggggttgtatttcaatataccaattctgttaaaatacagattccttttaaagtcatagcttggacacatttattggggcttcattttatttgatagcattgccctttcacaacattgtgaaat

SEQ ID NO: 297782 - DNA, 622 bp, Homo sapiens
ttacttctccccatccttcagaacacagctcaactgtcacctcctcttgaccactgctttgccgagggagagtcagctgtttctttttctgtcctttatcataaaacttagaacatattattggaatttatcatgctttctggattgtgtgctcttcaagagcagaggccataaagaccattcgtcattgactgtccatcatctagcagtgctccctaaattttgagtgagcgactgaatgtatcttgctatttttcttacattgaatgtgagttgctcagtcatggacaatatcttatttatctttgtgctcagagaagcacctgagagagattaacactggctaaatgtttgttgaattaataagttaaaaattacctgatatcctgaaaatagactgattggctaaatttatagggtaatacctagctataatattgtccccagaggcagtgagattttttattattttagtatatttttttctaatataaattgcrtaatttatttgcaaaaggtgttaataaaattatttttaaattctgtgtttataggctaagatttctagaatctttactttaaaaatgataatgatagtttcattttagaaggtaaatatagc

SEQ ID NO: 297783 - DNA, 567 bp, Homo sapiens
tgaattaatgaattcatcaatcaaaactctgaagttctgaaaacctctaatttactcttgctgtaatttagtgagagaaaagtagccttctgctggatagctccacagaaatgtaattaacctttgcttttgatggaacaggtgggacaattgttagagtaggatgataaataacacacacacacacacacacacacatacacacacaagcatacaattgtataggattcttacgccccacatttttgtgaggaccaaagtttgaaaatactgtaaaaaacaaattacaaatataagctgttgcaatagttgtttatagacagacagatacgtagaggcaggcaaacacagaacaaaatgttaacaaaatataaaattatttctgttatagaaattgagatattttcccctactgaattttctaatgatttttttcaattgacatgtattactatgaaataaaacraaatgaaatactgacattcccatattctactggcaggtgcccatagctgatggccacaagccatctcagcagcagcatattttcaagcagaagttgtagca

SEQ ID NO: 297784 - DNA, 607 bp, Homo sapiens
ataaaatatttaaaacatgagcacttcctttgaaaaggtgaattaatgaattcatcaatcaaaactctgaagttctgaaaacctctaatttactcttgctgtaatttagtgagagaaaagtagccttctgctggatagctccacagaaatgtaattaacctttgcttttgatggaacaggtgggacaattgttagagtaggatgataaataacacacacacacacacacacacacatacacacacaagcatacaattgtataggattcttacgccccacatttttgtgaggaccaaagtttgaaaatactgtaaaaaacaaattacaaatataagctgttgcaatagttgtttatagacagacagatacgtagaggcaggcaaacacagaacaaaatgttaacaaaatataaaattatttctgttatagaaattgagatattttcccctactgaattttctaatgatttttttcaattgacatgtattactatgaaataaaacaaaatgaaatactgacattcccatattctmctggcaggtgcccatagctgatggccacaagccatctcagcagcagcatattttcaagcagaagttgtagcaca

SEQ ID NO: 297785 - DNA, 593 bp, Homo sapiens
cggttcagtggtagccaggagggcactctacttgagatccttccatttaaagccttggagacctcacacacaacccctacaggcagcaggcagagtgtagagggttgagcaggttttattggccaggccyggaaagggtgcacacccctttacccacattaccttggccacagtccaatccccaagctgctcctaagggaggctagacatgtagctcagctgtgtgcccaggaggaaaaggccaaccattggtgaacaccttgcctgactctgctgtaagcaaaatactaaaaattgttctgctctatcacaccaaaacctatgcaagaacttttgtatacagacacttcagctcttttcaaaaggagtcaggaagggtagctctttctttaaaaaggagactgtgagaatagtgaggcgaaaagaatgtggcacagggtaggtacccaggccatgtttgtggggtcctttggagaaaaaagtcatgctgtctgcatttaatccttggcatcctaatgttatcaggtgattttgtgagcataaaaataaagctgtactttttgtaagcggaaagtctcattatatctgaggtg

SEQ ID NO: 297786 - DNA, 554 bp, Homo sapiens
tggagaagattggcatgttctaggagtttatagcaccttaggctgtggcatctggatgggctttccaaaaaaagtgaaattaaagttgaattctgaaagataaatgagaactaaatagaagaaaaaagatgaggaggatcgggattgggagagaattcttatagattcyacagtgtgtgcaaaaagacctaaaaatcagagagggcgtggcaagttctaggtattcaaagaagtcagtaggtctagaaaatcatggcaagggctagaggggtaggagaagggactgctaggtggacaatggatagatcagaggacaaatgttaaacacttgggacagaaacataaaagatgtacaacagcaacaacaacaaaaatgagtaaatatttatgtatttatatacatacattcataaatatatatgtatgtagtagtcccccttcatccatggttttatcttctgcaatttcagttacccacatcagccatggttcaaaaatattatggtatttcaagagagagaaaggctatatttacataaatttaattacagtat

SEQ ID NO: 297787 - DNA, 554 bp, Homo sapiens
tggagaagattggcatgttctaggagtttatagcaccttaggctgtggcatctggatgggctttccaaaaaaagtgaaattaaagttgaattctgaaagataaatgagaactaaatagaagaaaaaagatgaggaggatcgggattgggagagaattcttatagattccacagtgtgtgcaaaaagacctaaaaatcagagagggcgtggcaagttctaggtattcaaagaagtcagtaggtctagaaaatcatggcaagggctagaggggtaggaraagggactgctaggtggacaatggatagatcagaggacaaatgttaaacacttgggacagaaacataaaagatgtacaacagcaacaacaacaaaaatgagtaaatatttatgtatttatatacatacattcataaatatatatgtatgtagtagtcccccttcatccatggttttatcttctgcaatttcagttacccacatcagccatggttcaaaaatattatggtatttcaagagagagaaaggctatatttacataaatttaattacagtat

SEQ ID NO: 297788 - DNA, 558 bp, Homo sapiens
cacttgaccaaggtcacgcaacaaggaagtggcaaagccatggttaaattttaattccttctggctctaatgtccatagtcttttttctctttctgctttcctacatctacagattgaacttgtagtaagaaacttagtgctgtttataaagctctttcacatttgtcagtagtatcaatatcaataagcaacagtgggaaaaacttttgaaattactgttggccaagattggcagcatgaggtttagccaaatgctcactggaaatgtctttattggcaatttcgaagggttgtaaactgttgtattcactccactctctggtttgtgtgggccttaaccaggtaggaaaaggtctacatgttgatggctcacatgtcttctaatgacaygaaaagccaacaagtaaagggactgtgcttccaatgccttcaagactggactcttcttttgggttagtgaaattttccgcagttataataatactgaactcctccgagtctcagcttattcattttctaccatctactctgtttccatcccagaactgttgtaagaa

SEQ ID NO: 297789 - DNA, 513 bp, Homo sapiens
ttcatttctgagcaaattaactttaatgtgttcatgttctttgctcagaatttatatctcaatgtagtatttatttttctaaatatttgtagatgagatatttgttgaagtttttatctgtaatagtaaaaaatgaaaacaattgcaattttaaaaatagagaattggttgaattacaggaactatgagaccatgaaaaccataaatgaggaaaatgttttctcagtttctatactgtatatcttatgtgaaatamtaataaggaaataatatggaagttaaactgccattaaatggtccagataactcaaatgtttcctatacccacagtctaatcacagctcacaattcacaaactactgctgaagaagaatattaattgaagcaggaagtttttaaacagactgttaaaagtcctacagggaagataggaaggcagctccatctttaaatgcacagaaaaatattaacagcgtttgtcactgagtaatgggattatagtttaatttttgt

SEQ ID NO: 297790 - DNA, 563 bp, Homo sapiens
cagtctaatgcccaacttttaccagtggtgttttagttttttttttttttccaaaaggaaatgatgkaattctttatatacttctgaattgtctatcttttcaaaaataaaaattttcattttgcagtacatacagaatcaaaagactttcaagtcctaactccacaaatgtttattttgaagctctttaaactgtttaccacggatattagtaaatctgtcagaaatgaggtgacttacttatccttgtcccaccagatatgtgggaaggatgatcacgctagatagcatggatgggtcctctatttatctctttttacttgaatggaaaacacatcattcagattaatcaattagtcattgtgactgatagaatttttatatggataatctgggtttggtccctagctttaccacttacttggggtctttatgtcttctatggtctcctatctgtaaagggaagttgataatgccaatctagctaggttactgagatgcttaaatgtgtaatgtatgcaaagcagcaggtactcaataaagggtaactcttactattattg

SEQ ID NO: 297791 - DNA, 563 bp, Homo sapiens
cagtctaatgcccaacttttaccagtggtgttttagttttttttttttttccaaaaggaaatgatggaattctttatatasttctgaattgtctatcttttcaaaaataaaaattttcattttgcagtacatacagaatcaaaagactttcaagtcctaactccacaaatgtttattttgaagctctttaaactgtttaccacggatattagtaaatctgtcagaaatgaggtgacttacttatccttgtcccaccagatatgtgggaaggatgatcacgctagatagcatggatgggtcctctatttatctctttttacttgaatggaaaacacatcattcagattaatcaattagtcattgtgactgatagaatttttatatggataatctgggtttggtccctagctttaccacttacttggggtctttatgtcttctatggtctcctatctgtaaagggaagttgataatgccaatctagctaggttactgagatgcttaaatgtgtaatgtatgcaaagcagcaggtactcaataaagggtaactcttactattattg

SEQ ID NO: 297792 - DNA, 551 bp, Homo sapiens
gtggttgaatcatttgcgcccaggaactggacagaccagcctgggcaacatgggaaaaacctctctctaccaaaaaagaaaaaaaaaaaaattagctgggtgtggtagcatgcaccagtagtcccagttactcgggctggtcacatgagcctggggaggtcaaggctgcagtgagcagtgattgtgccattgcactccagcctaggcaacagagtgagaccatttctctaaatacatacatacatacataccttttgtggagttaaatttacacactttttctttattggctctggcttttgcattgtagtaagactttctttacactcaacttatagataaattcacccatgttttcttctagtacttgcatagttgaattttagatctctagtccatttggagtttattttttgtatggtrgaaggtattgatcctattttttcccaaatagttgttacccagttgtcccaaaacaagttattgaaaagtccatctttgtcccagatagactggaacaaaatgaattaaagacttaaatatgaagattt

SEQ ID NO: 297793 - DNA, 561 bp, Homo sapiens
cctacctggtggtagacggtgggagcagagagaggattgaaaaactacctatcaggtactatgcctattacctgcatggggaaataatctgtacatcaaacccctacaacacgcaatttatctatgcaacaaacttgcacatgaaccctgaacctgaaagtttttttttaaatgcctttgggaaaattggctatctgcgtgcaaaagaatgaaattgaacscttatcttagcaaatataccaaagtcaactaaaatggattaaagacttaaacacgatacctgaaaccataaaatttctagtggaaaacataagagaaaagctacttgacattagtctaggcaatgagtttttggaaattacaccaaaagctcaaacaacaaaagcaaaaataaacaaatgagactatattagaaagctcctgcatagcaagggagataatcaacagagtgaagagacagtctgcagaatgggaaataatattcgcataagtcctatatatttaaaatgtataaggatctcaccaactcgatagcaaaaaaccaaataactgattaaaaat

SEQ ID NO: 297794 - DNA, 570 bp, Homo sapiens
gttaatgttatctcttgtagtaatatgaaataaatgtgccccatctattgtataggagtcattgagatattygaagagagatatcctgtctgcccctcatctcttgttcacgataggtacttccatcgccttcagttactttttgcattaacagagctgctagaccttatcatggtcattatcattatcatactcaaagacatttatctgaaggaaaccttgatctctgccagctcagggctcttgggagtgcctagtcaccagataattttacctcctgggcagagttgtcaagaaagtggtgtttgttatcattttccccttctttctcctaaaatcacgcttctaacatggctgttaacaagcctcttcatagtgtttctctggttgtttatggctctacttgaagccttccatttcttggaaatgcctcttgcctttctaaatctcacccagcagaaagctaggccatctaatgaaactgtgtcacaaaagattccagtagcctgaggcatcactccttccaattttacctgcattttaatacaaaatctgaaaagtaaatgttca

SEQ ID NO: 297795 - DNA, 604 bp, Homo sapiens
tagtatttagtaaagcaaaacaatttggtaagtaatgtttaagaaatgctatttcctaagattttggagttgtatttattttttttaatgaattacatatgtttctatgaracatcttgtgacatttctaaacccaacagaaacagtgtatcagcacttatgacagctagttctccactgcagtgtgtcctaggaaacactctaagatccactgttaaaccttatgagagcttcagattctatattgctccctattttactgggcatgagtaggaagttttaggaaggaaaataaaagaatatcagctgcatagacttgaagcagtaacacttgcatttataagtgtgagtatagttttaaaaatctatagattttatgcaattgtaaatatatgaattcctcgctattaatatttgtttcagaatttttaaaaaaattgttgagttacttttcttttgttcatttcaccattaattagacccataatgttgtagacattatttggattatattgacattttatcagattgaacatatctgtattacttagtaaggtaaaaagcaaaaacaaaaacaaacttttccagaaagaaaaaaaactgt

SEQ ID NO: 297796 - DNA, 567 bp, Homo sapiens
gtacgtttttaacaagctcccaggtaatgatgctgcttggaccatgcattccagaggagtttctcaccaagtcactgtgcatacaaaccacstggggatctaataaattgcagactctgaatcagtgtgtctggaatggggcctgagaggcaacattttaaaaataatatattttttacttccattaatactgctattactgttttaatacctattatccttatttttaaatggacaaaaattgtatgtatttattgtgtacaatgtgatgttttgaaacatgtatacattgtgaaatggctaaataaagataaacatgcataaaattgacataatgatcacatactgattttacattgagaacacttaaaatctcccttagaaatttccaagtatataatgcattgttactaactattgttttagcctgttctcatgctgcaataaggaaatacccaagactgggtaatttataaaggaaagaggtttaattgacttgcagttcagcatggctggggaggcctcaggaaacttacaaccatggtggaaggcaaaggagaagcaagg

SEQ ID NO: 297797 - DNA, 560 bp, Homo sapiens
aaccactattttactcttcgcttttatgagtttaagtttttcagattctacataaaagtaagtatttgcctttctgtgcctgtcttatttcacctagcataatgtcctccaggtttatccacgtgttgtaaatgacaggacctctttaatgccaaatagtattccattgtgtatataaacaggctgattgtccctaatctgaagacttaaaatccaaaatgctacaaaattagaaatgtttgagtgccagcatgatgccacaactggaaaattccacacctcatgtgacaggtagcagtcaaagtgcagtcaaacctttgtttcatatagaaaaatattttaaatattatataaaattatcttcaggctatgtgtataagatgtataaaacttttatgtttagacttgggtcccaccccccagatatctcattacaccaacagtgtaaaagtattcccatttctccacagccttaccagcatctattgtttmttgactttttaataatcgccattctgactggtgtgagtgtggttttgatttgcatttctctgatgatc

SEQ ID NO: 297798 - DNA, 545 bp, Homo sapiens
tactataaaaattgacaaacttaaatgatctgtgccttacaaatactagtactgtaattataaataaggaaaatgtattttccaaagatctaaatggccagtataattacagtaataattaggcagttcagaaactgtctcttaaggataggatttatgaaacttcagtgaactcagtattttacatttacacatgtgactaaaatcatcaatatataattcttaatagaactcctagtttagtttactctttgtagttcactttaggaaacactagtaagtttctatctctatgtagtcaactgattatacaggttgtttctgttgagtgcctcccatatctcaggaactttttgtgagaactttacatgaattaactcatttaaacatctgcrtaagtaagtatagtttccttaagcaccaactgaaagccagtggtactgtccaccacattctggatgaggggctccatgaagcacatgggtctaaaaacagctcattgaccttcacctcataagttcttagaatatttcccagagcttaac

SEQ ID NO: 297799 - DNA, 629 bp, Homo sapiens
gataatagacttactggtggtggctgtcaattcttgacattccttggcttacagctgcatccctccagtctctgactctgccatccttggcattcttctctcataaggacatcagtcatattggattaggkcccgccctaatgacttcatcttaagttgattctacctgcaaagaccctatttctaaacaggggacattcacaggtaccaggggttaggacttgaacatagttggggtggtggagggaaatataatttagatcataacaggcagttgtgtgttttaaatgaattatcaactaacatgaatgattatgtagataattctacaaggatgaggcatgtagccaaggctttatacccgaggtaggaggtctaacgcagttactgtcaaacagttttgcttggggccctctaattctgtacctcagtcacaacagctgatgccatcatatcatctactgtttaactgtgtttacagtataaactggaaagttggctggaccttggtatctacatatgtaaaatatgggtgttggggaaaatattagttttctgtcaacttttaaaactgtttcattgaggtttacatgtggaaaaggggaaaaactatgtagatgatgtttaat

SEQ ID NO: 297800 - DNA, 606 bp, Homo sapiens
tattttctaaatcagcgtgtatcaggtaaagtgcaacactcacaatcttttgtttcagaatataacaaaagatttgaagattactcctgggtatgcttgataaaggtgtgttataggaagaatagataggaagaatggtaaatatatacctacataaaaacacatgtatatatacagaaagaaagatggtgaaatccataattataaaaaaataattatccagaagtmatttcactaagctcaaaccagtgtacatgttcagtctgaagtttgccagtttggcctataatactataatattcatagtctgctgaaaaaaaatggttgttggaacacagcccgtaggaaatgtattataaataaagggctttaaagtgataatggtccactcgttagaaaatttgggaacagctctctaaaaaattatatttttaaagaacatattttgaacaagtatcaaagatgtatttgaaatgaacctctgcccacccagtggggttcattttactgaggcaagcacatatggtaagtagtatttcaagtctaagacttctccagtataatttaactcagttatactttcatttcaagatatcttcaagggct

SEQ ID NO: 297801 - DNA, 568 bp, Homo sapiens
agggatatgacctttaaaactattgtgtaaatgttatttaacattttagagccaaaaatgacaagcttcctatagatctagagcagtggttctcagcagggagggttttatcacctaagggacagycaggaatgtctaaagaaactgtcaagtgtcagaacgtgggaggtggtactaccagcagtgagcgtatagaggctgaggatgatactaaatatcctacaatgcacaggacaaccccccaaaacaaaattatctggttcaaaatgccaattatggccactgatggaaaacctagacctagagaaaaagataaggcaaactgcaaaaggttaaatgacttgctgatggttcaatgactttgcttttagcacagttgaaactaaaatggatatttcttctttgcctgtctagtgtatcttcctcttaagcactgtttggcaatttcaagaattccacttgaacataacagctgccatttcctttggcttcctatgttccatgaactaagtgcttataaaaatcatctcatttatccatattgaacagatgagaaagctgaaaaaca

SEQ ID NO: 297802 - DNA, 529 bp, Homo sapiens
tcaatatcgtgaaaatggccatactgcccaaagtaatttacagattcaaggctactcccatcaagctaccattgactttcttcrcagaattagaaaaaactactttaaatttcctatggaaccataaaagagcccatatagtcaagacaatcctaagcaaaaagaaagctggaggcatcaggctacccgacttcaaactgtactacaaggctaaccaaaacagatacagaggccaatggaacagaacagagacctcagaaataacaccagacatctacctaggaatacaactggtctcgaactcctggcctcaagtgatcctcctgccttggcctcccaaagtgctgggattacaggcatgagccactgtgcctggcctattttagcctttattacctgttaatttctaaagccatttcacttagtcaatgtagatagttgaagtgatagaaatacagttttagagttttactccaaaattttatttaaaatttaatttgttgaatgccttcatactatcctgcctata

SEQ ID NO: 297803 - DNA, 1164 bp, Homo sapiens
tcaatatcgtgaaaatggccatactgcccaaagtaatttacagattcaaggctactcccatcaagctaccattgactttcttcacagaattagaaaaaactactttaaatttcctatggaaccataaaagagcccatatagtcaagacaatcctaagcaaaaagaaagctggaggcatcaggctacccgacttcaaactgtactacaaggctaaccaaaacasatacagaggccaatggaacagaacagagacctcagaaataacaccagacatctacctaggaatacaactggtctcgaactcctggcctcaagtgatcctcctgccttggcctcccaaagtgctgggattacaggcatgagccactgtgcctggcctattttagcctttattacctgttaatttctaaagccatttcacttagtcaatgtagatagttgaagtgatagaaatacagttttagagttttactccaaaattttatttaaaatttaatttgttgaatgccttcatactatcctgcctatawacaatacttggtaaaataatgaaatgctcttgcaactgtagaatattatttttctcctttgtgctatatatttatagcatttaagcaaccatgtcatttactcaggttttcttatattagttgatcagatcttttttcccttggtatcatagtctgacataattatcaataatacagaaaggtgatawaatcattattttacagaacaaatcctttttctgaaatcctgtgtgtctgtgtgtgcagatatctctaacagataccttaatcattttcattggaataggaattaaaagtcattttgcaaataaggtaagtctagactcccaaaataaaaattcttatgatcaaatattcatagattatgaggttattacatgcgaggcactgctctaagcactttacataggtcatatccttttatgctgagagtggtttttattatgatcccattatataggtgagggaattgaaacacagattaagaaatgggcccaacctagtgtggcagtgcccagtggcagagctcggatcagaccccagtggtctggctgtagagcccgcgctctaatcattttgttacactgcctctcagatgcttccactctgctttcttccatgtgcaaactattgt

SEQ ID NO: 297804 - DNA, 634 bp, Homo sapiens
acaatacttggtaaaataatgaaatgctcttgcaactgtagaatattatttttctcctttgtgctatatatttatagcatttaagcaaccatgtcatttactcaggttttcttatattagttgatcagatcttttttcccttggtatcatagtctgacataattatcaataatacagaaaggtgataaaatcattattttacagaacaaatcctttttctgaaatcctgtgtgtctgtgtgtgcagatatctctaacagataccttaatcattttcattggaataggaattaaaagtcattttgcaaataaggtaagtctagactcccaaaataaaaattcttatgatcaaatattcatagattatgaggttattacatgcgaggcactgctctaagcactttacataggtcatatccttttatgctgagagtggtttttattatgatcccattatataggtgagggaattgaaacacagattaagaaatgggcccarcctagtgtggcagtgcccagtggcagagctcggatcagaccccagtggtctggctgtagagcccgcgctctaatcattttgttacactgcctctcagatgcttccactctgctttcttccatgtgcaaactattgt

SEQ ID NO: 297805 - DNA, 485 bp, Homo sapiens
cgcacctggctggcacttctcttaaaactaatatctcaagaagttttttctttaagaatcttctttcaattgcaggtccatgtagttctggtattcattaaagtgcctatcccaggggttttggtatgttgtgtttcaattttcatgtttcartttttttgatttatgcattaattttgttttttcagaattcaggtgcaggttgtttagtttccatgtatttgtgtcgttttgagaattcctcttgttcttcatttctaattttatttcattgtgacctcagaagacacttgcattgattttgattttttttatcttattgagatgtgacttacgactatgtggtcaattttagagaatgttccatgtacagatgtgaaaaatgtatattttgtgttgttgggtggaatattctgcagatgtctgtcaggtccatttggtcaagagtctgatttaagtccagtgtatacctttgttagttttct

SEQ ID NO: 297806 - DNA, 590 bp, Homo sapiens
atggcatttcagtgcctagaaaaaaaatgacattcatatgcagagaagaaaagtttttcccttgatatttgcatggaaatattagctggcacagttatttttgattagaaaaatgagcaaatggttctctgtaattgacataaaagaaatgtatttgtctagtaaaaaaactaattttcttagcacgaatatcagcttaatatttataaacctgtatgtgaacatgaaattagatatgtggamtagaaagtacatatctggctagggttgttcttgttaaaaagtcagcttttatcaaaagcctcagtcataggctccactaagtgattatagacatcttgttttacaaattcttatttagttattcatgttgggcaaggaagtaaatagagagcctgaagagacctaaggaggccagacatggtggtacacacctgtaatctcagctactcaggaggctgagctgggaagactgcttgaacccaggagttcaaggccagcccaggtgccatagtgagacccccacctctaaaagacttgagagggagtaaagactatttcagaaaatctgtacagcataattttccctt

SEQ ID NO: 297807 - DNA, 590 bp, Homo sapiens
atggcatttcagtgcctagaaaaaaaatgacattcatatgcagagaagaaaagtttttcccttgatatttgcatggaaatattagctggcacagttatttttgattagaaaaatgagcaaatggttctctgtaattgacataaaagaaatgtatttgtctagtaaaaaaactaattttcttagcacgaatatcagcttaatatttataaacctgtatgtgaacatgaaattagatatgtggaatagaaagtacatatctggctagggttgttcttgttaaaaagtcagcttttatcaaaagcctcagtcataggctccactaagtgattatagacatcttgttttacaaattcttatttagttattcatgttgggcaaggaagtaaatagagagcctgaagagacctaaggaggccagacatggtggtacacacctgtaatctcagctactcaggaggctgagctgggaagactgcttgaacccaggagttcaaggccagcccaggtgccatagtgagacccccayctctaaaagacttgagagggagtaaagactatttcagaaaatctgtacagcataattttccctt

SEQ ID NO: 297808 - DNA, 582 bp, Homo sapiens
ttgtctttgggtagaaatacaatatttctaagttggtcaaaaatgacgattattagaactgccatgagagctaattctcatgaatttctctgacagaacaccataaacaacctcagattatattttatccaaatgtcaggctgaagtgatttataatctggttttcaattcagttcataaattactcatctaaactcttagtaaatcaaatcagctccataattgaaaaagtactttacatggtttaacataaaagaggtcagcagaaattaacatggtgataattttccctgcttttaaacaactagaatgactaattctttccacagttgaatgcatttttccactagatatttaaaaaacaaagccacattaaaaaccatctccttttaagcctttctctttcctattttttttaatttgggaaagaaaatgtaaaaatgcatgcttactacagtttatttcttcctactgatgygtatcagcatatataaatgtgtatataaatgcaaatgaacaggaattttgatcaaagaaatactacaaagctagttaaatacattctttactcctccccctttc

SEQ ID NO: 297809 - DNA, 570 bp, Homo sapiens
ataggaaggcttaaaaatacatgagaaaaaccagtgaggaatgtatcatattatcctggccaatagaggatcagaatgagatgaggagttacagatatcaaaggacgtttctctgggcagagtttaaaggataaaatgtgatattgacaatgactggcagacaaaatgattgtagtctaatgacttctagaaaacttccgcaagaaaacagactggtattgtggtgaggtagaccttgaagggattcacaaacagatggtgcacattgaccagcattttctacacagggcataatgtcaaaagaacatgtctaatccactgcacacaaggagtcccataaaaggggtttttagaactaagtctacaatctattttctgaacatttttgtgaattatagtgttttacatagtttatataaaaaagattttctatgatttttaaaaattctcagaggtaaamtgagaacaagcacactgagcccagacctgtcacctgtatgtccacttccatattctaatttgatgtttccagctaatctcaaaattaaaaatccctgcttttaaagacag

SEQ ID NO: 297810 - DNA, 594 bp, Homo sapiens
ctcttttgaggggaggagtctatctgaatcaaccactgatctgaaattctacagagactcaaagactagtccatgtggatatttttaattgtgtgggagatgggcaccatttgaagaccctacaccttcaggttcttgatagcaagtaaagctattccaaaggaaagaagataccttactgacatggcaatcacagatcgatctttaatcattataacatttttttcttcagccaacaaaaatttctcattgtgtttcatttcaacttctaccttttaatgtattaccttttaatttttaaacttttggttcagtttatcaattgtccctattaacctcagcctrcttgttacagataacatacagataatagatttaagtaaacaataaagaagaaccactattttttgaatgtattatgtgtcagtactgagctaagcatttttgaaacattagagtcacccacatttgaaacaggacaactgaagctattttatacagaagattcacacacacacacacacacacacacacacacacacactcttctacagaagatggcttatatatatttacacacactcttgaaacttc

SEQ ID NO: 297811 - DNA, 594 bp, Homo sapiens
ctcttttgaggggaggagtctatctgaatcaaccactgatctgaaattctacagagactcaaagactagtccatgtggatatttttaattgtgtgggagatgggcaccatttgaagaccctacaccttcaggttcttgatagcaagtaaagctattccaaaggaaagaagataccttactgacatggcaatcacagatcgatctttaatcattataacatttttttcttcagccaacaaaaatttctcattgtgtttcatttcaacttctaccttttaatgtattaccttttaatttttaaacttttggttcagtttatcaattgtccctattaacctcagcctgmttgttacagataacatacagataatagatttaagtaaacaataaagaagaaccactattttttgaatgtattatgtgtcagtactgagctaagcatttttgaaacattagagtcacccacatttgaaacaggacaactgaagctattttatacagaagattcacacacacacacacacacacacacacacacacacactcttctacagaagatggcttatatatatttacacacactcttgaaacttc

SEQ ID NO: 297812 - DNA, 594 bp, Homo sapiens
ctcttttgaggggaggagtctatctgaatcaaccactgatctgaaattctacagagactcaaagactagtccatgtggatatttttaattgtgtgggagatgggcaccatttgaagaccctacaccttcaggttcttgatagcaagtaaagctattccaaaggaaagaagataccttactgacatggcaatcacagatcgatctttaatcattataacatttttttcttcagccaacaaaaatttctcattgtgtttcatttcaacttctaccttttaatgtattaccttttaatttttaaacttttggttcagtttatcaattgtccctattaacctcagcctgcttgttacagataacatacagataatagatttaagtaaacaataaagaagaaccactattttttgaatgtattatgtgtcagtactgagctaagcatttttgaaacattagagtcacccacatttgaaacaggacaactgaagctattttatacagaagattcacacacacacacacacacacacacacacacacacaytcttctacagaagatggcttatatatatttacacacactcttgaaacttc

SEQ ID NO: 297813 - DNA, 565 bp, Homo sapiens
gactgatacaaagtttcaaaaaatgttcgctccaatggtagatagaaaaatttgtactaactagagaaagatccaggtaaggacacttaaagagagatttgaaggaccaggaatcttgaatcaggctaagaatgggatgagcaataaggagggctccagaggagccaggtagaagaactgagagagcttgcctggctagagtatttagccactccacacacaggttggtgtgatatgaggctgacttagggaagcaggaatacatggtgaacctcatgagccaggttaggaattttaaatctatgttgggactgacaggaagttgaagaatttgtctyggtcagctctgggtttcagaagtgtgaatgcaagactgaacacagaaaacctaattttggaagcccctgcagcaataagtagagataggataatcccaaggggaagtatttctctttcttgaaagagaatggtgctaccattcatggagaaaaaaacactgagaaatgaagttatatgcatgtatgtgtgcatgcagatgggggcatggatgggttaagttttagcc

SEQ ID NO: 297814 - DNA, 571 bp, Homo sapiens
atgcctatccctagctctcaactcgacataaatatttgggcactcaattattaaatgtcatcagattaatatgtatataagtgcccactatatgccaaaaaaatgcattatgcactaaaattatagtagacaaaatacaagtgatctctaaccttgtgtagaaagtcctccccagtagcgagaattctaatgtggactcaccctatttttcagtttttatcaagagtaagcatttctccttctaggaagactctcttctcatrataccaccttattaagctttttcctgcctttctatctggccactctgagtttcctctgatggctcccttccctccgccataagtgcgggaaacccccagggctatattctggaaactctttcattctctttccatcttccctctttaggagatctaacccatttcctatgtctttaaataccatctaaatataagtcattaacagaatcaaaaacagaaacggtatacttatttcaatagatgctgagatagcatttgataaaattcaacattcctttatgataaaaattctcaccaaaatggatata

SEQ ID NO: 297815 - DNA, 622 bp, Homo sapiens
aaccacattgtaacagatatgagattacatctagtggcattttgacccccaccccaccaatttcccacttacacacctgccatatgtttttctatttggaatctcttcygctcacgggtgaatgaaccacatcactggcttcctgggaaagctcttcctacatttattcttaagtaaacatctctttcttgtggcttctggagggctaattgttctcctatttctaagaatcattatttttagcctagaacaagaagaagggaagggcatgagccacactggaaataaagtcccaggactttggtgagactacatgggacacatcttaaaatagcctaatgatttagtggcccttttcccagagagctgagaggcactcatgtggagagaaagaagtttcagggaagtgatgttagtaagtgagaaagtgagtagtttgtggtgtgtgtaaacctcagtgtgagcctgggcagtgatgacattgtgatgttacctgatggagctaaaactaaaacaagaaggaggcaatgcagaatattaaatagataagagttcataatgcaagagtttgtctagtcttcacttagaaatttacaaaacagttcagctaagaaaccgataa

SEQ ID NO: 297816 - DNA, 622 bp, Homo sapiens
aaccacattgtaacagatatgagattacatctagtggcattttgacccccaccccaccaatttcccacttacacacctgccatatgtttttctatttggaatctcttctgctcacgggtgaatgaaccacatcactggcttcctgggaaagctcttcctacatttattcttaagtaaacatctctttcttgtggcttctggagggctaattgttctcctatttctaagaatcattatttttagcctagaacaagaagaagggaagggcatgagccacactggaaataaagtcccaggactttggtgagactacatgggacacatcttaaaatagcctaatgatttagtggcccttttcccagagagctgagaggcactcatgtggagagaaagaagtttcagggaagtgatgttagtaagtgagaaagtgagtagtttgkggtgtgtgtaaacctcagtgtgagcctgggcagtgatgacattgtgatgttacctgatggagctaaaactaaaacaagaaggaggcaatgcagaatattaaatagataagagttcataatgcaagagtttgtctagtcttcacttagaaatttacaaaacagttcagctaagaaaccgataa

SEQ ID NO: 297817 - DNA, 672 bp, Homo sapiens
ttttctttgtaaattaagaaagtcttggaaattcaaactcttaatcattctctttatcaagacagttttgagaagccactctaattagcttagtgctgttcacgtgcatgagttaaatattaaaaaatggacctgaaggaatgaaataaagcagaatgaatttttagatctatgtttgttcagttttcacaatgaaactttttatttaaaataattactggaccactgaccttcctatattcaagtataaatataaaaataaatctatttcaaactctagaatgattatcaggttatttacccttgagacataattgcccctcctatatttctgtccatatttatgagtgttatactaaaatttaataagctgacactgtaaaggcccatggttttagcaatcttatataattctttagggccagcagatatggactaacagcagagctgtgggccctgcagtagataaagcaaggtctgggtggaaatggttcaaatctaatcttaccactcttttttacaactgtaacttccaccagcgtcacgttttattcaaacatgggtgaagttacygcatggcttttggctgttaagtgattttggaagtgctcataaatctttatgaaattcaattcagttttcaacaagtaatagtttaggggatgggcaaaa

SEQ ID NO: 297818 - DNA, 581 bp, Homo sapiens
gaggaaagtctagaaaaatttacatgtggctgaagcccagctgcaaatatccacaattacctgaactcaggacgctgtgttctgaagttttgtgtgttttagtttcattgcccagcataaatttacctattagatgttatgaaacttaaactgtaatggagctgaatgtgctctgagagatttatctcacttctgctgttcaaatgacatctgctcactaaataagtctcgacctgaacatgtggctaattttctctaaaaatctgcattttccaaaaaagtttttaaaaactgaattaaatagcaaactagaggtaaaaatactaaagcttcgtgtgttttttaatgaaaacatatgaaatataaaaatttaaaaacagtartttagtgttaatttacatatagtaaaatgcacaaatcttaagagtagagctccgtgactttttgtgttatgtatgactttttgcatagtggccacttcccagatgaacagatagaatatttccatattccagaaaactccttcatactctttcccagtgcctctccaccaccaggtaagaactgtaccgattctttca

SEQ ID NO: 297819 - DNA, 520 bp, Homo sapiens
ttccagagttctcagttgttctgttcaaagtgttattatctagtcattattttgttggttctttgtggagaagaaggggtgttccgtgcctctagtcagccaacttgaagctcctcctcacctaaaattcattttttttaaattttgatgcctagaccctcctcccagagattctggtttcctgagtctgggatgtggcctaagcctccggattttaaagaccgatatgcagccaaaagcaagaatccctgaattaaaggaaytgagataaattcattttatattgcagggaatcaaaatatgtcctgtcatcatttcattttgtataggtgcatccagattcatctgctgattttgatttactttctggttccttttattaggggcatccttcccatttctattcactctctcccaattccccctagattctggggtaagtacatggcccatatggattcagcaaggctcaatgagccaatgagttctgaaaagcaattgtttttgacacttgttaaag

SEQ ID NO: 297820 - DNA, 376 bp, Homo sapiens
gacttctttttatagccactgtaaaaattctccttatgctcactacttcacttttcccttaagccccaagccctctccccaccctgtctgtacccagctcagccattactggccacttaccctccagtgtgcagggcctcttttaaagcactattagatgtctggatggtttatggatctccrggcttctgactccatgtactgcattactttaaaagctagaccataagatgcaattgcagaggggaaagttggagggggcagtgcgtgagtttagtatttaatgagtgaatgtattacaccaaatggatggaaacgctatgctagcactttttacttctttataggtttctgattttttttaaatcaattggca

SEQ ID NO: 297821 - DNA, 578 bp, Homo sapiens
ggcttggcttctctgagcaccctgaagtcttgggcattcattcactcttagagggagrgaatggctgggaactggggaagtgaggcttcctcagagactaagcagccacgaggctgcagctcccctggaacaggcagacttgcacaaactccagtgaattagaagtgtaaattgaggagttcgacttggcttgcacagtacaataaagatctgcaaacactcagctccgtattgaacctgaggcagggtgattaattcattattcgcttcccagcttggaagcaaaagcttgtatacccaggggccagcatggatcagcagagtcataaatcacgccacttacaagtctagcaatgagaaaatccactggctggaggggggatgctcttcaggcagcaacagcggccagaggaccggccagtcaaggcgggccagtctgctctctggagacagaccgattggccaggcatttcgccttccagccaagacggccagcctctcggccacccggcttggcgtttcctggccagaccacaaggaaataaactccactccacccaagaggaatgctcctgtga

SEQ ID NO: 297822 - DNA, 578 bp, Homo sapiens
ggcttggcttctctgagcaccctgaagtcttgggcattcattcactcttagagggagagaatggctgggaactggggaagtgaggcttcctcagagactaagcagccacgaggctgcagctcccctggaacaggcagacttgcacaaactccagtgaattagaagtgtaaattgaggagttcgacttggcttgcacagtacaataaagatctgcaaayactcagctccgtattgaacctgaggcagggtgattaattcattattcgcttcccagcttggaagcaaaagcttgtatacccaggggccagcatggatcagcagagtcataaatcacgccacttacaagtctagcaatgagaaaatccactggctggaggggggatgctcttcaggcagcaacagcggccagaggaccggccagtcaaggcgggccagtctgctctctggagacagaccgattggccaggcatttcgccttccagccaagacggccagcctctcggccacccggcttggcgtttcctggccagaccacaaggaaataaactccactccacccaagaggaatgctcctgtga

SEQ ID NO: 297823 - DNA, 548 bp, Homo sapiens
ttttaaaaattccctaccaagcttgacccactaggyaataactcttactcaatctcattgcttcatgaaatttcattgactccctgcaccctccatctccctgctccaccctaggctacttccttggcactgatcttattccaaggactgggccaggcccatgggtacacatagctaaccattccccagtccctggctttcagccaccatccaaggctggttccctgctctccccagcacttctccagttctactctgatttgggccatatagatggaaaagggatcagctgggtgactaggcaggtaatgaatcccaggactgtaggacacttattgacacaacactggggtagtggagactcacagaaaatacagaaagccttctactttttcatctaccttccctgttctccaactgagtataatttcatcatctgctcagattggaagtcatatggcctccttgtttgtttttctcatcttactttacccatagttttggtaagaaattggtgaggagggttggctcttggaggtttttgagct

SEQ ID NO: 297824 - DNA, 623 bp, Homo sapiens
aacatgtaatacttttgtaaccaaggagaaaaatgtattttttgaaaaaaccccaggaattgcttctgtgactagctaggtaattaacaaaatggagggaatgttttcctggaaaaaaaattaagtaatttatgatgaagttcttggtatagaataactcacactttcaaaaaaacctaacatgcaagaaagcagcctggacacagacagaagcgctatctgtgaggygtgaaatttcacacatgccaaagcctgcacaggtcccacagtgtatttcctttaatgacacatgggaacttgtaagttctctggctgcaactaagacagattctaatgggcggcaggagtgctaagctgtgcctttctggttctaccccacacttctctaccccacaacaaggaacaagttgattaacctctttgagctcctcaagtccctctctgatatggaaatccactaacatcaatagggcgcctaagggcaaaagtggaagaaaataaacactacaaataagatggctttagatagaagcccaggccagtgcaacagggacattacacagctgtctccaactgaactgccaacacccttggctgagagtctgcccagggtctcgtttcat

SEQ ID NO: 297825 - DNA, 550 bp, Homo sapiens
agcatcagtttccattgattctcttgagatcaagagaaaaaacattaatgtacttagggatgacagtcacataggtttctaagagtataccagacytctctctgaaatgaggcttgggttgtcctctttctgataaattcccagatttaacagaaaggctgccttctgccatgaggacacattgatataagagtttgagaggtactggtgcacttcttcacactaacagacgtgtgaggatgtatgactaaaccacatggcatacagttcctgcctacttaatgtttacttttctacctctgcctctggttttggtccctggcagctgctgattcttggtaaaaccccagagtttggagtcagaagactgagtttcaaagttcgtctgtcgcctttttcttttcttctttttttttctagccatgatatcaatctctttgagtcactaaatgattgtgacaacaccttgtacagttgttggtatcattaaatcagatggtgtataagagtattttataaaaactgtaaaggaggatgtggctgcaggggc

SEQ ID NO: 297826 - DNA, 1101 bp, Homo sapiens
agcatcagtttccattgattctcttgagatcaagagaaaaaacattaatgtacttagggatgacagtcacataggtttctaagagtataccagacttctctctgaaatgaggcttgggttgtcctctttctgataaattcccagatttaacagaaaggctgccttctgccatgaggayacattgatataagagtttgagaggtactggtgcacttcttcacactaacagacgtgtgaggatgtatgactaaaccacatggcatacagttcctgcctacttaatgtttacttttctacctctgcctctggttttggtccctggcagctgctgattcttggtaaaaccccagagtttggagtcagaagactgagtttcaaagttcgtctgtcgcctttttcttttcttctttttttttctagccatgatatcaatctctttgagtcactaaatgattgtgacaacaccttgtacagttgttggtatcattaaatcagatggtgtataagagtattttataaaaactgtaaaggaggatgtggctgcaggggcwagcatcagtttccattgattctcttgagatcaagagaaaaaacattaatgtacttagggatgacagtcacataggtttctaagagtataccagacttctctctgaaatgaggcttgggttgtcctctttctgataaattcccagatttaacagaaaggctgccttctgccatgaggacacattgatataagagtttgagaggtactggtgcacttcttcacactaacagacgtgtgaggatgtatgactaaaccacatggcatacagttcctgcctacttaatgtttacttttctacctctgcctctggttttggtccctggcagctgctgattcttggtaawaccccagagtttggagtcagaagactgagtttcaaagttcgtctgtcgcctttttcttttcttctttttttttctagccatgatatcaatctctttgagtcactaaatgattgtgacaacaccttgtacagttgttggtatcattaaatcagatggtgtataagagtattttataaaaactgtaaaggaggatgtggctgcaggggc

SEQ ID NO: 297827 - DNA, 573 bp, Homo sapiens
tttttcttttcttctttttttttctagccatgatatcaatctctttgagtcactaaatgattgtgacaacaccttgtacagttgttggtrtcattaaatcagatggtgtataagagtattttataaaaactgtaaaggaggatgtggctgcaggggctgatagttctcatgagtattactgctcttgtttctgacagttaaaagaatattggcagagaaacagccctggtgttccagcaggagccaagaggaacaggaaaacaaatggcagcatccatgagacagccacttctggtggttgccactcacctggagatgtgagtcttggctgactaggttcctggggacaggggacccaaggggcactagagggtaattgttaagattgtggatggactgttgggtacctgtgaagaattctgggtttgaatcctgcctctttgtctgctagggatatgaattagggcaagttgctagacctcatcgggcctctcttttcacatctgtataatagaggtggtattgtttcacttccatttgtgaagtttaaatgagatttgttattgttgtttt

SEQ ID NO: 297828 - DNA, 1147 bp, Homo sapiens
tttttcttttcttctttttttttctagccatgatatcaatctctttgagtcactaaatgattgtgacaacaccttgtacagttgttggtatcattaaatcagatggygtataagagtattttataaaaactgtaaaggaggatgtggctgcaggggctgatagttctcatgagtattactgctcttgtttctgacagttaaaagaatattggcagagaaacagccctggtgttccagcaggagccaagaggaacaggaaaacaaatggcagcatccatgagacagccacttctggtggttgccactcacctggagatgtgagtcttggctgactaggttcctggggacaggggacccaaggggcactagagggtaattgttaagattgtggatggactgttgggtacctgtgaagaattctgggtttgaatcctgcctctttgtctgctagggatatgaattagggcaagttgctagacctcatcgggcctctcttttcacatctgtataatagaggtggtattgtttcacttccatttgtgaagtttaaatgagatttgttattgttgttttwtttttcttttcttctttttttttctagccatgatatcaatctctttgagtcactaaatgattgtgacaacaccttgtacagttgttggtatcattaaatcagatggtgtataagagtattttataaaaactgtaaaggaggatgtggctgcaggggctgatagttctcatgagtattactgctcttgtttctgacagttaaaagaatattggcagagaaacagccctggtgttccagcaggagccaagaggaacaggaaaacaaatggcagcatccatgagacagccacttctggtggttgccactcacctggagatgtgagtcttggctgactaggttcctggggacaggggacccaaggggcactagagggtaattgttaagattgtggatggactgttgggtacctgtgaagaattctgggtttgaatcctgcctctttgtctgctagggatatgaattagggcaagttgctwgacctcatcgggcctctcttttcacatctgtataatagaggtggtattgtttcacttccatttgtgaagtttaaatgagatttgttattgttgtttt

SEQ ID NO: 297829 - DNA, 352 bp, Homo sapiens
gcgggctctctctgctgtcaccgccacacagaagaagaaggcggagagggtgagtccaaccacctgccccgtcccctgggagcctggcttcgcagacagaggagtgagcctaaaggtcccttctgcaggatggagtgtcctgcccagaaggcagcatggccatttctcactgcttttttgtatggttgttagcggcagcttgggactgagtcagctgctgtgggtgagttggggggcactctggggagagarcacaggacgtagagcttggaggccaagtgcctgccatgcctttacctggctgtggtcttggccaagtcctcagtgggtattgggtacttgtactgtgaag

SEQ ID NO: 297830 - DNA, 540 bp, Homo sapiens
ggtacagaagagtacctttagtatgttaccatttctgtagagagaggaaacgtgtgtgtgtgtgtacatattatgataatatacataaaatatgtttgcaagtgttcataaaaactcaggagagagcaacagggtggctgggagatacttcccttctgtaccttctgagtytgggactatgtgaatgtattatcctttcaaaaagtgaacaaaagattaattttccccttcctagctgtgcccccacccccagcaagaaaaatgggcttagagaattggatagatctgggtgtttaaatcccagctctgcctaagtgatcttaggcaagcacttaacctcaaatactccatgttttttcatctacacaatagaggtcatcatagtaactgtctcccatggtggttgcgaggattaaatgggattgctagcatggtatctggtgaagcactccataaaagttcaaacagtggtaataataacagtaataacaatagcaatattatctgatctctctgggcctctgttagccagctataaat

SEQ ID NO: 297831 - DNA, 535 bp, Homo sapiens
tctccaggacattgcactgggtaatgatttcttgagtaatasttcgtaaacacaggcaaccaaagctaaaatggacaagtgggatcacattgagttaaaaagctgcacagcaaaggaaacaatcaacaaaatgaagagacaacccacagaatgggagaaaatatttgcaaactacccatctgacaaaggattaataaccagaatatataattagcttaagcacctctataagaaaaaaatctaataatccaataagaatgggcaaaagatttgaatagacatttctcaaaagaagatatacaaatgacaaacaggcagtacgaacaggtgctcaacatggttggtcatcagagacatgcaaatcaaaactataatgagatattatctcaccctaattaaaatggcttatatccaaaagacaagaacaaatgctggcaagaatatagagaaaagggaacccttgtgcactgttggtgggaatgtaaattagcacaggcttatggagattagcttggaggttcctcaaaaaactaaa

SEQ ID NO: 297832 - DNA, 514 bp, Homo sapiens
aatacgacattaacaggagagcagcagtacgattttgccgatggaataacagatttgccggcaatcactgaaagagtgcaaacatcgggtccttgtgacttcaacggactcttccaaattgtatgaatgtatcaatgtattagataaacccagtttcagaatgataaagaaaaaatgttagaccaaataatgcggctagttaacagtggtacgatttctcgcccgtggctttaaaatgcacttaaagtcctgtccttgccttttattttctgaacttgatgtttttgcattctttgagttcagtttaaagacaactacgagcatctgtaaccaatctgacaataatgtgttcatcaggtgcctgtggattaaatcacatactggcatatttaagctgaatgtcaatctggaaaataaattgactgtattaacrgaaataccactctttgtgtagatatttgtcgtatatttaagaaaaagctaaaaagaatggaaatcgcatgactataactta

SEQ ID NO: 297833 - DNA, 514 bp, Homo sapiens
aatacgacattaacaggagagcagcagtacgattttgccgatggaataacagatttgccggcaatcactgaaagagtgcaaacatcgggtccttgtgacttcaacggactcttccaaattgtatgaatgtatcaatgtattagataaacccagtttcagaatgataaagaaaaaatgttagaccaaataatgcggctagttaacagtggtacgatttctcgcccgtggctttaaaatgcacttaaagtcctgtccttgccttttattttctgaacttgatgtttttgcattctttgagttcagtttaaagacaactacgagcatctgtaaccaatctgacaataatgtgttcatcaggtgcctgtggattaaatcacatactggcatatttaagctgaatgtcaatctggaaaataaattgactgtattaacggaaataccactctttgtgtagatatttgtcrtatatttaagaaaaagctaaaaagaatggaaatcgcatgactataactta

SEQ ID NO: 297834 - DNA, 535 bp, Homo sapiens
tctccaggacattgcactgggtaatgatttcttgagtaatacttcgtaaacacaggcaaccaaagctaaaatggacaagtgggatcacattgagttaaaaagctgcacagcaaaggaaacaatcaacaaaatgaagagacaacccacagaatgggagaaaatatttgcaaactacccatctgacaaaggattaataaccagaatatataattagcttaagcamctctataagaaaaaaatctaataatccaataagaatgggcaaaagatttgaatagacatttctcaaaagaagatatacaaatgacaaacaggcagtacgaacaggtgctcaacatggttggtcatcagagacatgcaaatcaaaactataatgagatattatctcaccctaattaaaatggcttatatccaaaagacaagaacaaatgctggcaagaatatagagaaaagggaacccttgtgcactgttggtgggaatgtaaattagcacaggcttatggagattagcttggaggttcctcaaaaaactaaa

SEQ ID NO: 297835 - DNA, 535 bp, Homo sapiens
tctccaggacattgcactgggtaatgatttcttgagtaatacttcgtaaacacaggcaaccaaagctaaaatggacaagtgggatcacattgagttaaaaagctgcacagcaaaggaaacaatcaacaaaatgaagagacaacccacagaatgggagaaaatatttgcaaactacccatctgacaaaggattaataaccagaatatataattagcttaagcacctctatargaaaaaaatctaataatccaataagaatgggcaaaagatttgaatagacatttctcaaaagaagatatacaaatgacaaacaggcagtacgaacaggtgctcaacatggttggtcatcagagacatgcaaatcaaaactataatgagatattatctcaccctaattaaaatggcttatatccaaaagacaagaacaaatgctggcaagaatatagagaaaagggaacccttgtgcactgttggtgggaatgtaaattagcacaggcttatggagattagcttggaggttcctcaaaaaactaaa

SEQ ID NO: 297836 - DNA, 535 bp, Homo sapiens
tctccaggacattgcactgggtaatgatttcttgagtaatacttcgtaaacacaggcaaccaaagctaaaatggacaagtgggatcacattgagttaaaaagctgcacagcaaaggaaacaatcaacaaaatgaagagacaacccacagaatgggagaaaatatttgcaaactacccatctgacaaaggattaataaccagaatatataattagcttaagcacctctataagaaaaaaatctaataatccaataagaatgggcaaaagatttgaatagacatttctcaaaagaagatatacaaatgacaaacaggcartacgaacaggtgctcaacatggttggtcatcagagacatgcaaatcaaaactataatgagatattatctcaccctaattaaaatggcttatatccaaaagacaagaacaaatgctggcaagaatatagagaaaagggaacccttgtgcactgttggtgggaatgtaaattagcacaggcttatggagattagcttggaggttcctcaaaaaactaaa

SEQ ID NO: 297837 - DNA, 500 bp, Homo sapiens
gatttacctttctatctttacaattttcagccgagatacttagaggtcacatgataaattaaggttttctttttttaataatctccatctttctaaatatggtgagtcacagtcagctatttttggattgttgaaagctgtgactgttctaaatcggagcccagaaatcacgccacttaccaaatatgctttgtcttccaacatcagagtgtctggtagaaggtgactgttcttggaatttaaaaaatctgaacaggacaagacaagaatctggacactttttctgtttctgataatatgattgagtaggtagacatgctsgataatccttgcaaagacatacttgaacttcccaaaaaaaaaaaaaataaaatccagaatctctaagaatgaagatggagtgaaaatcagaagggctgctgagagaataatggggaagcagccccagttatcaagggacatgtccatgtgttcaatagaaagtttcagatgtaaaaaaa

SEQ ID NO: 297838 - DNA, 485 bp, Homo sapiens
atagctgtgaattatagcttggtccttaaggaatatctcagaaacttcaatgttccttcaccccctccgcaaacccttctgaattgagaatgggaaccttggcaacagaggggagtcatgcacctcccttttccatctgtgactctgacatcttcctccaggtcagccatggtgcaaactctcacagttactttctggcagtttcctgcattccaaacctgtttctgaaatgggcaatatttgtccccttgaaaatcacctgtgataaatgtggtatagcccayggccagtgaaaattttcctacagggagacatattcctaagtgttaacattaactttttcagatgtttgagtcagactcaattgccctttcatattatagattgaaaacaacacttggttgatgttagtatatctgattgaggaaatatgagagcctttttaatttagatttgctcgcctagaaaactcactttgaaacttc

SEQ ID NO: 297839 - DNA, 485 bp, Homo sapiens
atagctgtgaattatagcttggtccttaaggaatatctcagaaacttcaatgttccttcaccccctccgcaaacccttctgaattgagaatgggaaccttggcaacagaggggagtcatgcacctcccttttccatctgtgactctgacatcttcctccaggtcagccatggtgcaaactctcacagttactttctggcagtttcctgcattccaaacctgtttctgaaatgggcaatatttgtccccttgaaaatcacctgtgataaatgtggtatagcccacggccagtgaaaattttcctacasggagacatattcctaagtgttaacattaactttttcagatgtttgagtcagactcaattgccctttcatattatagattgaaaacaacacttggttgatgttagtatatctgattgaggaaatatgagagcctttttaatttagatttgctcgcctagaaaactcactttgaaacttc

SEQ ID NO: 297840 - DNA, 355 bp, Homo sapiens
taactttccatggtcatctaattcagcaattagtttgagtaaattcaatggaaggctgctttctggaatgggtagtgtaatgtactgacttccctattagacatttcatttaaaaaaatcaattgtccgcataaaacaaccatttcaatcagtgtacattcaactggaaaggaaagttagaggactttttttgaaagtaatgggattggggttggccgttgctaatttctttttgattaamgcgtatgtaattgttttgtgttggataaaaatttgactttttatttgcgcggatgctgctgatcttatatgttatcatttcccattcagacttgagctgtttacctgccgggtt

SEQ ID NO: 297841 - DNA, 520 bp, Homo sapiens
actccccccgtcttaaggctgacggattattagccttagtgacatgtgcaagactcctttgccgtgtgaggtatcaacagggtaacatgaggaaatgaaggtcataggggctatcttagacttcttcctgctacaacctctattcacttattttgaaacctcagagtttgatgagctcctactatgttctaggtccttgcaataggagtacascagtgaacaagacaaacatggttctggtccttggagtacaaagtaaatgctgaaaatttaataaatgggtcagtagatagatagatgtataaaggtctaaatgcacattcagaaaatagcaggaggacactgagactcagtattattgaatatgctttaaaggcccatgtgtcgtcttgaatgaaaatgttgctcaatttctgatgaggagactaattcatcaatatctgttatcattgactgatgacctcacataataaaagatcttgacttgagtgtacgttaataatcaacataatgggtaatg

SEQ ID NO: 297842 - DNA, 520 bp, Homo sapiens
actccccccgtcttaaggctgacggattattagccttagtgacatgtgcaagactcctttgccgtgtgaggtatcaacagggtaacatgaggaaatgaaggtcataggggctatcttagacttcttcctgctacaacctctattcacttattttgaaacctcagagtttgatgagctcctactatgttctaggtccttgcaataggagtacagcagtgaacaagacaaacatggttctggtccttggagtacaaagtaaatgctgaaaatttaataaatgggtcagtagatagatagatgtataaaggtctaaatgcacattcagaaaatagcaggagracactgagactcagtattattgaatatgctttaaaggcccatgtgtcgtcttgaatgaaaatgttgctcaatttctgatgaggagactaattcatcaatatctgttatcattgactgatgacctcacataataaaagatcttgacttgagtgtacgttaataatcaacataatgggtaatg

SEQ ID NO: 297843 - DNA, 550 bp, Homo sapiens
aaatgtaaattctcaggccccaccctagacatgaatgaatcagaaactctgcagtagggcccagcaatccgtgctgcaataatccctccaggtgctcaggaacctctgccatacagcaggtagaaaaatgtgtttccttytgtaggtccacagccagggatactatacgttctgtctcaatatgaaacaatgacatgcaattaaaagacataaatctccttcctacttccaccctccagccagtgtgttttatttttatgagttcaataagaaaacgtgtggcaatcagagatttcatctaaaaaatatatctacaggtatcagttctcatccagcctgatctcatccaatatcatttctatcctcttacatctaaagttttagaaaaggattttcacaacgtaagactcaggcacactaggagttctatgataaaagaccaagtagatctgaatgtccaaacttactagagaagaaaagtggactcattggctatattttcaaattacattcaacaggaaattaaaggtttgaattttttccaccttca

SEQ ID NO: 297844 - DNA, 550 bp, Homo sapiens
aaatgtaaattctcaggccccaccctagacatgaatgaatcagaaactctgcagtagggcccagcaatccgtgctgcaataatccctccaggtgctcaggaacctctgccatacagcaggtagaaaaatgtgtttccttttgtaggtccamagccagggatactatacgttctgtctcaatatgaaacaatgacatgcaattaaaagacataaatctccttcctacttccaccctccagccagtgtgttttatttttatgagttcaataagaaaacgtgtggcaatcagagatttcatctaaaaaatatatctacaggtatcagttctcatccagcctgatctcatccaatatcatttctatcctcttacatctaaagttttagaaaaggattttcacaacgtaagactcaggcacactaggagttctatgataaaagaccaagtagatctgaatgtccaaacttactagagaagaaaagtggactcattggctatattttcaaattacattcaacaggaaattaaaggtttgaattttttccaccttca

SEQ ID NO: 297845 - DNA, 550 bp, Homo sapiens
aaatgtaaattctcaggccccaccctagacatgaatgaatcagaaactctgcagtagggcccagcaatccgtgctgcaataatccctccaggtgctcaggaacctctgccatacagcaggtagaaaaatgtgtttccttttgtaggtccacagccagggatactataygttctgtctcaatatgaaacaatgacatgcaattaaaagacataaatctccttcctacttccaccctccagccagtgtgttttatttttatgagttcaataagaaaacgtgtggcaatcagagatttcatctaaaaaatatatctacaggtatcagttctcatccagcctgatctcatccaatatcatttctatcctcttacatctaaagttttagaaaaggattttcacaacgtaagactcaggcacactaggagttctatgataaaagaccaagtagatctgaatgtccaaacttactagagaagaaaagtggactcattggctatattttcaaattacattcaacaggaaattaaaggtttgaattttttccaccttca

SEQ ID NO: 297846 - DNA, 608 bp, Homo sapiens
catacgcagaagacagaaaacaagtgtgacaaaacattaactagtgaatccagttgaatagcatacagatgttcactgtatgattttatcaacttttctgtgtttgcaagttttcaaaataaaagttgagggaaagaaacatcaccccaaatctttctatgaaatgggaccayagaaaaagcagagaagtgaacactttgcagaaaagagcactgcacccatccggacagcatggtcaaagtgcaggctctcctccaggaggctcttctctggtctcttctgtgctgtcacttcccccacatgcagccaaggcttttttctaacaactctttttctaaagatgtaatttttgtcattcatctaagaaagagaagaaaagaattagtatacatttagaaaataaaattacacttacatttgtgaaaaagcaaaaaatactttgaaaagtggggaagcaagaaatgtactgttctacaattctgttctgttcttaccatctttttattctgccaatgacttcctattcctgctgtgtatggtggggtgagctgcaaatgatttcttttcctcattgatttaaaatctcatgtttataatgtaccaaactc

SEQ ID NO: 297847 - DNA, 608 bp, Homo sapiens
catacgcagaagacagaaaacaagtgtgacaaaacattaactagtgaatccagttgaatagcatacagatgttcactgtatgattttatcaacttttctgtgtttgcaagttttcaaaataaaagttgagggaaagaaacatcaccccaaatctttctatgaaatgggaccatagaaaaagcagagaagtgaacactttgcagaaaagagcactgcacccatccggacagcatggtcaaagtgcaggctctcctccaggaggctcttctctggtctcttctgtgctgtcacttcccccacatgcagccaaggcttttttctaacaactctttttctaaagatgtaatttttgtcattcatctaagaaagagaagaaaagaattagtatacatttagaaaataaaattacacttacatttgtgaaaaagcaaaaaatactttgaaaagtggggaagcaagaaatgtactgttctacaattctgttctgttcttaccatctttttattctgccaatgacttcctattcctgctgtgtatggtggggtgagctgcaaatgatttcttttcctcattgatttaaaatstcatgtttataatgtaccaaactc

SEQ ID NO: 297848 - DNA, 538 bp, Homo sapiens
ctcctctaaatcttctaggtcctcctggccatcagcctctgtttctgaaccagcctcttcatgctcctgttcttcactctctgggagaagactgatatcttcatctttctttcactaaccgcattctggaagcactgtaaaattgcttcattttgcaattccagttgttgcaaagtctgctcatcatcaaaactttctatcacaagtttttgtaaagrgctgccatggattctaccattctctactgttttattaaagtcataaagcacttttgttaaagaagtgaactttggttccaatccatcttgaaacctattgggaggaattaaatgagatttagaattatagataataatttcacagccctcttaattaaaagaaaaataaaaacctcaactcttctgtaaaatcaaatttgaataaagtgtaagtatagattctggccccaacaatatataagctgatgagccacaatgatatataaaacctgtcaaccaagtatttgtgaatcagctgtatagattgttggcaggaaaag

SEQ ID NO: 297849 - DNA, 538 bp, Homo sapiens
ctcctctaaatcttctaggtcctcctggccatcagcctctgtttctgaaccagcctcttcatgctcctgttcttcactctctgggagaagactgatatcttcatctttctttcactaaccgcattctggaagcactgtaaaattgcttcattttgcaattccagttgttgcaaagtctgctcatcatcaaaactttctatcacaagtttttgtaaagagctgccatggattctaccattctctactgttttattaaagtcataaagcacttttgttaaagaagtgaactttggttccaatccatcttgaaacctattgggaggaattaaatgagatttagaattatagataataatttcacagccctcttaattaaaagaaaaataaaaacctcaactcttctgtaaaatcaaatttgaataaagtgtaagtatagattctggccccaacaayatataagctgatgagccacaatgatatataaaacctgtcaaccaagtatttgtgaatcagctgtatagattgttggcaggaaaag

SEQ ID NO: 297850 - DNA, 390 bp, Homo sapiens
ttatactctctcctcatttctttttctctcttcctatttctctttttctctctgcttcttcctacctcccctcgtgactttgtctcctcatcccatcaccgtgctacttagatgccacatcaatttgactagcctcaaatttacaatgaatactttttaaattcatgcttctgaaacttttaaaggatgaagaggtataaatgtctcaaataataatttgtttgatggctgaaatgaatggcatttctcaaaaaggccaaggkactgaatacagaaatttaaacaataactttccgttagtgatacggtttggatgttttgtcccctccaaatctcatgttgaaatgtgacctccagtgttggaggtgggcctagtaataggtgtttgtt

SEQ ID NO: 297851 - DNA, 390 bp, Homo sapiens
ttatactctctcctcatttctttttctctcttcctatttctctttttctctctgcttcttcctacctcccctcgtgactttgtctcctcatcccatcaccgtgctacttagatgccacatcaatttgactagcctcaaatttacaatgaatactttttaaattcatgcttctgaaacttttaaaggatgaagaggtataaatgtctcaaataataatttgtttgatggctgaaatgaatggcatttctcaaaaaggccaaggtactgaatacagaaatttaaacaataaytttccgttagtgatacggtttggatgttttgtcccctccaaatctcatgttgaaatgtgacctccagtgttggaggtgggcctagtaataggtgtttgtt

SEQ ID NO: 297852 - DNA, 379 bp, Homo sapiens
gaattttaacactggattaaggagatgaaaatggagccattgggaatgtggattctttgctaataattatttttcttctttaaaaagattcttcaaaaggcaagaacatggaagtatttcaggagatattcttgaggtatctaaaatacatactcttcctatcaaaatcaataaatagatggatgtaartaagataaagtcagggcaactgattttgcatgtgagtgtacacacagacacatatccaggttttctccatctgttctcagttgctgaattattagactcagctgaccgcttgactgtgtttaatctgataaacagactcttaacaagaagaacaatgttttaaaaactggactgttcctcctacttctca

SEQ ID NO: 297853 - DNA, 379 bp, Homo sapiens
gaattttaacactggattaaggagatgaaaatggagccattgggaatgtggattctttgctaataattatttttcttctttaaaaagattcttcaaaaggcaagaacatggaagtatttcaggagatattcttgaggtatctaaaatacatactcttcctatcaaaatcaataaatagatggatgtaagtaagataaagtcagggcaactgattttgcatgtgagtgtacacacagacacatatccaggttttctccatctgttctcagttgctgaattattagactcagctgaccgcttgactgtgtttaatctgataaacagacycttaacaagaagaacaatgttttaaaaactggactgttcctcctacttctca

SEQ ID NO: 297854 - DNA, 560 bp, Homo sapiens
tatcatatcttgcaagtaattttaaagtatgttgtaatgtagtcagaagctttttaaatatgaaatttaattcatgctggtgtcaattacatttgaaaaaatacaaaaaagctatataagattctaggatctttcagaattttataatgtttataatggacagttggttaaataaaaattgtaccctaaacaattttgttgttggcttaaaatagcrtttaatttattagtgctcagataatagttatcccctaaatagcatttttactttcatatgttgatatcaaacagtgaagtgagacagcaaatcagtacaacgtggtgattatcaaacatcataaatccatgaaggatagccttgatcttactgagaagagtttaattttaaaatgcatacctggaaaaggcaacttagattaacatttcaaactcacatagcattatttgtgattgattatagttataattgatcattttacttttggaccgtcacttcgaatcaaattgggataaatataaattaaagattgattatttgctttgaattttagattaaaaaa

SEQ ID NO: 297855 - DNA, 619 bp, Homo sapiens
ggtatgatggccctaggcaactactacactctaattcagaagttcttctggattttattgtatcatgtgttggtaggaagtacctggctgtttcagttgcatgatatgtgggtaatcttagaattatcatatcttgcaagtaattttaaagtatgttgtaatgtagtcagaagctttttaaatatgaaatttaattcatgctggtgtcaattacatttgaaaaaatacaaaaaagctatataagattctaggatctttcagaattttataatgtttataatggacagttggttaaataaaaattgtaccctaaacaattttgttgttggcttaaaatagcatttaatttattrgtgctcagataatagttatcccctaaatagcatttttactttcatatgttgatatcaaacagtgaagtgagacagcaaatcagtacaacgtggtgattatcaaacatcataaatccatgaaggatagccttgatcttactgagaagagtttaattttaaaatgcatacctggaaaaggcaacttagattaacatttcaaactcacatagcattatttgtgattgattatagttataattgatcattttacttttggaccgtcactt

SEQ ID NO: 297856 - DNA, 619 bp, Homo sapiens
ggtatgatggccctaggcaactactacactctaattcagaagttcttctggattttattgtatcatgtgttggtaggaagtacctggctgtttcagttgcatgatatgtgggtaatcttagaattatcatatcttgcaagtaattttaaagtatgttgtaatgtagtcagaagctttttaaatatgaaatttaattcatgctggtgtcaattacatttgaaaaaatacaaaaaagctatataagattctaggatctttcagaattttataatgtttataatggacagttggttaaataaaaattgtaccctaaacaattttgttgttggcttaaaatagcatttaatttattagtgctcagataatagttatcccctaaatagcatttttactttcatatgttgatatcaaacagtgaagtgagacagcaaatcagyacaacgtggtgattatcaaacatcataaatccatgaaggatagccttgatcttactgagaagagtttaattttaaaatgcatacctggaaaaggcaacttagattaacatttcaaactcacatagcattatttgtgattgattatagttataattgatcattttacttttggaccgtcactt

SEQ ID NO: 297857 - DNA, 631 bp, Homo sapiens
tttgtaaaatgaactgaaaggaagccactttttataactttatccatatttcctagtttggggtccattttacaagatgttttaaacagatgcttattaaaaacacyggttatagggactttaataaaaatttttaaaataatgttttacatttcttgcaaaaattgatgcctgcaacctatttactgtttttaaaattaaattaagattcatttaagcagtacatgtttattttagtgaaacacgtatttaattttctaagatagtattttttgtctttaaaacaatttctgcatgttttgttttttttcactttaaattttatgttttctcagtttttgttttatcacatttgctatatttttctgtatcatgggttatttgttaaagaatgaacttgtgtatgtttataaattgttactgtttttgtttataatttattgccttctaacttaatatgtaattagcattccttttaattttgcttgtatgctttgccgtaccattttgaaattcttgagttaaatgcttaactattttttatcaagtttaaatattaaattaaatatgtcccatcagtttagtcattttaatattctcactcatcagacattttttgggaacaccatat

SEQ ID NO: 297858 - DNA, 631 bp, Homo sapiens
tttgtaaaatgaactgaaaggaagccactttttataactttatccatatttcctagtttggggtccattttacaagatgttttaaacagatgcttattaaaaacactggttatagggactttaataaaaatttttaaaataatgttttacatttcttgcaaaaattgatgcctgcaacctatttactgtttttaaaattaaattaagattcatttaagcagtacatgtttattttagtgaaacacgtatttaattttctaagatagtattttttgtctttaaaacaatttctgcatgttttgttttttttcactttaaattttatgttttctcagtttttgttttatcacatttgctatatttttctgtatcatgggttatttgttaaagaatgaacttgtgtatgtttataaattgttactgtttttgtttataatttattgccttctaacttaatatgtaattagcattccttttaattttgcttgtatgctttgcygtaccattttgaaattcttgagttaaatgcttaactattttttatcaagtttaaatattaaattaaatatgtcccatcagtttagtcattttaatattctcactcatcagacattttttgggaacaccatat

SEQ ID NO: 297859 - DNA, 559 bp, Homo sapiens
aattttcatatccagccacataaccaagtcctgcaagaacataataaacaaaccaatcaaacaacaagaataacaaccacaacatggtccccattctgtctttaacctctgatagaaagagcagtaatggtaagacgagaaagctctcgtcaagtgttttcctcatctactgttaatgatttattcttacatcctgtcccagtccaattatsaaaaaattctaagagagatccctttaactgacttgtaatgaattccagggtcacattccagatattgttttcccctgaaatcgtgtaagtgcacatcaaaatactatacttttggtgtgaatctgagccaaattctattgtattctaaataaagtgaaactcctatcagccaatagggcacggtatcagtttcaaataagacaagttggtaaagtcaggagaaatgacttcctccttcctcctgatgtgctgtatatagatgtattagcactgccttttaatattttatgtgttcaacagagagggaactaacatcttgttaatcctcatttgaaaacaattttgcg

SEQ ID NO: 297860 - DNA, 559 bp, Homo sapiens
aattttcatatccagccacataaccaagtcctgcaagaacataataaacaaaccaatcaaacaacaagaataacaaccacaacatggtccccattctgtctttaacctctgatagaaagagcagtaatggtaagacgagaaagctctcgtcaagtgttttcctcatctactgttaatgatttattcttacatcctgtcccagtccaattatgaaaaaattctaagagagatccctttaactgacttgtaatgaattccagggtcacattccagatattgttttcccctgaartcgtgtaagtgcacatcaaaatactatacttttggtgtgaatctgagccaaattctattgtattctaaataaagtgaaactcctatcagccaatagggcacggtatcagtttcaaataagacaagttggtaaagtcaggagaaatgacttcctccttcctcctgatgtgctgtatatagatgtattagcactgccttttaatattttatgtgttcaacagagagggaactaacatcttgttaatcctcatttgaaaacaattttgcg

SEQ ID NO: 297861 - DNA, 559 bp, Homo sapiens
aattttcatatccagccacataaccaagtcctgcaagaacataataaacaaaccaatcaaacaacaagaataacaaccacaacatggtccccattctgtctttaacctctgatagaaagagcagtaatggtaagacgagaaagctctcgtcaagtgttttcctcatctactgttaatgatttattcttacatcctgtcccagtccaattatgaaaaaattctaagagagatccctttaactgacttgtaatgaattccagggtcacattccagatattgttttcccctgaaatcgtgtaagtgcacmtcaaaatactatacttttggtgtgaatctgagccaaattctattgtattctaaataaagtgaaactcctatcagccaatagggcacggtatcagtttcaaataagacaagttggtaaagtcaggagaaatgacttcctccttcctcctgatgtgctgtatatagatgtattagcactgccttttaatattttatgtgttcaacagagagggaactaacatcttgttaatcctcatttgaaaacaattttgcg

SEQ ID NO: 297862 - DNA, 605 bp, Homo sapiens
ttgcctatattatatctgtgtttctggagaaacaaaaaaacagtatgacaaacctacagtctgctagtttcttctcaccctgccaacaactgttatattactgtttagctggttatgtgcaaccatttgttcaggattgttttgttttgcttagttttactttttaaggcagagtcttgctctgttgcccaggcttgaggtctatgagttacactcagggtcacrtggtcaacgagatgtaatcacagctcactgcagccttaacctcctgggctcacgtgatccccctgcctctgcttcctcagtagctgggactacaggtgcatgccacgacacccggcttgttgagcagagttttgatgaaaatcattcatcccttcttaatcacaaacagtgaaaccttagaaaatgtaattagagagaaaaataacattttgcaccaagctaattgtatctttaccttttattagttggtttcaggattggtacttgttgatggttctgttttggagtgtgcgttccctgggtttaactccttgcagcacactttatatacgttgtgtggccttacttgagtaacttaagttgcttaacttctccagatc

SEQ ID NO: 297863 - DNA, 610 bp, Homo sapiens
aacttaagttgcttaacttctccagatcccagattctcaacctgtagaatggaagtaattataatacaaacattatgtggtgggttagtccaggtcctccaagaggtagatgttgaaaacgagttaaacacaagaggattttattaagggaaatccctrtgagagaaaatggagaggaagctgagtaagcctggaagaggtctcagctatgaggcaagtctgacctagaatgaaggaaagaggaaaggaaggttgagtggaagcattggagcgtaatgtacagtctaaggaagggtgagaaaaggcttcagggaatcctgagccaagactggtcctcagagaagccctgtgtctcctaaagagggatctgcattagccaccctgtggccctcagtcattgactgaggggcagatgcagaaacagattttagagtgaagcagcaagtggccgtaggcagttaggcttcccatactttgaggtctatgagtttatttatttatttattatttatttatttaaattatactttaagctctgggttacatgtgcggaacttgcagttttgtttcataggtatacacatgccatggtggtttgctgcacccatca

SEQ ID NO: 297864 - DNA, 610 bp, Homo sapiens
aacttaagttgcttaacttctccagatcccagattctcaacctgtagaatggaagtaattataatacaaacattatgtggtgggttagtccaggtcctccaagaggtagatgttgaaaacgagttaaacacaagaggattttattaagggaaatccctgtgagagaaaatggagaggaagctgagtaagcctggaagaggtctcagctatgaggcaagtctgacctagaatgaaggaaagaggaaaggaaggttgagtggaagcattggagcgtaatgtacagtctaaggaagggtgagaaaaggcttcagggaatcctgagccaagactggtcctcagagaagccctgtgtctcctaaagagggatctgcattagccaccctgtggscctcagtcattgactgaggggcagatgcagaaacagattttagagtgaagcagcaagtggccgtaggcagttaggcttcccatactttgaggtctatgagtttatttatttatttattatttatttatttaaattatactttaagctctgggttacatgtgcggaacttgcagttttgtttcataggtatacacatgccatggtggtttgctgcacccatca

SEQ ID NO: 297865 - DNA, 481 bp, Homo sapiens
actaccacttcatactcagtttcttagcctcttagccctctactgttgaccaatcaccaaatgtgggaaagcactacagactgtcaggatcacctcctaggcctggtcactcaagtcctgactgaggtctccaattaccttccaacaattgtttttgattgggggcggggcacatttttatccagtttttctaactgctcttgtggggaggcgaatctgtaacaagctcctctgcctttattgaaagttgaaaaccttcatctgtcctttttttgttgttgttgagatggagtcttgcgctgttgcccaggctctagtgcaatggcacgatctctgctcactgtaacctctgcctcctgggttcaagcaattctcctgcctcagcttcccgmgtagcgtgtgccaccatgcctggctaatttttttttatacctttaatagaggcaggatttcaccatgttttccaggctggtctcgagct

SEQ ID NO: 297866 - DNA, 481 bp, Homo sapiens
actaccacttcatactcagtttcttagcctcttagccctctactgttgaccaatcaccaaatgtgggaaagcactacagactgtcaggatcacctcctaggcctggtcactcaagtcctgactgaggtctccaattaccttccaacaattgtttttgattgggggcggggcacatttttatccagtttttctaactgctcttgtggggaggcgaatctgtaacaagctcctctgcctttattgaaagttgaaaaccttcatctgtcctttttttgttgttgttgagatggagtcttgcgctgttgcccaggctctagtgcaatggcacgatctctgctcactgtaacctctgcctcctgggttcaagcaattctcctgcctcagcttcccgagtagcgtgtgccaccatgcctggctaatttttttttatacctttaatagaggcaggatktcaccatgttttccaggctggtctcgagct

SEQ ID NO: 297867 - DNA, 555 bp, Homo sapiens
tgagccctgcattagaggttgctggatgtagggccctaggcctgacgtatccaaataatgtctatgataaagaagtcaataagtgctctctataacacacaagcattataagttttcacactccaaaaactcttcctttctaaagttactaaaacttttaagggcatttcaaacaaaaacagctgtggaaaacagatcggttaaatcctatggctaagaaacatcttcctatcccatgtattattcattacccaggtgtcaattctgtttccaatacaaaagtctcaagcagtgaagcgcttcccactccagctgggagagccatcctcaacaagataagggtaaaacctgtgagcacaaggcttccatctgcaattcctgtctgcagggaagctccccaaagagggaaaccatgtcttattccttacggtaaaacaccaccattcattccttgtgtttaacaaccaatgctggtggaacataaaacaaarcttagcaatcacttttttcatgctacttagacctgtaacacatttttcctctggtgcacactat

SEQ ID NO: 297868 - DNA, 601 bp, Homo sapiens
cctcctcacacctttccccaggctaacaactaaaaatatcttgagatattatcagatgtttcctggagggcaaaactccccctggttgagaatcagtctactaaagtatttggagatgacagagcatcaggttcgtttctatatattattaaagtatctttcaaagttgaaggtaaaattaagacattttcggaaaaattaaatgggccaatttgtcaccagcaaatctgtactacaaaacatgctagcagaagttttctggcctgaagggaaataacrtcgaatctaaactccagattagaggaaatgaaaagcatagaaatggtaagtatatgagtaacaggaaatacttttttttaatctgccgattttgttgaagggaaactgactatttaaatttaaaaagatatcattttattgtggggtttatgatgtggacagaaaaacttatactaaaaaaaatcacaaaagacagagggggagtaaaggaaatgttaccgtcatcagtttttgttgttgttgttttgggtttttttaatagactttatttttagggcagttgtaagctcacagcaaaattgaaagaaagatacaaagattt

SEQ ID NO: 297869 - DNA, 519 bp, Homo sapiens
cttcagtattttcagacctctccagatgattccactgaacatcctaggcagagaaccaattccccttggagtggaactttcttccaccactgtaaggtcttcagtcctctcattctcaggagagagaggcttctgttgaatcaattgatgttgatacagcagaacaattagcatagaagaaacctgtaataggcatattacaaatgcaaacataccttggttaatgcatgacatttttaacttgtccccaggatgtatgggttgaggggagatcattctgagcagggcagggaacaakgctgtgttggtctccagtgtccccagggcccagcccagtctctagcacagagtacacgctccataaacatttgctgaaggattggatgacttttaggggaaattgcctgtttccaacattaaccttttgcagaagagatggtgaataggtcaactgagcaccaagaaggtatttataatgctttccataaattgattgtgggagatgtaatatatccaact

SEQ ID NO: 297870 - DNA, 558 bp, Homo sapiens
cctaacacacacccacacacagacttacttagctccgcatctaagtggtttgtagtggcacatgtttagattttgtaccccaaagctcaaaaagtattttttatcatgaatttaactgaaaaatacacatatttccattccagagaggactcctcttgttgggggctaacttcaacaccagactctcctgagtacatctttgcagctctataaacttctggtatttgttcacattgtctaataatttcctggaaatagacttagtatttttagttataagaagaattgaaaaataatattgctgttctagaagaaggcatttatttattttgcatttgtacttcacccagaggctggctgtgcagacaaatctctctgcttgggaacgacagggctctctaaagtaactctagggatgcagctgtctacaagtcacactgaaaatgaaaagtatgyttatgaggtcatgagaaagtcttgtcataagttgtaattttgtgtgtgtatttaaaaggtatttggtgaccaaccttttctgtctcacacccgcacacacac

SEQ ID NO: 297871 - DNA, 557 bp, Homo sapiens
ccataagaaataagtaaactgaataccttaattaattaatgatatcatatgttaaaaggtaatatttaccatgtggaaaaatatagaacagcgaagggggctggaggtggtagtggcggggcagcatggaaaggacaggtgggtggaaattttacacagtgagcaaagactagaatagtgctactgctggatatctggggggaaaggattccaagcaggaggaacaatttgagcaaaggcatgagtaatcttaaataaaaatcatcttaaagacatgttacaaactattatgtaattatccccaaatgtagtggcttaaaactgtcatttcattatgctaacaccttttgtgagtcrggaattaacaaagagaatcaaagggtgaaagctgtttaatttatatctctaccagtcaatgctagctatcagctgggattgtcagctagaacaccaacatgtgaacttttccggtggcctgggcttcctcacagaccagtcttccaagacaatcagtggaaggtgtattcccttttatgacctagcctaggaagtcacat

SEQ ID NO: 297872 - DNA, 551 bp, Homo sapiens
cttacctgggactggattgcctttgtaggactaacattagccacaagattagaaattatggtttaggagtcatgcagccgaaggctacaagattctgaccctccctaaactgctccaaagatcagcgcttgagatatttggcagaccctgcacttgatggatcagctggccccacacagatcaataaactggctcatctgatcttgtggcctccacctaggaactgactgagcaaaagaagacagctccaattccatatgattcatctctgaccaatcagcactcctggctcactggcttcctctcacccaccaagttatccttaaaaactctgcttcccaaatgcttggggaaactgatttaagtaataataaaactctggtctccccgcyggctggctctgtgtgaattactctttttctattgcaattcccctgtcttaaggaattggctctgtctaggcagcaggcaaggtaaacctcttgggcagttacattaatacttgctcacctacctatctcctctgctaaagtgtgatctatttgaaggca

SEQ ID NO: 297873 - DNA, 1130 bp, Homo sapiens
ttgccatggacaatagaggtgtaccttggtttatgcaataaatgctttcctgaaaatgtgtgtagcacaaaattttataaatcaggtcatgatttaaatacactaagaacacttgctgcatttgttagcatattgatttgctgctttaataaacagaaagataaaccagaatggcyagtaacaccacaccttggggttatctttactaaatatgggccctactgaacagaaattagagcttatcacaggacaacaaattttgtttgaaaataacctttttactacttttttatctgactctaaaagtaacatagtggcttaaataaaatagatttgtctcttatgtgaaggtctgagctggtagaaaacacacaaagcaggacagggctttgtgggggcccaagttcttttcacctctttgctctatcatcctttatgatgttgccctcatttacatgaccaaaactggctcaccatcatctgtccttgtgccaggttgtagaaaaaagaaagaggatatcaacgacagcagcttctgtattaggacatgccagaagttgtacacatcacttctactcacatcctactggccwcttccttttgctgctgaaaagatctgtcttccagctattttaacaggaattcctagacaagtaagcaaagacacttctgccttctgccataattaatctctgccctcccctctttgccagtctattattgatgagtaattgcaataagaatccttggtctgtgcctgactccctcwgggacagggagatccaggcaaggccgcagggcctcagattcagcctgtacccacccacctccaccccacacctgttcctctcctggtgctcagtggactggtggggcctaggtttttgttgtttttttaaactctagaattaaaaagaaaaaagtttctggtttttaaaacaacatattttctccaggaaatcaatgttctcttgcattaagcactgtcccttggaaagattgccatacacactctcctttgctctctgcagcttacaggcacaatccctgcactgactctggtatggatgtcttcaaactgaacaaaacagtggccccagcccatgcttgaggaggctaggctacaacaa

SEQ ID NO: 297874 - DNA, 504 bp, Homo sapiens
tgtccttaattttggtttgcttttccttcaccctatttttttttttttttttttttttgtttctcacagatgctggcaagagtggatttccggaattggtcacaatcaggaatatatttttggaatccagagaggcataggtgattttatttggttgttagtaggcctaagaagagcacctatcctgataaattttcctggttttatttgtagtcctggatacctgcagtgatgtcaaatttcaraagttcttggttaattctgtcgctgaaattccctaaatttcttctttagaatttgaaaagtctctctattcaatcttttctttcctaatttactatttggtattatttattttttgaaacctcccacctttatagatattgataaatgttcaatgagtgttttcacatagagaatgaattaatgcttttccttataatcactggttcaaggcaatatatcagagtatatttatatttttatcaatgaaatatttctttt

SEQ ID NO: 297875 - DNA, 1201 bp, Homo sapiens
gtttcaaataagattgcctctcccttgtaacatacatcataaagagagcttgtttagagrcagcctacctccgccctgaacatgttttcaaggaagtgatcagggctgtttgtttttcttgctgttggatgtggtcttcagtgaagtcacaggaatggaatgagagtggccacagttgacaatggagctatttccacagctggctgcaaagagtgggcagtccatcacagataaactagcacatggggatagatgatataaaacatctgtcacaatagggataagcaaaaacaacgtgcctttgaagattgtgttttaatgatgaggtggggggttctgtctctataataggaatgaaagatgtgttgttggtgggcagatggcttcaggcttgctcttgcatgaaataaagcaaaagtatgtgttaaaaatctctgacagttgtcaagtcacctgattttgctgaccgttcatttccttgcctatcccatgtgtaatctatgagaaaagaaagggagtgctaggaaaaaataatggcagaaaaaaaaaactwattgcaaatttggctagtcacaagttgtacatattctaaatatagtaattgcagcttggcagcatattcatttttttacctaaaaataatcataatcaaagaagtaaatattttgtattgaacataatgtgtatttttggcatataatgattagatataaaacatgtagaagcaattaaatttaaccatctaggaatctgtaaaagctttccttataggaaaaagtcatatttgatgtagttttcacaaattaaggatagtcaaggatttgatatatatgatctttttactgataatagacttaattttcacawctcagtttcaccacttactcattgtaaaagcggaccagcaatgtaaaatttccctaactaacagaattatatgaccttacactgaacactcaatcccaaatctggcatagagtagcatgtagtaaatatctgttgaatgaataaaagattgggagtaacttgcagcattatgtaaggtaaacaggggaataacttttatgaaccatggaaagacacaaaacaaatgttagatattattaacattattgaggcacatgcaaaaattattatttttagggccattttcctggagctatgcctctcattttatttccagcatagaaatagtacagtc

SEQ ID NO: 297876 - DNA, 552 bp, Homo sapiens
gtttcaaataagattgcctctcccttgtaacatacatcataaagagagcttgtttagaggcagcctacctccgccctgaacatgttttcaaggaagtgatcagggctgtttgtttttcttgctgttggatgtggtcttcagtgaagtcacaggaatggaatgagagtggccacagttgacaatggagctatttccacagctggctgcaaagagtgggcagtccatcacagataaactagcacatggggatagatgatataaaacatctgtcacaatagggataagcaaaaacaacgtgcctttgaagattgtgttttaatgatgaggtggggggttctgtctctataataggaatgaaagatgtgttgttggtgggcagatggcttcargcttgctcttgcatgaaataaagcaaaagtatgtgttaaaaatctctgacagttgtcaagtcacctgattttgctgaccgttcatttccttgcctatcccatgtgtaatctatgagaaaagaaagggagtgctaggaaaaaataatggcagaaaaaaaaaact

SEQ ID NO: 297877 - DNA, 592 bp, Homo sapiens
agtttgaagtcaggtagtatgattcctccactttgttctttttgcttaggattgtcttggctattcgtgttcttttttagttacacatgcatcttaaaatagttttttctagttctgttcctcacaggaaaatttaattctaaggaaactggctttatgtggtcaggagggagaatcccctgcctttttcaaaatattagaasagatttaccagaatgtggccctgcttggtatatataaaaatagaaagtaaattgcaatttaagatctgatatgaattataaattctaagaagcagattaacttttaaaaggcaaattgcatagttatcaatttttaaatgaagcttccttcatgtttgatattgtggtagatgctttaatgtgttcacttttattccaccaaactacctgtttttgagttgaaaccccttttgagatggaaaaagtcctaaagatgagagagtttaagtaaattaagtatacccagctaataagtgtcagaaccagtatataatcccgggtcttgatattccatagttcattccatactgtttcctggatcaaacgatccccacctccttatttaccag

SEQ ID NO: 297878 - DNA, 558 bp, Homo sapiens
aggaaacatgacttcattgggcaaaactctagaaaaatatgtagttaacatttttgggaaaaactgtccgtagtagcctgtgagttagtgaaggagtgtccccaggccctaaacagaaactaatgttttctaggatatagcattcaaggaccaagaaactaggtgagaccagatcaagaaaattaggagataaaaatgaagagtaatatgatatctgtattgctttttctttttgtttgattttggctgccttcttctttgctaccacccaataatgagcacttctggtttgcttatctatttatttcattagttttatttyttttcgaagctaattcttacacgcctctcttaatgttcagaccctttatatcttattttttccagtgaatgggagatattaagatttgtccttttgagttgattatatccaatttattttctttgtttgagaatgtaactgagatatcactgggtctctcaatattttgaaaccagatgattgtctaaaatcctcaatcccataccctttagaagtccaaagctttatgcaacatg

SEQ ID NO: 297879 - DNA, 550 bp, Homo sapiens
ttaatattactaatattattccaagctatctggctctcaagcaagaacaaacaaaggacttaacaaaatgattgagagtcaaaccaagaatctttttagaagcaatgtaatagaaaattcactcagagccctggcagaccaaatgcagagctaagctttccaaagtttatcgtgaatataactcacctggggcaggctctaatttagtggggctggggttcacctgagattctgtactaagctccctgatgatagtatccagtcccaggccatacgttragaaacaaggtagtagagtttaagaacattctattaaactaaaaaaaatgttaaaattaatcatatagtattactgcttaggagaaatggcaataaaatctaagcggaataaaacatgtaactaagtttcttgcacaaatcctgaaacaaataggacactgaaggataacaagataaagctgtcttttatctcatctggacagttttaaatatattaattgaaatcttgaaggcctcagaatgtaacttgtttggatgctaatatataagt

SEQ ID NO: 297880 - DNA, 581 bp, Homo sapiens
tacatactttgcttcttcattgcttgacggttatcatcaaactaactattcttcaattcctttggcaaggagtggaatctggactctggcaccagagggtcgatttccttccagttctcctttctattttttttttgcttttgtttytttactttgaactcctcacagtcttggaaaaaagagggcttgcagagactttttcattttgtttttatattgcccaaattgtactcacatggatagagtagtaccatttaattgtttccctctaaatatgcacagttcccagaggtattttaatcagatagctttatgccctgttgtttgcagtttccaactttttgttttctattactttctgtttatttagaatgttgctgcctcttcttttcttctctccattttctccctgtcttcatttgctcaccacccatcttggatcaacctctaatatgaatattcaaaatagttgagtaagtcaagttctgtctctgaaaatctcttgactaaaaaaacagattaaaaaataatatcactgacccttttagaggctgagctctgtttcagaaaacattaaggaa

SEQ ID NO: 297881 - DNA, 578 bp, Homo sapiens
taggttgcactttgggaaaggaggtcatttaacactgtttcccttataaccccacttagaacaaaaaataaggagaaactggtctgctcctcttcaaattttatatatatatatatatatatatatatatatayacacacacacacacacacacacatatatatgtatatatgcatacatatacatattgtttttaaggtagaaaaaattaggaactaatctcaatatttcaaatataattttttattatgaaatatatttggtgggtagagatcaatggttttctttctaaaaaaagtatagaaggagctgaaatatatttgattaatcaattcatttttaagtgtcatagctttatagtcttttgtctttgattttttttgtcttgtgctgtttttgattcctttaaataaattttggagtgtgcaatacatctgtataggaaagctatataccatgggggccctgcaaagcaaagactaaggactatggttatgccactaattttttcacacaaatagtctcattttttcacattatctacaccacaacacatgtatttttatgtaaactacagc

SEQ ID NO: 297882 - DNA, 578 bp, Homo sapiens
taggttgcactttgggaaaggaggtcatttaacactgtttcccttataaccccacttagaacaaaaaataaggagaaactggtctgctcctcttcaaattttatatatatatatatatatatatatatatatacacacacacacacacacacacacatatatatgtatatatgcatacatatacatattgtttttaaggtagaaaaaattaggaactaatctcaatatttcaaatataattttttattatgaaatatatttggtgggtagagatcaatggttttctttctaaaaaaagtatagaaggagctgaaatatatttgattaatcaattcatttttaagtgtcatagctttatagtcttttgtctttgattttttttgtcttgtgctgtttttgattcctttaaataaattttggagtgtgcaatacatctgtataggaaagctatataccatgggggccctgcaaagcaaagactaaggactatggttatgccactaattttttcacacaaatagtctcattttttcacattatytacaccacaacacatgtatttttatgtaaactacagc

SEQ ID NO: 297883 - DNA, 571 bp, Homo sapiens
tatgatctccttaagtagaaaaataagaggaaaaatatagtaaccccatctgtgtaagaaatttataatcttaagatcaattctgtaatcaagtgtaacaaggttaatgacaaaataatttaagtgtcctattgcataatcagccaacaaaatcctttggccgtagagtcttcaaaatctcaaattttcaactctccctcaataatgcaatatatttaaaagccactttgctctattaggatctaaagaagctactgaaaacaccaaaagctactgataaacttgtttctgtagttttaggcacaaacgtctaaaggattaaaataaagcattattgagaatcctaattatctatgtacctgctttggtaagaaatacttcaatatgacatatttacttyatattctcattcaaaatgacactattatattaataggtacttaaccaataattgaaaccattattcacagttgaataggcgtagtacataattaggattcttttaaagggatttccatggctaaaactaatttggctttagtgtctattaatattataactttaaaaaaaa

SEQ ID NO: 297884 - DNA, 547 bp, Homo sapiens
acagtgggcaagaggatatagatgattttcaatacattctacctcaaaaaatgaaaatgtaagtgacatattttagacacatcacaggtaaattacctcagaagaaaggaagatgttaatgccatctattcagacaagcacaaaatgacatgaatggacataaaaattatatacagttgaatttagcctttttagtaaaaaagtaaaaacatttgatgttcacacatttacaatttacagtgtttatttgtaagaagtctccttccttgtaggatatattttcaaatggacattgtatatgcttgtagggtgctgtgattacaccaaccatggaccatcccatgtcaatgcagccagccaacatgatgggcccactgacacagcagatgaatcacctttcgttgggcacaacaggaacggtgagttgaagagattgttttgtttccttgaacttttttgatcagatgtgayattctccatttttactggcattatcagtgaaactgtgtctgtaccatattcgttgactaacacatctttcaggttt

SEQ ID NO: 297885 - DNA, 595 bp, Homo sapiens
cactccttcactgctctgaaattttgatagtatcaggtgaaaatcctcaattattcagtttgtttagacattgttcttttttctgttattaggtatgaatataaatattaagacagagttttaaaaagctaacaggatgttaaatggactctgattcaggaagcagtatcataaatggtaatgrgtacatctaaaatagttttttaggaaaaaatattaattaaaacactcaaatacaaaacagaaaatatatctaaaaaggtaatagtttaaaaaaattggtttagtcttactttaaaatgaaagacctttgaagggagtcttataaacaataaatgagctggcattaagtgtaagtctagtagtacgagtgtgtatttgtaaatattacacttttgttgtttaaaaaaatgaattctgaattcaaataaattaccgacatagtaaaaaagcctcaatagataaaatgccaaagaacatgaacagatagttgataaaagagtaaatagaatgccaaggaacatgtacaaaaattgtaatgaaagaaacagaaacagtaattaaatatacatgtacatatatcccatcaaataaa

SEQ ID NO: 297886 - DNA, 595 bp, Homo sapiens
cactccttcactgctctgaaattttgatagtatcaggtgaaaatcctcaattattcagtttgtttagacattgttcttttttctgttattaggtatgaatataaatattaagacagagttttaaaaagctaacaggatgttaaatggactctgattcaggaagcagtatcataaatggtaatgggtacatctaaaatagttttttaggaaaaaatattaattaaaacactcaaatacaaaacagaaaatatatctaaaaaggtaatagtttaaaaaaattggtttagtcttactktaaaatgaaagacctttgaagggagtcttataaacaataaatgagctggcattaagtgtaagtctagtagtacgagtgtgtatttgtaaatattacacttttgttgtttaaaaaaatgaattctgaattcaaataaattaccgacatagtaaaaaagcctcaatagataaaatgccaaagaacatgaacagatagttgataaaagagtaaatagaatgccaaggaacatgtacaaaaattgtaatgaaagaaacagaaacagtaattaaatatacatgtacatatatcccatcaaataaa

SEQ ID NO: 297887 - DNA, 595 bp, Homo sapiens
cactccttcactgctctgaaattttgatagtatcaggtgaaaatcctcaattattcagtttgtttagacattgttcttttttctgttattaggtatgaatataaatattaagacagagttttaaaaagctaacaggatgttaaatggactctgattcaggaagcagtatcataaatggtaatgggtacatctaaaatagttttttaggaaaaaatattaattaaaacactcaaatacaaaacagaaaatatatctaaaaaggtaatagtttaaaaaaattggtttagtcttactttaaaatgaaagacctttgaagggagtcttataaacaataaatgarctggcattaagtgtaagtctagtagtacgagtgtgtatttgtaaatattacacttttgttgtttaaaaaaatgaattctgaattcaaataaattaccgacatagtaaaaaagcctcaatagataaaatgccaaagaacatgaacagatagttgataaaagagtaaatagaatgccaaggaacatgtacaaaaattgtaatgaaagaaacagaaacagtaattaaatatacatgtacatatatcccatcaaataaa

SEQ ID NO: 297888 - DNA, 595 bp, Homo sapiens
cactccttcactgctctgaaattttgatagtatcaggtgaaaatcctcaattattcagtttgtttagacattgttcttttttctgttattaggtatgaatataaatattaagacagagttttaaaaagctaacaggatgttaaatggactctgattcaggaagcagtatcataaatggtaatgggtacatctaaaatagttttttaggaaaaaatattaattaaaacactcaaatacaaaacagaaaatatatctaaaaaggtaatagtttaaaaaaattggtttagtcttactttaaaatgaaagacctttgaagggagtcttataaacaataaatgagctggcattaagtgtaagtctagtagtacgagtgtrtatttgtaaatattacacttttgttgtttaaaaaaatgaattctgaattcaaataaattaccgacatagtaaaaaagcctcaatagataaaatgccaaagaacatgaacagatagttgataaaagagtaaatagaatgccaaggaacatgtacaaaaattgtaatgaaagaaacagaaacagtaattaaatatacatgtacatatatcccatcaaataaa

SEQ ID NO: 297889 - DNA, 496 bp, Homo sapiens
tagaaattttacattcagaaattaaagaaataggaggattatagctaattgatcttatttatttgatacttctttatagaaattatgtttaaactgttttgcttatctttggtttcattacctttatatggtaacattcccagtagtaggacaccagtagaacaaccatttctatgcatgtgagatgtcacacaaatatatactgtttcttgagttaacattgggacatgccttttagaggtgtggaagctgatttaaacaacttactcaacataccaaggagcctaacataagtgtccataataaagtatattattcctcattcgcattgctctatgcaatttagccrtcaaatataactcagagataagtaacctaacagaaagataaatattactgtagagaagagcctggtcccattttacatagaacacagggtatccaaagatgtagttgcagcttactccaatccagttattattgttcaacgttgctt

SEQ ID NO: 297890 - DNA, 596 bp, Homo sapiens
ttcatgaggacacaacacttatttctaatgtgtaagttttgtaacacatgaaataaatattcttcggcattgcaattataaaaattttattatattttctcattgatcactttggtgtataaaaatgtatatactaattttattcatttaattttaaaaatctattaattgttcaaaagtattgctgaaatttagaatatatacataagttaaaatatgcatataaaatacccatttcctcttacccaaagattagtacagttaatatctaatgttacatgtttccagatgtttttctgtatttatatcaatatctaccaacttatctacatctacaaacatgcatgcatacaatatacccattatatatatcayatgtatgtgtatataccatttaccaaaatgatatcagtcaaatgacatcacacaatatgtgctattttcagtgaatattttccatttttcccagttgagaaattttttatcatctctcatcaaattttcccaattgagcaaaaatgttatttacactggtttacccaatccaggaagcaatcagtgaccacatattatatttggttattgggtcatttaag

SEQ ID NO: 297891 - DNA, 526 bp, Homo sapiens
attcacacacagccaatgtttgtgatttgctgattggcttaagtggttctcaaactcaccatcagaatcatgcaccagagtcacctggaggctttttaaaaataagatggttccacctccaccctcaccccctgcccaacccttttgggttcagtagatctgggtcaaggcctgagaatctgtatgtctaacaagctctcaggagatgctgtgctgctagactgggatcacagtttgagaactattgstttaaaaaattgaacatgctaagtcaaaagcttggaatcctgtgatgtgggaaagattgagtatctattatgactatgccaatatctcatctaactctcatagtatatctctgtgagtattgtcattatcttctttacagatggtaagacagcttcagagaacccatacatacagtccatgcaagagctgggatttaaatgctcatcttgttcaaaacttgtattcattctttcaccatatgctgcctgctcagcattaagatgggatgaggtacttc

SEQ ID NO: 297892 - DNA, 545 bp, Homo sapiens
tctacatgaaaaaggaagattgcatgtggcatagagtgcaccaaaacacctctgaggttttaagcaccattggctgaaagaaaaataactcaccaattggtaaaagatttcctgtcctactctaagcttagtataayattaaatcatatggttctcaccccaaagagaagagctatactctaagctactgtcaaagactctaacaatcttaaacttgtagctacacttaaaacatcttggcttagataaagaatgcttatagaggtttgcttgaaccctagggaagtctgcagaagaaactggattgagaagcaagattatgagacatttgaaattgtgaacaagaagtttgaactataaatgggccaggtaagagtggataggggatatctaggaagtagttggaaactttggcatgaaaagcaaaatagatgataggatttagcaatatagatttggaggtcatctatataacagttaaaagtgaggaagcacatgatgccactgagaaaaaaatgaagaaaagcaaggtgtcataagaccag

SEQ ID NO: 297893 - DNA, 588 bp, Homo sapiens
gcaccatgagaatcttgaggcaagaaggatctacacatttcattaagcataggaaaaatcatcattgaataaatatatattgaataaggtgcatctgggatagagggcaatcaatgctataagaccataaaaacaaattgaggcagatgaaatcaagaacatacaaggaggggttaacattgacaaaaagaggactatggcttgacaaaagaggaagataggaagaagggaaaaatgaagaaacaaacatttgaagatcggataaaatgtggtactgatcttctcataaagaaagagtcmttttttagcataaatgggaagactcgtgtttggaacttaaaaaggtgaaaaaggttaaaacagctgaaggagcataaatatgagtgtgggtccagctgagcttataaagaacgaatttgcagaggacaaagaaactccctgcggaatgattgtgacaatcaaatgttacaaatcaattcacgtagagcactaagaacagtgcctagaacatagtatgtatgtgatgaatacatactatgtgatgaataaaacactatttaccctctctcatgtttgcatttatatttc

SEQ ID NO: 297894 - DNA, 522 bp, Homo sapiens
atttggaggtcatctatataacagttaaaagtgaggaagcacatgatgccactgagaaaaaaatgaagaaaagcaaggtgtcataagaccagcaccatgagaatcttgaggcaagaaggatctacacatttcattaagcataggaaaaatcatcattgaataaatatatattgaataaggtgcatctgggatagagggcaatcaatgctataagaccataaaaacaaattgaggcagatgaaatcaagaacatacaaggaggggttaacattgacaaaaagaggactatggcttgacaaaagaggaagataggaagaagggaaaaatgaagaaacaaacatttgaagatcggataaaatgtggtactgatcttctcataaagaaagagtcattttttagcataaatggsaagactcgtgtttggaacttaaaaaggtgaaaaaggttaaaacagctgaaggagcataaatatgagtgtgggtccagctgagcttataaagaacgaatttgcagaggacaaag

SEQ ID NO: 297895 - DNA, 559 bp, Homo sapiens
atttttagataagatcaacacacaatcaaaatcgtctttcattttgtccttctcctaagatgtttagcacacaaacttcccattagcccaatagtatttcttcatttattttttamtaaaggaattagaagctttgtacttccaagttgaatttgtggaagatttacaaaattaagcactgcattaagaagcacaattaaaaataccagcaaatcaacaaacagttaagagcaatagagagaacatgctaccaggaacatttgcaatgtactccatctaattccaactatcctgataaccaaggctaagggaaaatagattaagctgggtattttacattgttagttaaaaataagtatattcattcatctggagagagatacttgctgagacactgaactcaaggatctattaatcatttgcttctttatataaaagacattgggtaaaataacagacaatttggtttgctgtggcatctcaaaaggctggtaacattgtttaaatgttcgtgtaatatattgcttctcaaagaagaggttaaaatgttaaaatttta

SEQ ID NO: 297896 - DNA, 622 bp, Homo sapiens
ttcttttcttaaaataaccagtagagatttaatagtataattgagattagctcagttcaatgtgttgtatgtgtgtgtatcttttaatgaaaaaaaatctttctgcttgctttttttttgtcacagaaaacctaacasaacttgaaatacttgtttgaaaattaagaacaggttattttaaactaatcaatgctatggagttttatgtcccttaagactattatctctgggtaaacatttttgtattacagttcttctgtggtagacatacactttctaaggtaaatcctcaggaagtgacagtcttgtgaaattaggaacaagtatttacaggaattggccatagctatgtgtaagctcaactcccagctttaggtaattggtgacaaataactttgaactttctctgcaagcacatagtttgattttcttcagagcacagatgaactacagtcagacttaataatacagcctgcacaaacactggttaaatctgggtgcctcagagactgctttcattttatccagctaataaatggcagaggactaagagaacgacctgtgatatcaattctgcccttttaacttgataaattctcacagattacttattgaaaccaca

SEQ ID NO: 297897 - DNA, 568 bp, Homo sapiens
tactatatactgcatcttttgtactagagaaaaattaaacactctaattgtaatttggtataaaaacaccatggaatatgctatttgatctattaatatgtacacaaaacatttagatttcatttaaaktaaaagaagcaaataggtattttataatttaagaaaattgtgcaggcttcggcagcacatatactaaagttggatwtgaagctagaggtaactgggctggatggatagggtcttagaggacactgacggagtttggcttttattctgtgatggtaagttattagaggtttttgagcagagaaatgattaaaatctgatwtatatttttacagaattactttgggtgctatcttgagactattctaagagccaaaaacagggaaactatttaggaaactatagcaataatccaagtaagagatggtggtagtttcaatcaaggtgggagataatttgagtaagaaaaatagagaaagcatttcttgataaaagttgaaagcagagctaaaaaatttgtagatgaatcaaaagagaaatttatgaggagctacggatgtct

SEQ ID NO: 297898 - DNA, 595 bp, Homo sapiens
attcagggatgcttaggtgatttcttttcccaataagttcttgtggttctcagggttgagggtagagaaagaataagaaactcaaaataagtcataaggaataaatcgttaaatgaatggatggattctaaaagagaagaacatrggaaagtaaggccgtctatggattctaatatactacaggataagcccaggcctggatttcactcatgtcctgaggataatccaggtttcaacttcctatataccatttcatcatcttcccatccctctcttgctccatcctccagtctgtcctgaatatcttcatgaactttaaggtataatgactggtcatatgctagctcacaatgttacccttctaagaaatctttgcattttatatgtaagccaaaagaattctctaaaatttaatttcacatctaagatagtgaatgagggaagaaattttgtgctttaagtttttaggagatgatacacactaaagttttgagctgcaccgttgactaactgtgtccttgggcaagtctcttaaattgtctgagtcatgtcttccccatttccatctgaaaactttcacaggattgttaatgag

SEQ ID NO: 297899 - DNA, 561 bp, Homo sapiens
ttggggtggaccctccatgacttttggtattaataagtgatacaataaactgaccaaattcttatagatatgytaatgaaatatggttgttgatgtctggagattgtgaaggactggggtaccaagcctggttttactctttgatttaaatttctactttgttgctatccagtataacttgagatcctactgtagatttatataagtcctaagaagatagttttacaactgtgtttaacctttttaatgtattttcattcaaggcagttaataaaaaattttaatttattatacacagttaaaaaaattaccaagattaaaaggaaataatattcctaaaatactttggactccgattaaatgtggaatctttgaacacttttaaagtgtggaatttttaggatatagatatataaaaagtagtaataatattgtttttttatgtaatcagattaaaaataatacaatgaaatacaatctgtttactgcaatttccactaagcagtcaaatttagagtctgcattcattacagctggagagaatcaccctgaagagaaaag

SEQ ID NO: 297900 - DNA, 595 bp, Homo sapiens
attcagggatgcttaggtgatttcttttcccaataagttcttgtggttctcagggttgagggtagagaaagaataagaaactcaaaataagtcataaggaataaatcgttaaatgaatggatggattctaaaagagaagaacataggaaagtaaggccgtctatggattctaatatactacaggataagcccaggcctggatttcactcatgtcctgaggataatccaggtttcaacttcctatataccrtttcatcatcttcccatccctctcttgctccatcctccagtctgtcctgaatatcttcatgaactttaaggtataatgactggtcatatgctagctcacaatgttacccttctaagaaatctttgcattttatatgtaagccaaaagaattctctaaaatttaatttcacatctaagatagtgaatgagggaagaaattttgtgctttaagtttttaggagatgatacacactaaagttttgagctgcaccgttgactaactgtgtccttgggcaagtctcttaaattgtctgagtcatgtcttccccatttccatctgaaaactttcacaggattgttaatgag

SEQ ID NO: 297901 - DNA, 621 bp, Homo sapiens
atataagtcctaagaagatagttttacaactgtgtttaacctttttaatgtattttcattcaaggcagttaataaaaaattttaatttattatacacagttaaaaaaattaccaagattaaaaggaaataatattcctaaaatactttggactccgattaaatgtggaatctttgaacacttttaaagtgtggaatttttaggatatagatatataaaaagtagtaataatattgtttttttatgtaatcagattaaaaataatacaatgaaatacaatctgtttactgcaatttccactaagcagtcaaatttagagtctgcattcattacagctggagagaatcaccctgaagagaaaagctgttgcatcaaattatgggaaatgtgaacaattccaagggaattagagtgttctttccaaaaacagtttataggaaggatcaggatcagagttttactaytgaaataattttgttcttctttgttttttttctttctattgtaaatctcaaggaaatgtgacataatttatttttagtatgtttatatatgtgcctactggttattttgaaccaagagaaaaaatctttgcatttctgggaacaaaaaatattaacac

SEQ ID NO: 297902 - DNA, 570 bp, Homo sapiens
aagttctcagccctgctcacctgttgcctggaaataaactcagagatgatgtggggtacatggtcaggctgaaactggccttttgggctgtatgggagctgggtaaggcctgtaattgctggctttcccccactctcctggtgacctgaatgacacagcagaggcagccataatcctcctgggaacrtaactccattggcctggaaaccacagccccatccccaacagcagccataggaagctccgcttaagaagagtctgagttcatatatgcttaatcctgccccaaactgatggtctttctctacctaccctggtagacaaagacaaaggacataatcttttgagagccctatggccccactcaccacctgagaaacccaaatacttatccgggtgaccgagggcaagcttgtagcctccctgtactaccacagcagatgcgctcttaaaagtgccacctcctgcctggaggccaaccaacacaaaaccagtgcactaaacaaaaatacaaccaaggaccatcacagagtccacttcactcccctgctacctcccctggggcaggtg

SEQ ID NO: 297903 - DNA, 573 bp, Homo sapiens
cactactacaaagccaatactacaagaactgctaaaaggagttctaaattttcaaaggaatcttcaaaatacaccaaaatagaaactccttaaagcctaaatcacacaggacctataaaacaaacacacacacacaaaagatattcaggaaacaatagcacgaagaacagaatagtacctcacatctcaatactaacattaaatgtaaatggcctaaatgcaccactgaaaagacacagaatggcagaatggataagaaatcagcaaccaagtgtctgctgtcttcaagagactcacctaacacataargactcacataaacttaaagtaaaggagtggaaattgtattccatgcaaatggttatcaaaagtgagaaggagtagctattcttataccagacgaaacaaactttaaagcaatagcagttaaaaaagacaaagagggatattatataatgataaaaggactagtccaacaggaaaatatcacaattctgaaaatatatgcacctaatatatgcactggagctcccaaatttataaaacaattactactaggcctaagaaatgaga

SEQ ID NO: 297904 - DNA, 1187 bp, Homo sapiens
actttgagtgaagttacttatgtttattgaacatcagtgttttatctgttaaaaatatagtgactctctcattagattctttgaggattaagtgagataatgaatatatggtgtttatatagtgttggacattatacaggagaaaagagacactaatcagtatcagaaatgagagaggtgacatcactgcaatcagtagatattaaaggaataattttaaaaaatgaaaactttatgtcaacatatttgacctgtgatatggtttggctttgtaccccacccaaatactatcttgaattcccacgtgttgtgggagggacctggtgagagatagttgaatcatgggggtaagtctttcctgtgctgttcttgtgatagtgagtaagtcttgcaagatctgatggttttaaaaatgggaatttccctgcacaaacactctctctttttkccaagtcttggtatgtctttatcagcagtgtgaaaatggactaatacagtaaattggtaccagtaagtggggcattgctgaaaaaatgtccaaaaacgtggaagtgactttgtaactgggtaacaggtagaggttggaacwttttaactacatagaaatatatatatcatatatatatgccaaaacttatgagttatagctttataaagctgctattagtaaaagtattgaccttgaagaacaagaatgaataaattaagcattaaattataaaattacaactagattaaaagcagaaatttatagagacaaagagaaaaagagagaaagcagtgaaatacaaaaawaagtagaatggacatgttatatatatatatagaatggacatatatatcatatatataggcaatttatgcatattggagaaactctggcatgacctgatgctttcaagtacgtatatattttctcttttatgtctcaactgagagcctggagttttttactaaggtccccccaccatactgggttgtgaattcagacttctgtctctctgatggactgaaaaactgctgaaatcttggcttcactctctggcatctgagctggggctttttccttgttttttcaagtctcaatctgtatgagtaaaacttagcagttggcaaatggctgaagggcaaattgctgtagtattttgagctatcctttctgcattcccttttccctgttacattct

SEQ ID NO: 297905 - DNA, 598 bp, Homo sapiens
ttttaactacatagaaatatatatatcatatatatatgccaaaacttatgagttatagctttataaagctgctattagtaaaagtattgaccttgaagaacaagaatgaataaattaagcattaaattataaaattacaactagattaaaagcagaaatttatagagacaaagagaaaaagagagaaagcagtgaaatacaaaaaaaagtagaatggrcatgttatatatatatatagaatggacatatatatcatatatataggcaatttatgcatattggagaaactctggcatgacctgatgctttcaagtacgtatatattttctcttttatgtctcaactgagagcctggagttttttactaaggtccccccaccatactgggttgtgaattcagacttctgtctctctgatggactgaaaaactgctgaaatcttggcttcactctctggcatctgagctggggctttttccttgttttttcaagtctcaatctgtatgagtaaaacttagcagttggcaaatggctgaagggcaaattgctgtagtattttgagctatcctttctgcattcccttttccctgttacattct

SEQ ID NO: 297906 - DNA, 333 bp, Homo sapiens
ttgtcatatggattcaatgtaacagatctcaaatgtgattttaaaaaactgagctcgaactttataagatcaataccttatcccaaaaacgaataccaaatttcaccaaaataaattcaattgttggccaggcaaggtggctcatgcctgtaatcccarcaacttttgaggccaaggtgggcagatcccttgatgccaagtgttcgagaccagcctgatcaacgtggcgaaactccatttctactaaaaataacaacgacaacaacaaagagccatgcatggtgttgtacacctgtagtcctagctacttgggagactgaggcacgagaattg

SEQ ID NO: 297907 - DNA, 501 bp, Homo sapiens
taaatatgaccaggttagaattatagttctacttaactgggggcttatcattttcattattattgtttccagtgactgccatttagtaaatgtttcctgtgtgtcaggctctatggcaactactttcgaaaaactgctagcaaatgtaagaaattgatactgtcatctttattttagaatctaaaatgtagtaattaagactggaagcactatagttaaatgggctgcttaaaatgccaacactgtgaccttggactttcacttgacctctctgtgcccagtttatctatctgtaaaatggggatgatgacaatgcctgcctcatagaccgttttgaggaataaatgtcttaacatgtgtaaactgattcgatcagtgcctaacayggagcaagcatttaaatgtcatcaatattgataatatagagatgaagtttgctcaaggacaattcattagtaagtggcatccgttattaagcagtagaatatactagcattgtca

SEQ ID NO: 297908 - DNA, 589 bp, Homo sapiens
ttctactttagagttggttaaatactatttgtgacttaagaagtggttagaattctggagctagaaaagatattcatgatcacttagtctagtgattcccagacctttggatttatggaccaacaaaaatacacaaatattttaacatcagggtcctgttatagagagcatacttgaattttgctatgtgaggatgctcaaagggaacaggggagaatgtctagtgttcataaaagtaaacaattttaacagatttatacaataaataaatttaatttcataaataagtccattgttatttttctcattttcccacagactaatgaaaaattgatcacaggccaatatttggaaaccactgacctaacataaccatttattttacaaatgaagatacmccaaagcagggcagattcagtaactttcccatgttaatggtggagccaggacttgatacctagcttctcattcaaaatccatgttctaacctgcctcctgccagataggcaggttcctctgaccccagccttaggaatgacattctgtagtgtacatgtgaatgctacctattccttgaataaaagagttt

SEQ ID NO: 297909 - DNA, 589 bp, Homo sapiens
ttctactttagagttggttaaatactatttgtgacttaagaagtggttagaattctggagctagaaaagatattcatgatcacttagtctagtgattcccagacctttggatttatggaccaacaaaaatacacaaatattttaacatcagggtcctgttatagagagcatacttgaattttgctatgtgaggatgctcaaagggaacaggggagaatgtctagtgttcataaaagtaaacaattttaacagatttatacaataaataaatttaatttcataaataagtccattgttatttttctcattttcccacagactaatgaaaaattgatcacaggccaatatttggaaaccactgacctaacataaccatttattttacaaatgaagataccccaaagcagggcagattcagtaactttcccatgttaatggtggagccaggacttgatacctagcttctcattcaaaatccatgttctaacctgcctccygccagataggcaggttcctctgaccccagccttaggaatgacattctgtagtgtacatgtgaatgctacctattccttgaataaaagagttt

SEQ ID NO: 297910 - DNA, 612 bp, Homo sapiens
gataactatctcatagtattttaggattaaatgagataagagacacaagtctggcacataacagattttcaataaatccttattgggtcatagaaaaggggatcaatgttgaaaaacatgcacaccgaataacacatgatcttgtattcaaaatgtaagacaaatctcttgtaaggtaggaratgaggtggtgtgaacttggcagaaagatggggtaaaggactgcagtgttgttctacgtggcaacaagggaggcttctaccgcattctagcctgaccattgtctgcccatatggccaacattaccctgtggaaagctgcacctttgctctaagatcagcttttccacagggatttgtaagatgtcatagactcttcaggtgagctcctgttaagcttgtttctcaggaggtgaattagaccatactagagaagaattttcacattgttttatacctttggaagcccctgtgctccagctacctctcagaatctttattcttggcaccattggccttttttcttttcctggcaaacaggctaaaataaaaaccagtgagaacaatatgtaatgaaaggagccaacaaaatcttatagtgggagagcaggcc

SEQ ID NO: 297911 - DNA, 413 bp, Homo sapiens
gatcaccaccctcagaaaaaatttgccttttgctgttccctgattgcaatttataacagtaggtataaacaagasaatattgaaagtaaataggtgaatttaataaaattgatctcagaataaacataaaattaagaaataggatactctaatgtgattatctagattatctagttatctagagagattactagtcaaataagaatacatttgttaaaatgaccaccaaaaagtaaaaataaatagtatcagctaaagaaggaacatgctaaacataatatagaaaaacaataattgatatacatatattcaattaaaataacattttaaaagatgataaccatattactgtgtatcaggcatgatatttaatgctaagtgtttataaacatgtgaaatatatattattatta

SEQ ID NO: 297912 - DNA, 647 bp, Homo sapiens
ctgtaggtctaattaaacttgtgtgtagagaaagaaaatatacttttatcagtggatgtgatggaagcaactagaaaaaccagaggagtttctctcagatcctatttagtgttaataaaacaatttttccatatgctctcaggaragaaaatttaggttgtacacagaaaatattctaaccatgacactcagactctcatagactgtttaatactagataccctgtgggtctcttctctagtgtacagtcttctcttgtgttgggaaggccccgaaagtgcaggaggcacatggtaggaaaggctggcttcaaggttctcagactactttggcaaagttctgtggacagcaagactaaatcagtacttattctactccgtataatattagcttgggtttcccaccaagagccttccacagcaagattgttatagtgtgttgtaggtttccctcacctactaaagccttgacatatatttacagtgattttgatgaacatttaaggcctgtcagtacacatgctatgaaatcagctaatgttcctttctgtggaattctaaagaaggagctagaagatgtggcattttcatagaagatttgtcatcattctccagtcaaggatcatactttgaaagcccaaccattag

SEQ ID NO: 297913 - DNA, 630 bp, Homo sapiens
attctactccgtataatattagcttgggtttcccaccaagagccttccacagcaagattgttatagtgtgttgtaggtttccctcacctactaaagccttgacatatatttacagtgattttgatgaacatttaaggcctgtcagtacacatgctatgaaatcagctaatgttcctttctgtggaattctaaagaaggagctagaagatgtggcattttcatagaagatttgtcatcattctccagtcaaggatcatactttgaaagcccaaccattagaaaaccagggcaaattcacccacttcaagcatcttctggtcacactagaaattaattttagagaaaattgaggcctaagtcacatctcacctatgacatagcaattcaatattttcttcatttaataagtttacctatgactataaatactataatgtatatccyaatacaggctatagcccaatatatttaatcctggatgcacatgagaatagtaaagttttcaaaaatatcagtaatgctctgcctccccaacaaatttattttaaattggtctagggtgggattttttttttttaactcctcaggtgattctaatatggccagggttaagaactactgatttggagc

SEQ ID NO: 297914 - DNA, 585 bp, Homo sapiens
ctattcttctggcacccatttaggctagacagtgaaatcaacagcatgatataatgtaatagaatatgtagtatacaaaggaattgatcccagaaggaaggtgtgaaaaggggtaaaggagacaccagtggtagttgggtgggggttgtttacaaacttttgtatgaggctgtagattcaagatgtgtaacatcccttacaagactatctatttaaagaacataggccaaagtaacaaagagtgtaaccatagttgggggaaggcacaagggaagagacagatgctgtcattccagcctatacaaatacacaccatattttctcatttttctaaaaaaaaaacttaagtsatagaaacataattgtgtcttcagaatctacttatattgtgaatcagtagccacattctttctattgcaatggcatgaaaaataagttattgggaaaataaggtataaataagttataaaaataagttatactaccatttgtccaagaaatatgggtctcttctaccccaaccccaccaaccacttgagacacactacacatgtgccttaactgtactcatggccaggctaagaa

SEQ ID NO: 297915 - DNA, 1213 bp, Homo sapiens
gtacacatatactctatcataccatacatacaaaacagtttcagaattaactgaattaacagttasttcaatactacaactaacctcaatacataaaagtaaagttcaagatttctgtcctgcctgtacctgcacccgtaccttcctagacaattcaggcccaaagccattcaaggaggtggaggcatctgtatgtgatagggggagccagagtggcccagtgtggggagtggaagctcacccagggttcctgaaaccccttcaggtaatctacaaggttaaactattttcagaataacactaaggtaacttgccttttgcacttacatcatctcatgagtatactttggagtttaccaaaaacttcaggacatcataactgcgtgaggctgggttttctcccaccaaagtagtataatgggatacttgaatataatctagctgccttccaataagctagacatctgaggtttatagaaacataaaacaatgccacacttctcactaaattatttgttttgggaaataattactttccataaagatatttcatttatgttaacatgtaatgggtttatgagttatawgtttatgagttataacatgagttaacatgtatgggtttataacttttgatgagttagtttttawttttaaaattttaataaatatttttaaaatttacaagttttttcttgtttaaatatgattataatgattattttacacatttaatgggtataagtgccattttgttacatagatatattgcatatcagtgaactctgggctttcagcgtaaccatcacccaaatagtatacattgtatcaattaagtaatttctcatcttctagacatctccaatgtctacgattccactatgtccctgtgcacacattggataactatatgcaggagaatgaaactggaccctcatctctcaccatatacaaaaattaactcaacatggatgaaagacttaaaggtaaaacctgaaactatacaaataccacaagaaaatctaggaaaaaactcttctggacattggcctgggcaaataattcatgactaaaacctcaaaggcaaatgcaacaaaaacaaaataggcaaaagaaatttaatcaaactaaaaagcttctgcacaacaaaagaagtaaacaacagaatggacagccaaccagcagaatgagagttttattttctaatatggta

SEQ ID NO: 297916 - DNA, 574 bp, Homo sapiens
tacactggccccctggctccccacctttactcttaacctgtctcttctcaatcctttgttgccaccaaactttaaataccctacgggtggtattaaggctggtccccaacaaggcacatagcaagaataaaatcagaataaaagtagaaaactcaaggtatgtttaagaaaaatgagtgggtcagccttgctaaagcagagagattggtgaaggaataataaggaataagtgggaaaagggtcaagtccaattgtggaaaaccttgaatgctaacatgagtaccragaaaaccatcctgagcacaggagaggcagcagcactgcaggagatttatttgacagtgcacacaaatttattcagatatgacaagaagatattacaggcaggatctaatggagtatggtaaaaaaaaaaaaaatgtggctggcatagtggaagccagactagaaaggaagaaacacaaacaagacacacagagcggaaaacaattaaaatgacttgataagcctcctgaaaattcttagatttaagacctttaataaaaatcttaaatgtagtgagctgatgcatgca

SEQ ID NO: 297917 - DNA, 409 bp, Homo sapiens
agggatgtaaaactatctcttgggtacaatgtacactatttgggtgatgggtrcactaaaatcctagacttcaccaccatacaattcatccatataaccaaaaatcacatgtgcccctaaagctattgaaattttttaaaaaagaaaactagtatagatagacccaaaataatatttaatattaatttacgttttttctattagagaaggtaaatatacatctttttatacaaaattggccatttatattttatctcatataaatttcttgttcataactttcttttttcactcaattgattttaggtgttctctatagattctgcacattaatttgactattaaagacttcacatattttgtaattttttatacagatcttttttgacttggttactggtattttatt

SEQ ID NO: 297918 - DNA, 566 bp, Homo sapiens
ataaaatctgtgcaataggcccaaggagaatgtcaaatgattaaggggcacaggctctgagaaggagatgtccgggggaaaaaaaagacgcactaaaagagtaatatgactgagagattagaaaatagtgaaaatgtgttacaaaaataggataggagggccatcagtgaaaatggcaagtgaggacatctaaaatgactattctccctaaaagcagtaagagtactggtaaaacttcttagaatcaactttttcagaactctggaaattaataaaaggcttgctgcaatgtaggaaacatgtattcaagaaaagcagttagatctcagtaatagtaagttttatggcctcttaatttgccccatttctatctcccactctttagctctgtaatagctttgaaaactacccacaatcacagtacaaaacagcagyctggaagccactggatggggctatgcattcccagaggattgtcactatttggcccatctgggattccctggaagacacttctcacaaagatgcctttgtttaacctgacttggagcttatccaatgtaaca

SEQ ID NO: 297919 - DNA, 566 bp, Homo sapiens
ataaaatctgtgcaataggcccaaggagaatgtcaaatgattaaggggcacaggctctgagaaggagatgtccgggggaaaaaaaagacgcactaaaagagtaatatgactgagagattagaaaatagtgaaaatgtgttacaaaaataggataggagggccatcagtgaaaatggcaagtgaggacatctaaaatgactattctccctaaaagcagtaagagtactggtaaaacttcttagaatcaactttttcagaactctggaaattaataaaaggcttgctgcaatgtaggaaacatgtattcaagaaaagcagttagatctcagtaatagtaagttttatggcctcttaatttgccccatttctatctcccactctttagctctgtaatagctttgaaaactacccacaatcacagtacaaaacagcagcctggaagccactggatggggctatgcattcccagaggaytgtcactatttggcccatctgggattccctggaagacacttctcacaaagatgcctttgtttaacctgacttggagcttatccaatgtaaca

SEQ ID NO: 297920 - DNA, 566 bp, Homo sapiens
ataaaatctgtgcaataggcccaaggagaatgtcaaatgattaaggggcacaggctctgagaaggagatgtccgggggaaaaaaaagacgcactaaaagagtaatatgactgagagattagaaaatagtgaaaatgtgttacaaaaataggataggagggccatcagtgaaaatggcaagtgaggacatctaaaatgactattctccctaaaagcagtaagagtactggtaaaacttcttagaatcaactttttcagaactctggaaattaataaaaggcttgctgcaatgtaggaaacatgtattcaagaaaagcagttagatctcagtaatagtaagttttatggcctcttaatttgccccatttctatctcccactctttagctctgtaatagctttgaaaactacccacaatcacagtacaaaacagcagcctggaagccactggatggggctatgcattcccagaggattgtcactatttggcccatctgggattccctggaagacmcttctcacaaagatgcctttgtttaacctgacttggagcttatccaatgtaaca

SEQ ID NO: 297921 - DNA, 540 bp, Homo sapiens
ctttcctggtttcctaggctaaattaggtttctttgttatctgcctctatagactgtttctttctctcagaagacttatcccagttggttcacattctatcacagtcaatgatgtggttattttatgaatgcccttcttgcacgttagtctgaagcttcatgagtgagtagccaygtcttttattttgcttgctgtcctatctccagctcctagaaaacttcctagcatatagggtaatcaatacatatttgatgaatgaatgcatgcatgaataaagggcaaatttggtttaaaaatagtatatggcttatagaccatccctcatgccaattcagacctgattttctccaatttttagcttaaagtgtgtttattcttattcttatacatgtacaaccataaagattgctcaaagtactgaaatgctatagcacctatgaagatatcaatttcagagccacagggaatagtaataagatgaatacagaatttttcataccgaataagtattttagataatgccaaatagactttatagc

SEQ ID NO: 297922 - DNA, 616 bp, Homo sapiens
tgatgtcatatatatttgcttattaaaggttgaatgtcccttatctgaaaatccaaaatgctgcaaaatataaaacttttcaagtaccagtatgatgctcaaataaaatactcattggagcatttcaggttttggattttcagattaaggatgctgaatcagtaagtatgatgcaaatgtccccaartcacaaaaatctgaaacctgaaacacttctggtcccatgcatttgagataagcgataatcaacctacatctcttattctgtcctccttccctccatcagagcagagctgcctcttgtttgttgttggacttttgctgctgggacagtgcctgatatgccctaaacactcagatacttatgacaatgaatagactgagggatggatgaaccattctctaatccaaggaaatacacgttggtccttcttccagcttctccttagaacacatctactgacatattctagaaaggtcataagcaaatggcatccagccctggtaggacaggctttgcttcaatccctccttacaatgaggtagtatattgctaccaattacctacatatgatatttcctctttttttcttgctctactattggttttgtctag

SEQ ID NO: 297923 - DNA, 622 bp, Homo sapiens
tgtgctattacagaacctataatccctgccaaagtggtcatgatagcctttcttgagaaagtaatgtttgagctgagagctaatgcatgaagaaacatgtcttaggtggagggattgggaagtggtggctgagagtcagttttttcaggcagagagagcagcttgtagtaaagccctgaagtgggaaggagacagatacatttgaagagctaaagggaggccatgtggcgggaagctgaatttgagaagagtgagaagaggagaagactgcaatgagatgaagcttcccagatggaaagagcttgagagggattctgcgatgggctccaagagctataagaagtaaggaaatattttaggcaagggtacctcattcagatttgcattttgaagggttcaccctagacgtagtatggacagtggcttcatgcaatggaagctaattaaacatagatggaggaggtggagctgataaatacagagaagacagcgagaatgcaaaggccagaaaaaaataagagtagcaatgaatttgtataaaagtcaatgcatttgggatatgtctacaggatagaatcaacagaayctagtgatacattggatataaaagataagggagagg

SEQ ID NO: 297924 - DNA, 1139 bp, Homo sapiens
ctttttctgtgctacttctgttctactagaagtgtggttaattggtatcatttgtttggcaaagtaattaagtctctattgtacagtcatctgttgttatccaagggggattagttccaggaccccacacagataccaagatctgcaaatgcacaagtcctttatataaaatggtttaatatttgcgtataaactacacacattcccccgatactttaagtaatctctagattacttataataccaaacacagtgcttayacatcacttcatttgtgtggatttgacatagtattcagtgtgtgggaagttcaagctttgctttttggaactttgtgaactttctttccccagtatttcaatccatagttagttgaatccatagatgcagaacccacagatatggagggaagattccagtttattttaaataaaacattattctttcttcttcctttcctagaaggaactcttattctgaatttagtgcttatacccctgcatttcttaatacatttgccaagtattttcaaacctataaagttttgcatgattttaattttataaatgwctttttctgtgctacttctgttctactagaagtgtggttaattggtatcatttgtttggcaaagtaattaagtctctattgtacagtcatctgttgttatccaagggggattagttccaggaccccacacagataccaagatctgcaaatgcacaagtcctttatataaaatggtttaatatttgcgtataaactacacacattcccccgatactttaagtaatctctagattacttataataccaaacacagtgcttacacatcacttcatttgtgtggatttgacatagtattcagtgtgtgggaagttcaagctttgctttttggaactttgtgaactttctttccccagtatttcaatccatagttagttgaatccatagatgcagaacccacagatatggagggaagattccagtttattttawataaaacattattctttcttcttcctttcctagaaggaactcttattctgaatttagtgcttatacccctgcatttcttaatacatttgccaagtattttcaaacctataaagttttgcatgattttaattttataaatg

SEQ ID NO: 297925 - DNA, 421 bp, Homo sapiens
gcaggtttgggggtaattatgttagttgtgtcttcaacatgttgagtttgaggttctcagagacatccaaatggtctgttgaattggcagaagtgtaaaagagaagtatgggttgaatagacattggagaaatttctagaatagaaatttgttgaaaattcattagtgaatattatattagtacttctttccctatgatamtataaggtattcttgggagctgctataaatatttgttaatgcactcaaggtagtatgtacaaatagaatacatctaaggcaatgcagtaattacaacagtagtttaaatgggaggagatcagaaactattcagagatggaaaatactgttgaggttaatttgtaaaattttcataagactaaaatttcttaaagagatgggaaacaaagcatgataaatt

SEQ ID NO: 297926 - DNA, 565 bp, Homo sapiens
gttctctgaaccatcttgtcattgtgattttggagacactttgcttcttcagggaaatttacaaaaattgtcacatcctaattttcccaaacttgaatgttaggtaacatggcaaaaaagaattagggctgctgttggaatttagcttgcaaatcaactgaccataaaattgagagataatctttgttatccaggtgggcccaatgtaatcacaatgtttctcaaaaatggaagacagagctacagaaaagtcagagaaagagatgtgaagatggaagcagtttcagagagatgctatgttgttgactttggaggtggagggaaggggtcaaggccrgaatatgggctctagaagctgaaaaaaggtaaggaaacaggttatcttttagagcctctaggaagggatgcagcccagccaataccttgactttattcctgtgagattcatgtcaaacttctgaactacagaactgtaagatattaaatttgtattgtattaagccattgagtttgtgataatttttatggcaaccataggaaattatcacacttaattttcacttct

SEQ ID NO: 297927 - DNA, 528 bp, Homo sapiens
ttttggcagtatggccattttcacaatattgattctacccatccataagcataggatgtgtttccatttgcttgtrttgtctatgatttctttaagcagtgttttgtagttttccttgtagaggtctttcacttccttggttaggtatatacttaagttattttattttattcgcagctattgtacaagggggtgaattcttgatttggttctcagcttggttgctgtttgtgtgtagcagagctactgatttctgtacattaattttgtgtcttgaaactttgaattcatttaccagttctaggagcttttggatgagtctttgggttttttaagtatatgattatatcattggcaaacaggaacagtttgacttcctttttaccaatttggatggcctttatttctttctcttgtcttattgctctagctaggacctctaatactatattgaatagaagtggtaaaagtagggatccttgtcttgttccagttctcaaggggaattctttcaacatttccccattc

SEQ ID NO: 297928 - DNA, 528 bp, Homo sapiens
ttttggcagtatggccattttcacaatattgattctacccatccataagcataggatgtgtttccatttgcttgtattgtctatgatttctttaagcagtgttttgtagttttccttgtagaggtctttcacttccttggttaggtatatacytaagttattttattttattcgcagctattgtacaagggggtgaattcttgatttggttctcagcttggttgctgtttgtgtgtagcagagctactgatttctgtacattaattttgtgtcttgaaactttgaattcatttaccagttctaggagcttttggatgagtctttgggttttttaagtatatgattatatcattggcaaacaggaacagtttgacttcctttttaccaatttggatggcctttatttctttctcttgtcttattgctctagctaggacctctaatactatattgaatagaagtggtaaaagtagggatccttgtcttgttccagttctcaaggggaattctttcaacatttccccattc

SEQ ID NO: 297929 - DNA, 528 bp, Homo sapiens
ttttggcagtatggccattttcacaatattgattctacccatccataagcataggatgtgtttccatttgcttgtattgtctatgatttctttaagcagtgttttgtagttttccttgtagaggtctttcacttccttggttaggtatatacttaagttattttattttattcgcagctattgtacaagggggtgaattcttgatttgrttctcagcttggttgctgtttgtgtgtagcagagctactgatttctgtacattaattttgtgtcttgaaactttgaattcatttaccagttctaggagcttttggatgagtctttgggttttttaagtatatgattatatcattggcaaacaggaacagtttgacttcctttttaccaatttggatggcctttatttctttctcttgtcttattgctctagctaggacctctaatactatattgaatagaagtggtaaaagtagggatccttgtcttgttccagttctcaaggggaattctttcaacatttccccattc

SEQ ID NO: 297930 - DNA, 528 bp, Homo sapiens
ttttggcagtatggccattttcacaatattgattctacccatccataagcataggatgtgtttccatttgcttgtattgtctatgatttctttaagcagtgttttgtagttttccttgtagaggtctttcacttccttggttaggtatatacttaagttattttattttattcgcagctattgtacaagggggtgaattcttgatttggttctcagcttggttgctgtttgtgtgtagcagagctactgatttctgtacattaattttgtrtcttgaaactttgaattcatttaccagttctaggagcttttggatgagtctttgggttttttaagtatatgattatatcattggcaaacaggaacagtttgacttcctttttaccaatttggatggcctttatttctttctcttgtcttattgctctagctaggacctctaatactatattgaatagaagtggtaaaagtagggatccttgtcttgttccagttctcaaggggaattctttcaacatttccccattc

SEQ ID NO: 297931 - DNA, 570 bp, Homo sapiens
tgttggtgaaagaaggaatgaagcagaaaaatgatcactggattggaaacaaaactcctctgttttagcccttactctgcttctaactggacaggtgaccttgggagaaaaaatttaacttccatgggtcttatttttctcattgaaaaaacccagagcttaatacagtcgattctcattatttgcagtagtaatgttttataaagttgctggaaacaccaaattagccaaaccgttgtttctatggggaaatatggagttggattcctgtgagccactggtcacaacattttcatcaatggatcagtacataactttgttttatgtgtgtttctgtttaaagatgccttacttaatacacgttgttgattcattaacattgaattcatgggccaacagcagtagagctcattactgaatgaagcttatctractcacatttttgctccataaggcacatcacagccttcttgtgctcagaaactccagacagcccttcagcaccacacttagggcctgcttaaacagtgaagtcactaacaaaaagcacaaaaatgggaaaggtgtggt

SEQ ID NO: 297932 - DNA, 558 bp, Homo sapiens
  misc_feature (1)...(558): n = A,T,C or G
tatcttntgagatctaataatatttgctttacatgtaaatatatgtgcacacaaccatatatacatgtgctctggtgttgggtacatatatatttacaatttttatatcctctcactgaatgatccctttgtcattacataatgactttytttgtctcttcttacagcctttgacttaaaggtctttttaaaatatgtaagtataggtactcctgctcacgtttagtttctatttgtatggatatcatttttctattcctttattttaagtctttgggtctttacatgcaaagtaaatttcctgtaggcagcatatagttgggttgtatttttgtatccattctgccagcctatatcttttaactgggaaatttaattcatttacatttaaggttattatttgtaggtgagaacttactcctgtcattttgttaattggtttttgataagtttttgatatcctttgttcctttctttctctcattgcttatcattgcagtttggtagttttctgtagtgataatgtttgattcttttctcttacttctatgtgtattt

SEQ ID NO: 297933 - DNA, 395 bp, Homo sapiens
gtgttccaatgtgacagtaataagtggtgtggtcattaagagatgaataggccatgagggctcctccctcatgaatgggattagatgtccttataacagggattgacagagaaagtctgtccctttttccattctatcttctaccaggtgaggaaacaacactcttcccttcaagaggatacagtatcagtgcatcatattggaagcagagcagcctacmccacacactaaacatgccagcaccttgatcttgggctttccagcctccagaactgtgagaaaataaatttcttttctttataaattaagaagaatttataaagtctcaggtattctgttgtagcagcacaaatggccaagacactcagttataagatacctgcactacagatgaa

SEQ ID NO: 297934 - DNA, 396 bp, Homo sapiens
ctggttgcctcctgctgcctggaaaatctagcagtggagaaatcatgttgagggctcttaacttccctgcagaatctcttaaaagccygcaaaagaagctccttgctgccacaatgctggtcagggaggagggtatcacagagaaaacaagggctttgtaggcagctggatttctggtccaggtcctgatcccttgttccccataccatgtcctacctgtctgaccttggggatgttattaacctgtgaatcctgttgtgacatgttagatcatcagcatagtgcctgaggacagtaacctggagttatgcttactagactagacgctccgcactggcagggagcatggctcatgtgtttatgactacaaataaggttgccagattcagcaaataa

SEQ ID NO: 297935 - DNA, 536 bp, Homo sapiens
gctgctgtgacaagtacctaaacatgtggcagtggctttggattgggtaatggaataattttgagattcaagacagaaaaagcctaggttgctttaaagagactgctgsgagaaatacagacattaaagacaattccagtgcgagttcagaaagaaaactgtagaaagagctactatcatcttacagaagacacatgtgatatggtttggctgtgtccccacctaaatctcaccttaaattgtaataatctccatgtgtcaagggcagagccaggtggagataactgaatcatggggggcaatttcccccatactgttcccatggcagtgagtaagtctcatgagatctgatggttttataaatgggagttcccctgcacaagctctcttgcctgccaccatgtaagatgttcctttgtttctcctttgccttctgccatgattgtgaggcctctccagccatgctgaactggaggtccattaaacctctttccttgataagttacccagtctcaggtatgtctttattagcagcc

SEQ ID NO: 297936 - DNA, 569 bp, Homo sapiens
gccataccttttcttttatgtatcatctttgcactgaaactgcagagttggccagcaaagccaaaaatatttaccatttggctttttatagaaatatttgctgacccctgctccaggtagttggtggattgatttcggtcaggccagagtaagagaattatctgtgtttttcagttccagtttcttcaaacagatgaatgaaaaactatayatgcaaacaaaattgcaaatactaaattctaggaatcaattctgacttgaatttttaataaaagtgacagagactgggattgtcaatctgccttttcagctctgaacattgcagagaactgaagacctgttttcattcctggtaggctctgttatccctcttgtggcaggactcaggctgcaggggtatcgagaggccaccttgtcctgagttttgggcacttaagctatcaatcgttacctttggtctgaccctgggctgtgtcacgacccagtaggaatctggctgtagttcttggctcctctgtgctcagtttcctctaggcatgttgatactggcagatgctgtctgccctgtc

SEQ ID NO: 297937 - DNA, 1064 bp, Homo sapiens
caggggccctaaaacacatcttcacaaacttaaaagaatggaaatcatacggtgtctgctctcagaccacaatgaaattaaactggaaatcaataacaaaaaagatagctgaaaaaaatcccaaaatatttggagattagacaacatacttttaaaagaattctcaagataatttttttaaaaattaaaatgaaaacacagcctatcaaaaggtgtgggatgtagcaaaagcaaagcttacaaggaaatttatagcactgaacacatgtatcagaagagaaaagaagatctagaagcaatcatctaagcttctactttagaaaactagaaaaagaagagcatattaaatctaaagtaagcagaaaaaatgtatattttttattctgcaaagcagaaatcaatgaaattaaaaacagaaaatcagtagtatcaatgaaaccaaaaatttgttctttttaaaattatagtacaaagatccaaataaaaattaacaaagggaaggggtacatgagrcaaagtcccaaggaatccaggtgcaaccttccaagagttctwttagctccctttccttgttcccaagagaacaaaaactagagacttattttcttggtgcctcattttttcaagagagatgccaatgctgcattcacaatcacagcaccctctttgacagagggaattgcttgtgctacaccagaattttactgtaaaacttcggaaataggaaatcagaacactcttggaaaataataatagcttcagatggacaaaaaagaatgtctctatgttggctgaactaaaaccacaaaacatttttcatctgctgaaggataagtaatccccaaaagtcwaccacatcatcccctcccatgccccatcccaccaacccttgtctctcagtaaaactgaccacatgagccataaataacagattttacaaagcagtcatcacttccaataatgtttctcactctctcccgcccaatcactccttcctgttgaaccaatgaagccagaaaaaatcaaagaatgaggacattccttaatataatcacagtataggg

SEQ ID NO: 297938 - DNA, 1109 bp, Homo sapiens
gccatctcttctctggaaaccctcagcatcctaacaagtgtccagttggcactcagtgccctggatcccattctttttctggcaatcycacatggttgccagaaaaagccttttaagaacaattctgatggcagctccctgtttgaaacccaccagtgacttcccactaatcatgactatgacccataaggtcctttgatctggcccagtaccctcagatcctgacccccagccatctttctggccccagaccactaccaacttgtctctgtcatcctgctgttctcttgaccaaggatattcttgtcctagatccttgtatgtttgactgcccctcactggtcactctgcagctcaaatgactcctcctcaaggatgtcacccccaccccaccccctaacaaaggactgagcactttgtgctcaaagcagcactgagaatatggctagtgctcaaaatgcagttggacaaattaaaaaatatctattactcaccctactgggtgccaggcactgtgttcgtctgggaatataaggtttataagacacagctgtwgccatctcttctctggaaaccctcagcatcctaacaagtgtccagttggcactcagtgccctggatcccattctttttctggcaatcccacatggttgccagaaaaagccttttaagaacaattctgatggcagctccctgtttgaaacccaccagtgacttcccactaatcatgactatgacccawaaggtcctttgatctggcccagtaccctcagatcctgacccccagccatctttctggccccagaccactaccaacttgtctctgtcatcctgctgttctcttgaccaaggatattcttgtcctagatccttgtatgtttgactgcccctcactggtcactctgcagctcaaatgactcctcctcaaggatgtcacccccaccccaccccctaacaaaggactgagcactttgtgctcaaagcagcactgagaatatggctagtgctcaaaatgcagttggacaaattaaaaaatatctattactcaccctactgggtgccaggcactgtgttcgtctgggaatataaggtttataagacacagctgt

SEQ ID NO: 297939 - DNA, 554 bp, Homo sapiens
gccatctcttctctggaaaccctcagcatcctaacaagtgtccagttggcactcagtgccctggatcccattctttttctggcaatcccacatggttgccagaaaaagccttttaagaacaattctgatggcagctccctgtttgaaacccaccagtgacttcccactaatcatgactatgacccataaggtcctttgatctggcccagtaccctcagatcctgacccccagccatctttctggccccagaccactaccaacttgtctctgtcatcctgctgttctcttgaccaaggatattcttgtccyagatccttgtatgtttgactgcccctcactggtcactctgcagctcaaatgactcctcctcaaggatgtcacccccaccccaccccctaacaaaggactgagcactttgtgctcaaagcagcactgagaatatggctagtgctcaaaatgcagttggacaaattaaaaaatatctattactcaccctactgggtgccaggcactgtgttcgtctgggaatataaggtttataagacacagctgt

SEQ ID NO: 297940 - DNA, 554 bp, Homo sapiens
gccatctcttctctggaaaccctcagcatcctaacaagtgtccagttggcactcagtgccctggatcccattctttttctggcaatcccacatggttgccagaaaaagccttttaagaacaattctgatggcagctccctgtttgaaacccaccagtgacttcccactaatcatgactatgacccataaggtcctttgatctggcccagtaccctcagatcctgacccccagccatctttctggccccagaccactaccaacttgtctctgtcatcctgctgttctcttgaccaaggatattcttgtcctagatccttgtatgtttgactgcccctcaytggtcactctgcagctcaaatgactcctcctcaaggatgtcacccccaccccaccccctaacaaaggactgagcactttgtgctcaaagcagcactgagaatatggctagtgctcaaaatgcagttggacaaattaaaaaatatctattactcaccctactgggtgccaggcactgtgttcgtctgggaatataaggtttataagacacagctgt

SEQ ID NO: 297941 - DNA, 569 bp, Homo sapiens
tgagcactttgtgctcaaagcagcactgagaatatggctagtgctcaaaatgcagttggacaaattaaaaaatatctattactcaccctactgggtgccaggcactgtgttcrtctgggaatataaggtttataagacacagctgttgtcttcaaggacattagagtccaggatgggaaagaaaccagtaggcaactgcaacacaacatgataaaggctctaacaggagctaagcaaggaatcctacataccaccaagggagcaactagaccaggcttacggggtacaaggaggctcctcacgtatggtacaagaagccttctcatctacactgagacctgaaagacaagagccagcccagaaaacaaaggaagggccttccaggatgagggaactgcaagtacagtggcaaaagaaggcatgacatgttcaggcaatcatgagtggcttggcatatgaaggttatgtggaggggagcctgtgtcgggggcagggagctagtgagaaaggaggctggagagcaaaatattattgattattgatgttatctagatgttctcaaatgagca

SEQ ID NO: 297942 - DNA, 569 bp, Homo sapiens
tgagcactttgtgctcaaagcagcactgagaatatggctagtgctcaaaatgcagttggacaaattaaaaaatatctattactcaccctactgggtgccaggcactgtgttcgtctgggaatataaggtttataagacacagctgttgtcttcaaggacattagagtccaggatgggaaagaaaccagtaggcaactgcaacacaacatgataaaggctctaacaggagctaagcaaggaatcctacataccaccaagggagcaactagaccaggcttacggggtacaaggaggctcctcacgtatggtacaagaagccttctcatctacactgagacctgaaagacaagagccagcccagaaaacaaaggaagggccttccaggatgagggaactgcaagtacagtggcaaaagaaggcatgacatgttcaggcaatcatgagtggcttggcatatgaagrttatgtggaggggagcctgtgtcgggggcagggagctagtgagaaaggaggctggagagcaaaatattattgattattgatgttatctagatgttctcaaatgagca

SEQ ID NO: 297943 - DNA, 540 bp, Homo sapiens
gcgatattttttgaaatccaggtcaagaagaatgatgagccacaacacagcttttgtctggtcagaatgcctcttcgattacaaggaaataaaagatgattccttatgtctgcctctgctgtttgctgattaatattctggatgaggtagatattcacctttgaggaaatgtcttctgaaaacagaaagacacagatttgaatcttggctttttttctcactggtggtgagactgggyatatttcttacatgcctagtttgtatagttaggaagaggataccctccctacagggtgtcaggctcccacaggccagttgatctacatgaagtattaatatttggtatactgtttggtagagatgatgatcccagtttggggtaacctttattattattgtggttattattttgacccatacccttgaaatacaaagatgttgattatgtttataattgcatatttaacctctacctcctttgtagactgtggcctccagggaccacgtctgctttcagccctgtcagcagagcttaagcac

SEQ ID NO: 297944 - DNA, 517 bp, Homo sapiens
ctggaaagcagcttttgttgatgaatatttgccacatttttctttgatctggtagtgtggagtgatgggaagttgtaataaatttggaaaacagactatcaaaggtacaggttgaattgagtcaggtaggcggcttttctggtttcttcctctattgggttacagcatggtgtcctgtagtatcartgctattgcatctgtatttcctagtcaccctctacaatatccatgatgctctttcctggaagttttgctctgagatgaagcaagaggcacccgtggtcagatagatgctggggcagtgaatgtgtttgtggtgtgtgggaacatatctataattggcagcatttctataccaagggccttgtgtgcttcttactgtagaagacaaatctttccttgggtgaatatctttgtttgtttattgttttcttggatgtgcttgcaaaagaaatgttctagaatattttccctgaggaggaaagattctagaatatttttcctgagacttgtgaca

SEQ ID NO: 297945 - DNA, 584 bp, Homo sapiens
ctcttcttcttgaagcatctccagtaaaagtgcaacagggaagaaataattatttctttatatttgagaatataaagtgtctatcattgcttagtaaattataggagaatagcagaactgatctggacaacaagagagagggagaaaatctcttagaaatggagagaaatagggctggtgacccaagggcccaaggagactacaacagtcactcttggtcagaggataggtgatgaattttcagtaactattcgtgtcaagctttaagcttgaagtttccccccmacagccctgagctgtaattaccctctgtttactccagattttgtaaaggtcttttatacacacaaccttggattggtggtgcttgggaaaggaaacgggggaggctttgctcatgcttaaggagaaagggctggagacgagctctgagcacaaactcaaagcaagagggaacaggagcttgcatctttacctcttgggaacaactgtgggacaatgaggtgagtcattttagttgggtattgaagcagagggtgactgtcccagaaggctgaggaatgcaaataaacaaattgaaataa

SEQ ID NO: 297946 - DNA, 569 bp, Homo sapiens
tttaggtggtccaggccagcattccacagagtccaaargctcagccaagccaatttgcagggtctcatctatttcaatatttagtgccaggaaagctgacctgtaggtgccgcatcccaggggttctgttctgaactctcactgtcctgcgtggaagatcttctgtgcactggcctgaaattcccttgctgcgccattttatctttcttggttttagtatgtattgtatggtgctcaaaacggtgagattgaaatagatgtttgaggacactgagaatatgaaacatgccatcacaactggcagggaaatgttgcttatcctgagtctgcttgtgagctgtgagttagttgtgacacgagagaccccaagggtcattggttttaaaagcacaaaactgaaaaactacagaacaaaacaaacaagcagcttttcagatttcttcgaaagtatcaaggctgaaatagatcagtgtctggtcttgaacctgcaaaaaaagtaacggcctgtgtgattagggtccatgcctaccacagggctgtggcctgtgcccacagacccactcagctca

SEQ ID NO: 297947 - DNA, 550 bp, Homo sapiens
caaacaagcagcttttcagatttcttcgaaagtatcaaggctgaaatagatcagtgtctggtcttgaacctgcaaaaaaagtaacggcctgtgtgattagggtccatgcctaccacagggctgtggcctgtgcccacagacccactcagctcatgtaaagggatttttttggatatagtccttttcttctgggctccggagattgaaaataaagcttcatggtccatggaaagggattgggaaccaagttacattttgctcagtggaccatggcctctcattttgattctgtttcatgcatttatttyacagtttattactgcacttcggctatacacagatacttgccctcatgaagctcatggtttagtaggaaaaacagaaaataaataaataaataaataaaaattaaatggtgactcatgcaataaagacaacagagaacagtgatagtagtgtgcatgtatgcaaacgtgcatgtgtgtgcgtgcgtgcttgtatgtgtgtgtatgtgtgtgcatgtgtgtgtgcaagtgtgcatgtgtgcaag

SEQ ID NO: 297948 - DNA, 550 bp, Homo sapiens
caaacaagcagcttttcagatttcttcgaaagtatcaaggctgaaatagatcagtgtctggtcttgaacctgcaaaaaaagtaacggcctgtgtgattagggtccatgcctaccacagggctgtggcctgtgcccacagacccactcagctcatgtaaagggatttttttggatatagtccttttcttctgggctccggagattgaaaataaagcttcatggtccatggaaagggattgggaaccaagttacattttgctcagtggaccatggcctctcattttgattctgtttcatgcatttatttcacagtttattactgcacttcggctatacacagatacttgccctcatgaagctcatggtttagtaggaaaaacagaaaataaataaataaataaataaaaattaaatggtgactcatgcaataaagacaacagagaacagtgatagtagtgtgcatgtatgcaaacgtgcatgtgtgtgygtgcgtgcttgtatgtgtgtgtatgtgtgtgcatgtgtgtgtgcaagtgtgcatgtgtgcaag

SEQ ID NO: 297949 - DNA, 408 bp, Homo sapiens
atttaaaagtccaccgattttcacattgatgaaaagtcataattataaaaatggcttaaagcaccaaccttttactttgctgactctgtcctgtggaaagagatatcaactttatatattaaggctgccctctcaataaatagttgataatgtaaaaaacagattgtgcattccaagatgtgcgtgtttggtaagtgctccatgaggcgtccaaggtaaatgtcaattctgttccagcgttactggcagagacacacattacctgtatttccgttgtgtatttatcatcatgattctggaaaatgtaactggaacccttcattccygtgaacattggttccccgaatgcaggtctaaatagaatgaaaaacccagctcctatccaattctccctgaggaggatgaaat

SEQ ID NO: 297950 - DNA, 551 bp, Homo sapiens
tccaactttgtggaggtagtcagcccttccccatacagctttgtgatgcaggaaaagatggcaccatcctcagctccagggagggttccaatagattgaggccagtccttctggatcccaggtttaagcactgcacaagacaactgctaatggtgcccaggcaggaatgtaacctaaactggaccaatgggacccccaagtgacaggaggactttcatgctgtacttttctgtttccctctaggcatccataaggaagcccattgacctaattgctgccatcaacccagggacaaagccaatcgggtggacagcggagaggcaatatgggaaggaccttggtccttgaagatattgtgccactatatcaagcaaccgctgaagcctraattacctctggatgcctaataacgtggaacaataaatttccttattgtttaatttgagtcaggatttatgatacttgcttccaatagcatcccatagggcacgtccttgtgggtaagggttgttgttgcttttattccaagaagaacagtcttctgaaatttg

SEQ ID NO: 297951 - DNA, 481 bp, Homo sapiens
cagaagtccacatggtggtggtggtagggtgtggttctgggatgatttttcttttaaaaggccggaaacattgttcatttcaggcaagtctcaaagtagctctgtctctttaaatgagtaaattgtcaagttacatgaatttattcattcaagtttatctaaaagagttacctgaaaaccaaagaactggctcgagggctccacgaatctccacttcatgcttgtgatagaggatgccagagagagaaagaagagagatcaaatgctytgaaaaccaagagtcagaaatgattaaaaaaaaaaaacaacaacaggcatttatggctctttttgaagccaggacctgttgcagcaaaatatctctttatttgtattgatatcagtaagatgaaaaggcttctctaaccattctcatatgcacagttctttgttattttgttaagactaataaggaagtcatgtgatatttaagaactggcgc

SEQ ID NO: 297952 - DNA, 481 bp, Homo sapiens
cagaagtccacatggtggtggtggtagggtgtggttctgggatgatttttcttttaaaaggccggaaacattgttcatttcaggcaagtctcaaagtagctctgtctctttaaatgagtaaattgtcaagttacatgaatttattcattcaagtttatctaaaagagttacctgaaaaccaaagaactggctcgagggctccacgaatctccacttcatgcttgtgatagaggatgccagagagagaaagaagagagatcaaatgctctgaaaaccaagagtcagaaatgattaaaaaaaaaaaamaacaacaggcatttatggctctttttgaagccaggacctgttgcagcaaaatatctctttatttgtattgatatcagtaagatgaaaaggcttctctaaccattctcatatgcacagttctttgttattttgttaagactaataaggaagtcatgtgatatttaagaactggcgc

SEQ ID NO: 297953 - DNA, 557 bp, Homo sapiens
ccttgggggcattttgaacagctgggacttttttttttttttttgagacggagtcttgctttgttgcccaggctgaagtgcagtggcacaatctcggctcactgcaacctccacctcccaggttcaagtgactctcatgcctcagcctcccaggtagctgggattacaggggcctgccaccatgcctggctaatttttctatttttagtagagacagggtttcaccatgttggccaggctggtcttgaactcctgatctcaagtgatgtgcctgcctcagcctcccaaagtgctgggattacaggtgtgagccactatgcctgggctagttgggattttttctgtttgtcatgacttggggtcctactggcatttagaaataggggcagaacaggcccatrcaaggactttcaagtaccccactgaacattcaggtaagagaaaaaccccacttataagcatctgaatctagcattaaaagccattttgtacataaattaagaggagtttttgcatggctttaataaacaccatattttccaggaatgcaattacaa

SEQ ID NO: 297954 - DNA, 606 bp, Homo sapiens
gtttttcagaaagctgttctcattttgtacagaaaggctctgcttgagggctaggtgtatggcctttgctttcagattatataagatgtaaaaacacatgatctggatcacataggccaaagtatgatttttttaaagtgcttaccaaagacacgaagaaagagccttaaaaataaaaacctatctgatatatttgtgactacaccagaacacaattcattcattcactcttttgacaattacctcctaaatggtgggaactgtgtgtggtgttatgaaatatgaatatttataagtcacggtccctgctctcaaatgaaagggaaagacacaattrgccatgctaaatatcagaactaattaagtacaaataagaagctataggagcataaaggaataagtgatttatgaaacttcatgtgaattgagaaaaacttcagggaggaaatttttggatgctgaccttgaaggatagctagcaattattcttttatgatgttgatgatgatgactttcttttgttgccttatttaaaaagcaatatattcgtatcatagaaaatatacataagctccctacttaaatataactactattggtattccc

SEQ ID NO: 297955 - DNA, 458 bp, Homo sapiens
agggtctgctttcttaaaaattctccaagtcaaggacacacatgtggtccatgaggggacagggaaaaaaataagtgaagaaaaaaacataatatctcaataaattgtcttgttacattacattagggaaaggttttggaaaataaactaaacaaaggaaaagtccacttggagaatgggcgttttcctaccctgagtaagcactatcagctgtgaagggtatttttcaattatgaaggtcaataccaggtgggtgtgttctaaaaattgtacccgggattgttttaatcaggtattgtaagatacaagatgctgaaatgatcatcgtgagggaataatttatacttacagacctcgagaagcaggaggcaagtatgtcacgcaggcccacrtggagatacaccagggccagtcaggaaacagagagagggaaggggagaacatggcccagatccagt

SEQ ID NO: 297956 - DNA, 549 bp, Homo sapiens
aaccccaggttgtttgttctttcatttagttgccaggatttgtactaagagttggggaaataaagataatacgattattctttagaagttcataggggaaggctttcatgaataaataattatagcacaataaaggccttggaagaattactgtaagcctgggatattatgaacttacagataaagggcacctaaaacaccccaagggaagggtgagggaggaaagtcttcctagagagtgggaggggtggggatggcagcccctcttcctgctgacatgggagatagaatcaggcaagagttaacatggatctttccaattmtggtacagaatcccactcagctattgcagccccccagcagaggcagcaattaaacacagtgtggggaattgcaggcaaaaagcacagcgtgagtgatggtacagaggtgaggaaagcaggggcacacactgtgactgtaaactgcccatttggcttctgaaaggataacaggaaggaaggagggttggggcaggaaaaataagaaactcgactgcaaggtaaaaca

SEQ ID NO: 297957 - DNA, 549 bp, Homo sapiens
aaccccaggttgtttgttctttcatttagttgccaggatttgtactaagagttggggaaataaagataatacgattattctttagaagttcataggggaaggctttcatgaataaataattatagcacaataaaggccttggaagaattactgtaagcctgggatattatgaacttacagataaagggcacctaaaacaccccaagggaagggtgagggaggaaagtcttcctagagagtgggaggggtggggatggcagcccctcttcctgctgacatgggagatagaatcaggcaagagttaacatggatctttccaattctggtacagaatcccactcagctattgcagccccccagcagaggcagcaattaaacacagtgtggggaattgcaggcaaaaagcacagcgtgagtgatggtacagaggtgaggaaagcaggggcacayactgtgactgtaaactgcccatttggcttctgaaaggataacaggaaggaaggagggttggggcaggaaaaataagaaactcgactgcaaggtaaaaca

SEQ ID NO: 297958 - DNA, 609 bp, Homo sapiens
ctgagacagacagatgttcagtgtagtctagtgaaaagcttctggatggagtcacgccaagtgctgatatttacctccaggaagagattctggattgaaagggaaaatttacctcaatttctatctattttatttttttgaggcggagtctcactttgtcacccaggctggagtgcagtggcgcaatcatggctcactgcagccttggctcaagcaatccttctgtctcaccttcttgagtagctgggactacaggtgtgcaccagtatgctaggctaatgttttgacttttttatagagatgaggtctcactatgttgcttaggctggtgttgaactcctgagctcaagtgatcctcccaccttggccttcccagatgctgggattacaggcatgagccactatgtgcagcctcactttctrtcttattccttcatgtattgtaagacctttttttttcattgagtatttcttaatttgttaatatagaaatcaccatataggcagatataaaataaggaagtatgacatagatgtcgacaagctgtgggttgagtgctgcgggagccaggagaagatggcactttcctctgagaggaggaggtgaaa

SEQ ID NO: 297959 - DNA, 618 bp, Homo sapiens
acacttataaagtgctgttagagagtaaaagtaaacgtcctacaagtgtttggtaaattaaaaacaacaggtcagatatatcttcaagaccctcatgatatgcaaggaacctatgaaaaatgcaagttgcttcctccccctttactataaatgtaagcaaattyattgtgaaaaaaataaacacatgggatttgagttcagatggacctgacttgaccctcaactctgctgtttgctggccgtgtgaccttgggtagatcacttaacttcttcagtagcgtattttcttcacggataaaaatggagagaaaagagtggagtgctgctgaatagcgaataactggctctctgaaaagacaaaaacccttgtttgtaaagtttgctgatttctgtggtgtaaatgcatccactatagctaatttcaagctatctacatgatgtcagtaagcacaggcttgggaagaaatgcacacaaatctgctcttgtaagccagtcaaaaaattacagatgcttgtgaggtttcagagaaaaatgaatgcttatacactgttggtggaaatgtaaatcaggtcaaccattgcagaaaacatgtggtgattcctcaaaaaactaaaaac

SEQ ID NO: 297960 - DNA, 551 bp, Homo sapiens
ctcctgctcaagtcctttatgtaaaatagcatatttgcctgtaacctatgtactttagattacttataatacctaatacaatgtaaatgctacgtagttagtttatattttatttatttaatgtactttacaattcgtattatttgtacattttttggagaatatttttsatttggttgaatccgcagatgtggaactcgcacatatagagtgctataatcccactctagcaaagtgtcccaatgccccactgtaagccctgtcatattgggaggtcatcctttgtaacatgggaacgaagctgcacagcttctgagttcaacatttcctcgtggaacgattccagcccagcgctgggatgacatactgtttgctttgcgtctctggtatgtgcctggtgaaatatttaccaactggtccgctctgtccacagagcggccgtgagactgtctgtgtttgctccagtcagcttcctggctcagcctgtttccttggcaacggcctttcctgtcagcagccttgaaggaaggtataaaagagcacactgttag

SEQ ID NO: 297961 - DNA, 578 bp, Homo sapiens
  misc_feature (1)...(578): n = A,T,C or G
tactggttttcaactggtgagttacagaccactgtagatatgtggaatgatttgtaaggaatctagaattccagtgtgtgaatrtatttgataggttggatatatggtaggttatacactctaatacataaaccatacataggtagatacaaatgtttataaaatgcatgttgttgttttaatacagtggaaattcattntaaggtgtattagcctcatcatcattattctgcatatttttagttaactacgattaaacatacaactatcacagatggagtcaggttgagaaacactgtacagggatgacagattttctttttccttggtggatatcatttcaatgtcacctagaaaaagcaaacacatcaggctgcccaggtataacttgataaaaataaaagagaacagatctaattgtcatgtatcaccaactagagtggcactgcctcattttcttttctatttcttcttctgagatgactctaagatccagccagctcaaatatcacaatctagctagtcaaatgtggtagtagtcattatggattaaaatactcaaggactaagtagtccca

SEQ ID NO: 297962 - DNA, 569 bp, Homo sapiens
atttgcaaggtgtttggaaatccttctataccaatatcattgtaaatcttgcatagtgtatattactgaatccaaagaaaatgtgcaaaacccagccaggcactttaagaaacagattagttaagaatcttaactctttactcttattttagctaatatatctctggttattaaaatataaatcagtgttgccaacagacttaattaagatcacatttgatatgaaaaggaaaacacagcatgttttcatggccacaagcacacttcccatctttgtacattctcaacaatagttagagggtttccattcatcaaaaagtcttaacaatctgcactgggagccagttaacaatcaccagaccacccatgtttctcaacatgcatggaatctaaattattctartttttaacaaaatatttggtttaataatgacaatgatgaaaaataatatgatatgcagcaaaattaataatggcaacatttgttgggtacagccacatttataatgcctgtaacactagggactataaatatatcccatttaattttcgaaacaacactgtttagc

SEQ ID NO: 297963 - DNA, 539 bp, Homo sapiens
tttaactatatgtgataattttttcctttccattccttttccttttcctttcctttcctcycttctctttctctttagttattttaaacttgctaacaaaacctagttttcaaaaagaaataaaatatttttaggtgttactgtcctcattagctggtttctttaaacaaatacatttacttcaataaatatggaaaatgttaaattcgggggtgttaaattcagggatgaagtctgtcatggatagacaaaaactgaatccaattagtctctttcacaaaataactgacagagggaataggagaaatcaataattttagtaccttattgtgagcatttaagtcaacttcttgggagtttaggcaactgcaaagttggtttgtaaggcctccctcacttttaacaccaagtgcaagtttggggattcccaaagccattcttatgataaataatttgctagaaggactcatagaactcatagaaactattatacgtatggttacagtttattacagggaaaggatacagttcaatatcag

SEQ ID NO: 297964 - DNA, 524 bp, Homo sapiens
ttggtcaagaacctgttaagctaaccaatgcaattttcttcacgtacttaacaagaatctcagttctgtaagagatctaaaaggtatatgaagacatggcttctgtctccagtaaactttaaatatagccaaggagacagaaatcacacatgaggaataatcacagaattatgaataactaagttactaaggtaaaaaaacaaatccaattttytgtgcaatagcaggtctggaaagggagagaacaaaatagaatttcaaagactttcaaaaagaagagcaggatcgagtatggactataatctaaacaaatggtccctctcattagaagtatatagaaatgaatttcactgaagaaaaataccggtacatacacttaaacaaaactaataaattcccatgataaatggctttagaggtatataatgaagtagaaaaaaaaagagtttccattgataaagacacattattaacacactggcagtattcaggtttgctaaaaatgttccacattgaaaatgcta

SEQ ID NO: 297965 - DNA, 524 bp, Homo sapiens
ttggtcaagaacctgttaagctaaccaatgcaattttcttcacgtacttaacaagaatctcagttctgtaagagatctaaaaggtatatgaagacatggcttctgtctccagtaaactttaaatatagccaaggagacagaaatcacacatgaggaataatcacagaattatgaataactaagttactaaggtaaaaaaacaaatccaattttctgtgcaatagcaggtctggaaagggagagaacaaaatagaatttcaaagactttcaaaaagaagagcaggatcgagtatggactataatctaaacaaatggtccctctcattagaagtatatagaaatgaatttcactgaagaaaaataccrgtacatacacttaaacaaaactaataaattcccatgataaatggctttagaggtatataatgaagtagaaaaaaaaagagtttccattgataaagacacattattaacacactggcagtattcaggtttgctaaaaatgttccacattgaaaatgcta

SEQ ID NO: 297966 - DNA, 514 bp, Homo sapiens
atatatatatctctctccattttcttaccgagcataactcttttctccttaaatatagggcacattgtcctttcagtcattaagaaactaaaacttacagatgtgctcttggtgttttgcaagggcaattcaccaaaagtcttgaagaaataaagcagtgacctgtggtgaagtgtcagcttttaatacaagaccgagttgccataatagggaaatttatcttgctttaaattatagattatcatggattcattctcatcaaatgacataaaacactatccacaactctcctcataaaacattcccacaagctgtgggaaatacagctggaatgaaatcagttactagcttccttttattccatctctaaaactccatgaaaaggtcagatttttgacrtccatcctaatttaacacagtgcatgtgaagtgtgggaaaaaaaaaaaagcttcctttggaccttccaatctacaagatgagagggctcacaaattcaatgatggtattacagtt

SEQ ID NO: 297967 - DNA, 505 bp, Homo sapiens
ttaactctcagccatatgcttgggccaccccatgccttgacagagaatgaaaggccaatgcacactaagtattttaatagtatcattgtcatactacaaycaatcagaagctaaacacggatccacccctctaaaactacatcatagattaaaaagaaacttacagcagatgtcaaccctaccaggtgggcatcattttttaggtatctttccctgtggcttggggtgaatgcaaataacatgatgatcagaaatttgtctttgacataagttactatagctgactctacatctaaggctatgtttgcccaagaaaaatctctaaattatcttacttaagttgttttagataatcagattgcattggaccatctattggctgaaaaaggagaagtcagtgcaataactaacatatcctgttatatctgaataaatacctcttgtattgcagaaactcaattacaataagttaacaggccacatggctaaaacaagttgaatccct

SEQ ID NO: 297968 - DNA, 505 bp, Homo sapiens
ttaactctcagccatatgcttgggccaccccatgccttgacagagaatgaaaggccaatgcacactaagtattttaatagtatcattgtcatactacaaccaatcagaagctaaacacggatccacccctctaaaactacatcatagattaaaaagaaacttacagcagatgtcaaccytaccaggtgggcatcattttttaggtatctttccctgtggcttggggtgaatgcaaataacatgatgatcagaaatttgtctttgacataagttactatagctgactctacatctaaggctatgtttgcccaagaaaaatctctaaattatcttacttaagttgttttagataatcagattgcattggaccatctattggctgaaaaaggagaagtcagtgcaataactaacatatcctgttatatctgaataaatacctcttgtattgcagaaactcaattacaataagttaacaggccacatggctaaaacaagttgaatccct

SEQ ID NO: 297969 - DNA, 512 bp, Homo sapiens
  misc_feature (1)...(512): n = A,T,C or G
gagacttactctcagtgattgacaacaaaaccatgggtgtcttgtgcttcccctgtcttccattatagaccatcactcgctagtcagccaaatacagtgcatctcatcctttggacaaagctggctaaacactaacamatttttcacttcaatcactccccccaaaatattttttggtgaatcgttgactcagaggctgtaaaactgaaagagaccttggagattctctggtctaagcttntttaacagggatttttaaagtatgttccatagaacactcgggctttaagaaacgcagaagacaaatgtttcttcaacaaatatctttgggaaagatatatagctttatttttacctccgtagatgcatattaaagggttaggtaagtcctgcaaaaaggaaaccaaatgatatttttatcagagttttctaaacttatttggccagaganctcttatgttcagccgctaaccattagcagagtgacaggttttatgaagcaggcctggatg

SEQ ID NO: 297970 - DNA, 495 bp, Homo sapiens
actcgagcttacagaggacattggaaagagaaagggtttcaggactggaaattttggtgctagcattcctttgttagaacaaaattatcgcagaggatgggaaagaaggaaggaagatgctttcatcccagctgatccataaagtgcaatccagaaaagacggtgtttaattattattggctgtgaatggagagaaggtcaactcagcaagaatgactcaggcaaaaatgcaggaactctgtggtttgctcagaagtatctctcagagcagcccaacrggaagagagacccaaagcaaacccacctgttgggagagcagctgtctaagggcttccctgcctcaagggtatgactttacccatacagctgcaggaagctaggggaaggcaagagcagaagagacattaggaaggatatgtcctgcttcagaaagagcctgaagtacctgttgagtgattaccttatggcttaaaagggttaatgtacctcctatgc

SEQ ID NO: 297971 - DNA, 1087 bp, Homo sapiens
aagacggtgtttaattattattggctgtgaatggagagaaggtcaactcagcaagaatgactcaggcaaaaatgcaggaactctgtggtttgctcagaagtatctctcagagcagcccaacaggaagagagacccaaagcaaacccacctgttgggagagcagctgtctaagggcttccctgcctcaagggtatgactttacccatacagctgcaggaagctaggggaaggcaagagcagaagagacattaggaaggatatgtcctgcttcagaaagagcctgaagtacctgttgagtgattaccttatggcttaaaagggttaatgtacmtcctatgcatgattgacatctctaaatggtaaaaacttaggctaataaatctgaaccacttcacagtttctaattattacaatatttttgacaagtgatcttcattacaatgttccattccatagatttacataatctacggagatgtaacaagattgtccaaggtcacacaggaagtccgtgcctgcacattagttagctccatagatgtctgacatttgccaggaaaaacccaatagcttttcattaaatatagwttctctactatatgtgtatttttagtctcttattctccatccatttgtttaatttttttactctgagagatttattcaacctttatattggattatttttaaacaatcattttaaatgtctaaatgttctttcctgttttctaaaagattttgtattttctgatgaaattacataggtataatatctacagtatcttcttttatctctgaaagtacacatacacaaataccacctccccccaccacaaacacacttatttaggttttctatttttatcatttttttttcactgtttattttagtctttctctcatagtagaggcatttctcaaatgtaatccttgactgtccacttacatttgaaaatgaagtacacaaaaggctgatgggaagttgtgtgtgtgtgtgtgtgtgtgtgtgtgtgtgtgwgagagagagagagagagagagaagagagtcatctttgggtaaatgaacagggactagctattttttttt

SEQ ID NO: 297972 - DNA, 602 bp, Homo sapiens
atgtgactgattacttttcacgtactgacagctccctgtggtgtcttttatgtggatgggggagattatattaaagctctgtctttctgcgtagtggccacytgctcttaaaaaaggttgtagcaaacttccttggaaataatgttaggagtccaaagcatgatacagaaactgatgggactgatctgcatctagactgagcagtacagtgaatagcaatgaagacaggaggattgagccccaggcaagccactatatctgctcagttgttatatttatcaaggattacactaaaacctaattctgattatgagcaaagtgctgtatcctgaagtaaagatggtgagtaaacaagaacaagggataaccttctttttctgtgatgtgtatgcatttgatgagctttatgaatgtatttccctaattgatttcaaggaagaattttctagggttaatgtatgaaaagcaatttttacatgaagccttagtgtaaagtaaagtcaatgattagtagagatcctcaaagcaattgtactacatagaaatcaatataaatactgtattaaagcatttatttcacttgtgaatctgcatgtgtgtgg

SEQ ID NO: 297973 - DNA, 562 bp, Homo sapiens
gctatacgacaggattttgaatgcttctataattaagaaatgataaatgtttaaggtgatagatatgctagttaccatgattttaccattacacaatgtatatatgtatcaaaacacattgtgcctcataaatatgtacaattatgctgtgtcaaaattttayttttgttatttttctacatatattttactatgatgtaccgtgatgtttttctttgtagttttcctccttgcaatttgtagtgcattttgattttgtagttagatgtccttcagtttaaagaaattgtctcaccagtatctattcaaatattgcttttgtctcatttttattgtcctttctttctagtacttccatacacaggcttatgatacctattatctatacatcatttgcttcatgctattttctattatattttattattttttgttgtttgcttcagtagagatagcctactgacctttcaggttgtcaattccataataagttgtttataatatgccattaatcccatctattacatttgctattaaagttatttcctttttcatttcaact

SEQ ID NO: 297974 - DNA, 574 bp, Homo sapiens
tggtaagtgatgtaaatctgtagcattttatttttagaaattaatgtcaatctaatgcaacaaaaatatatatcctttgatatctatataaatctacaaaatctttaacaagaaagactgccagcttcttttaccaayaggaatgtacctacaaatcataggagtgtcctgcaaaattttaagcaggacttggtctccggctccaagagtaatcatttaaattcaattaaaaaaatcatagtacatgaaaatttcagaaagccattcgtgaataatacagccctggaatttgcatttgtcttcctccaactccccaagcagagagatggttaaaaatgaattttgtagttgaactctaggaatgtcagatctcagaaacaacagacaaagaaactctaattagctgtgatgaatgttgattataagcgtggatataacaatgattacaaaaggaaaaaaaaaatgatgcattggtcccgtgtatcaagtatagttgtgtaatcagagaaatttaatcacagcaggcaaatgtgatatatttgtatttatacaattttgtggattcactggcaga

SEQ ID NO: 297975 - DNA, 551 bp, Homo sapiens
acacgctggcaccacgcttcttgtatcgcctgcagagctgtgagccaaaataaacctcttctttataaattacccagcctcaggtattcctttacagcaacataaaatggactaatatgtctgctaatttttaaatgttggcataatttatacgaaycaaacaaagcattctttgggctgatttggcacacaggctgatagtttgcaaactgttctgtactacggctgctgtctgtattatcaagtccagagggtaaacttcagtgacaggctatggccagaaaggggcgacagagggtcacagaaccaaaccaggcctattagattcatactcccagctgccactgggaaaacctgtcctgggtatggggcgctcccaattaaatcaagccaaatcaataagttggaggttgctggatacgaggcaacaagtagagagaaattagggtgagggggagatgccaaggaaaccaggttgtttcagaggacactggtgagctaaggggcccaaagaaaactgttttttcaaagacgatcagatatcaaataat

SEQ ID NO: 297976 - DNA, 583 bp, Homo sapiens
aggtcatcttacttttaagtcagtttgctaacctgtataatgaaatagtagttctaaaaaaatcttctctcacagctgcaaatctctacaaattgtctaaattcccctctaaataggagaaaaagagcctmagttgcaacgtaaacaaaatttgtgctctgtgagggaaaagaaatgtgacttttataaaaagtcttatcactttaaaaaatgctgacatccctgaagatagattgctggggctctcttctctccttgcttctcctctttctccctccccacccttctcttttttcttgttaattttttattcttaacatggagaaaaaaacttgcctctcttaggcagtatttgcagtcatgatatttttatattgtagtatcatttaagttgggtcataacctactacggcttatgaagataatttagtgagctgtaccagtattttgaaaaatgaaatagacccgaatacaacagactgtaatagaaaatattggaacacattctatttaaaaaattagtcaaatttggaagaaagaagttaaaaagttgggcagtatatctttctatatcacccatggg

SEQ ID NO: 297977 - DNA, 583 bp, Homo sapiens
aggtcatcttacttttaagtcagtttgctaacctgtataatgaaatagtagttctaaaaaaatcttctctcacagctgcaaatctctacaaattgtctaaattcccctctaaataggagaaaaagagcctcagttgcaacgtaaacaaaatttgtgctctgtgagggaaaagaaatrtgacttttataaaaagtcttatcactttaaaaaatgctgacatccctgaagatagattgctggggctctcttctctccttgcttctcctctttctccctccccacccttctcttttttcttgttaattttttattcttaacatggagaaaaaaacttgcctctcttaggcagtatttgcagtcatgatatttttatattgtagtatcatttaagttgggtcataacctactacggcttatgaagataatttagtgagctgtaccagtattttgaaaaatgaaatagacccgaatacaacagactgtaatagaaaatattggaacacattctatttaaaaaattagtcaaatttggaagaaagaagttaaaaagttgggcagtatatctttctatatcacccatggg

SEQ ID NO: 297978 - DNA, 623 bp, Homo sapiens
gttactgagggctcactcttgggtagtagtggagtaccggtagtacggaatttgaaactaatctgtaaactggaaaaaaatcttggactttgtggccaacaaggcctcctaggggttcatactgatagaagtcactctctgaatggtggataaaaacatacatgttcagcaaaaagcacttaatgaaacatcatgcagttttagatttccttttttgtcatgctgggggcttgtgtaaggtattgaacaaaactgaatgctgtatctatatttccccttattttgctactacagaaagcataatttaaaagttggctgaaacctctgttttttaaaaccctgacatcaaataatcaaggaaatttctcaagagataagaacacacaatgtgtttataggaaccactaatagttggtttgtagacatcctaagtggtgagtggcaagcttggcttttccaaggttttctaatstttatatcttctagtgggtctccaggtgactataacttaaaataactggttaatgacaaaactgtattcctcttaaatcagaccattccacagtggactgtggtctttaatcaccatcacatcctgaacaccgactatgatcaattggact

SEQ ID NO: 297979 - DNA, 629 bp, Homo sapiens
tactaatctatacatcactgcttgagctgggaagaaatggtccagtttctaagcatgaagatatgtttttaaaatattatttccaacatcttttatatttaaaattagatacaatgaattcatttctagcaattttatatagagggtgaggcagcccaaaaagcctgtgaagtctctggtttggggaattttgtccaaccccctgcaactcagtcacagttaggatcacagaaaagtagagtcttctgaagaatattctcgtccatcttatttatcactacaggcaatctctctattgaacttagatgagtaaagttttaattgcttgatctttccttcagtaactattgttgagcctttatttgtgggttatattcaatttcttatagatttttttcttgcctataatctraaaataaatacatacatataaaacctaagacttctctttatcgttgtttgtttccctttcttattaactggggagcctgtatttccttttgccttgctcttgtttcaaatgtgttttaaaaggttttctccttctccttggtgacctgctctaattggaactcattttgtgtcttggccttctgactgccctgcaggcttctgctgttctcttcctc

SEQ ID NO: 297980 - DNA, 578 bp, Homo sapiens
gcttatatatattcaaagactaaaatctctatcccaaactgatcttcttcaagaaagactctccaagagattagaaaggcaaaaaaaaaaaaaaaaaaaaaaaaaaaaaaacttattttggcaaatataggaggctatattggaaaaagtacttcaaaaagcatttcatttgagccaaaagagcctataactgttgaacacacatcataactgaacatgataatagycacagctaaaactattaaatatatcacgagtagctatggcttatggataaattcctaccaaaggaatacctaaagacactacataaacgtattggatgagtcaaaatgtagctttttctactcagtgtatactaacgtatatgattcttgccatatttgaaatttatattataagcacaaaatttaatttggttgtaaattattgttcagaaaaacatgtttaaaaaacttgaaataaaaaattactccttagatggataaaatccaattataatgaaaatgaagaaagagtgaattacataaatttaatttgctaatactttaaatgtacaggtagattatcttaagtat

SEQ ID NO: 297981 - DNA, 1170 bp, Homo sapiens
cttaagtttttaaactgcatatttgatttaacaagttttttttgtttgaaacgggagtttccctcttgttgcccaggccagagtgcaatggcacgatctcagctcactgcaacctccgcctcccgggttcaagtgattctcctgcctcagcctcccgagtagctgggattataggaatgtgccaccatgcctggctaattttgtagttttagtaagacggggtttctccatgttggtcaggctggtcttgaactcccgacttcaggtgatccgcccgccttggcctcccaaagtattgggattacaggcatgagtcaccrcgcccagccagatttaacaaattccaaaattaatccataacttagccctcttcttgatcattataggtactttaggataaattctaccacttatattttaactaatatttaacaactccttatattattcgttacagtgaatttttactagaatttcttgtatacaattttaaatatttcttcattcaccattgctttttgtaccatactccctcactccgggttttgtctgaaaatgaatttatattaccctcaatcttgagtaaggctgwgcttatatatattcaaagactaaaatctctatcccaaactgatcttcttcaagaaagactctccaagagattagaaaggcaaaaaaaaaaaaaaaaaaaaaaaaaaaaaaacttatwttggcaaatataggaggctatattggaaaaagtacttcaaaaagcatttcatttgagccaaaagagcctataactgttgaacacacatcataactgaacatgataatagccacagctaaaactattaaatatatcacgagtagctatggcttatggataaattcctaccaaaggaatacctaaagacactacataaacgtattggatgagtcaaaatgtagctttttctactcagtgtatactaacgtatatgattcttgccatatttgaaatttatattataagcacaaaatttaatttggttgtaaattattgttcagaaaaacatgtttaaaaaacttgaaataaaaaattactccttagatggataaaatccaattataatgaaaatgaagaaagagtgaattacataaatttaatttgctaatactttaaatgtacaggtagattatcttaagtat

SEQ ID NO: 297982 - DNA, 622 bp, Homo sapiens
gggctacaggtggtcactgtttgctatctgaaatatcattttgtttatcttttataaagccacattgcaattacattagarattaatgtcaaatgaattggtaatcaattcttgagtgcctcctcatctggggaggcggtggagtactgggggaagtaccctgaagtcattaaaggtggaaaattctcccctttgtggttttcctcactttgtggtgtcagtgtctgtgtgcttgcttgcttctcgaactgatccccaaggcagaggccatgccatatttgtctttaaatacttagtagctaacccactgttaacacatagcaagagctaaatgaatgtttattgaataaaggaatgaatgaaccagagttgctactgtcaaatattcatattttttctagctttttcataaaatagataagtgtttaaaatattcatgaatagattccccccatgggttccttatttccttaaagtatgattccatgaatttgatttttgaattaaggaatatatattttatctttttaatgtatttaatattgcttttaaagctgattttaaagtcaatttataattggaacatcatcaataatgggacaacgattattataatacatag

SEQ ID NO: 297983 - DNA, 972 bp, Homo sapiens
tttgctttctgtgatttcagtgacacatggtcagctgtggtctgaagacattaaatggagaatccaagaaataaacaattcataagttttaaattgagtactgttttgagtagtgtgatgaaatcttgtgcctgcytgctccgtcctgcctgggaaataaatcctccctttgtccagcaagatccatgctgcatatgctatccactcattagttacttagtagctgtttcggttatcagatctaaaaaacacaggatgtataaggttcagtaccacccgcagtttcagacatccacctgcggttttggaacgtatcccccatggataagggtgaaaatactgtacagctaaaatcctcaacagagagaagctggcacccggaggagtgttttctaaaatttccacttgagggcgctgtcgtcttctgtcagggtagaaccgacgtatttttttcccgttaggttagttactgcatgtgaaaaacttcactgacacwacaggaaccataatcaatagaaaaagcactaaatagatactctgaaataacctatgtgttgaaattagcaaacgattttaaagttgttattacaagtatgtttgaggatttaaaaaaaaaggattacaaagtgagagaatagaagggtaagaagataaaaattttaagttattaaaaatatgcctaaaattttaagaaaagatggacacaatgagtgaatagatcagtagaccagaaattgaaagaataaaactaaaaataatggccaggcacaatggctcatgcctacaatcccagaactttgggaggcctaccgctttgggaggctaaagcaagaggaccatttgaggccaggagtttgagaccagcctgggcaacataatgagacattgtctctatttttttttttwaaaaaaaggctgggtgtggtggttcgcatttgtaattctggcacttcgggaggctgaggtgggcag

SEQ ID NO: 297984 - DNA, 556 bp, Homo sapiens
cggtttagcatcatctcccagtgctgttcttgtgatagagttctcatgagatctggttgtttaaaactatrtaacacctacttgctctctctcttcctcctgctccagccatgtaagacatgcctgtttttccttcaccttccgccatgattgaaagtttcctgaggcttccccggaagcccctatgcttcctgtacagcctgcagaaccatgagccaattaaacctcttttctttataaagtacccagtctcaggtgtttatagcaatgggagaatggactaacacagtgatactaacaaggaggtaggctggctgtgcctcagagtcaggagaaatgggatgcaattgtgcatggacttgagaaaagcatttgataaaaacacaattcttagcatagcacagagatgtacaatgtgtattaattaacattttaggagttgtggatattaactttcattgatatatagtgtatgtttcataatactaatgcagtctgttaaaaatgaggtttcaacaacggtttcaggttttcaggaaagaaaggaattatggaa

SEQ ID NO: 297985 - DNA, 556 bp, Homo sapiens
cggtttagcatcatctcccagtgctgttcttgtgatagagttctcatgagatctggttgtttaaaactatgtaacacctacttgctctctctcttcctcctgctccagccatgtaagacatgcytgtttttccttcaccttccgccatgattgaaagtttcctgaggcttccccggaagcccctatgcttcctgtacagcctgcagaaccatgagccaattaaacctcttttctttataaagtacccagtctcaggtgtttatagcaatgggagaatggactaacacagtgatactaacaaggaggtaggctggctgtgcctcagagtcaggagaaatgggatgcaattgtgcatggacttgagaaaagcatttgataaaaacacaattcttagcatagcacagagatgtacaatgtgtattaattaacattttaggagttgtggatattaactttcattgatatatagtgtatgtttcataatactaatgcagtctgttaaaaatgaggtttcaacaacggtttcaggttttcaggaaagaaaggaattatggaa

SEQ ID NO: 297986 - DNA, 556 bp, Homo sapiens
cggtttagcatcatctcccagtgctgttcttgtgatagagttctcatgagatctggttgtttaaaactatgtaacacctacttgctctctctcttcctcctgctccagccatgtaagacatgcctgtttttccttcaccttccgccatgattgaaagtttcctgaggcttccccggaagcccctatgcttcctgtacagcctgcagaaccatgagccaattaaacctcttttctttataaagtacccagtctcaggtgtttatagcaatgggagaatggactaacacagtgatactaacaaggaggtaggctggctgtgcctcagagtcaggagaaatgggatgcaattgtgcatggacttgagaaaagcatttgataaaaacacaattcttagcatagcacagagatgtacaatgtgtattaattaacattttaggagttgtggatattaactttcattgatatatagtrtatgtttcataatactaatgcagtctgttaaaaatgaggtttcaacaacggtttcaggttttcaggaaagaaaggaattatggaa

SEQ ID NO: 297987 - DNA, 398 bp, Homo sapiens
ataaggttgttaataacaacaataagagtaaaatttaagaggaattgataacaagcattctaataactctgaaaagatattgtgaatgtcactcatycctgcactcttaatttcctaggcaattgtctctttacttgctatagttttctttgtataaataacatagcgctagtataatttggtttactgataggattaaaatgtaaagatatgtttaaattgaactagcaagaagacacaatatagtttttaggctagtcattcaactgctgaattacagaattgaaattttgatgagtctctgttatcgttaaactgccatcaattggtgtgttggcagtggtggcagtatttgcgggaaaaaaggcagaaatataatacaaacaccaacagcaaag

SEQ ID NO: 297988 - DNA, 398 bp, Homo sapiens
ataaggttgttaataacaacaataagagtaaaatttaagaggaattgataacaagcattctaataactctgaaaagatattgtgaatgtcactcatccctgcactcttaatttcctaggcaattgtctctttacttgctatagttttctttgtataaataacatagcrctagtataatttggtttactgataggattaaaatgtaaagatatgtttaaattgaactagcaagaagacacaatatagtttttaggctagtcattcaactgctgaattacagaattgaaattttgatgagtctctgttatcgttaaactgccatcaattggtgtgttggcagtggtggcagtatttgcgggaaaaaaggcagaaatataatacaaacaccaacagcaaag

SEQ ID NO: 297989 - DNA, 649 bp, Homo sapiens
ctgtgactccattcttagcctgtggacttaaagctaggaggagcccaaagtatccaggtaccaatcttaacttccaatttaatggaatcmttgttgtgtttcctggtagcagggttcctccctctggaactaataactctaggccagcagaacataatgttgagggagcaggaaacaaaaattttgctagtggatcactagggatattggtgagtggtgacacttccacttccaccccttgattcctggacccgtgaatcctggctatgggagaaacagtaccatatattggctgctgattcagcccatacatggccttctttgccctagtcctgcaaagtattgtcacctagttggcattgtagtcgtgacttcaaaaggcctttccaccattctatcaatccagctgcttcacgattatggcgaacatggtaagaccagtgaattctctgagtctgagcccactgccacacttctttagccataaagtgagtgccttggtcagagacaatgttgtttggaataccatgagagtggataaggcattccatgagttgatggatggtagtcttagtagaagctttgcgtgcagaatagaaaaccccatatatggaataagtgtctattccagtgacgacaaacctctgcc

SEQ ID NO: 297990 - DNA, 541 bp, Homo sapiens
attgtcacctagttggcattgtagtcgtgacttcaaaaggcctttccaccattctatcaatccagctgcttcacgattatggcgaacatggtaagaccagtgaattctctgagtctgagcccactgccacacttctttagccataaagtgagtgccttggtcagagacaatgttgtttggaataccatsagagtggataaggcattccatgagttgatggatggtagtcttagtagaagctttgcgtgcagaatagaaaaccccatatatggaataagtgtctattccagtgacgacaaacctctgccctttccatgatggaagaggtccaatataatcaacctgccaccaggtagctggctgatccccctgaggaagggtgccatatggagtgctcagtattggtctctgctgctggcaaattgggcactcagcagtggacatagccaggtcatctttgctgagtggaggtccttgttactgagtccatgcagagcctccatccctgccaccgtagacactttgttcatgggcccattgg

SEQ ID NO: 297991 - DNA, 649 bp, Homo sapiens
ctgtgactccattcttagcctgtggacttaaagctaggaggagcccaaagtatccaggtaccaatcttaacttccaatttaatggaatcattgttgtgtttcctggtagcagggttcctccctctggaactaataactctaggccagcagaacataatgttgagggagcaggaaacaaaaattttgctagtggatcactagggatattggtgagtggtgacacttccacttccaccccttgattcctggacccgtgaatcctggctatgggagaaacagtaccatatattggctgctgattcagcccatacatggccttctttgccctagtcctgcaaagtattgtcacctagttggcattgtagtcgtgacttcaaaaggcctttccaccattctatcaatccagctgcttcacgattatggcgaacatggtaagaccagtgaattctctgagtctgagcccactgccacacttctttagccataaagtgagtgccttggtcagagacaatgttgtttggaataccatgagagtggataaggcattccatgagttratggatggtagtcttagtagaagctttgcgtgcagaatagaaaaccccatatatggaataagtgtctattccagtgacgacaaacctctgcc

SEQ ID NO: 297992 - DNA, 592 bp, Homo sapiens
gtctgagcccactgccacacttctttagccataaagtgagtgccttggtcagagacaatgttgtttggaataccatgagagtggataaggcattccatgagttgatggatggtagtcttagtagaagctttgcgtgcagaatagaaaaccccatatatggaataagtgtctattccagtgacgacaaacctctgccctttccatgatggaagaggtccaatataatcaacctgccaccaggtagctggctgatccccctgaggaaggstgccatatggagtgctcagtattggtctctgctgctggcaaattgggcactcagcagtggacatagccaggtcatctttgctgagtggaggtccttgttactgagtccatgcagagcctccatccctgccaccgtagacactttgttcatgggcccattgggtgatgtcagggagtggctggggaaagaggctgaacactgtccacagaaccagtcatcccacccacttgatgactcaaattctcttctgctggggtcaccctttggtgagcactcacatgggacacaaatgtcttgacagtttttgaccactcacagagttcc

SEQ ID NO: 297993 - DNA, 592 bp, Homo sapiens
gtctgagcccactgccacacttctttagccataaagtgagtgccttggtcagagacaatgttgtttggaataccatgagagtggataaggcattccatgagttgatggatggtagtcttagtagaagctttgcgtgcagaatagaaaaccccatatatggaataagtgtctattccagtgacgacaaacctctgccctttccatgatggaagaggtccaatataatcaacctgccaccaggtagctggctgatccccctgaggaagggtgccatatggagtgctcagtattggtctctgctgctggcaaattgggcactcagcagtggacatagccaggtcatctttgctgagtggaggtccttgttactgagtccatgcagagcctccatccctgccaccgtagacactttgttcatgggcccattgggtgatgtcagggagtggctggggaaagaggctgaacactgtccacagaaccagtcatcccacccacttgatgactcaaattctcttctgctggggtcaccctttggtgagcactcacrtgggacacaaatgtcttgacagtttttgaccactcacagagttcc

SEQ ID NO: 297994 - DNA, 615 bp, Homo sapiens
agtacacaggccaagctgcacctccctttctgcagcctgtgccttcacagtgtggccacttcagatgggccactgctgccatcaataattgtaaacttatattatcatgtcttgctttcattctgaggttccccattggattagatggtagaacagcaccatgaagaagggtattcttttttcaatcttctttgttaagatctctctctatatatatattcaagatcactttgaattaaaatttctaagctatgaagtattccacattttatatgaaatgcaatttttgattacttttgctcctgagagaaaacttttccatgcagatcccagagattaataaatactttaaattttctatttaaaatgatacagaacattttgcttaacatttcatactgaggctctctcaagttttcaattataagtagaatctcagttctaaatttctgcctcacaagaacctcaatrtttaatctactgccctcacatacttgttaatatttcttaagttatatattcctggatggtaaccatcatcatagaaacctgcaactcaagcctgtttcttatcatatttatatatatacaatgacatgtacatggatatgtaca

SEQ ID NO: 297995 - DNA, 559 bp, Homo sapiens
ctcatgtatagttttatgtaaatgccaagaatactttttgtcatgagaatcatttgtccagtgatattaaaacatatgttttacttttattttaaaagcgcgtgttgagctccctcaattgaagaaatgtctattcaaggcctctgcctagtttttaaattgggctcttacattgcaattgagttgtaggagtaatgtatatatatctttattgaacccttaaaagatccatagtgaggcctggtgcagtggctyacgcctgtaatcccagcactttgggaggccgaggcgggtgaatcacaaggtcaggatattgagaccatcccggctaacacggtgaaacctcatttctacaaaaaaaaaaaaaaaagagagagagaaattagccgggcgaggtggtgggcggctgtagttccagctactcggaaggctgacgcaggagaacggcgggaagccaggaggcggggcttgcagtgagccaagatcgcgccactacactccagtctgggcgacagagtgagactccgtctcaaaaaaaataaataaaaataaataattt

SEQ ID NO: 297996 - DNA, 551 bp, Homo sapiens
gcactgcctagtgaagctgtgagaataaggccacgattatctagatctcagaacggtagatccaacaacagctttcaccctacacttggaaaagccataggcactcaatacragcatgtgagagaagcctcagagactgaacgctgcaaactcacagggatggatctgcccaggcattgggagcccaaccctcacaccagtgtgccctgggtttggaacatggagtcacatgaggttattttggagctcttttaataacagctctgctgggttttgaacttgcgtagggcctgttgcccctttcttttggctcatttctctcttttttaatgagaatatttacccaatggtggtaccctcattgtatgttgaaagtaaataacttgttttgattgtataggctcataggcagaaggaattcatctccagatgtgatttgggatttgggactttgagctaatgctgaaatgagttaagtcttcgggggactattgagaaggcatgattgcatcttgcaatgtgagaaggacatgagattttgggggccagag

SEQ ID NO: 297997 - DNA, 505 bp, Homo sapiens
ttgatccttcataaagacattttttgctattcatttaacagttagtagatgttactcaaaattcaatttcatgcttaaacaatagacacaaatctacgttcgtaaagagaaaacctgtctttagacaaagcatttgaacactaggaaaaaagagcaaatgacacaacttycaggtaattctcctttttacttgtcttcctgtaaaaccagtcctaattatattttaagaatgcagatcacaaacacttccttgatgtgtgtgagtctgtgagtgtgtgtgtgtgtaagagagaaaggcgttatgttctctttgtttctcaatccacagacttatacatagaaatttatagatatgaatgtgatgctcattagatagaataaaattattataagaaatataagtaaatataactggaggaagaagcctgactctattgctctccatctaaattttgtacctaagccaaagatggtttagctttcatagtttgcagcaaatactaag

SEQ ID NO: 297998 - DNA, 505 bp, Homo sapiens
ttgatccttcataaagacattttttgctattcatttaacagttagtagatgttactcaaaattcaatttcatgcttaaacaatagacacaaatctacgttcgtaaagagaaaacctgtctttagacaaagcatttgaacactaggaaaaaagagcaaatgacacaacttccaggtaattctcctttttacttgtcttcctgtaaaaccagtcctaattatattttaagaatgcagatcacaaacacttccttgatgtgtgtgagtctgtgagtgtgtgtgtgtgtaagagagaaaggcgttatgttctctttgtttctcaatccacagactyatacatagaaatttatagatatgaatgtgatgctcattagatagaataaaattattataagaaatataagtaaatataactggaggaagaagcctgactctattgctctccatctaaattttgtacctaagccaaagatggtttagctttcatagtttgcagcaaatactaag

SEQ ID NO: 297999 - DNA, 592 bp, Homo sapiens
gattacgtatgcatttgattatatgagagttagattgaattatctttgttttggctatgttatttttgttatkcatacactttctagattatttttaaatacctctcaagtggcttgaggctcttttctaagtatttttgtgttttactctccatttatttaattatctgttatcttgtgatatactataaattcatgaacatatctgggattaatatacattaaatataagcatatttatgtatacatgtaccaatgttttatccaaatcctaactagtaatattttcatcttaatatacaataggaattaattttctagattttgcttttctgtataaaaatggcaccttttgataaactttgataaacagattggtgagatgcctgtgcatttcctattcaatatcttaatggaaatagtcaggctagcttcttaggtgtccatttgataagacagtagtctgtattttggggtgacatgaataatagtcttattaagctcctaaattaagatatagtaacaaacataagctacagcttattgccttgactaagtttggtgaaaaattatatagtaaatatatttttac

SEQ ID NO: 298000 - DNA, 592 bp, Homo sapiens
gattacgtatgcatttgattatatgagagttagattgaattatctttgttttggctatgttatttttgttattcatacactttctagattatttttaaatacctctcaagtggcttgaggctcttttctaagtatttttgtgttttactctccatttatttaattatctgttatcttgtgatatactataaattcatgaacatatctgggattaatatacattaaatataagcatatttatgtatacatgtaccaatgttttatccaaatcctaactagtaatattttcatcttaatatacaataggaattaattttctagattttgcttttctrtataaaaatggcaccttttgataaactttgataaacagattggtgagatgcctgtgcatttcctattcaatatcttaatggaaatagtcaggctagcttcttaggtgtccatttgataagacagtagtctgtattttggggtgacatgaataatagtcttattaagctcctaaattaagatatagtaacaaacataagctacagcttattgccttgactaagtttggtgaaaaattatatagtaaatatatttttac

SEQ ID NO: 298001 - DNA, 592 bp, Homo sapiens
gattacgtatgcatttgattatatgagagttagattgaattatctttgttttggctatgttatttttgttattcatacactttctagattatttttaaatacctctcaagtggcttgaggctcttttctaagtatttttgtgttttactctccatttatttaattatctgttatcttgtgatatactataaattcatgaacatatctgggattaatatacattaaatataagcatatttatgtatacatgtaccaatgttttatccaaatcctaactagtaatattttcatcttaatatacaataggaattaattttctagattttgcttttctgtataaaaatggcaccttttgataaaytttgataaacagattggtgagatgcctgtgcatttcctattcaatatcttaatggaaatagtcaggctagcttcttaggtgtccatttgataagacagtagtctgtattttggggtgacatgaataatagtcttattaagctcctaaattaagatatagtaacaaacataagctacagcttattgccttgactaagtttggtgaaaaattatatagtaaatatatttttac

SEQ ID NO: 298002 - DNA, 592 bp, Homo sapiens
gattacgtatgcatttgattatatgagagttagattgaattatctttgttttggctatgttatttttgttattcatacactttctagattatttttaaatacctctcaagtggcttgaggctcttttctaagtatttttgtgttttactctccatttatttaattatctgttatcttgtgatatactataaattcatgaacatatctgggattaatatacattaaatataagcatatttatgtatacatgtaccaatgttttatccaaatcctaactagtaatattttcatcttaatatacaataggaattaattttctagattttgcttttctgtataaaaatggcaccttttgataaactttgataaacagattggtgagatgcctgtgcatttcctattcaatatcttaatggaaatagtcaggctagcttcttaggtktccatttgataagacagtagtctgtattttggggtgacatgaataatagtcttattaagctcctaaattaagatatagtaacaaacataagctacagcttattgccttgactaagtttggtgaaaaattatatagtaaatatatttttac

SEQ ID NO: 298003 - DNA, 557 bp, Homo sapiens
taatattttcatcttaatatacaataggaattaattttctagattttgcttttctgtataaaaatggcaccttttgataaactttgataaacagattggtgagatgcctgtgcatttcctattcaatatcttaatggaaatagtcaggctagcttcttaggtgtccatttgataagacagtagtctgtattttggggtgacatgaataatagtcttattaagctcctaaattaagatatagtaacaaacataagctacagcttattgccttgactaagtttggtgaaaaattatatagtaaatatatttttacctgaatttaatgctccactttaaaaaagaaacacatatacaactttttaaaaatctattttattgcttaagccatgatttaaaagaaacacacacacacacacacacacacacacayacatatatatatatcactttttaaaaatatctttttattgcttaagccatgattcttcaataacaagtcaaacttcatttctcttgagtctgaaaacaagccaagatttattggaaggtgaagagaa

SEQ ID NO: 298004 - DNA, 491 bp, Homo sapiens
tgatttaaaagaaacacacacacacacacacacacacacacacacatatatatatatcactttttaaaaatatctttttattgcttaagccatgattcttcaataacaagtcaaacttcatttctcttgagtctgaaaacaagccaagatttattggaaggtgaagagaaggaaattgcatcagtgatgactggttttggaatgatgttaatttaaatataaaatttaaggaaagaagccattatcagattagagtttcatatctcagagaartgttgctctaaacaccttttaataactctccctaaagaaaataacataaataagttcatattaacagctaaagtgtttcaaaatgggaagaagctctttgagtcataattccaatttcaagaattaattcgcccctcttctagtcctgaaacacattaatgtgcttgtttatggattttaaaaatgtagaaggaaaattatagaaaaaaaagtatgcc

SEQ ID NO: 298005 - DNA, 585 bp, Homo sapiens
actttgtgttaaaaccattattgatggtagtccaagcaaggtagcaattgccaaggaataagctgaagtactagatgttgcttttaaaacatagaggaaagaaagaatgaatgaaaaaaagaaaacagattcaggcgcttggcttatttcttatatgactactgccaaatgcagccaacgcatggccatgggagttggcgctgcaggagaggcagacattccacatggaggaagttggaaggactgaaaagtcaacgctaaaactgaaggcaaagattgccaagtcaaatgctgaattgtgcaagtacaggatgttttcctttcygttttttcacaatgaagcatttattttactccctcctgttttgttcaaagactaatgttctcaactttcactcaccaaattgctgtggttttgttactcatttatacaacaattgtaagtaaatagggtcatttaagtagctttgctggtaaaataattaaagtttaaaacaaacaggaaaaaaagtagaacagtcactggtgaacccagctccaaatatgtaaatgttttaccatgttttctttagatttaaaaaagtg

SEQ ID NO: 298006 - DNA, 585 bp, Homo sapiens
actttgtgttaaaaccattattgatggtagtccaagcaaggtagcaattgccaaggaataagctgaagtactagatgttgcttttaaaacatagaggaaagaaagaatgaatgaaaaaaagaaaacagattcaggcgcttggcttatttcttatatgactactgccaaatgcagccaacgcatggccatgggagttggcgctgcaggagaggcagacattccacatggaggaagttggaaggactgaaaagtcaacgctaaaactgaaggcaaagattgccaagtcaaatgctgaattgtgcaagtacaggatgttttcctttccgttttttcacaatgaagcatttattttactccctcctgttttgttcaaagactaatgttctcaactttcactcaccaaattgcygtggttttgttactcatttatacaacaattgtaagtaaatagggtcatttaagtagctttgctggtaaaataattaaagtttaaaacaaacaggaaaaaaagtagaacagtcactggtgaacccagctccaaatatgtaaatgttttaccatgttttctttagatttaaaaaagtg

SEQ ID NO: 298007 - DNA, 1091 bp, Homo sapiens
gtaaatgttttaccatgttttctttagatttaaaaaagtgaaatgaatttagtgatatccctgccatrtgaatcctttaatgttaatacattaatatgtgcccatgataatatacagtatttatttcaaatttatattaatggttttgcttactgtttcatgcttattgtctaggatagtagctgccacatagaagattctccaaaaagaataaaaatgtttgactgaatgactgctaacacactgataggttatccctttgcaatttcctttttcactcaatattatgttttttatattgttcatgttcattgttcatgttcagatttttcagatgctacacaatacttgtctgtgactatttaacagtttatttaatcactctgatgttcatttatgttgcttaatttttttaactcctacaaacaatatccaataaactttaaataagaatagcaaattaagttcaacgtcattacactgacaccatgtttaagatgtggcagaatgtttgatgttcgatttgaggattttggattccttggwgtaaatgttttaccatgttttctttagatttaaaaaagtgaaatgaatttagtgatatccctgccatatgaatcctttaatgttaatacattaatatgwgcccatgataatatacagtatttatttcaaatttatattaatggttttgcttactgtttcatgcttattgtctaggatagtagctgccacatagaagattctccaaaaagaataaaaatgtttgactgaatgactgctaacacactgataggttatccctttgcaatttcctttttcactcaatattatgttttttatattgttcatgttcattgttcatgttcagatttttcagatgctacacaatacttgtctgtgactatttaacagtttatttaatcactctgatgttcatttatgttgcttaatttttttaactcctacaaacaatatccaataaactttaaataagaatagcaaattaagttcaacgtcattacactgacaccatgtttaagatgtggcagaatgtttgatgttcgatttgaggattttggattccttgg

SEQ ID NO: 298008 - DNA, 545 bp, Homo sapiens
gtaaatgttttaccatgttttctttagatttaaaaaagtgaaatgaatttagtgatatccctgccatatgaatcctttaatgttaatacattaatatgtgcccatgataatatacagtatttatttcaaatttatattaatggttttgcttactgtttcatgcttattgtctaggatagtagctgccacatagaagattctccaaaaagaataaaaatgtttgactgaatgactgctaacacactgataggttatccctttgcaatttcctttttcactcaatattatgttttttatattgttcatgttcattgttcatgttcagatttttcagatgctacacaatacttgtctgtgactatttaacagtttatttaatcactctgatgttcatttatgttgcttaatttttttaactcctacaaacaatatccaataaactttaaataagaatagcaaattaagttcaacrtcattacactgacaccatgtttaagatgtggcagaatgtttgatgttcgatttgaggattttggattccttgg

SEQ ID NO: 298009 - DNA, 573 bp, Homo sapiens
agctaaaggggaaagcaatgtagaagacagcaacaacatgtgttgctatacttyattcttgttacactgcataatccttgccttattgcacttacctgacccattttagagatttgtccacttgtaaatatgccacagtctccgttttattcttctttgggaagtaatctggtatgcataaatacctaatttatgagttaatagcatctgttccaggaaagttattgtacaagaagggaaatcatggccttacatttttaaataagttttcttgaaatgtgatcacagcaccatactgtaacatttggtgtctatcttcttggtcagtttataaattgaaactgatgctacagtatcacatggggaaataaaattcccttaattagaaaattattagataagaaaattttactggagtgtaaaagtcacctggaaaatgaacgtaatcaattatttaaaacaagaaattctgttggagttaacagaggaacagagtcacataaagttcactcaaatagcagcaaatctggcagaatacctgcagtaaaatgtgcttaccataaaactgatttt

SEQ ID NO: 298010 - DNA, 573 bp, Homo sapiens
agctaaaggggaaagcaatgtagaagacagcaacaacatgtgttgctatacttcattcttgttacactgcataatccttgccttattgcacttacctgacccattttagagatttgtccacttgtaaatatgccacagtctccgttttattcttctttgggaagtaatctggtatgcataaatacctaatttrtgagttaatagcatctgttccaggaaagttattgtacaagaagggaaatcatggccttacatttttaaataagttttcttgaaatgtgatcacagcaccatactgtaacatttggtgtctatcttcttggtcagtttataaattgaaactgatgctacagtatcacatggggaaataaaattcccttaattagaaaattattagataagaaaattttactggagtgtaaaagtcacctggaaaatgaacgtaatcaattatttaaaacaagaaattctgttggagttaacagaggaacagagtcacataaagttcactcaaatagcagcaaatctggcagaatacctgcagtaaaatgtgcttaccataaaactgatttt

SEQ ID NO: 298011 - DNA, 573 bp, Homo sapiens
agctaaaggggaaagcaatgtagaagacagcaacaacatgtgttgctatacttcattcttgttacactgcataatccttgccttattgcacttacctgacccattttagagatttgtccacttgtaaatatgccacagtctccgttttattcttctttgggaagtaatctggtatgcataaatacctaatttatgagttaatarcatctgttccaggaaagttattgtacaagaagggaaatcatggccttacatttttaaataagttttcttgaaatgtgatcacagcaccatactgtaacatttggtgtctatcttcttggtcagtttataaattgaaactgatgctacagtatcacatggggaaataaaattcccttaattagaaaattattagataagaaaattttactggagtgtaaaagtcacctggaaaatgaacgtaatcaattatttaaaacaagaaattctgttggagttaacagaggaacagagtcacataaagttcactcaaatagcagcaaatctggcagaatacctgcagtaaaatgtgcttaccataaaactgatttt

SEQ ID NO: 298012 - DNA, 987 bp, Homo sapiens
atttatatggctcatcatatcaaaacggtgaacaacatagctaacatccttaatacttcacaattcttttacttgatactcctaggatctattgcctgattttaaaggctaataaaatctctcttttacactttaatgatacgatttaaataagatatgtaatagatttatgttctaggcataaaatcatgtatttatttgtgtattctagtgtggaattactagaaataattttaacatgcatacttattcatctgtctttctrtaaaccagaagatatgttaatgatttttttaattctataattaaatacttaaagactgtaaattataggaaaggaggagcaacatactttaatacaagaggtgtactgatttaccaattcataaatgaaaactatcttaggatgctaagaaataactcatcttctaaatgtgagcttggaggagtgtgaactatatataaaacaggaatactatttaagagtacagagwatttatatggctcatcatatcaaaacggtgaacaacatagctaacatccttaatacttcacaattcttttacttgatactcctaggatctattgcctgattttaaaggctaataaaatctctcttttacactttaatgatacgatttaaataagatatgtaatagatttatgttctaggcataaaatcatgtatttatttgtgtattctagtgtggaattactagaaataattttaacatgcatacttattcatctgtctttctataaaccagaagatatgttaatgawttttttaattctataattaaatacttaaagactgtaaattataggaaaggaggagcaacatactttaatacaagaggtgtactgatttaccaattcataaatgaaaactatcttaggatgctaagaaataactcatcttctaaatgtgagcttggaggagtgtgaactatatataaaacaggaatactatttaagagtacagag

SEQ ID NO: 298013 - DNA, 493 bp, Homo sapiens
atttatatggctcatcatatcaaaacggtgaacaacatagctaacatccttaatacttcacaattcttttacttgatactcctaggatctattgcctgattttaaaggctaataaaatctctcttttacactttaatgatacgatttaaataagatatgtaatagatttatgttctaggcataaaatcatgtatttatttgtgtattctagtgtggaattactagaaataattttaacatgcatacttattcatctgtctttctataaaccagaagatatgttaatgatttttttaattctataattaaatacttaaagactgtaaattataggaaaggaggagcaacatactttaatacaagaggtgtactgatttaccaattcataaatgaaaactatcttaggatgctaagaaataactcaycttctaaatgtgagcttggaggagtgtgaactatatataaaacaggaatactatttaagagtacagag

SEQ ID NO: 298014 - DNA, 566 bp, Homo sapiens
gcatttgtgttatggagctgtgctctgaagaacagatacatgtttgaatcatataaaatgagctaggttcctatataatagcaacattctgcaactgaaaattaaaggaaatgtccatggaatttacatmattcagccagttctgctttgccaatcgagaattatatacaaatactgaataatgtatttacaagactattataagacacacagcaattccttccaaccctcatttcttctgcctcagattaggtttttctttctaacctaagtcactgaaatctacttctaagttacatcattgactctaatttctcatttcattctattttcttttttttttctttttttttttttgccattagaaaggttcctctaaaaaacattgatctaaccaatcatcccatattggaaacctaggatgacactacacacctatcggaatgctaaaataaaatattcaacaaagaacaacaccaaatgctggcaaagatgtggggacagggtcactcgtatattgctggctggaagctagaatggtacagtgattttgcaagataattggg

SEQ ID NO: 298015 - DNA, 566 bp, Homo sapiens
gcatttgtgttatggagctgtgctctgaagaacagatacatgtttgaatcatataaaatgagctaggttcctatataatagcaacattctgcaactgaaaattaaaggaaatgtccatggaatttacataattcagccagttctgctttgccaatcgagaattatatacaaatactgaataatgtatttamaagactattataagacacacagcaattccttccaaccctcatttcttctgcctcagattaggtttttctttctaacctaagtcactgaaatctacttctaagttacatcattgactctaatttctcatttcattctattttcttttttttttctttttttttttttgccattagaaaggttcctctaaaaaacattgatctaaccaatcatcccatattggaaacctaggatgacactacacacctatcggaatgctaaaataaaatattcaacaaagaacaacaccaaatgctggcaaagatgtggggacagggtcactcgtatattgctggctggaagctagaatggtacagtgattttgcaagataattggg

SEQ ID NO: 298016 - DNA, 483 bp, Homo sapiens
ctttgagggtgttttgggaagagactggcatttgactcagtggacttagtaagaaagatccttcctcaatgtgtgtgggtaccatccaaagactgagggcccagagagaacaaaaagggggagagctccctagagcggggcctcccttctcctcctgcccttccacattagacttccaggctttccagtccttggactccagcacttctaccagcagctccgtgggttctaaggcctttgacctcagactgagattcacaccatgggcttccctagttctgaagaacttgaatttggacagagtcatgctaccagcctccttgtttcttgagcttgcagatggactgtcatgggacttcttaagcctccataattgtgtgagccaattttcctaaaaattgccttctcacttatctatctacttrcctactatctatctatctggaattgattctgtctctctggagagctctaatataccat

SEQ ID NO: 298017 - DNA, 624 bp, Homo sapiens
gcacttagggacaaagatcacttttgccaccatctcgcaagcacagaaatcacctttcaagtttatacattttcccactaaccaagctctcagggrtctctcttgctgcttcttcatatttctctcctcaggaacctcttctgtccccttcctgttgtcattatcacagacatcctaagtgccacacatcagtttgctgctctgcttacctatgtggttttctgagggaaaaatcctaaagtagcttagttcaagagtaacaatgggagaaacatcagcatactcacgcacactcacatgcacacgtgcacacataaaatcttactgttttctctttatagtttagtaactatgacttcaaaatgtggagtaagctttctgggttcaaatcccagctctttcagcaaataactgcatgacactcgacaatattgtttaacctctttgtgttccaatcttcttacaaattaaatgaaagtagtcaatgtacttacttttcagtcttcattatggcgtaagcataaccctcttctaaccatagctacactgataagtctggcatgtaatatttatcaggtaaaagttagctatgactactgctgcagataatactaatactgttac

SEQ ID NO: 298018 - DNA, 624 bp, Homo sapiens
gcacttagggacaaagatcacttttgccaccatctcgcaagcacagaaatcacctttcaagtttatacattttcccactaaccaagctctcagggatctctcttgctgcttcttcatatttctctcctcaggaacctcttctgtccccttcctgttgtcattatcacagacatcctaagtgccacacatcagtttgctgctctgcttacctatgtggttttctgagggaaaaatcctaaagtagcttagttcaagagtaacaatgggagaaacatcagcatactcacgcacactcacatgcacacgtgcacacataaaatcttactgttttctctttatagtttagtarctatgacttcaaaatgtggagtaagctttctgggttcaaatcccagctctttcagcaaataactgcatgacactcgacaatattgtttaacctctttgtgttccaatcttcttacaaattaaatgaaagtagtcaatgtacttacttttcagtcttcattatggcgtaagcataaccctcttctaaccatagctacactgataagtctggcatgtaatatttatcaggtaaaagttagctatgactactgctgcagataatactaatactgttac

SEQ ID NO: 298019 - DNA, 624 bp, Homo sapiens
gcacttagggacaaagatcacttttgccaccatctcgcaagcacagaaatcacctttcaagtttatacattttcccactaaccaagctctcagggatctctcttgctgcttcttcatatttctctcctcaggaacctcttctgtccccttcctgttgtcattatcacagacatcctaagtgccacacatcagtttgctgctctgcttacctatgtggttttctgagggaaaaatcctaaagtagcttagttcaagagtaacaatgggagaaacatcagcatactcacgcacactcacatgcacacgtgcacacataaaatcttactgttttctctttatagtttagtaactatgacttcaaaatgtggagtaagctttctgggttcaaatcccagctctttcagcaaataactgcatgacactcgacaatattgtttaacctctttgtgttccaatcttcttacaaattaaatgaaagtagtcaatgtacttacttttcagtcttcattatggcrtaagcataaccctcttctaaccatagctacactgataagtctggcatgtaatatttatcaggtaaaagttagctatgactactgctgcagataatactaatactgttac

SEQ ID NO: 298020 - DNA, 574 bp, Homo sapiens
tgtgctcacaggatcacattacacagtgcatttctttcctctggggtgtagccaaaaactgaaaatctaggaggggaatcattgattaacacagtaacagcaaataaactkagcccacatttgagaccttaggtaaagttctcctctctgctgttcatcagaaccacctgtggaggttctgaaacatacagaagaatgtttctgattataccaattaaatcccaaacacttggtgtgggataacattaatgtgttttgcttttgatttagagctctccaggcagttagggtatgcaactaagtcacagaacctttgtcataaagtagccatcatatgttagagatatattacattctatgattatacaaacttttatctgtgtaccagtcaatgacaggagtatcataaagacaagtaggacaattaattgatcaagagtgttgtaaatattggaaacattaagaatgcagtaattgattttccatcttctttgaattaaacatatgttagctctagtcaaacagcaatgaaacatgtttggtatttttgctttcggttattgtttttgggttt

SEQ ID NO: 298021 - DNA, 563 bp, Homo sapiens
aaattagtgttcgtggggccacgcttcctctggagttttaagggaggaatctgttccttgccccttccaactcctggtggctgctggcattccctggcttatggctgcatcacttcagtctctgcctccatggtcactttgcctcctccttttttcatggtctccctcttccacactctcattaaggacattgtaatggcatttaaggcctacccagatgatctgggataatctcttcatctcaagatcttcaatttagtcacctcggcaaagatttttttcttataaaataacatttacagatttcaggaattaagattggatgtcttcacggaacatttttccagcctactaccagggccattttagaattctgcctaccatattcctgaaaaaagaaagttatactatatttttcagagtacttcaggactagtcatrtttgttttattaattccctttaatcatggaatatagtataatgtaaataattataaatatatgtataatagagcattacacaaattgtctagtttaggcagagcatacatttgtcattactt

SEQ ID NO: 298022 - DNA, 546 bp, Homo sapiens
catcacttgtgcataagctagggcaagataaatgaattatgcatctctttcttcatttgtaaaaattygttaataaacataactcaaggcagtttgaacaggaaaatataattatataaataaagggcttaagtatatgttaaacaatcaaagtgataactgaaaatatttggctggaaaactcatgtaaatttccattggcaaggaaaaggattccttttccaaaatatgtatctaattgtttgatatctgaaatttttttctggagcttcaattacaacaatcctcagtaaaaaaagaaaataataataacttatcaatagtagtgagtctcattcattatataggaaactgattttattatcttctttttacttcatttttactgattttattatcttcaattttactactttcttttttactgcaacacattattaaagtatagaacaatatggggtctataatgaaaaaggtatatccatagagaggaaaaattgaatgcatggataaaacagagttttgttgatctattttaaataaaca

SEQ ID NO: 298023 - DNA, 546 bp, Homo sapiens
catcacttgtgcataagctagggcaagataaatgaattatgcatctctttcttcatttgtaaaaattcgttaataaacataactcaaggcagtttgaacaggaaaatataattatataaataaagggcttaagtatatgttaaacaatcaaagtgataactgaaaatatttggctggaaaactcatgtaaatttccattggcaaggaaaaggattccttttccaaaatatgtatctaattgtttgatatctgaaatttttttctggagcttcaattacaacaatcctcagtaaaaaaagaaaataataataacttatcaatagtagtgagtctcattcattatataggaaactgattttattatcttctttttacttcatttttactgattttattatcttcaattttactactttcttttttactgcaayacattattaaagtatagaacaatatggggtctataatgaaaaaggtatatccatagagaggaaaaattgaatgcatggataaaacagagttttgttgatctattttaaataaaca

SEQ ID NO: 298024 - DNA, 568 bp, Homo sapiens
ccaagcctttggactgggattatcctttggctatgactaagtagaactaagaatggaaggtaccatggtgkttaagagaattaagcaacagtacaaaagaaacagaatcaaagaagagtacaaaaaatactaaatatttaccttgttagatatgcgaaaacaaacatcttctatcttttttttctgtttcgttacttactttaatgactcttagctacagtgtaactgaataatggaagctgcaaaggccaatttgtctcccctaccatacctagtcttgggctgttccatgtcatcttattcatatattgtgattcccaatatcttttattggggaaaaaaggtacctctgattagtaattctgatcccgggatatctcagaattccagttttgaggctgtaagaaatgttaaattgtctattaatttagctgctatgtaatttttttcacaaagcctttttaaaattttgttttcaatttaagttgcttagttattttttacaaaacaattcctaaatttttaacacactttcctcctaaagaaaagaatgactgtatgtttaaaa

SEQ ID NO: 298025 - DNA, 568 bp, Homo sapiens
ccaagcctttggactgggattatcctttggctatgactaagtagaactaagaatggaaggtaccatggtggttaagagaattaagcaacagtacaaaagaaacagaatcaaagaagagtacaaaaaatactaaatatttaccttgttagatatgcgaaaacaaacatyttctatcttttttttctgtttcgttacttactttaatgactcttagctacagtgtaactgaataatggaagctgcaaaggccaatttgtctcccctaccatacctagtcttgggctgttccatgtcatcttattcatatattgtgattcccaatatcttttattggggaaaaaaggtacctctgattagtaattctgatcccgggatatctcagaattccagttttgaggctgtaagaaatgttaaattgtctattaatttagctgctatgtaatttttttcacaaagcctttttaaaattttgttttcaatttaagttgcttagttattttttacaaaacaattcctaaatttttaacacactttcctcctaaagaaaagaatgactgtatgtttaaaa

SEQ ID NO: 298026 - DNA, 421 bp, Homo sapiens
ggtggtgttatttatttatacatcacttttcacattttattttaaaacaggtgctcaactaacccaagataaattgaaaatttcgtgatatgctgagatatgttattaataaattattggcaatgttctagaaggttgccaaaataataattttaccattaatggaggcatattgctaacattagcaccagcatcatcagagataaaaatgtatgctttcacagaaaaaaaaaaacatttgcagtatrcatgactaatgattaaacactttaatatttaactaaaggaaatgattttcactttattcaaaacacaaaattcatgttgaaaagcattgtgcatgagacttttcttaatccctgatattatcttttttggttactcataaatttgtttcttcttttctttgtattctattagt

SEQ ID NO: 298027 - DNA, 550 bp, Homo sapiens
agtgcctggtgcatcgtaagcactcagaatagctgctattattattgtttattcattttgaatattgatcattttcactcattatcctggtttgyttttattttaatcaactgtctagtgactctattaatatcaactatttaatataaactatttttgacaccattaattgtttaaaagaataattttttaaaaacagccaaatgaaacattttatcaattatattaaaaagcataggtattcacaatgtatttagatactttgaattcaaatagttacatcatggggaccactaccatttgactgcattcaaagatcttttgcataaagattgtttcagaaagttttatttactcttcgaagtcattaaattacagacaaataggtaattataaaatagatagatccttatggttcattagagagcccactttgagccctgtttaaaactatcaataatttccaaataaaatatacatatcatttttaccatcgtgaaataattaaatcagatttggggactaaacatgtcataaatacagcggaaat

SEQ ID NO: 298028 - DNA, 1101 bp, Homo sapiens
agtgcctggtgcatcgtaagcactcagaatagctgctattattattgtttattcattttgaatattgatcattttcactcattatcctggtttgcttttattttaatcaactgtctagtgactctattaatatcaactatttaatataaactatttttgacaccattaattgtttaaaagaataattttttaaaaacagccaaatgaaacattttatcaattatattaaaaagcataggtattcacaatgtatttagatactttgaattcaaatagttacatcatggggaccrctaccatttgactgcattcaaagatcttttgcataaagattgtttcagaaagttttatttactcttcgaagtcattaaattacagacaaataggtaattataaaatagatagatccttatggttcattagagagcccactttgagccctgtttaaaactatcaataatttccaaataaaatatacatatcatttttaccatcgtgaaataattaaatcagatttggggactaaacatgtcataaatacagcggaaatwagtgcctggtgcatcgtaagcactcagaatagctgctattattattgtttattcattttgaatattgatcattttcactcattatcctggtttgcttttattttaatcaactgtctagtgactctattaatatcaactatttaatataaactatttttgacaccattaattgtttaaaagaataattttttaaaaacagccaaatgaaacattttatcaattatattaaaaagcataggtattcacaatgtatttagatactttgaattcaaatagttacatcatggggaccactaccatttgactgcattcaawgatcttttgcataaagattgtttcagaaagttttatttactcttcgaagtcattaaattacagacaaataggtaattataaaatagatagatccttatggttcattagagagcccactttgagccctgtttaaaactatcaataatttccaaataaaatatacatatcatttttaccatcgtgaaataattaaatcagatttggggactaaacatgtcataaatacagcggaaat

SEQ ID NO: 298029 - DNA, 553 bp, Homo sapiens
attaaaaacctctattacaagaattttaaaataaatgtttagagttggtcagcatttaatcacattttccaaaatatataactaaaagatggttttaaccaatattaaacacattatgaaaagtactattatttaagttttagcagatattgattaggtttgtaccattttcatcaaagaggggaaaactgtctaatcaactttgctgcttttaaatgttttgtttttatcgaagtttaataagactttccaatagcttcagattttaagatrcacttttgacaaaaatgtcctctgattcaaaatagtacattctaacagcttgattacctttagtattgtctacatttcaggagttgaaactaataattaattttaaaagcacagatttctagctcctataggtatcaaaacattttaattgctttgataatttgttttccactatcatacaatctctggagagttggaaactaaaatatcagtggcacatagatgaaacaaacaagcaagatatagaataaaaatgtgatttgcgaagagataaatatgc

SEQ ID NO: 298030 - DNA, 553 bp, Homo sapiens
attaaaaacctctattacaagaattttaaaataaatgtttagagttggtcagcatttaatcacattttccaaaatatataactaaaagatggttttaaccaatattaaacacattatgaaaagtactattatttaagttttagcagatattgattaggtttgtaccattttcatcaaagaggggaaaactgtctaatcaactttgctgcttttaaatgttttgtttttatcgaagtttaataagactttccaatagcttcagattttaagatgcacttttgacaaaaatgtcctytgattcaaaatagtacattctaacagcttgattacctttagtattgtctacatttcaggagttgaaactaataattaattttaaaagcacagatttctagctcctataggtatcaaaacattttaattgctttgataatttgttttccactatcatacaatctctggagagttggaaactaaaatatcagtggcacatagatgaaacaaacaagcaagatatagaataaaaatgtgatttgcgaagagataaatatgc

SEQ ID NO: 298031 - DNA, 588 bp, Homo sapiens
aacgacatggagtatacactgtgttttaaaaaataattctaaaaaatcaacttctcatagtcttctctcatgaaaatatagtggctctcactcaattgtgctttactaagacataatctatcatctctcagtgagtgattgcctgccctttcccatgggttgattgcattatggcagctcataacttttgctacttttaaaaatccttaagatgccctgtgacattgcttccaggttttagagctgtctctcacccattgagccacaaaaagtgaaccttgatctagaatgtgcacattgtagatcataaaggccagctctctcggtccctcaaagaagcacaatgagaaaagagatatcttactgctataatacctaattcctgccctgagaaattgttcttattcccccaaaaggartttacctaaacattaatgaaattgattgaacaaagaccttttgattatgttctagacatcatgctagatactgtaacagctccttcagaataaaattcattctgctttagaacattgtgatgtcatcatcctatcaccttttcatctcataagataacttgcatattat

SEQ ID NO: 298032 - DNA, 593 bp, Homo sapiens
tccttgtcaaaacctatacactggctctgtccttgcactttggttttctataagtcttggcagttttgtaaggcacaatgtgtctttaaaagacacaacggaagaaagcatgctgatgtgttatttggtgggctggtatgggactaataattttttgaagttgcagttaatcatgccaataataagcatggcatcgttggttccttaaacstatgactacaggaaacattaattaaacaaatgcttcttaagcacttaatatggtggaagtgtaaaaaaacaattgtaatgactattttttgggctcttactatgttccatgcactgtgttatgtgtattccacacacagtctctttcaatttttaaaacactaagaaatagaaaatgtaattctgtttgtttaatatataggaaaattttagcttaaaaactttaatagcccaaggtcaaatagttggtaagggagtacagagagattccaaactatatctgtgtgattccaaaatatatgttatgaactgataaactgtataccacttacttcaaaattactcccgtaagctcaagttcaatgtgtctgacctattcattg

SEQ ID NO: 298033 - DNA, 499 bp, Homo sapiens
tcaaatcatttcactgcacaggtgttttgtacatggctttcccaaatttgttaatcgtattttttacttctytactgaactccagttcagtcattgattttaatttatttatttgtttgtttgtttatttatttatttatttatttgagacagggtctcactctgccactcaggctggagtgtagtggtgtgattttggctcactgagacctctacctccaaggttcaaacaatcttcccacctcagactctcaagaagctgggactataggtgtgcaccaccatgctcagttgattttttatttttgtagagacgaggtttctctatgttgcccaggctggtctccagcacttgggctcaagggatcctccaacctcagcctcccaaagtgcttacattagaggcttaggccactacaccctgcctagtattcattttcttagcaatccttcagcaattctgtgataagcaagtccttattaatcttgtggctgcaag

SEQ ID NO: 298034 - DNA, 499 bp, Homo sapiens
tcaaatcatttcactgcacaggtgttttgtacatggctttcccaaatttgttaatcgtattttttacttctttactgaactccagttcagtcattgattttaatttatttatttgtttgtttgtttatttatttatttatttatttgagacagggtctcactctgccactcaggctggagtgtagtggtgtgattttggctcactgmgacctctacctccaaggttcaaacaatcttcccacctcagactctcaagaagctgggactataggtgtgcaccaccatgctcagttgattttttatttttgtagagacgaggtttctctatgttgcccaggctggtctccagcacttgggctcaagggatcctccaacctcagcctcccaaagtgcttacattagaggcttaggccactacaccctgcctagtattcattttcttagcaatccttcagcaattctgtgataagcaagtccttattaatcttgtggctgcaag

SEQ ID NO: 298035 - DNA, 499 bp, Homo sapiens
tcaaatcatttcactgcacaggtgttttgtacatggctttcccaaatttgttaatcgtattttttacttctttactgaactccagttcagtcattgattttaatttatttatttgtttgtttgtttatttatttatttatttatttgagacagggtctcactctgccactcaggctggagtgtagtggtgtgattttggctcactgagacctctacctccaaggttcaaacaatcttcccacctcagactctcaagaagctgggactataggtgtgcaccaccatgctcagttgattttttatttttgtagagacgaggtttctctatgttgcccaggctggtctccagcacttgggctcaagggatcctccaacctcrgcctcccaaagtgcttacattagaggcttaggccactacaccctgcctagtattcattttcttagcaatccttcagcaattctgtgataagcaagtccttattaatcttgtggctgcaag

SEQ ID NO: 298036 - DNA, 587 bp, Homo sapiens
aaatagcagtactaacacaacacaaggcaatcctttttcgagtaccttattgaaaatctaatgtaaactctgtactctctttttcaaaaacatttcctactsggtatataatttcatagaaatcacagacttgctgaagtccatgtaaatccactattttagatagttttatcctatgataattcaattttgtcctgtttcaaattgtgttttacttacagttattcatttggacaaaggtgatggtaattcctaaattaataattaaaatatttttgtgattatatacacttttttacacattaaagattttatatttgtaggatccttcttaaaatataaaagaccatacaatataatcaatattctaacatttcatgattcctgagtagaaaaggggcctggctaaataaacgtcatttctgggattctaaaactttagagatacaaaagactttagacatgagctatccagacattttatttaaggctgatagaactgaagcctaaatatgataattgactcattaaagatcaaacaattaggaggcagaaccaaaattagagctcaggtctatgacatttga

SEQ ID NO: 298037 - DNA, 430 bp, Homo sapiens
gaagtcttgtgtgggaactagtaatctgcattctcttatgtcaattcaggcgtaaacgtagtcccactcacctagtgattaagaataagattagacttaagaaaagtattacgaaaaagattcactttgtgcctccaggaacaaagatcccaatccctaaaccttgtcttgaacaggtgcatcctgtaacagattaattgcacagctgtttgaatcagaaaagctccagagtatttgttctgagtgaaaagaaaagttatggcrtatgttggaataaaaatccaattgtggtaaataagtaacaaattgatccattgattatacttcacaattaatactacccatgttccaaggcagcggtccccaacgtttttggcaccagggaccaattttggggaaaacaatttttccacagaagtagtcagggtta

SEQ ID NO: 298038 - DNA, 430 bp, Homo sapiens
gaagtcttgtgtgggaactagtaatctgcattctcttatgtcaattcaggcgtaaacgtagtcccactcacctagtgattaagaataagattagacttaagaaaagtattacgaaaaagattcactttgtgcctccaggaacaaagatcccaatccctaaaccttgtcttgaacaggtgcatcctgtaacagattaattgcacagctgtttgaatcagaaaagctccagagtatttgttctgagtgaaaagaaaagttatggcatatgttggaataaaaatccaattgtggtaaataagtaacaaattgatccattgattatacttcacaattaatactacccatgttccaaggcagcggtccccaacgtttttggcascagggaccaattttggggaaaacaatttttccacagaagtagtcagggtta

SEQ ID NO: 298039 - DNA, 620 bp, Homo sapiens
gtaaggaagagtacgcatggaatacaggagatccattagggcatctcttagtattamcatgccctgtgattaaggtcaatgggaagctacaacagcccaacccagacgggactacaaatgacccatacccttcaggaataaaggtttaggtcactccaccaggaaaaagcaattacctgctgagatgattgctgaaggcaaagggaatacatgataggtagtagaagaaagtagtcatcaataccagcgacgatcacatgaccagctgcagaaacaaggactgtaattgtcacgagcatttctttcttcttttgttaaaaacatgtttgtgcatgtatacacttgtactaaggaaatatcttcatcttattttcttttcctttatcatgtgacataagatttattacatcatatcagcatttaagtagtgttaactttatgtaatagtatttgggttggggattggtgtgtttccagttttatgaaggacagctatattatgttaggcataattatgacttcattactgtctctatttgaagattatgtattaattcaggagctgtgtatgggttcaagttgacaaggattggactagggatggttaatagtgaatgtca

SEQ ID NO: 298040 - DNA, 620 bp, Homo sapiens
gtaaggaagagtacgcatggaatacaggagatccattagggcatctcttagtattaccatgccctgtgattaaggtcaatgggaagctacaacagcccaacccagacgggactacaaatgacccatacccttcaggaataaaggtttaggtcactccaccaggaaaaagcaattacctgctgagatgattgctgaaggcaaagggaatacatgataggtagtagaagaaagtagtcatcaataccagcgacgatcacatgaccagctgcagaaacaaggactgtaattgtcacgagcatttctttcttcttttgttaaaaacatgtttgtgcatgtatacacttgtactaaggaaatatcttcatcttattttcttttcctttatcatgtgacataagatttattacatcatatcagcatttaagtagtgttaactttatgtaatagtatttgggttggggattggtgtgtttccagttttatgaaggacagctatattatgttaggcataattatgacytcattactgtctctatttgaagattatgtattaattcaggagctgtgtatgggttcaagttgacaaggattggactagggatggttaatagtgaatgtca

SEQ ID NO: 298041 - DNA, 556 bp, Homo sapiens
tcttctgcactcaaactgtatctaacatcctgctgtctatttagtttttaccattgacctggcagaaaatcctcataggaacaaaagatttgtcatgttggatcagattcatgtttcatcccagtccacattgtttctcttactagagctaaatgatactttatcttgagaaaaaaaaaaaaaatgaggcttagggaatacaggatatcttttaatatgtaaaagactctcatacaatagatagaatatgttcattccatgatagtggagagctggtcaaaatacaagttayagggagccaatttttatttgatagtaaagaagaacaacaagagctttaagaaatgcactgtgctgcctctgaaaatacaatttgtcatgactaaagttttaagcccacttggatagactgcttttcagagatctttgcatgtacgttcagactgtaagttagtctgaacagggatcctgcccagctcttgtttctgcttgtctgtgctcttctcattttgtctaaccatatctcagatctctccatgtggtagagaacttggtt

SEQ ID NO: 298042 - DNA, 644 bp, Homo sapiens
tgataccatattgctacagcactgatctatatatgtcattatgtaattatttttcattttcaagagctacttgaaagcataggctgctattttgcatgaattagttcatacaattattgcttaagactatctaacaagaggatattggtttttgctttattgattataacccaaaagtatctacgcatcgtgaagaacataagaattttattttctatctgattgggaagttaattggagggaagcagaaacatagacaccaagtttggcaaacattttccttctcagataattgaccrtataactcatttgactgctttggaggtgtagagagcattgaaagtttctttcttttgatctctgcctcactgtcttgtttctctgatcctcagtttattcatctataaagtggagctgctacactgagttctcaaggtcactttgattattttaaaaatatacataaatatgtgtttatttaagtgaaggatccctgggccccatccctgagcccacttttacccacaaacacatggatacgtatatacaacttcaactgatacctgcaaagaatgctacatgccagattcttctaaccctttgctctatttctcttctaaaaacaccattttgaaagtaattca

SEQ ID NO: 298043 - DNA, 556 bp, Homo sapiens
tcttctgcactcaaactgtatctaacatcctgctgtctatttagtttttaccattgacctggcagaaaatcctcataggaacaaaagatttgtcatgttggatcagattcatgtttcatcccagtccacattgtttctcttactagagctaaatgatactttatcttgagaaaaaaaaaaaaaatgaggcttagggaatacaggatatcttttaatatgtaaaagactctcatacaatagatagaatatgttcattccatgatagtggagagctggtcaaaatacaagttatagggagccaatttttatttgatagtaaagaagaacaacaagagctttaagaaatgcactgtgctgcctctgaaaatacaatttgtcatgactaaagttttaagcccacttggatagactgcttttcagagatctttgcatgtacgttcagactgtaagttagtctgaacagggatcctgcccagctcttgtttctgcttgtctgtgctcttctcattttgtctaaccatatctcakatctctccatgtggtagagaacttggtt

SEQ ID NO: 298044 - DNA, 478 bp, Homo sapiens
acttcatcccacaacatgttgtacttagtcttgtgctctttatataccaggctgcttctagccttgaaggagtacctgctattgtgaatttttgttgttgttgttgttgtttgtttttattgagacagagtctcactctgttgccaaggctggagtgcagtggcacaatcttagctcactgtaacttccacctcccgagtacaagcgattctcccgcctaaccctccaagtagctgggattacaggcgtgtgccaccatgtccggctaatttttatatttttagtagaaacgaagtttcaccatgttggccagagtggtctcgaactcctgatctcagacgatccacctgccttggcctcccaatattttgaaatttttattrttcacattagaaagaaactttggagttcaagaaaacaatatggatttcaaaaatcacttttagtctcactttaaaaacacataaagttgcatatg

SEQ ID NO: 298045 - DNA, 489 bp, Homo sapiens
acaacaataaaggtgagtataaatattaaattacatttggcatatgtcatcttagtctcaaaatagttttgcaaacttgtaatttggaagacatgagtcatgcatgcattaacatagcttgtattgtcttaaaattattccagattggttccacattatggcagtaaacaagtcacctcaaatgtctgtagttattgctgtaattgatcaacttgtcaaagcagaaagtgaaagaactcagacttrttgagctactcttaagttacttctgcagttggtgactgagctacctgctgagtggatagggacctgacaggtggaattgtgcagacagtagctatgggacattgggtttccttctttgaaaactatcaggtccagaagtcacatataactccaacttccaagtttttcaatgatacttcttcacaagtgagatcactgtttctaaataaaataaaagaatggactggataaagaaaatgtggc

SEQ ID NO: 298046 - DNA, 974 bp, Homo sapiens
atatacaatatactgtatactgtatataatgtatacaatatataatgtacacatagtttatacactatatatacaaataatatatgtatatatgtatatatattagatattatatacaaatactatgtaatatgtaatatgtgtatattattaacatgtgtacatattactatgtaatgtgtatattatatacatatatatttaatctaatatacacaacatacatgtagtatattatatacacatattacacataatatattaayatataatatatacatatgacatactaatatatacttatatatgttatataaatttattcacatatataatttctgttgatgagctagtagattttgccctctggagaaatattttgatgtttctaatcttcttctttatcagtttttgttgtaaattatgtagaattwttataaatggtttttctcttacgtttttccagaagttaaaataaattgacawgtatttggaatgttctgaaatgtagaaaagtctaacagtcaaaatcagaacttaagataaaggcaaaacttgaaatatttccaatatgaattacatttaactgaattctaaatattttagaggtttttccccttgcaaattaacagttgctttgtttctgactttttaaaaaatttttgttggataccagaaataatattagtgcaatgtgtaattagaaataatactagttggggcacatctaaacctaaacacagattgatatgggagttagaagaatcttaaatcatttcttaatcaagtcctggatgtgattttcttctagcctttgaatattctgcttgttttctttggaaaacaagataggaattactttcattctccaagttagccttcatttggaaagtgctggatgttttccttggggtcatattccttttgtttttttcattcaacatttccattttttttattgttgaggggacagg

SEQ ID NO: 298047 - DNA, 554 bp, Homo sapiens
ccctgaattcagattaataaacaaagcattactagcaccctggaaatcctctgttttagttagggttctccagagaaacagaaacaataggatgtgggtacattctttacatttayaaagagatttattgaaggaactggttcatgcagttatgtaggctgacaagtcctaagatcttcaggctgagtcttctagaccaaggagagctaatggtgtggttgcaggccaaaggccagcaggctccagatccaggactaactgatgtttcacttcaattcccaaagtaggacaaagctggtgtcccagttcaaatgaagtcaggcaggagcaattcactatttctcagaggagggtcagactttttgtttgtttgtttgtttgtttaatttaggctttcaactgattggatgaggctcacccacttcagggtgggcaatctgctttactcagcttactgatttaaatgttaatctcatccataaccacccttatagaaataccccatataatgttgggccatttatatgggcaccccatgtcccagtcaagttgac

SEQ ID NO: 298048 - DNA, 616 bp, Homo sapiens
gagtcatgtaaaacttaaataaatctgcacgtttttctcttgctaatctgtctttcatcagtctcacttggcctaagctaatgaaattaaggtgtagaagataaatatttctccccctttacagcgctaagctcctaataaatgtttatatttttatatttataaaacatattaaaatatatttctatttataaattcatttaaggacaaaagaaaagatagaataatatttcaattaaggtaattacataatgataccrcaacttaatatagtttttaaaattagcacagtacctagcacaacaaactttgttggagaaaatcattgaaacaaatgaagaaaagataaagaaaactgatagcacaactctttctttttaaattattattttgtgtgatatgatacactacaaaataatccctatgttaattgttgtcagtaataggtaccttgtcatagccagctcttatatccttagcacaaaatcagtacttgaagcagaaaagtagaatagtatgaggagtgagatgtactatcatctgtactgtcatctccctactgatggcggagaaattagaggagctgatggtgaaagttcagaatgtccatgtcagc

SEQ ID NO: 298049 - DNA, 616 bp, Homo sapiens
gagtcatgtaaaacttaaataaatctgcacgtttttctcttgctaatctgtctttcatcagtctcacttggcctaagctaatgaaattaaggtgtagaagataaatatttctccccctttacagcgctaagctcctaataaatgtttatatttttatatttataaaacatattaaaatatatttctatttataaattcatttaaggacaaaagaaaagatagaataatatttcaattaaggtaattacataatgataccacaacttaatatagtttttaaaattagcacagtacctagcacaacaaactttgttggagaaaatcattgaaacaaatgaagaaaagataaagaaaactgatagcacaactctttctttttaaattattattttgtgtgatatgatacactacaaaataatccctatgttaattgttgycagtaataggtaccttgtcatagccagctcttatatccttagcacaaaatcagtacttgaagcagaaaagtagaatagtatgaggagtgagatgtactatcatctgtactgtcatctccctactgatggcggagaaattagaggagctgatggtgaaagttcagaatgtccatgtcagc

SEQ ID NO: 298050 - DNA, 607 bp, Homo sapiens
tgaactaggggaacttttaaaaacgttttatgctttatgtaagattttttttcttaaaaatttcttttatattacttcttccaaaactttctgaggcctaggcttagattaaaaaaaaaattaattttatgaatgaracaagaggcaaatctgggtatgcatgttcctggatagccttctttctacttgccttttctgtaaacatatcttttgtaaggtatttctcagattagctttcgtttcacatgttgtcttttatagctgtaacaacaaaagtgggcagtgtttgaacctaatttttgaaattttaaaagcagttaaaaagtacttaaccaaagttacaacaggataaaatatgtttgtttatttgcatcttttattctcttctataatgtacatcataccactgtaacaaaagtgacattcttttaaaataaaagcgcttaaaattccacagatgaagaagaagattagaagcagtaagaatgggaaaagaaccaccataaaagcaaaaaatgtgaataacaggcaaaatagtttgaaattttaaaaggttaattagaagaccagattgtgaagcttttggtttaattccatctggttttgg

SEQ ID NO: 298051 - DNA, 607 bp, Homo sapiens
tgaactaggggaacttttaaaaacgttttatgctttatgtaagattttttttcttaaaaatttcttttatattacttcttccaaaactttctgaggcctaggcttagattaaaaaaaaaattaattttatgaatgaaacaagaggcaaatctgggtatgcatgttcctggatagccttctttctacttgccttttctgtaaacatatcttttgtaaggtatttctcagattagctttygtttcacatgttgtcttttatagctgtaacaacaaaagtgggcagtgtttgaacctaatttttgaaattttaaaagcagttaaaaagtacttaaccaaagttacaacaggataaaatatgtttgtttatttgcatcttttattctcttctataatgtacatcataccactgtaacaaaagtgacattcttttaaaataaaagcgcttaaaattccacagatgaagaagaagattagaagcagtaagaatgggaaaagaaccaccataaaagcaaaaaatgtgaataacaggcaaaatagtttgaaattttaaaaggttaattagaagaccagattgtgaagcttttggtttaattccatctggttttgg

SEQ ID NO: 298052 - DNA, 259 bp, Homo sapiens
ggagttttaacttatgatggagagagttagaggaagagcacttaaagtggaaaaacaaaggtaaagggcacagaaggaaatttaatcgtagtgttaatgataccaaataaacattttaattaattaytttattgatacatactagaggcacacaattttggtgtaaatgtgataatttgggcccagcacggtggctcacgcctgtaatgctagcactttgggaggccaaggtgggtggatcacaaggtcaggatatcga

SEQ ID NO: 298053 - DNA, 532 bp, Homo sapiens
ggctttttggcctgccccactccctatcctgtgcccataaaaacacaggcagctgatgcaagtggtcagggatgcaagctgctgaatctcagggattcaagctgctgagtgctggggatacaagcagatgagtggtaagtagagaaggaattgagggtcagtgactacasataacatggctcacttcagatggcgcagtttcacaagggagcctagccagagacagctgggcttcagggaaagatcaccttcttcctgcaccatcccctttctagctcccctttcaccaagagccgcttccactgctcaataaagtcttctgcattcatcatcttttaaacagttcctatgacctgactcttcctggacactgaacaagaactcaggcgtcataaatggcagttgcaagaggcaatcagcctgacccttcactgagctgttaacacctagctgtccatagactgcaagctgagttaaatgagccactctagttcctgcccacggagggggtcaaggtcaagggaacacatac

SEQ ID NO: 298054 - DNA, 634 bp, Homo sapiens
ttaatagtagccatctcccgtgtggtgggattatgagttatattcattattttctttagacttcatatatattttcctagcatgtcaataaatataacacatttggggttaacaaagatatgttttaatatttatgcaggggatggctttggattattagcttcttttggaagggaggtaagcaaaagacaagcatcttacatcaaaagtactagctcatcaggacatagaactagttctattctaatgaatagaactcattagttctttttctgccattttagggattctgatgcagaaagacctgagccaataaggamcacccctctttgtgtttaattgaccattcatccaagcagcagaatgaaatcccaagggaagacctcacaatcacaaatgcatgttagccatgaggagcttacattaatgcccagagaaagtggaaacactcaaggaagaggctaaagccataggaaataggaaaccaagctccctgaaggaagagagagaggcatgggagagagaaaggaaaagccaagcaacgaaatcctgggggagatttaaggttcttgtggcacttcaaattatgttagctttcctttcacacaagattgaatttagctgccaagaatga

SEQ ID NO: 298055 - DNA, 576 bp, Homo sapiens
tacatttctcccttcctgagagagctctgctacgttaaaaagggtgtgtgtgtgtttatgtgtgtgtgtgtgtacagcaaggggtgggcaatgtgctagagattaggccagaaatgtgaaaaatggttttgtttcattactaccttyttataactaactatgtacagatagtgacggtcagaatctgaaggacgcatcagcagcattaggtattcatgcatgcattaaacacctaccgtgtatttagaggctgatattaaaaggaaagaaatctaatattgctgaatacaaaaacgtacagagtggtagactgaaataatgatctatttttctttcctttatataacacataattctctctgacattagtagggtttaagaatgaatagggaatgaaaaatgtactttatttccatctatgccctatccttagcagaatctgcccagtttaaatgcagttacatgatgcagagcctttaatgtggacattcaggcatcaggaaatatgaggaatgcttgtgtcagggcctacatctcaaaatcatgtgagtcttctcagtatgcttgcattttaga

SEQ ID NO: 298056 - DNA, 471 bp, Homo sapiens
tcctgacaaaagtaaatagatttagcatatcactaaactactcccctccactacttgacttcatactgtataaagatttggccagtttaatagttctttctggtttaaaaaaaaacaaatttggtggcaaactgttacattatatattaggcaaatagataattttaagaatatatatatayacacacataaagcatatttatatctatatatatacataaaatatatatacacataaagcatatatatatctatatatataaatatacataaaacattttactgttctgaacaacccttggtatgtaaatgcctccccctagtacatacacttaactattcattcagctggagaacttagtgtgtgttttttaattgcattcatatttatagcttgcctttcaaagttactttggtctattaaaattctgttttatatgcttgccaacgtgacctgtgtgtgaccacaaa

SEQ ID NO: 298057 - DNA, 542 bp, Homo sapiens
tgaagggtaatttcgctgcacaaactctcttctcttgtctgcctccatgtgagacgtgccttttaccttctgccagaattgtgaggtctccccagccacatggaactgtgagtccattaaaccyctttcttttgtaaattgcccagtctcgggtatgtcattatcagcagcctgaaaatggactagcacaccagcctagaaattctggagctttggtgggtaatggaatgctctacccaggaaactcattatgtttgaaagtaacaagaggagatgagagggccccctccttgtcaattgttccttgcattctggacatatagtgaacatcaataggaacatgggtgtattcctttcctatatctgctgttaacaaattaccacaaacttggtgggctaaaacaacacaaatttttcttacagttctgcaggcagaagtttggcctggtctaagtgggctaaaataacgtgtctgtggggcttttctccttctggagggcctcagaaagaatccttcctcttgcctttgaacatcaggagac

SEQ ID NO: 298058 - DNA, 575 bp, Homo sapiens
aaaccaggatatatggtcaccctacattattaaaaactaattttgcagcctttgcttatcttcagtgttgcagatgttataaagggtgaacactgtaccatttaaaggctgagagattagagagagaagaccactcggagtcagaattactaatgtgctttcagtctcctgccacttagtagatgaaggtaagacatgtgctactcctttacgttaagccaagagaaatagaaagaggtaaacaggtgtcaaggtaactgatttgaatgtcttgctggtgtcccctgaggaaactggtgtctgatcatcgctggaagaaacctaaaagaagaagttggttataacttgaagatccaagagcaaaaggtamgctagagcaagttgtcatccaaagacagcagaacaagggccatgtttccaataaaccaggtataagcgccagcgaaggcaaatgaaaccccatcctaacagaagataggcccctaaaaccccagggccagcactgtggggacacttaaaattggctagccagacaatttctggcttatgtcaaaagaaccaacaggaggattcct

SEQ ID NO: 298059 - DNA, 575 bp, Homo sapiens
aaaccaggatatatggtcaccctacattattaaaaactaattttgcagcctttgcttatcttcagtgttgcagatgttataaagggtgaacactgtaccatttaaaggctgagagattagagagagaagaccactcggagtcagaattactaatgtgctttcagtctcctgccacttagtagatgaaggtaagacatgtgctactcctttacgttaagccaagagaaatagaaagaggtaaacaggtgtcaaggtaactgatttgaatgtcttgctggtgtcccctgaggaaactggtgtctgatcatcgctggaagaaacctaaaagaagaagttggttataacttgaagatccaagagcaaaaggtaagctagagcaagttgtcatccaaagacagcagaacaagggccatgtttccaataaaccaggtataagygccagcgaaggcaaatgaaaccccatcctaacagaagataggcccctaaaaccccagggccagcactgtggggacacttaaaattggctagccagacaatttctggcttatgtcaaaagaaccaacaggaggattcct

SEQ ID NO: 298060 - DNA, 575 bp, Homo sapiens
aaaccaggatatatggtcaccctacattattaaaaactaattttgcagcctttgcttatcttcagtgttgcagatgttataaagggtgaacactgtaccatttaaaggctgagagattagagagagaagaccactcggagtcagaattactaatgtgctttcagtctcctgccacttagtagatgaaggtaagacatgtgctactcctttacgttaagccaagagaaatagaaagaggtaaacaggtgtcaaggtaactgatttgaatgtcttgctggtgtcccctgaggaaactggtgtctgatcatcgctggaagaaacctaaaagaagaagttggttataacttgaagatccaagagcaaaaggtaagctagagcaagttgtcatccaaagacagcagaacaagggccatgtttccaataaaccaggtataagcgccagygaaggcaaatgaaaccccatcctaacagaagataggcccctaaaaccccagggccagcactgtggggacacttaaaattggctagccagacaatttctggcttatgtcaaaagaaccaacaggaggattcct

SEQ ID NO: 298061 - DNA, 542 bp, Homo sapiens
tgaagggtaatttcgctgcacaaactctcttctcttgtctgcctccatgtgagacgtgccttttaccttctgccagaattgtgaggtctccccagccacatggaactgtgagtccattaaacctctttcttttgtaaattgcccagtctcgggtatgtcattatcagcagcctgaaaatggactagcacaccagcctagaaattctggagctttggtgggtaatggaatgctctacccaggaaactcattatgtttgaaagtaacaagaggagatgagagggccccctccttgtcaattgttccttgcattctggacatatagtgaacatcaataggaacatgggtgtattcctttcctatatctgctgttaacaaattaccacaaacttgrtgggctaaaacaacacaaatttttcttacagttctgcaggcagaagtttggcctggtctaagtgggctaaaataacgtgtctgtggggcttttctccttctggagggcctcagaaagaatccttcctcttgcctttgaacatcaggagac

SEQ ID NO: 298062 - DNA, 622 bp, Homo sapiens
aacacctcgctttggaatgggtgaatacttggcatttcttgttttgtttttcagagacaataagaaacgttacacttggcatccttttgcactaggaattgtgccaaaacatgccactagatgcagagctaaaagatgatacactggctcatgcctgaaatcccagcagtttcggaggccgaggtgggcagatcatgaggtcaggagttcgagaccagcctgacaaacatggtgaaaccccatctctactaaaaatacaaaaatgagctgggcgtggtggcatgcacctgtaatcccagctactcaggaggctgaggcaggagaatagcatgaacctgggaggcagaggttgcagtcagccaagattgcgccactgcactccagcctaggtgacagagatagactccatcttaagaaaaaaaaatgatacacaggggaacaatgttaactatataagtaccagcaatcatttggaagtgcttgttggtctcacttatcatagatttaatagccagaaaaaaatttaacaagaaatagttttaaattcctttttcagatgttaggcatarcaagacaggtctcaagacaggtggtttggtataatgactaagagcttgggttc

SEQ ID NO: 298063 - DNA, 576 bp, Homo sapiens
agacacctgtcaagttttgcacctttactatttatataaataaatygaatttacatcttagttccaatagtttgattcttttctattttccagaaagaaattcttttcatatacaagtaatgataattttgcatttttcttaatgttaaccacagataggattttagtttcctggtctattacactgctagacaggccaaaacatattttaaagcaataagcattttttgtctgattttaatgggattgctattatgtattcgaagtaataaataacctcgtatgttgactttgataattgtattaaaatgctttctctctttttctctgccctggaaaaaatggtcaagcatgggaatcccttgtaacactaaagtctgaaagaacatatctctgaaactgtcttttaatcttgtattattaaagggcttatagttcctttgacacatttttaccggtctcgataccgttattgagcccttttagtctacctagaatggctttgtttgcttggttcttgcacttcctacagagttaaactctgtatgacaccctccagaaagccgttagagatat

SEQ ID NO: 298064 - DNA, 557 bp, Homo sapiens
agttcagtttagaagcattcttgttaagattacttccaagtatttaaatttttgctcctgttatgaatggactctttttcaacattatattcactaactgttggtgatataagacacctgtcaagttttgcacctttactatttatataaataaattgaatttacmtcttagttccaatagtttgattcttttctattttccagaaagaaattcttttcatatacaagtaatgataattttgcatttttcttaatgttaaccacagataggattttagtttcctggtctattacactgctagacaggccaaaacatattttaaagcaataagcattttttgtctgattttaatgggattgctattatgtattcgaagtaataaataacctcgtatgttgactttgataattgtattaaaatgctttctctctttttctctgccctggaaaaaatggtcaagcatgggaatcccttgtaacactaaagtctgaaagaacatatctctgaaactgtcttttaatcttgtattattaaagggcttatagttcctttgaca

SEQ ID NO: 298065 - DNA, 584 bp, Homo sapiens
ctctgtgcaccctgtacatcgtgggaacatatttacataagaaaataaaccaagatgcttaaagaagcaaatactgtttcagttaccatattaatcagcttgaaatatagtttgttcatattcttcttagcataaaagtattcaatgtctcattacttgtgattaaatcaactacgttcaataaacatttattaacatctactgtgttcaaggcattttgctgagtgttacatgccatagccaccaggtcttagtaaaacttgcaatcggaatatgggrttttgaggaatgatagaataagaaaagtagagaaaaataagtttagaagataggtttaagtaatatgctttgtgttttcaatgtagtattggctgggagaatggggaaaagcatctcagtgacatgggtctctttggataattagcattttagtgctctacacgttcagagaaacttctctagtaacaaactatagaaatgatccctgaaagtatagtcttggataattagcattttaatgactgagatagaaaggtgaagtagatggtatttgatacggtttggctgtgtccccacccacatct

SEQ ID NO: 298066 - DNA, 584 bp, Homo sapiens
ctctgtgcaccctgtacatcgtgggaacatatttacataagaaaataaaccaagatgcttaaagaagcaaatactgtttcagttaccatattaatcagcttgaaatatagtttgttcatattcttcttagcataaaagtattcaatgtctcattacttgtgattaaatcaactacgttcaataaacatttattaacatctactgtgttcaaggcattttgctgagtgttacatgccatagccaccaggtcttagtaaaacttgcaatcggaatatggggttttgaggaatgatagaataagwaaagtagagaaaaataagtttagaagataggtttaagtaatatgctttgtgttttcaatgtagtattggctgggagaatggggaaaagcatctcagtgacatgggtctctttggataattagcattttagtgctctacacgttcagagaaacttctctagtaacaaactatagaaatgatccctgaaagtatagtcttggataattagcattttaatgactgagatagaaaggtgaagtagatggtatttgatacggtttggctgtgtccccacccacatct

SEQ ID NO: 298067 - DNA, 486 bp, Homo sapiens
tttttctctccagactgatctgtttgttctgtacatttcttaaaagtccttgtttccttcattatcacttatgtggtgctgcttgcgataaacttatataaacctctttaaattgtgcatttctagtcttgactaccttgtgtggaaaggagtacagaaatgttaaggactattytagacgtggctcatacactttgatataggggcagcttaggagtgaccatcaggtggaaacggagatggagggccctgtgtagcactttatatcagatagagaaaatgtcagttgtgcatgtccagtacagagagggaggtaggacctccaaggccacctcttggcacttccattgattgtttgaataatttccgtatattattatgggcattatgcctttgtagttcccttcaggaatttatcagaattcaaagagaaagtgagctagctttttaaagattcctgccctgactctgcacaactggtttgag

SEQ ID NO: 298068 - DNA, 581 bp, Homo sapiens
ggctttgaaggcaggtccaaggggatttgtattcccttgcactactcactggctgggtcatgctggagtagtgataaacctctctgaagatgtgcttckttattaatttcattcttgcttcttggcgtgaaccctggcattttcatgatttggttctagaccccattttctccacacaccacagtcacactaacaacttgacattctccacacactagatgtctttgactttgcacaccccatctgttctccttccatcccccctacttcttttggtttgagttctgcccttgtttcaagaccatactcaagtgctaccagtttgaaagcctctggtgactttcttcaggcagagtgattcacccatttctttgagatcccacagcactttgcgtgcatttccaactatggcacctcttacaggtactcaagggcctctgactactcctgtcatgccagggatcatggcagccaggaaccaccctaatgctgttttgtctttagtgtctgataaagcaccagatgttttggggtcttgtaaatgattgttgaatgaggaagtatctgatactgtagatgta

SEQ ID NO: 298069 - DNA, 581 bp, Homo sapiens
ggctttgaaggcaggtccaaggggatttgtattcccttgcactactcactggctgggtcatgctggagtagtgataaacctctctgaagatgtgcttcgttattaatttcattcttgcttcttggcgtgaaccctggcrttttcatgatttggttctagaccccattttctccacacaccacagtcacactaacaacttgacattctccacacactagatgtctttgactttgcacaccccatctgttctccttccatcccccctacttcttttggtttgagttctgcccttgtttcaagaccatactcaagtgctaccagtttgaaagcctctggtgactttcttcaggcagagtgattcacccatttctttgagatcccacagcactttgcgtgcatttccaactatggcacctcttacaggtactcaagggcctctgactactcctgtcatgccagggatcatggcagccaggaaccaccctaatgctgttttgtctttagtgtctgataaagcaccagatgttttggggtcttgtaaatgattgttgaatgaggaagtatctgatactgtagatgta

SEQ ID NO: 298070 - DNA, 581 bp, Homo sapiens
ggctttgaaggcaggtccaaggggatttgtattcccttgcactactcactggctgggtcatgctggagtagtgataaacctctctgaagatgtgcttcgttattaatttcattcttgcttcttggcgtgaaccctggcattttcatgatttggttctagaccccattttctccacacaccacagtcacactaacaacttgrcattctccacacactagatgtctttgactttgcacaccccatctgttctccttccatcccccctacttcttttggtttgagttctgcccttgtttcaagaccatactcaagtgctaccagtttgaaagcctctggtgactttcttcaggcagagtgattcacccatttctttgagatcccacagcactttgcgtgcatttccaactatggcacctcttacaggtactcaagggcctctgactactcctgtcatgccagggatcatggcagccaggaaccaccctaatgctgttttgtctttagtgtctgataaagcaccagatgttttggggtcttgtaaatgattgttgaatgaggaagtatctgatactgtagatgta

SEQ ID NO: 298071 - DNA, 592 bp, Homo sapiens
gaggaagggaacacggtgcaaaagaaggtatggcaaggtggaggagcccaggaagaagcagtttctgtgtatccaacagaaagggtatcctgagagaaaggaggagataagtttcccaggtataaaagaagttcaggtgaagtaaataggaatctgagctgacaaagaggcaatgtcgtggggttgttgccatatgcatactctacgacttatgcacagctcacaagcggccagcatgggcctatttaagaatgctttctcttatatgatgggaaccacctatttagaacaattcagctgtcccatttcccagagttgggctctatgtttgttatcaactgtgtgaggtctgtcctgcagtgttacaacaggcaaacgtaggtttgagcccttcagaacttttcctatgaaacatcttttaaatttgcccatttttggcaagtatcatcagattctcttttgccgccagccatgctacctgtatccaaaggaaatgtcaaggaactatgtgtaatatatatgtaygtatattacatatatatatagatataaaatatatttctatccttttatttttagttctgaaaccaga

SEQ ID NO: 298072 - DNA, 592 bp, Homo sapiens
gaggaagggaacacggtgcaaaagaaggtatggcaaggtggaggagcccaggaagaagcagtttctgtgtatccaacagaaagggtatcctgagagaaaggaggagataagtttcccaggtataaaagaagttcaggtgaagtaaataggaatctgagctgacaaagaggcaatgtcgtggggttgttgccatatgcatactctacgacttatgcacagctcacaagcggccagcatgggcctatttaagaatgctttctcttatatgatgggaaccacctatttagaacaattcagctgtcccatttcccagagttgggctctatgtttgttatcaactgtgtgaggtctgtcctgcagtgttacaacaggcaaacgtaggtttgagcccttcagaacttttcctatgaaacatcttttaaatttgcccatttttggcaagtatcatcagattctcttttgccgccagccatgctacctgtatccaaaggaaatgtcaaggaactatgtgtaatatatatgtatgtatattacatatatatatagatataaaatatatttmtatccttttatttttagttctgaaaccaga

SEQ ID NO: 298073 - DNA, 572 bp, Homo sapiens
tgcctttgcttagcaacaacctcagcttttcataacagcttctccctgagtctcagcagtaactctggagctgccagcagggcggggaagcctctcggatttaaatgggatagaaggtaaaaattcccagaggttgtgggttcccggagggtcataaagcctctggcattacagctctgtataatggcttggctgctaatctcttttaacataaaggactggtacccccattttattgatgtggttcagctacctgctcttactcaatagtgctgggttaaccagacaggatgtgttctgggcacgcatctagtcctagtgctatttggctcaccaggaaatctcacttaggaagttcatcttagcgggggggggggggggcgggggcagtttgtgaaagtgttttcaaggcactgggagataaagaaaaggcagagtgtggaataggcagtatattcttactctgagttttgtttcccragagatcattatgttattcctagaaatttcccaaagccctaaagcttttcaaaagcccctggattagcatggaattagccccgggaaaaagg

SEQ ID NO: 298074 - DNA, 563 bp, Homo sapiens
attctcaatgcttcaagttagacatctggacccactgtgtaccagccttgatgggggaatatttaacaacaggagcagaagagccactgcacatttgcatggctggaaaggagtagatattccactgaaagaagagagatgtgattctacaggagtatttggctagagtggctagggaccgtccatccctcacaatccaccttgcattcatgagatgctcatgccaggggacatcctaatattaggggtagtggaggaatcctaaagtatggcagtgattatctctgaatcacaaggggtccagtatacttggaatccaggccaatctgtagcaattgtcctccatcagtgcctgyaccaagacaaaaaaaatcactacaggctctattcggggtggttttctgtgctcattctgatgaacattctcttaccaagctcccatttccagaaaaggtaggtctgtgacttgttcctataagctcctttcaaagccatgtcctcctagatggaactctatatctggttgaagacctgggaggcagaataccctttcctgtggtgcc

SEQ ID NO: 298075 - DNA, 591 bp, Homo sapiens
aagccgggtgtgctgtgttcttcccgtttgggaaaagaaaactccattgtacctaaatatctgcaaggcaattttcaatttcttttttaaaactyttttccccccaaagtattctttgttcccctccctcaaatttctgtcccatgaggctgtgtttcttctaatttcatttgtatatatctgattggttgctgtcggtgttgccattgctgttgtgttggtggtggtggtggcggcagcctttcccgggtggggaagtggcactcacatcaaaatttgagaagcaggtgcaagaccagaagaggcagcagccagacgcagcctgccctcctcgacgtgccgttgctcacctcgctgacggcgcctggacctgtggagagaacacactcgccgtgagtggtctgggagaaaatggaaggaaagcccggtggttgcctggtctgctgtcatttggccttgcccctggtgagtcatccctctaagtgaaacacatggtgttccagccccagcattagaagtgaacgttctatggcccacatccccaagacacacacactagataacgggaagccttcccctgcaaggagagaa

SEQ ID NO: 298076 - DNA, 550 bp, Homo sapiens
gttagccacttttctactgctctctattttacgtctgtgaatacagtcacatggaggttcaataaacgtaagttgaatcataggttgaatctgaataagtctattgacttcactttttctatttctttgtttcattttcttgcttgtggctcatckctgtggtgctgtacatcactaaagtgagtaatgcagccctcactctttccatgataaaaaggtactttttttcatctgtcatgcaccttcccatgtaatgcatttcttttcatctccccctccacctccaaagtctacagccatcctctgatgacagtttgcaaggccagaatgtgaggggatgaacagggtggggtgaggtggggagaggaggtcaggggattgggatggaaggtgggagaagcattcccctccctggcttcacagctgccttcctgaaaggctactgctgtggtcagcactgtcctcagggtgacagcagtgcacgcggcacccattttattccactgcttgcttggatgcttagtcatagtcatagtcttaatgagtcact

SEQ ID NO: 298077 - DNA, 583 bp, Homo sapiens
tgggcatcagacttctgtatttttagatatctattcttacagactggggttctgtaaatgaaagaaggttctcccacagtcattgggcagtgggtggacaaggaacccaatcatctattaaaatgatttgaagatgaacaaatgtttctgtgtatttgcatctgaattgtgaaaaacatatacgtatatgcatatacttgtatatattgaactctttcggaggcacactgagcttttgtgggcacagaattgattacctagacactgtcagatatttacttaaaaataataatatattaagaaaagtatcaatgttacttccctgtgagaaaactcctgaaaccttcaggcttgtgattatgctccactaattggtgtgtggactcactgggctaacagaaaatttagctaatcaaaacgcagccatgctctgaagamccactggtcacacccaaggtcattcctttaaagctgttagaagaatttagttactgaaggagtgatgctccatgttgatgtggcactttcaaagcagcatatgccaaataaaattaaatgaacatttatgctcattataaaaatg

SEQ ID NO: 298078 - DNA, 598 bp, Homo sapiens
tagaagaggtagcacttaagctgagatttttaaaggctaaatataaacaaaggcctggaagatcaatggcggaaaggattccaggcaggtggaatagcctgtgcaaaaaatcagaggcatgaagacatatggttttaagtatttatacataattgtttgagcctgggatttaacgtgcagtagtggaagttctggtgagcattaagtgcgaacatgtgggctggcatctaaacatgacaagcaaaaggactgtaggatactcctgagaatcttggatgatcatctgcaagattggagcgagagtcacatgaacagatctctgtgataaacagtgccctctagcagcagaatggaggaggaagcagaggccaagtctaaagacaaatggattcatgagagaaatagcacaatgattccagtaagagataatatgtgcctcaggtaggcagtggctgtggaaatrgacagaatgtaatatattaaaaggaaatttagaagaattaattgatgggacttggatattaattgaaaagatagctggaataaaaagaaggcatctaaaataacttacaagtctctgtttggggccagcagatag

SEQ ID NO: 298079 - DNA, 609 bp, Homo sapiens
agccctgcatcctccgtgcatttcaacttagctttggtgggaaaagactttcccccatttagtgaaaaaagaactccccagatcgatatatctattcttcaaaaggattatttataagttatttcacttcccatcctccacaaaatatttaatgaaacatacgtaaggctctgcttccccgtggagtgatgttcttttgcctatcatcatctacatttttgcgggctttttcttggcagacatgtgagttgacatggatttggytctgcaccatcactaggggatgatccagaggatcatagcaagggggtaccaagccgtgtgtgtcctgggctccttttacatccttttcagagagctgtagaatctcttcttaaggaaaacacacaccaatgcacgtatgcataatattatttcctggtattcaaaacccctgaggttaacagttccacaattctcagattaagaacccctgccctacaaaatgtattgatggctaaatcataggctgccctgcttcccaaggctgttgggatccaggtagtgaaggtgacttcttatctgatcctgagcacaatggtgtcaggagaaccttaaccctttaggagc

SEQ ID NO: 298080 - DNA, 501 bp, Homo sapiens
aggtgtaatctcttgcattactccattctcaaatggctataaagaaatacctgagactgggtagtttataaagaaaasaggtttaattgacttacagttctgcagattgtaaaggagacatggctgggagacctcaggaaacttaacagttacagcagaaggagaaggagaggcaagtatgtcttacaatggcaaagcaggagagagaacaaagggggaaaggctacacacttttaaaccacaagatcttgtgaaaactcactcagtatcttgagaacgacaagaggaaaatctgcccccatgattcaatcacctcccatgagaccctctcctctaaaacatgggaatgacaatttgacatgagaattgtgtggggacacagaaccaaaccatatcattccaccatggctcctcccaaatctcatgtccttctcacatttcaaaacagaatcatgccttcccaatagtcccccaggtcttaactcatttcagcattaactc

SEQ ID NO: 298081 - DNA, 439 bp, Homo sapiens
ctaagaatgttttatatcttgatagattatggattatttggatgtatgcaaatattcaaactacaaattttgcatttaaaatgtatgcatttcactgcatattagttattcctctattaaaatatttcttttttattgctaaaaatatgctattaaaatcactaaatgcaattaattacctttaccatgcrctaaataaaacacgaatcccagttagcaaacttttaaagaaaataatgcagtttttttttcactttttatcattgccttggttagcaatttattttaataaacctcagcaaattttcattaagccattatgttgttttaatgagcttatactttgtacattttagctgtgtgagaaaatcaaactctgacaggtccaggtatataagccagcaataccaggcttcaaagaagccccaagatgcaagag

SEQ ID NO: 298082 - DNA, 439 bp, Homo sapiens
ctaagaatgttttatatcttgatagattatggattatttggatgtatgcaaatattcaaactacaaattttgcatttaaaatgtatgcatttcactgcatattagttattcctctattaaaatatttcttttttattgctaaaaatatgctattaaaatcactaaatgcaattaattacctttaccatgcgctaaataaaacacraatcccagttagcaaacttttaaagaaaataatgcagtttttttttcactttttatcattgccttggttagcaatttattttaataaacctcagcaaattttcattaagccattatgttgttttaatgagcttatactttgtacattttagctgtgtgagaaaatcaaactctgacaggtccaggtatataagccagcaataccaggcttcaaagaagccccaagatgcaagag

SEQ ID NO: 298083 - DNA, 629 bp, Homo sapiens
tattctatttacagcacatttggcgttttattaaataataacaactaacttgggagtgagccacatttctctcatactgggtatcctttctcattaggaattgctcaggacattaagagatcatttgtttcacctgacttgccgttttctaagttaacaacactgttaagattggggtattacaatatggccagaaagcttcctctttctcttatttcattaactacagttaatgaaagtgacataatttgaccaataaaattttggatgcctttctgtttcaaatgtgtataattgagcttgctaaaaatgttattgactgcaaaatttatagatgaaaagtttgttttgcttgggtccaatcaagctggaacataaattgcattgaaaaaatatagtaatactgtgcttacaacaaccttctgacatgctgaaatgcctggtttaagtacctagaaaagggattaacagatttttgttgtgggaagaaaatactgggggatgtgggcttctgttccagaggagtgagtgatctgaattccaggaaaagctatgtgaatggaaagaaatgcaaggaaaacgcatgctggcaacttctgctccatcaaamtgaaagaagtagattcccg

SEQ ID NO: 298084 - DNA, 325 bp, Homo sapiens
gtattttgtttttatgtattgtcttttgtttatattttccctgctttcatggggccttaaaatccttgatggcggacgtttttgtcttatctttggttatttagtattaactctatgttgcttttatgtgataagttattttaaaaatctgcaaaaagcaacagcttttcagaaaacttagagacttgacaaataaaaatctctgaaatgctctaatgatggagacagataatcttacctgaattttagcacagtcgaatcacactaaaattggtaacytttatgttgatggttttcccattaatctgtccatagaattttgtta

SEQ ID NO: 298085 - DNA, 546 bp, Homo sapiens
tttgtgcatgtaatagaaagggcccggctggtcttcacaagatagaggtgaaataggttttcttttttcatataaagaatagttgttccataaatttgctttctaaaatagttaaaggaaagttcagtgttgccaggactagcttactgtaatcacaagtcattttttaaagtcatggaaaactggaaacatacttaagtaatttgagacttaattacaggaaagctttgcctgtttacaaacatctcagttcatcttcattcattttttacaaattcaacaaatattcattgaatatcttaaatgcaccaggggctgttgttcacccagtgacaatgaaaatatttggtttcatttaatataggttccgaaatactttagttaaacttaaatataattaaataactaaagtagtttccctctgttggatgtaagcaaggcatttttaaaagtyatttttatgtattcattagcattttcaattactttttccttctttgttactctttttaagaaatatgattgaaaattagcaatatacttact

SEQ ID NO: 298086 - DNA, 601 bp, Homo sapiens
gtcattttcagcaacatggagagaactggaggccattaccctaagtgaattaatggcacagaaaaccaaatactgcatgttctcacttatgagtgggagctaaacattgggtacttgtgaacataaatataggaacagtagaccctggggatcactagaggagtgagggagtagggagggggacaagggttgaaaaaccaactaatgggtactgtgctcactaccttggtgatgggatcagtcataccctaaaccttagcatcatgcattatacacttgtaacaaacctgcacatatactccctgaatccaaaagctgaaattgtttttaaaaagtaaataaaaagaaaaaaattaaaacgacataattaattgtatttcatgatctatagagtagatctaaacttgaccaataacttgtttttattaagacacttattagctttggggaagggaattatcaatttgttctcttycaatattctattatttttgttttgtgtattcaaaagcaccatccagttttaatcacaattttagaaacatgtttacaaatagttcacatattataatagtttgattttttagaagaaaattcaaaa

SEQ ID NO: 298087 - DNA, 628 bp, Homo sapiens
aggaacatacagttgtaaaatgtagaacatagaaattaacattttaaaagcatgcctttttaaaaagcatgctcctatgtgtcatagctttctgaaaccactaaaaatagaaactgttgamagatctctgatgtagaactcttgcagtgaaagcttatctttggaagaaactgggctgtctttctggaagagtcttttctcagagacatctttgaaacatgaattctcttttagcttagtgttcaaaactattgttaatacctaatttttgagaatgtaagatgtcatcaattctgaggtgcaccattatttatgtaccatgagaaaaaaaatactgtcaataaaccatgacagaaaactatgtttcctagtcatacaggattttttattttacacatattaaaataactattttagactattaagacacagaagttattatgtcttctaacgatgatgcatattttatagccctgtccagatgtcttttggttccccatattttctgaaaaagcctgtgatgaattggtagaagaaatggaacattacggcaaatggtctgggggaaaacatcatgtaagttgtaatttcacactaagaactaaaatgtatgtgggggttaagtaga

SEQ ID NO: 298088 - DNA, 586 bp, Homo sapiens
ttatttatatatttttaagtatgatacaatacaacattttaaaaggaagaattgtgacaccttattctgaaataaggagtagctagcatatttctagttaatactgttgaagtgatttgttttctgtttttatctaatttgtaaactgctaatctatgttcaatagagaatatttacttggattaataataaaataagcataagagtagtcagattcgactacaactgataaagcaatttgtttagagtagataaaattacttaatttacataatattaaaacaacagctccatagggtcctattgtaaaaacaaaattttaaaaattgttctttgttaggaaaaggtcaatagtaatttttctttattatcagtacggaactggtaagtgcaacaatgaggacaagagtcttgtagtaaaatttgggtgattcagatactgtgaaagttacaatccttgttttgactttttgaagattaacaaaatttattcctgctgaagttatgcactaaattagttctaatttactccagctgttgcacatttacttactgaccrcacagccacgctgatcacccttttctt

SEQ ID NO: 298089 - DNA, 608 bp, Homo sapiens
tgttttagcctctaaaccactaggacgtgatttgagaaatttcatgaagcctcaaggtgttctttcaggttatttgtacaatggggaagaaaatatctatagttcaacctctttcccataytcatgacagatcacctggcctgtgcttcagtattttacagattgttcatctgtggctgaaaagctcttatcaaaatgctcttacttttattgagctgataaagttgccatcctaacttctatccattggttctggctctgcctcctggaggaacacagactatgttgattgtcttttccctgtgttagcaatgcagatggattgtaattttcctaaatctgctcttcaagaaaagatttcaagttttgaaaaccatatcatcatcctgtcctcggtgacacctgtttctctcctttgtcaacatcacctttcacaatgtgtcacctggatagcagatcgaacaacctggctataatagtggttctgatagcctcctttgatctcgtcattgtattctagaaatgaagcccaagattttatgtatttttaccgcggtcataccacgttgatttaaaagatcaatgattttcaagccaggctggacatt

SEQ ID NO: 298090 - DNA, 608 bp, Homo sapiens
tgttttagcctctaaaccactaggacgtgatttgagaaatttcatgaagcctcaaggtgttctttcaggttatttgtacaatggggaagaaaatatctatagttcaacctctttcccatactcatgacagatcacctggcctgtgcttcagtattttacagattgttcatctgtggctgaaaagctcttatcaaaatgctcttacttttattgagctgataaagttgcmatcctaacttctatccattggttctggctctgcctcctggaggaacacagactatgttgattgtcttttccctgtgttagcaatgcagatggattgtaattttcctaaatctgctcttcaagaaaagatttcaagttttgaaaaccatatcatcatcctgtcctcggtgacacctgtttctctcctttgtcaacatcacctttcacaatgtgtcacctggatagcagatcgaacaacctggctataatagtggttctgatagcctcctttgatctcgtcattgtattctagaaatgaagcccaagattttatgtatttttaccgcggtcataccacgttgatttaaaagatcaatgattttcaagccaggctggacatt

SEQ ID NO: 298091 - DNA, 565 bp, Homo sapiens
agctgaaggaaaagaatgtgcttattaagrcccattgttttactggggcccattgtgtaaaggtcatgtttgacagttacacaagaaacttttcccctaccttcctttgtgcccaagcattttatttgtgttttactgtttgctttttctggctgcttatagttaaaaaaaaatttcttaaaatgcatagggctaaaaagaagctttaatagcagtatctgtccaatataatggtgcttctgctctgtcacctagtcataatctttgttcaaaacattagatgtcgtgatggttaattttatatatcaacttcactgtgccatgggatgcctagatatttggctaaacattattctggctgtgtctttgagggtatttctatatgagattaacatttgaatgagtagactgagtaaaatagattgccctccccaacatggatgggtctcatttaatccatcaaggcctgaataaaacaaagactaactaagagataattctctccttctgtctgggacattggtctcctcctgcctttggacttgaacacaaactggacctagca

SEQ ID NO: 298092 - DNA, 655 bp, Homo sapiens
ttcattcattcattcattcattcattcattcattcattcagcacctgtgtccaacaccctgcaaggcactacagattcggcagtaaataaaaatgaartcattgttcttagagtgcttgttctccagggaacaaagacagacaggcaaacaaacaaagaatgaataaaaaatatgaagtagattagatagtggtatcagaaagaaaaagaaaacaaagtatgaagatagaaagaaacaaatgtcttgggggaactatttcagatagagtaaagggaaagaaagataggaaataagaagaaatagcacttctgtctttttccaactttataaccaggaattaagcctctaaacacagcttccttcttttttcatcttacaggtcctcatgataataccccaactagacctttaacttccttcttttcgtacaagatctcctgctcactaagatggcacacaacagagataattgcttattttcaaggtttcagtgttttctcataaacattataatatggcatatatattattttatatattacataatattaatataatatataatattagtatataatgataaatatgtattatatgtaataaataatatataaactgtatttgatataataaatatatataataaatatataa

SEQ ID NO: 298093 - DNA, 379 bp, Homo sapiens
tggaaaacattctgtctggggccacttattataggaataaacagctctgtagatttagatgttctggggaagtaccctatcattggaaaatatggtaagtgatcatgagtcctcaagaagaggttatatttgtttggtattctttgcttaattatcacayttgacagaatgatttgcattattaacattattaatagaaagtgtttagagaaagttgaaaggcaccatggtttaattgactggaatgctttatgactaaaaatgcagagagtagtttgtgaattttcaggaactgatcctattctttattaaagcgtattgtgtatttctgaaaaagcacacatagtatagtttaattcagactctctgagctgtatat

SEQ ID NO: 298094 - DNA, 559 bp, Homo sapiens
tataacacagtttctattgatgaaggtgctctataaaatagctatatttgctaattaacaggttggcaacaatttgcaataagaagtagaaaagtacctgaaatgatagtgaaattcagtcctttttaattatctttttttctacatcctgaagcacattttctcctttcaaaataaatgcgctgctctttgcctggaagtaccaaactataaacctgaaggccagaaaatttgtggttcagatgagaaagtctggaaaagctgcctaagtgaacactgtgtattttctttgcatgtgatgatagaaacttcatgtttatcctccgattttcactttctaggccaacacaatcttgcagtctctatttttcttgattcttgtcctgaattaacctcaaggtgactaaagaaatcttggaatcttattattggagttatgcgtaatgttcagaactaggaaatattctggtaacatttgtgagagttaccttgatttcaagctttscattaatgtatcagatgcgatactagaaaatgaattcagccattacaaaaacct

SEQ ID NO: 298095 - DNA, 513 bp, Homo sapiens
gagtataggcgtcttttttatgtaatgacttctttccctttgagtagatacccagtactgcgatggctgaagaatacttctcaaacgaagaaatacgagtggccaagaaatatatgaacaaatcctcaacattactaatcatcagaaaagtgaaaatcaaaaccacattgagataaccatttcacaccaatcagaatggcttattggtaacaggtcaaaaaacaacagatgttggcatggatgcaaagaaaaggaacacttacacattgcttgtgggaatgtaaattagttcaacctccatggaaaatagtatggaaagttatcaaataactaaaaatatagaattcctataaagacagagtacaactttatgtaaaatctctaaacttccaatcaaaagaaagatagaaaattatgcaatgtaaatcttttagcagactgacacatctaaggataaggaaagataaaatrtacagagttctttaaccaaacagtattataatttaaataact

SEQ ID NO: 298096 - DNA, 595 bp, Homo sapiens
cctctgtttacaaagcagctagagtgatcatttcaaaacagttagatatctgaccatgtcacttcattggtaaataccctcttaggatagtagagaaactccattaccacaatgtggtcctaggttacttctctcctctccaatctcatccactttctctctccactttgttctctcttctccaaccacattggcctgtatttttattttctaataatgcctgcaccctcccattcaaagagaagagccttttcaagaccattatctaatattcctccctgacatcttgatgtggccactgcctaggtaaacctgagattcttacacatatgctatttccttagagagaccctctctgacctactagagtaggccagtacccatgttttcactgcactttctacctttctttcagggcactcaccacaaattgtaattacawattaatttgcataatctcaaattatgaataatctcaaattatgtgagattaaagtctctctctccaatgagactgtaagttacagaaaggcagagaacattcttttgctcacaattagacctccagagcttatcacaatattaagcacacagt

SEQ ID NO: 298097 - DNA, 556 bp, Homo sapiens
ggagaactgtccaagtacaaacaagtctaactccaagtggaaaaaagaagatgagagaggttgtgtggaaggaaagtttgggaaagagttcaggggtcctcaagccaaaacaggctaccagaagtgtcttatgactcccacaaatctttctacttcagtatccatccctgccatgctcartcattggatgaacagctcgtgggaagcatggggtgactgcaaaagagtacgaagcagccgaggcctcttagcaattacactccctgtagttggaggagcgtcatctacattcctgtggctgtccaaaactaatattatttttccctgattacaggtgtttagtatcataactcagaataaagtcagcaccacattaaaataaaccttcttatgtaaataacacttaagagtataacaaataagaaatgacttgccaaaccactggccctttattttttatcacaactcagaaacaaagacagcaccatattaagttaaacccttttcccataaagaagatttttatttatcaaattgctagactgccagtctggtg

SEQ ID NO: 298098 - DNA, 556 bp, Homo sapiens
ggagaactgtccaagtacaaacaagtctaactccaagtggaaaaaagaagatgagagaggttgtgtggaaggaaagtttgggaaagagttcaggggtcctcaagccaaaacaggctaccagaagtgtcttatgactcccacaaatctttctacttcagtatccatccctgccatgctcagtcattggatgaacagctcgtgggaagcatggggtgactgcaaaagagtacgaagcagccgaggcctcttagcaattacactccctgtagttggaggagcgtcatctacattcctgtggctgtccraaactaatattatttttccctgattacaggtgtttagtatcataactcagaataaagtcagcaccacattaaaataaaccttcttatgtaaataacacttaagagtataacaaataagaaatgacttgccaaaccactggccctttattttttatcacaactcagaaacaaagacagcaccatattaagttaaacccttttcccataaagaagatttttatttatcaaattgctagactgccagtctggtg

SEQ ID NO: 298099 - DNA, 582 bp, Homo sapiens
agacagcagtggtttggcttcaagtgacaaggataatttacatcagtttacaaattaactatcagtatgacaaacatgaagccagtcagtatgtgacatgggatattattaaataactgtcatcttgtaatatatttagttaatttgtttcaattcattaatttttaaattaatcagttctatacgttcttttgaaaaaaaaatctggaaggattttcctaaagctcaacattgccctcctatggattaaaagccatcatatggtatttccaatgtttataaaagacataggaaaattatacttctgtggcataggttttaaaagatgtaactagctctcagaattctgaayagcactcacaactgtccccagtatccctaatatgaccatatcatatttgattttctccttctatagatcagttctgccctgaagacagttcacaacgtcagactaccctttggtcttgtgaggcacaatcattacagaaaaatgagcaacatcatgatgtgtctgtagttatttcatcgagtctggccgatacttaacatttcaaggtacttactgggcattgtgtatta

SEQ ID NO: 298100 - DNA, 539 bp, Homo sapiens
tctgggagttatgttgagtttaaaaataaaggaaattttccattcattaagagaagaataaaagtgtttctcagttttatggtcgaggctgccagatagaaataagccccaaattctgcaaggaatccagctggagccccggaaagagcttgtgttaagtgatagccaagcagttggacagagtaggaataactggtgagtctgaagattctacttgtccagctagattaagcagaaagaaaatggaaaggagttgggaaattaattttttaagctatttgagaatttcactgtactttttgaaatgaccatattaagaaaatgtgttttggcaaacgtggtgaaaaataagtaatccawtagcagtcattttcatacaatgtgtataaaaagaatatcccttaatcattataaaataaattgcaattaagtctggggtaagttgttttaacctctctgagtctcagtttcctcatctgaaaaacagtattattattactattttgcaagtttgagcatatggatgagaactaacacag

SEQ ID NO: 298101 - DNA, 576 bp, Homo sapiens
atattaaaaccaaaaatgatcccaatattcaaatcaaagtcatctggctctagaacctaggcccttactacttcatgatagtgcctttccaaattttaaaaaatatgcaagcattttttttctcttgacacaccacaaattaattgtcactttgcactggttgggagacctagtaaggtttgttaaattcatctctctatataaggtaaagctataagtcaatataattagatttgtaacttatcaagaaatgagccaatgaaaaataacaacttctgcttcggggagagaggcttgtgaaaacggttttgttttttatttgttttgtctgatgggtagaatctgcatgagagcaaaatggaagccctgatcctgatcgcaaaccagaattgctgtagacagccttacatcattccagattaaatgctgcctggagacccacatctactttgttatccctttgatatatgaaaacgtawccctttcccactgagccatggcactggggacacactatcagcacctacagaaatcaacacttgttccaacaaaaagaatgtctccaccctaaaatta

SEQ ID NO: 298102 - DNA, 567 bp, Homo sapiens
atatattaattaatttaaacctaattaatggatttaatcattgccttataaaatcacaaggctctcaagaaattcttttacgagttaagtgctgcagtggcacattttgcttcctttgtagaaaaggacattcagcacaaactcctgtttggtcgttgtaagagtaatcacagtcatctgtgatgacccaaaatgaatataaatttattccttctttttggggggtgagagaaggaaattctcagttgaaggtggggtagaagacttacctttactttttacacagataaaatgtgcctttcacaatgatattaatacattgtcatcgaaaatactcttgcttcaattctgatggaatatttttctttctctaggttcatggaaatcttaccgctggtcatggtctcctggttgagttrataatcacatttcaattggtgtttactatctttgccagctgtgattccaaacggactgatgtcactggctcaatagctttagcaattggattttctgttgcaattggacatttatttgcagtaagtttccaagtccatttaaataatc

SEQ ID NO: 298103 - DNA, 430 bp, Homo sapiens
acaactttcagttcaacatattaaattgaaactattttgtcattaacaacttttagttaaatttataagcacttgaaaatgtagatgaaaaaatatattttactaattacytgtcagttgcagtaaactagttaagatttaaatagtaggaacattcttagcttgttgattaaactaaaagttgccccatgttatattataccaatcttaattctactaaaaatagcaatggttgtatgaaatttagaactaatttaaagtatatttgtaggtagaaagattaggaataacattaaaatattaattgggttttttgtatagtgtaatgatattattttagttttctttatacttttacacattttctagatttttagcaataaagattctttactttaaagtacatatgacttcattttgaaatagcaac

SEQ ID NO: 298104 - DNA, 625 bp, Homo sapiens
tcagtgttgaactctaccaaacatttaaagaactaataccaatccttaaactctttcaaaagattgaagaggacggagcacctccaaactcattttatgagaccactattaccctgatacaaaagccagacaagtamactacaagaaaagaaaattacaggccaatatccctgatgaacattgatgcaaaatcctcaacaaaataccagcaaaccaaattcaacagcacattaaaaggattattcacaatgatcaagtgggacttatctctgggatgcaaggatgattgaacatacacaaatcaataaatgtgacatacctcattaacagaatgaaaaaccaaaaacatataatcatctcaataaatgcagaaaaagcagctgacaaagttcaacatcccttcaagataaaaagaaaaactttcaaaaaaaaggtataaaaatgtagacatttatcaaaaaaatacatacaaatggccaaaactatatgaaaaagtctcaacattaattatcagggaaatgcaaattaaaaccacaatgagataccgcctcacacctgttagaatggctatcaccaaaaagataaaggataacaagtgttgaagaggatgtggagaaaacagagt

SEQ ID NO: 298105 - DNA, 524 bp, Homo sapiens
tgcaaatagagttcaggatgacttaaaaatcaagtataaacataaaatgctaggagtttagccagatgagcacgcaggaaaatctcagccctcccttctttcattaagatttctatttcatatactctgaaggttgatgtcaaagggtgaataagcaccgaggaaccccttgggaaaggttcagagggctcctggtcaaggttagccctatcattaggcaaaagaggcagtagcctagagccaaagagtattaggagcaatgaaaacgtgtagtgactggataccctttggctgacttcaggcttgcaggcatcacaacattttccagtgtacatagggcaayaaaagtcttcatctccacctctcaattcaatccaggacatacagtactgatttccaacattaaattacattgagggttttttactattgttgaatatagctatttcccattgcttataatgcatatctcttttaggaaaaaagaacagaaaaataaacgtgaaagagctacataatgtgag

SEQ ID NO: 298106 - DNA, 596 bp, Homo sapiens
ctgaacctcagcactattcacatattaggccagataattctttgttgggagtgggggactgctctatgtattatagaacgtctggaagcattgctggcatctagatrccagaaactcactctgaattgaaacaaccaaaattgtctccagacattttggatatttccttgtgggcaaggtcaccctttcttgataaccactgaggctggaggctaatgcagttatctattgcaatggtctgaaccaaggtagaggaaataggcatggaggcaaaaataatttaagaggtctttgatttggcaaatgatagaattgaagagaattggagacttcgtatacaatttttaattttaagttcgtctgaaaaatcagatcaggctacactggacccaagaactcaggtggcaaaaatctgcagagttgagtttgccccagtttgtcccagtctctccaaggccttcttgattctttccattgcttgcctacctacccctgcaagaatttgagcttaagacccctgcctttgttgaagctttctggctttgaaatagatacaaacatgagaagcattactatctaaaaggccccacattata

SEQ ID NO: 298107 - DNA, 551 bp, Homo sapiens
ggataaaatgaaagccttttttctaaaatctggaacacacaagggtgcccacttttcaccactgttattgaggrtagtactggtaaccctagctaaaacaatcagacaagagaaagaaataaaggacatttaaattggaaaagaagaggtcaaattatccttgtttgcagataatatgatcttttatttggaaaaacctaaatattccaccaaaaaactattagaactgataaacaaattcagtaaagttgcaggatacaaaatcaatatacaaaagtcagtagcatttctataccgaagaaaaaagtaatcccttttacaatagccacatatgaaattgaatacctaggaattaacttatccaaagcagtgaaagttctctatcatgaaaactaaagtattcatggaagaaattgaagaggacaccaaaaaaaaaaaaaaaaaaaaaaaaccaaaaaaaccaaaaccaaaaataaaaaaaacagaaagatattccatgtttgtggattggaagaaaaatattgttaaaatgtccatactacccaaagcaa

SEQ ID NO: 298108 - DNA, 581 bp, Homo sapiens
gcaaacaggcatatggaagggtgctaaacatcattgatcatcagagaaaagcaaatcaaaatgacaatgagatatcatctcaccccagttaaaatggcttatatccaaaagacaggcaataacaaatgctggcgaggatgtggagaaaagggaaccctcgtgcactgttggtgggaatgtaaattagtacaaccactccaaacaacagtttggaggttcctcaaaaaactaaaaatagagctaccatatgacccagcaatcccactgctaggtatgtacccaaaagaaagaaaatcagtatattgaagagatatttgcaccctcatgtttgctgcagcactgttcacaacagccaagatttggaagcaactgaagtgttcatcaacagatgaatggaaaaaaaaagtstagtacttacacacaatggcatactattcagctgtataaaagaatgagatcttttcatttgcaacaacatggatagaacgtaaggtcattatattaagtgaaataagccaggcacagaaagacaaacattgcatgttttcattgatttatgggatctaaaactcaaaacaatt

SEQ ID NO: 298109 - DNA, 607 bp, Homo sapiens
gtgttccatgttgtcccactcaatttgaagtgttatttacaaaagtgcagtaaccttcttggacaaagagcaatttgtttcaccttcagccccacattttctccccgtaagaaatgatcaccatagaggggttacgcatataagatcatccaacacagcccgtaaaactccccaaaaagacacctcattctcaccatcagcccagcatacaagctccttgtcaccagaagggcrtgcccaacccatgctatgctgtgtattttgtggtgaattgataagtgagtcctctcttcccagagaaaatgaaacagggactcaagcatttgaacatgatcaataaggacagaccatctgtaaaaatccaggatcccccactccttctcaccttcccctcaacaggatgcttctgcctgagttacataaataaatgcactttgcctgacctctgtaaacaataagagaaaattattcgttcataaacggaaatttgccccggctcttattgatacatctttgtgcattttaaggtcttttaacgtaaaacttgtgccattcttaaaagtgccagctatctggagagcatatcttaatctcagagtacaaggtt

SEQ ID NO: 298110 - DNA, 535 bp, Homo sapiens
cttcactttttttttaaccaggtcttgggttagttgagtagttataccagctaaccagaagttggattattttccaatgacatgattctgtcacggcattgatctgcaagccagaacccgatacgtagtgtcctactagagccagaatacccctttttatgaccaaggaaccagaggtatagtgatttccagagtggtacttgtacctgcatccattcattgcacagacctgcctactagaatgaaggagcagccaccctactagcaaaatggccctgcagtgatatagggcttgatgagtaacaatgcgtgtggcctctggatcaaggagttaagaactacctgaacattgaaaccaaaaccaaagccagaaagtccctattccaaaggaaagaggcaaagggaagaatccaggtaaaagcatcaygacagaatccaggatgtttcaggagtaggcagcagtcactgctctccactcttacccaagtcagcctctctcttccctcagatcgctaacttggttcctgagcactcc

SEQ ID NO: 298111 - DNA, 535 bp, Homo sapiens
cttcactttttttttaaccaggtcttgggttagttgagtagttataccagctaaccagaagttggattattttccaatgacatgattctgtcacggcattgatctgcaagccagaacccgatacgtagtgtcctactagagccagaatacccctttttatgaccaaggaaccagaggtatagtgatttccagagtggtacttgtacctgcatccattcattgcacagacctgcctactagaatgaaggagcagccaccctactagcaaaatggccctgcagtgatatagggcttgatgagtaacaatgcgtgtggcctctggatcaaggagttaagaactacctgaacattgaaaccaaaaccaaagccagaaagtccctattccaaaggaaagaggcaaagggaagaatccaggtaaaagcatcatgacagaatccaggatgtttcaggartaggcagcagtcactgctctccactcttacccaagtcagcctctctcttccctcagatcgctaacttggttcctgagcactcc

SEQ ID NO: 298112 - DNA, 617 bp, Homo sapiens
gatttctacatttttgaatttgttcacctctctgcgtccccaggaacttactcattcttacatttgagctgtgggatattaccggtaataatcttggtgatatatatttgtttttgattttctgttctggggagtgaagcaagcttgcttctccaccaccattttggaaaggaagagcacaaataccctttagaaagtatgagaaattgttataaagtctatgctaagcaatactataatatgattattggattggtattgggagatgattctccacaggtctgttttacttctgtacaccttatgarcagaaacagtgatggtctttgttctagataatattttcaaggatatttttataacagtcttggaagatagatatggtcttttgtactgtttatagggaaaaatgtgtttctccagggcaaacggcagttatgcccattgcacattataaaacaattagattccttaaattcagtgttcttctcctgtaacagagccgatggcatgtgcaggtgtcatccacccccttttcatgtcacctatggtatttggggcctgaggaactcatataagaaaaatgatacatactagctattgctattttgtaagta

SEQ ID NO: 298113 - DNA, 455 bp, Homo sapiens
aagtttgggaattttttttttttttttttttttttttttttataagacagaatcttattttgtcactcaggctggagtaaagtggcataatctcggctcatggcaacctccacctcccaggtgtaagtgactctcctgcctcagtctcccaagtagcggggactataggtgcacaccaccatgcctggctaatttttgtatttttaataragacagggtctcaccagcctgttttgttggccaggctgatctcgaactcctgaccttaggtgatccacctgcctcgtcctctcaaactgctaaggttacaggtgtgagccactatgcccagccaagaaacaactttaaaaggcaaatatttaagaataagaaaaagcatagtttaaaagataaatatataaataataaatgatataagtgatataataagagcttgatataaaatgttaggaaaa

SEQ ID NO: 298114 - DNA, 570 bp, Homo sapiens
aatcccctaaaatagggaaggagtatttaccagtgacatacgttactgaaaagttaaaaagatgagcatgtatatcttaagaagactgtagatggatgtagaaattcagtggtgtggtgtgtatggtacttggatgactataaagaataagtaaatataaatagtgactaattctagagagttatgaatgtaggggaagaaaaaagaaggataataaatcttattctatttcatatttcagtcacataattattttactcctttaactccctaacttcacttttgcttcctctgcctctccccaacacttatttttatcttatgctcttacctgactcagaaaatttgaatgtcctgrtggatcagatcactgctcattttttttccttcttcatgtccacatttttttccatatatgtataagcacactctttatttccttttgttttgaagaagcatctctctctggttaacgttacaatccacgtctgaaaccatgatttgtcattgtctacattctcttagactttgagcaactatcctctcttcatccacaggctagttatcctt

SEQ ID NO: 298115 - DNA, 552 bp, Homo sapiens
cactgcagtatacccaatgcaatagaagaaaatatttttggcagcatttattcacattgatctttgtgtctttctctgtacattccaataaaagaatagggtgatacaggaattaacatctttcctggatttctcatatttggagctcttcaaaggcaaacataatttttccctttttttgggtgtgtgtgctaatataccgcatggccacccagaatctccatagaaaaggggctcaataaaccttgttgactggtggctggagccatgtagtmaaatggggaaagattaaagagttgtttttactttctcaactaaagggtaggcagagtgagaaagcaggtctcgtaaccccagctgatgaggtagatgatttggaaagcaaaggctgtctcatttagagagctggaaaagtatgttcctagcattttaaccttagctatgccctaattatggacttggttattttgctaagcagcgggagggacttggtgatcagtttctctgaatgtcttggccaaggtcttcgtctacttgtaatgttcgtcccca

SEQ ID NO: 298116 - DNA, 428 bp, Homo sapiens
ttacctactaatcgctagaactctgctaaatgtwgtatggaaattaagcaaaggagtagatgggatccttgtccccaagaaacgtatatatcttttagaagaattgaggttaacaagcataggaaaccattagcactacaaaaaaaaaaaattcaattatctgtgttgacaaaagaccttatgtatatgaagaactcattaaatgctagctaaatctacttttattatgacaattctggaaagcaaaatattatttactttatggacgttccacagtgacttgaaaaagataaatctgtgaattattacttggacgtttctaaaagtaaagactgtgctgtttagctaaccaaagtacaaaaaaaaaaggcaaatctactaattgatgattgttacacttacagcatgcaacttttgtgtacttaaag

SEQ ID NO: 298117 - DNA, 428 bp, Homo sapiens
acctgcctgaacacaaggcctttaaatctgcaaggcttgtgagtgattcagattcaaaatgtccaagatgtcacatgtgagtttgctaatgatcygcctggtagaagacctctggacatggtggtgtcttgtctagttcgagagcattggctgcatggttagactgcctggtttgaggccacttcccacataaaagcatgggagccggcggcagggtcgggggcttgggcaagcactgaagcttggaagctttgtatttatcatctgaaaaatggggataacaatagcaccaattctagaaggctgctgtgaggatttatcacacaattcctatgtaaaacacttggtaaagcatggggcacagcgtaaatgcttaaaaaatgtcagctgctgcccctgagtgggtttgagctcaaagggatgaggga

SEQ ID NO: 298118 - DNA, 428 bp, Homo sapiens
acctgcctgaacacaaggcctttaaatctgcaaggcttgtgagtgattcagattcaaaatgtccaagatgtcacatgtgagtttgctaatgatccgcctggtagaagacctctggacatggtggtgtcttgtctagttcgagagcattggctgcatggttagactgcctggtttgaggccacttcccacwtaaaagcatgggagccggcggcagggtcgggggcttgggcaagcactgaagcttggaagctttgtatttatcatctgaaaaatggggataacaatagcaccaattctagaaggctgctgtgaggatttatcacacaattcctatgtaaaacacttggtaaagcatggggcacagcgtaaatgcttaaaaaatgtcagctgctgcccctgagtgggtttgagctcaaagggatgaggga

SEQ ID NO: 298119 - DNA, 428 bp, Homo sapiens
acctgcctgaacacaaggcctttaaatctgcaaggcttgtgagtgattcagattcaaaatgtccaagatgtcacatgtgagtttgctaatgatccgcctggtagaagacctctggacatggtggtgtcttgtctagttcgagagcattggctgcatggttagactgcctggtttgaggccacttcccacataaaagyatgggagccggcggcagggtcgggggcttgggcaagcactgaagcttggaagctttgtatttatcatctgaaaaatggggataacaatagcaccaattctagaaggctgctgtgaggatttatcacacaattcctatgtaaaacacttggtaaagcatggggcacagcgtaaatgcttaaaaaatgtcagctgctgcccctgagtgggtttgagctcaaagggatgaggga

SEQ ID NO: 298120 - DNA, 428 bp, Homo sapiens
acctgcctgaacacaaggcctttaaatctgcaaggcttgtgagtgattcagattcaaaatgtccaagatgtcacatgtgagtttgctaatgatccgcctggtagaagacctctggacatggtggtgtcttgtctagttcgagagcattggctgcatggttagactgcctggtttgaggccacttcccacataaaagcatgggagccggcggcagggtsgggggcttgggcaagcactgaagcttggaagctttgtatttatcatctgaaaaatggggataacaatagcaccaattctagaaggctgctgtgaggatttatcacacaattcctatgtaaaacacttggtaaagcatggggcacagcgtaaatgcttaaaaaatgtcagctgctgcccctgagtgggtttgagctcaaagggatgaggga

SEQ ID NO: 298121 - DNA, 607 bp, Homo sapiens
ttatataatacgtttgtccaaacccatagaactccaagagtgaaccctaacatcaactgtggactgtgggtcataatgatgtgtccatgtaggttcatcgactgtaacgaacackttagtatggtaagaaatgttgataatggagggggctgtgtacgtgtgaagatggggtgcatgggaactctctgtaccttgaacctaaaactgctctacaagtgttttttttttttttaaagaaagaaaccacagtagtgattgatgtgatgtaataaagtgaagtgagtggtcaaggaaggcctctctgtgagaagttgacatctgaccaagacctgaatggtaagaaggcactaaccttgcaaagacaggtcagaaaagcatcccaggcaagaagagctgcttgtgcaaaggccctgtggcaggaatcacattgccccatgcaagaaactgagagaagccagcacggctggagcttggagggcacaaggacaagaatggaacaagtcacagtcagagagagagtccagggcatgctcacggagagctctgaaggccaaaagaaggagcctgaagcacattctaagcatgataggaagtggctgcagggtct

SEQ ID NO: 298122 - DNA, 607 bp, Homo sapiens
ttatataatacgtttgtccaaacccatagaactccaagagtgaaccctaacatcaactgtggactgtgggtcataatgatgtgtccatgtaggttcatcgactgtaacgaacactttagtatggtaagaaatgttgataatggagggggctgtgtacgtgtgaagatggggtgcatgggaactctctgtaccttgaacctaaaactgctctasaagtgttttttttttttttaaagaaagaaaccacagtagtgattgatgtgatgtaataaagtgaagtgagtggtcaaggaaggcctctctgtgagaagttgacatctgaccaagacctgaatggtaagaaggcactaaccttgcaaagacaggtcagaaaagcatcccaggcaagaagagctgcttgtgcaaaggccctgtggcaggaatcacattgccccatgcaagaaactgagagaagccagcacggctggagcttggagggcacaaggacaagaatggaacaagtcacagtcagagagagagtccagggcatgctcacggagagctctgaaggccaaaagaaggagcctgaagcacattctaagcatgataggaagtggctgcagggtct

SEQ ID NO: 298123 - DNA, 607 bp, Homo sapiens
ttatataatacgtttgtccaaacccatagaactccaagagtgaaccctaacatcaactgtggactgtgggtcataatgatgtgtccatgtaggttcatcgactgtaacgaacactttagtatggtaagaaatgttgataatggagggggctgtgtacgtgtgaagatggggtgcatgggaactctctgtaccttgaacctaaaactgctctacaagtgttttttttttttttaaagaaagaaaccacagtagtgattgatgtgatgtaataaagtgaagygagtggtcaaggaaggcctctctgtgagaagttgacatctgaccaagacctgaatggtaagaaggcactaaccttgcaaagacaggtcagaaaagcatcccaggcaagaagagctgcttgtgcaaaggccctgtggcaggaatcacattgccccatgcaagaaactgagagaagccagcacggctggagcttggagggcacaaggacaagaatggaacaagtcacagtcagagagagagtccagggcatgctcacggagagctctgaaggccaaaagaaggagcctgaagcacattctaagcatgataggaagtggctgcagggtct

SEQ ID NO: 298124 - DNA, 607 bp, Homo sapiens
ttatataatacgtttgtccaaacccatagaactccaagagtgaaccctaacatcaactgtggactgtgggtcataatgatgtgtccatgtaggttcatcgactgtaacgaacactttagtatggtaagaaatgttgataatggagggggctgtgtacgtgtgaagatggggtgcatgggaactctctgtaccttgaacctaaaactgctctacaagtgttttttttttttttaaagaaagaaaccacagtagtgattgatgtgatgtaataaagtgaagtgagtggtcaaggaaggcctctctgtgagaagttgmcatctgaccaagacctgaatggtaagaaggcactaaccttgcaaagacaggtcagaaaagcatcccaggcaagaagagctgcttgtgcaaaggccctgtggcaggaatcacattgccccatgcaagaaactgagagaagccagcacggctggagcttggagggcacaaggacaagaatggaacaagtcacagtcagagagagagtccagggcatgctcacggagagctctgaaggccaaaagaaggagcctgaagcacattctaagcatgataggaagtggctgcagggtct

SEQ ID NO: 298125 - DNA, 543 bp, Homo sapiens
tggtctggacctggcccagaggctgtagtttgctaacttctgacttaatctttctccccactttgtgaaattcttttttttttttaaatgccttttgcaaacgctgtcaatcttagtgaaattcttgaggctgacaccgtgtcctgttcattcctgtgtgccgagtggccagcatagtccctggcaaggaatatttatggaatggaagatccaggtaaaggtttcaatcctgcctcttatcttttacaaattacttgttttccaagcctttaaaaaatctcaaaaatggaaataaatattactgcattactgactttttcagayggttgttataagaactaaataaaatactgcacaggaacataaagctgtttttactttttcttagtgcattccttcctgacaaactcaagtgacgtcactaaaagcaagacctttatgttttctctgaatatagggtaaacctgacccaacggagacctatattctgcctctcaggggctggtctggggcttagctgcaggccacactctgccttatagt

SEQ ID NO: 298126 - DNA, 540 bp, Homo sapiens
ttctactgtggtggcaagtcaaagaggaaggcaggaggtggcttctccagaattcctccagttttcctagattcatagctacctatcagatggacacatcattctcctgctcctattttattcggcagcaaattgaagcccactctcaattgtgcacatgcaccatctcctatccaccctgactgagggtgcagaagataagaacaggactccagtgcctgctctctgarggggcgagagatcctgggagacaaggccatccttctggagacctggagcaaaaagcaggtcactgattattgcaataggacaagggacttcccttgtgccaggatatggggcaaactaaaggattcttattcacatttttgcagtttctttcccagaagctgggcccagcaccaaacctcaactttgtgtatatttctggactcctccacttgcctcctttcccactgccaccaccgtggttttgatcaccaacatttcatgccagagttactgcaacagcttctaagtggtctctccaggtccactttt

SEQ ID NO: 298127 - DNA, 540 bp, Homo sapiens
ttctactgtggtggcaagtcaaagaggaaggcaggaggtggcttctccagaattcctccagttttcctagattcatagctacctatcagatggacacatcattctcctgctcctattttattcggcagcaaattgaagcccactctcaattgtgcacatgcaccatctcctatccaccctgactgagggtgcagaagataagaacaggactccagtgcctgctctctgagggggcragagatcctgggagacaaggccatccttctggagacctggagcaaaaagcaggtcactgattattgcaataggacaagggacttcccttgtgccaggatatggggcaaactaaaggattcttattcacatttttgcagtttctttcccagaagctgggcccagcaccaaacctcaactttgtgtatatttctggactcctccacttgcctcctttcccactgccaccaccgtggttttgatcaccaacatttcatgccagagttactgcaacagcttctaagtggtctctccaggtccactttt

SEQ ID NO: 298128 - DNA, 588 bp, Homo sapiens
gagtagcgttctgaaatcatttaatgtagaaataaggattcctatatacttcaatagagctttagtacataattatagaattctactgtaaacatttcaaaaatttgcctcttcttaaacataatggtataggctaatctgattgtttgartattttgtgtgtcctgtgcatctctttaacctctccaagtatgactgccttcttcatggttaatttcaaatatataaagtgataccatgtggaaggggatagagattttcttagtgttgcttaattaaaagctaggatggaagttatcagaaagcagattttagttgaatataggaaaatagtttttagtaattagtgctaactttatggggaataagctgctttttgaagtcatgagcttataatttgtaaaggtgttcaaataaggcaagacaccccatcagggatgttataaaaatgatttatacattgaattgacatataaagtagcaaaacaaatccagattctgtgatcaaagagcttgattcaaacaagtataagagaatttccatactaagcctttgtaaaattccacattgaattataatacttgtgt

SEQ ID NO: 298129 - DNA, 588 bp, Homo sapiens
gagtagcgttctgaaatcatttaatgtagaaataaggattcctatatacttcaatagagctttagtacataattatagaattctactgtaaacatttcaaaaatttgcctcttcttaaacataatggtataggctaatctgattgtttgagtattttgtgtgtcctgtgcatctctttaacctctccaagtatgactgccttcttcatggttaatttcaaatatataaagtgataccatgtggaaggggatagagattttcttagtgttgcttaattaaaagctaggatggaagttatcagaaagcagattttagttgaatataggaaaatagtttttagtaattagtgctaactttatggggaataagctgctttttgaagtcatgagcttataatttgtaaaggtgttcaaataaggcaagacaccccatcagggatgttataaaaatgatttatacattgaattgacatataaagtagcaaaacaaatccagattctgtgatcaaagagcttgattcaaacaagtataagagaatttccatactaagcytttgtaaaattccacattgaattataatacttgtgt

SEQ ID NO: 298130 - DNA, 639 bp, Homo sapiens
tttcagttaggatcagttatgtggagccttttaccaaagtaagaccttatagctaacaaacgtgttaggttaagtgagcctatcatgaggtaataagacaacatccacatttcaatggattaaaccagmaaaatgtatttcttactcatgaaaaatcaagtgcaaatctgggaaaatttccagggcaaatgtcctccatgaggcaattcaacaatctaagcccacaaaggctccagcatcttttacttgaaccacctgcaaattaaggcatactcatcactcatggcaggagacatgactactgaagacttctcatcaacaattacatactttcatcccaaataatgcattatcacctctggtcatagcctattggccaaagttagttacatgggagtaaagaagtgtaattctcccatggtctgggatgatagggaggacccaacacgagttgtgaagcaggttcactgtgtactggttacaaacttgcctgggtccagtgagacagaacacacacacacacatacaaggtgttacatgagatgggtttattacctaaagatagacagcaagggacaacagaagcctaggattcattgagagtcaatccctcaaggcttagaaaagctggctggggcg

SEQ ID NO: 298131 - DNA, 639 bp, Homo sapiens
tttcagttaggatcagttatgtggagccttttaccaaagtaagaccttatagctaacaaacgtgttaggttaagtgagcctatcatgaggtaataagacaacatccacatttcaatggattaaaccagcaaaatgtatttcttactcatgaaaaatcaagtrcaaatctgggaaaatttccagggcaaatgtcctccatgaggcaattcaacaatctaagcccacaaaggctccagcatcttttacttgaaccacctgcaaattaaggcatactcatcactcatggcaggagacatgactactgaagacttctcatcaacaattacatactttcatcccaaataatgcattatcacctctggtcatagcctattggccaaagttagttacatgggagtaaagaagtgtaattctcccatggtctgggatgatagggaggacccaacacgagttgtgaagcaggttcactgtgtactggttacaaacttgcctgggtccagtgagacagaacacacacacacacatacaaggtgttacatgagatgggtttattacctaaagatagacagcaagggacaacagaagcctaggattcattgagagtcaatccctcaaggcttagaaaagctggctggggcg

SEQ ID NO: 298132 - DNA, 639 bp, Homo sapiens
tttcagttaggatcagttatgtggagccttttaccaaagtaagaccttatagctaacaaacgtgttaggttaagtgagcctatcatgaggtaataagacaacatccacatttcaatggattaaaccagcaaaatgtatttcttactcatgaaaaatcaagtgcaaatctgggaaaatttccagggcaaatgtcctccatgaggcaattcaacaatctaagcccacaaaggctccagcatcttttacttgaaccacctgcaaattaaggcatactcatcactcatggcaggagacatgactactgaagacttctcatcaacaattacatactttcatcccaaataatgcattatcacctctggtcatascctattggccaaagttagttacatgggagtaaagaagtgtaattctcccatggtctgggatgatagggaggacccaacacgagttgtgaagcaggttcactgtgtactggttacaaacttgcctgggtccagtgagacagaacacacacacacacatacaaggtgttacatgagatgggtttattacctaaagatagacagcaagggacaacagaagcctaggattcattgagagtcaatccctcaaggcttagaaaagctggctggggcg

SEQ ID NO: 298133 - DNA, 521 bp, Homo sapiens
gtatactgaaaattgtaaagggttgatgaaagaagttgaagargatacaaataagcaaaaacatatctcacattcacggactggaaggaataatattgttaaaatatccatgctacccaaagcagttcacaaattccatgtaatccctgtcaaaattccaatatcatttttcatagaaatgtaaaaagaaattttaaaatccatatgtaaccaccaaaaacccaaataagtaaaaaaatcatgggcaaaaagaacaaagctgcaggtatcacactacctgttttcaaactttaatacgaggttacggtaattaaaacagcatggtatggcaaaaaattagatacatcaatcaatcaatggaacagaatagagagcccagaaataaatatgggtttattcatggtacatatggtctatcaactttcaacaaaggtgtcaagaatacttaatgggaaaaggatagtctcttcagtaaatgctgttgggaaaactgaatttccatgtgctaaagaatgaaattg

SEQ ID NO: 298134 - DNA, 621 bp, Homo sapiens
taaaataaaataaagcttgcaacaaaaattcatttccgctacttttaatctcttttaaacactgtttaatacctagaaattttaaacttaactttgaaggaaaccagcatttctagataacataaaatgaatattaacattccaatactctaaaattagagaaatactgttaaaatttcaaggatttcagttcatcataatacaaagtagaaatcgtcatacgaaagtaaagacatttggaataaaacacaagatgtaaggttgaatcatgtctccaccctataagtatttcctggtatcagtacacatatacatcaataccgtataaatgactatggaccttagggtacgaataagawtcacacatacaatgatgctttttgaggcactcaaggcttttccatttttattgaataatatccttctagtatgtttctgaaagattttgacaagaatgctttgaagaaaaatgttttctttctatgtctagtaaatccaaattattataaactgaaattttgaacaatttgattcattggaattttattctaaacagagagctctttgtaatattttgaattattttttacattcatataatcctattagtggcccacctat

SEQ ID NO: 298135 - DNA, 630 bp, Homo sapiens
gatgtcacttttgcttcttacaagtctcctctgaaaatgaagcatcaaagtctaatattctttcttgtataaatgctctcactttttaatgttttgaagaacaagaataagctagagaaaatccagctgtcttttacagacctctaataatgccaggaaatgaagagtgtgtggttatttttcagcccatattcctctaccacacagcaccacactaacagttacctgctaaaaggtgaaggaagaaagaaatttgctggagattggatccagaaaatatgttttcaacaaaaatttccagtgctttgggggacattatcaagagtgccaaatacatttagacattactgaatcttaaatctttgttgatgyttttaaataaaataaattcatttataaatattcaaaaatgtttacaatacttcaaagtgtaatgttgcattaaaaatatatatttgaattgctaagtctgtgctgtagtttcagaaattacttagaagtagatattactggaaactgtctgctttggagattttttaaatggctctttaattcgttttcgaattagagaacatgttttactatccataaaaatacccaaatgtgtacccattttcaattttaggactt

SEQ ID NO: 298136 - DNA, 630 bp, Homo sapiens
gatgtcacttttgcttcttacaagtctcctctgaaaatgaagcatcaaagtctaatattctttcttgtataaatgctctcactttttaatgttttgaagaacaagaataagctagagaaaatccagctgtcttttacagacctctaataatgccaggaaatgaagagtgtgtggttatttttcagcccatattcctctaccacacagcaccacactaacagttacctgctaaaaggtgaaggaagaaagaaatttgctggagattggatccagaaaatatgttttcaacaaaaatttccagtgctttgggggacattatcaagagtgccaaatacatttagacattactgaatcttaaatctttgttgatgcttttaaataaaataaattcatttrtaaatattcaaaaatgtttacaatacttcaaagtgtaatgttgcattaaaaatatatatttgaattgctaagtctgtgctgtagtttcagaaattacttagaagtagatattactggaaactgtctgctttggagattttttaaatggctctttaattcgttttcgaattagagaacatgttttactatccataaaaatacccaaatgtgtacccattttcaattttaggactt

SEQ ID NO: 298137 - DNA, 630 bp, Homo sapiens
gatgtcacttttgcttcttacaagtctcctctgaaaatgaagcatcaaagtctaatattctttcttgtataaatgctctcactttttaatgttttgaagaacaagaataagctagagaaaatccagctgtcttttacagacctctaataatgccaggaaatgaagagtgtgtggttatttttcagcccatattcctctaccacacagcaccacactaacagttacctgctaaaaggtgaaggaagaaagaaatttgctggagattggatccagaaaatatgttttcaacaaaaatttccagtgctttgggggacattatcaagagtgccaaatacatttagacattactgaatcttaaatctttgttgatgcttttaaataaaataaattcatttataaatattcaaaaatgtttacaatacttcaaagtgtaatgttgcattaaaaatatatatttgaattgctaagtctgtgctgtagtttcagaaattacttagaagtagatattactggaaactgtctgctttggagattttttaaatggctctttaattygttttcgaattagagaacatgttttactatccataaaaatacccaaatgtgtacccattttcaattttaggactt

SEQ ID NO: 298138 - DNA, 591 bp, Homo sapiens
agaaataaagggcaaaattgattttcttataagagagaaggaaaagggaggaactaatatttattgggcacctactgcacgtcagccagtctgctggatatcttatatcctctcatttaagtcacaccataacccacaaagaggcagtttatmcacattttatagataatgaaactgaggcttagtgaggaggttaaataacttgtcctaaggttgcttgtctttgtccagtaaatggcaaacttgggttctaacacaaatcatgtctttccttctctccaactgcttcacactttttcttacattaatgatatctgatgtgcacaaatgcacaaatccaaccagcacctggactcaattctataattgccaacagtattcccaaacaggaaatttgcaactgttaagaagccattgcattcaactgtcttttacagctcatgcacaggtgctcacattataaaagggaacatttaatccctttatcaacagatactgatattgatattgatattgatattgattaaaccacttccatctattcttatctgaaaccaggcaaactaatcatttccttatgaaggattagaa

SEQ ID NO: 298139 - DNA, 591 bp, Homo sapiens
agaaataaagggcaaaattgattttcttataagagagaaggaaaagggaggaactaatatttattgggcacctactgcacgtcagccagtctgctggatatcttatatcctctcatttaagtcacaccataacccacaaagaggcagtttatccacattttatagataatgaaactgaggcttagtgaggaggttaaataacttgtcctaaggttgcttgtctttgtcyagtaaatggcaaacttgggttctaacacaaatcatgtctttccttctctccaactgcttcacactttttcttacattaatgatatctgatgtgcacaaatgcacaaatccaaccagcacctggactcaattctataattgccaacagtattcccaaacaggaaatttgcaactgttaagaagccattgcattcaactgtcttttacagctcatgcacaggtgctcacattataaaagggaacatttaatccctttatcaacagatactgatattgatattgatattgatattgattaaaccacttccatctattcttatctgaaaccaggcaaactaatcatttccttatgaaggattagaa

SEQ ID NO: 298140 - DNA, 586 bp, Homo sapiens
cccaggagagatttgaatgcagcccaatacaatttcataaactttcttacaaaattatgagatttttgtgattttttttgtttagctcatcaggcattattagtgttagtgtattttgtatgtggcccaagacaattctttcagtgtggcccagggaagccaaaagattgaacacccctgacttaaatgattacactatgygctccaagtgtttattattctcttttgtaatctacctcactggaatatatgatcctatgaggtctggcatagtgggtatgtattaaatgaatatgtattgaatataattgaatagaagtttgatgcatctgccaaaataattgtagtcaaaacaaatctttaaaaaccaaacaaaatctctatgcctgtaattatttccttcaggaagaaaagttagggtaaagttattttgctcttgcatcctgtgaaattctctgcaatgttattcagcaatgcagataaggataatgttaatcacagtcagaaagtgtcattatttccataggaattcatctgtaaatgagagacatcttcactctctgcactaattacaattaatttacta

SEQ ID NO: 298141 - DNA, 554 bp, Homo sapiens
ctgtggcctgaaacaccactttttctcctctgctagagttcccacctgctaaacattctttattttcacaacatgtaatcaaaacataccctgcactttgttccctatcgcttgctgtgcttatctgccacacgatatgcatacatcagattcattacagttttagtctggtgcttggggctctctacaaactgattgaaatgtacattttctcracctcctctgtttgggaaaactgcatgataaccaaaaagtcttatccatcatttcatggttagacattttcttgcctttgcttatgctatacttcttacccaagatatcctccttcccttgcttcagagagcctagctattcttcaaacctcatttcatgtcaaatatattcaatttagtctttcctaacagttggcgaccacaataatttttcttttcattgatcaattgtacagtatgctgttgatactatcatctgtattagatttgaggtcagaaaattcgagtttaagatttgggcttggcacttaataactatttaatgctattgaattaatg

SEQ ID NO: 298142 - DNA, 554 bp, Homo sapiens
ctgtggcctgaaacaccactttttctcctctgctagagttcccacctgctaaacattctttattttcacaacatgtaatcaaaacataccctgcactttgttccctatcgcttgctgtgcttatctgccacacgatatgcatacatcagattcattacagttttagtctggtgcttggggctctctacaaactgattgaaatgtacattttctcaacctcctctgtttgggaaaactgcatgataaccaaaaagtcttatccatcatttcatggttagacattttcttgcctttgcttatgctatacttcttacccaagatatcytccttcccttgcttcagagagcctagctattcttcaaacctcatttcatgtcaaatatattcaatttagtctttcctaacagttggcgaccacaataatttttcttttcattgatcaattgtacagtatgctgttgatactatcatctgtattagatttgaggtcagaaaattcgagtttaagatttgggcttggcacttaataactatttaatgctattgaattaatg

SEQ ID NO: 298143 - DNA, 579 bp, Homo sapiens
tgtgtagaattatattatccattttaactttcctagcgaactatgagtttcctgagaacaaggccaatttttccttctcgccttcccccaattcctagttcgctgttttttatgttccttgagggcagcatcacttttactgaccacaaaatgtgtgaaataatgttttatataagctatcacaaaaaattaacctttatcttactttgatttaacacttggggtgcaaggaatggagagttagctcctttctattttaagatcaccacgttctcttsaaaaggcaaagggaataaacgtgataggcaagataaaatacagtagtgaaaatgtccccctctccttatagtccacatcacatatccattgaatgtgtgacctagtactagaaaaccagaaaggcaaggcagtggacacagaagaagccatcagagggagtaaaccggatttccaagaaagtgtgcatgtgcgtgggttttagatgcacagaggtgtgtgtaaaagagtaaacctgtgtgacagctgcattaaagataaagatcttgaggagtttagcaaaagaaaaaaagataaggttat

SEQ ID NO: 298144 - DNA, 576 bp, Homo sapiens
ctaactctaacctttatgttctttggtatgtgaaaggacacactttgagtttaaagtgtttattagtttttggcagtcaccaaggaagctgactagtcacttgtaatgtacaaattttgcagttaaaaaataaaaaagaaagaagtcttggccaaacaatgaaatgacaaaagggcatttttgtctttcccaaataccatttaacattctaatcttgtaaaagatgacccaatgatttttcatgaattaaatatattcagaatagcaraatattttaagctagaatatatcacaaaatgcaataaggacaatatgctaaataaatggcatttctgacctcatactattggctgattcttacctaccgtgtataagaaaaagccaaattaaatattgtgccaatccaggattcattagcagaacgtgtcagctgtgtaaaaccttcctcacaagtgtctgatcagtactctggtgcatacttgttgagcttcatttacaagattgtcagaaaactaaatgtattttcacagtaccttccaaatctttaatcaagcaacatctaatgaagccaaaaga

SEQ ID NO: 298145 - DNA, 610 bp, Homo sapiens
gaaagtggaaatgatcatgtagaacaaggtctcatcagccaccagaaattttaaaacaaaaagaacacaacaatgttgtgttcatggtgaagcagcactaaaaacaaaactaactaactaamtaaataaatacgtgtgtacattgaaacagtggagatcctaggcctttcaagaagattctggacacttgtttttattcaaagcaatgcttgttccattagctgggattttaccagttagttcattgggaattctggatcatggacaggcaccatccttttcagtgataattactagagcctcttattgtgctaactcaaccagaaatggtaactaagcaggccagatactcaaacttctatacacagtcctccagctgtgatcactggaaacatcactaactgataacaatgccctttaccaatgaatccagactcagtataggatctctttctatagagcagtatgaacagccaccaccaattggtcatgactggtccgaaacattaaacccattcactatatctagcatctacttatctatgcactcccttctgcaagccaagatatagaatccttatagacccagtgtcttacctcccagttctga

SEQ ID NO: 298146 - DNA, 610 bp, Homo sapiens
gaaagtggaaatgatcatgtagaacaaggtctcatcagccaccagaaattttaaaacaaaaagaacacaacaatgttgtgttcatggtgaagcagcactaaaaacaaaactaactaactaaataaataaatacgtgtgtacattgaaamagtggagatcctaggcctttcaagaagattctggacacttgtttttattcaaagcaatgcttgttccattagctgggattttaccagttagttcattgggaattctggatcatggacaggcaccatccttttcagtgataattactagagcctcttattgtgctaactcaaccagaaatggtaactaagcaggccagatactcaaacttctatacacagtcctccagctgtgatcactggaaacatcactaactgataacaatgccctttaccaatgaatccagactcagtataggatctctttctatagagcagtatgaacagccaccaccaattggtcatgactggtccgaaacattaaacccattcactatatctagcatctacttatctatgcactcccttctgcaagccaagatatagaatccttatagacccagtgtcttacctcccagttctga

SEQ ID NO: 298147 - DNA, 610 bp, Homo sapiens
gaaagtggaaatgatcatgtagaacaaggtctcatcagccaccagaaattttaaaacaaaaagaacacaacaatgttgtgttcatggtgaagcagcactaaaaacaaaactaactaactaaataaataaatacgtgtgtacattgaaacagtggagatcctaggcctttcaagaagattctggacacttgtttttattcaaagcaatgcttgttccattagctgggattttaccagttagttcattgggaattctggatcatggacaggcaccatccttttcagtgataattactagagcctcttattgtgctaactcaaccagaaatggtaactaagcaggccagatactcaaacttctatacacagtcctccagctgtgatcactggaaacatcactaactgataacaatgccctttaccaatgaatccagactcagtataggatctctttctatagagcagtatgaacagccaccaccaattggtcatgactggtccraaacattaaacccattcactatatctagcatctacttatctatgcactcccttctgcaagccaagatatagaatccttatagacccagtgtcttacctcccagttctga

SEQ ID NO: 298148 - DNA, 494 bp, Homo sapiens
acaattgttaatgatttcttttaggaactatttttaaagcccaccttgggttcaccagattataaaggacatctcctacatatctcactcttcaggagttcatcttatatttactgtatcatgatgaacaacctattgtaaattggttctctttttcttcactaattttgttcctgcaattccctctgcttagatatccatctatggcagcaatagtctatatggcacttttgtgctaattagaaaaaggcaactttggacaaatgcaaccctggatwagggcacatagtttgataaatagaatgcaatgtggatgtcactcctcctttcagtttttatatgtagttcctttgtgcagtgcacagaccttgcagcagccctgatctctcctattctaaacttcactgatttctaagcattaataactgcccactgtgggcaaaactggagatccagaaaagtatgtatgtaataataaaactacaataatgctt

SEQ ID NO: 298149 - DNA, 647 bp, Homo sapiens
tgtttgtattaccttctagctgtgtttttcctttatacattcataagttcaaacattgtattaaatagaacaaggcttgaaactaactcgtatgtttatgttcaaaccatatacgtgcacttgtcttttaattccttattgtttattttattagtttatattgattctatatagagctaaactaatgtacatgtaagtttttattacattctatcacatcttaaaaaggaaacatctttgtaactcttaacagccaaaattggaagataaatcagattcacttagaatcaactaatttgtcatataacaatgtcatatcatatcaaagtattgcttgataaggattaaaacttaaaaggaagtatatcttaaagtgtcaaattttctgaaaagggattgagaggcctaatgctagtctgtgttaaattctcgagtatgatacaatgtggagacacatttccaaataattaaagttcatgctgttatagtcattttaatgtatctgtatagaaaaccatcraacaatggcaattaaatgtatatcaaaattttaatctcccctcaaagaagaatgaactgcgatttatgtctcttcatatgccacaaataacattaaagttttgttttgaagaggttgctaatctttg

SEQ ID NO: 298150 - DNA, 599 bp, Homo sapiens
aatcacaaattgtatagtctataggccttgggaacattctccagttattttattttggayggagatttttaaaacttattagttttttgggataaaatattatttaaacagtaaataagacaaaaaatgaaaatatctctaaaaataatttgagtttttaaaagttggtttttggactaatttccatatgtgagttccactggcacagaatgagtgtctttacctcactcactcaattttgaaaagtattatacttgcaatagtattgaatctctgttctggctcttcagtcctctctcatttgaataacatgtcaatctcaccaagtacatatgaaccctctattttagagaaaggagaatgaaggattcaggagattctgccattcagcacaacaagtaagcttacatcttccaaatgtatatgctgttttttttctgtttgtcttctataatctgccctcacaattttaaatctatattttcctcttcataaatgatcagatggcctccctttttcccctggcataattacaaggccaagttagaaagtatgtattatgtattgctctgttctaaattgagtgatattaaaatgta

SEQ ID NO: 298151 - DNA, 568 bp, Homo sapiens
gaaaagatgttgatggcttgaatgagggagtagtagtggcaataacgacaagctacaacagagatttgcatttttagtttagaaagattttctataagaacgaatgcagcaccattctatgtattagggaggataggcatgaaataaagccgcaaaagataatctttggrggaaagggttaatattctaatcagataataaattatttcaggctattttaaatgggtacattccattttgcagtgccttttattgatttgtgtaaaacatggttcacaataaaagtcacatgatggtcatatgtgggccctacaatattgtttactttcttattgctttttcttttatatttcagaattattaataccatatttcctaacaccctgtgtttgcctatgccatgtctgtaaaatggaattaattgagtctgactcacagtattctttagggaattagttaaaatgatacacttagcaatgttttaagcattgacaagtatggaagcaataattttgctgttatttctatcaacataaaccagcataatagcaaaagaaacaggcattgg

SEQ ID NO: 298152 - DNA, 475 bp, Homo sapiens
tttagcatgcattttctagactgcatttaaaaccgtgtacttttcattccatgggataacccataccttattttttcctattttgttttcatctttatcaagaagaataagtctccaaatgatagaggcagaattaaaactgatgaggaaattgaactaaaaaagagataagggattgtatgagagctcagagttcctctaaatgattgtatgcctcctctctaggataaatttrcctcccggaatgtgcaaatattatttcagaatcatttttctcttttaaaaatgatagcaaacagatgctatagaagactggaaacatggacattttttgatttttcaaaaatggaaagtattttaagcatagtattaggcaaacattttgattattaagtggatagcagcaagcattaaaaaaaattaagtcaatcattagaaaccagattatgttcaccaaacatatagacaagttaaa

SEQ ID NO: 298153 - DNA, 595 bp, Homo sapiens
tggagaggaaatacatacaaataagaagtatagaatatcacttggtggttttgcctaatagaaaaagttacaaaggataatagatggttgtgataaaatcagccctggagatcgtagaggaataaacgctgtccaaaggaaattaaactgcagatctgcctacattcastaaaagggcttcccctaagaaccacccctcccatgtcaagtgaaacttacctgttttatcaaattgtcagtttctgttaagtgacataaataataaaaaacacttagaacagtgcctgaccctctagttgttcactattgctattactgtttttgtataatcagtcagttcttgagaactaaatgtaccaaatatcagcaattttatgtagctccacctcattattaatactttgagtttgttagcagctgagcttagaagctaaagtttcttgttgcatctttagtcctaattcatacagaattatttaaaatttaaggctccaattacatcggggaccaaacccactgtatcattgcattcaaggcatcaccatttaaaaccgatgccaacaacctgaacgtgcttagaagtctgcagtcctta

SEQ ID NO: 298154 - DNA, 595 bp, Homo sapiens
tggagaggaaatacatacaaataagaagtatagaatatcacttggtggttttgcctaatagaaaaagttacaaaggataatagatggttgtgataaaatcagccctggagatcgtagaggaataaacgctgtccaaaggaaattaaactgcagatctgcctacattcagtaaaagggcttcccctaagaaccacccctcccatgtcaagtgaaacttacctgttttatcaaattgtcagtttctgttaagtgacataaataataaaaaacacttagaacagtgcctgaccctctagttkttcactattgctattactgtttttgtataatcagtcagttcttgagaactaaatgtaccaaatatcagcaattttatgtagctccacctcattattaatactttgagtttgttagcagctgagcttagaagctaaagtttcttgttgcatctttagtcctaattcatacagaattatttaaaatttaaggctccaattacatcggggaccaaacccactgtatcattgcattcaaggcatcaccatttaaaaccgatgccaacaacctgaacgtgcttagaagtctgcagtcctta

SEQ ID NO: 298155 - DNA, 615 bp, Homo sapiens
gcagtaacgagcctttttgtcattcaggtcataattacacatagtcctctgtgtgacccaacatcaatgccaaattagcaaacccagttcctgggtatcaatgcatccttataattttttaaaaatctgtggagttgtatagtgcccatttgtattgcagaatatacaataaaggtattacaatgggttaggaatctttatttttgccttttattaggaaaacgtgatgctttgtaataattagtgaattcaacatttttgaatctgagtgattacaatagctatgtcaaaggctttgctgaggtagttggatatgcataattgtttctgtgaagatttagaagctctatatttaactcaggaaagcagctatgccaattttaaatttaattgttattatttttgtcaaaaaaatgcaatgtataaaatatggaacaggttttaatttataagattgtagagaaaatattacttaactaaatttttcttagrtaatgttggtttttaaaaatttaagaatatacaagtatttttcatattttagacttgatactatcctgctgtccattataataataccaataattaggaattcaaaatggtgagaatggagag

SEQ ID NO: 298156 - DNA, 556 bp, Homo sapiens
aatgaaatcacttccagagccatttgtcaaatggatacttgggacatctgcatgtcggtacgatcgaatcctacagcctgtttacaatataaagtaagacattaaccttttttccattttgattaaagatatctaaatatttgcttacataaaattgagttagatgtcaacaactcttagcaatgatttgagaagaatctcaggttattatagatgtactttaaaagcatcaaactttaaataaaataaggtaacttgtaactcagacttcttgaatttagtagttactatggccaaaaagataagtttttccagaacaatcttgattagaaataatcttcttctggctccataattttatttattaggccatgtgttcaattttggcttggaaactgtcactaycataaataaaaagtgtggaaggggaagtagagggcagaagaaactggcccgagagctacaaagagagacaggcagttgtcaccatgacatccctgaggctataacttgttttcacttgcaacctacagcttggagcatgattggttttggc

SEQ ID NO: 298157 - DNA, 499 bp, Homo sapiens
cttagtaaataattatgtagtaaatgaatgagtgattaaataaatgttaaatgtcaatatgtatttgtaatctgttaacttctgtcttgtaagtagtgataaaacaagacattaaccactcaatcaacattcaccaagagtggaataataagtcaaaatactgaaacaagtaccagtatggataatctaactgagacttctaaaacagacagctaccttcagccaatgggcaatgctacagattttgaatgaaagaaatgcctctcttggtatctatttcaaagtcactaggagagtattacatagctactaagatgaaaactctgaagtttttatcttggacatcactttcaagctatgtagtcttgggcacgttactttatctctstgtgtgtgtgtgtgtgtgtgtgttttaatcttttaatgtaacaaatgttaatgatattacttctctcagtggattattgtgagaaataaatggataaatgtatgtgaggaa

SEQ ID NO: 298158 - DNA, 582 bp, Homo sapiens
aactaaacaagttctttttaaatgtaacttcctttttgaaaatatgcatataagactatgcattttaattttcatgaatactgaccttctgtaaatgcaaatacgcattttytacattacaatattacccaagggggaaaaaaaaaaaaaacaacaacaaaaaaggaaatgactgtgtaggagtaagcaggaatagaacagtcccagtattgtaccattcccacagtgcttcaggattgtcttttagatttctacttttaaatcacttctattcctatcacagttcataaaagtgggtgaaaatttgaatcgcaatttcctcatttaaaaaaattcacctccttcatcgtcaccgtgcttgcttttcaaggaacgttctcataccgattgcaaatattacgatgacacatcttatttgtttttgacagtttggatgtaaattttcttcttaaattagcacttatagtcagagtatctctttcactttatagacattgttatataggaattaggtgatgtatgcaattgacgaccaactgagttctgcattttgtttgctcaatatttggtcaacataaggaa

SEQ ID NO: 298159 - DNA, 568 bp, Homo sapiens
ttctacttttaaatcacttctattcctatcacagttcataaaagtgggtgaaaatttgaatcgcaatttcctcatttaaaaaaattcacctccttcatcgtcaccgtgcttgcttttcaaggaacgttctcataccgattgcaaatattacgatgacacatcttatttgtttttgacagtttggatgtaaattttcttcttaaattagcacttatagtcagagtatctctttcactttatagacattgttatataggmattaggtgatgtatgcaattgacgaccaactgagttctgcattttgtttgctcaatatttggtcaacataaggaacaattttacatattacttattttgcaactattataataatcaatttctgacataatatctaatatatttaatcggtcatgcgtaatacatactttgtttgctatacattctctctatcttttaaagaaccatgcaaatatgatctaattgttctcattttgcaaaagagttaacaggttttccgagaagttcagtaacttgcccagtgccacattgtctgtaaatgttaagcctg

SEQ ID NO: 298160 - DNA, 568 bp, Homo sapiens
ttctacttttaaatcacttctattcctatcacagttcataaaagtgggtgaaaatttgaatcgcaatttcctcatttaaaaaaattcacctccttcatcgtcaccgtgcttgcttttcaaggaacgttctcataccgattgcaaatattacgatgacacatcttatttgtttttgacagtttggatgtaaattttcttcttaaattagcacttatagtcagagtatctctttcactttatagacattgttatataggaattargtgatgtatgcaattgacgaccaactgagttctgcattttgtttgctcaatatttggtcaacataaggaacaattttacatattacttattttgcaactattataataatcaatttctgacataatatctaatatatttaatcggtcatgcgtaatacatactttgtttgctatacattctctctatcttttaaagaaccatgcaaatatgatctaattgttctcattttgcaaaagagttaacaggttttccgagaagttcagtaacttgcccagtgccacattgtctgtaaatgttaagcctg

SEQ ID NO: 298161 - DNA, 635 bp, Homo sapiens
agcacttatagtcagagtatctctttcactttatagacattgttatataggaattaggtgatgtatgcaattgacgaccaactgagttctgcattttgtttgctcaatatttggtcaacataaggaacaattttacatattacttattttgcaactattataataatcaatttctgacataatatctaatatatttaatcggtcatgcgtaatacatactttgtttgctatacattctctctatcttttaaagaaccatgmaaatatgatctaattgttctcattttgcaaaagagttaacaggttttccgagaagttcagtaacttgcccagtgccacattgtctgtaaatgttaagcctgggatttgagcctccgtctctttggcaacaaagtccacactcttgaggacaggaaattaaaagtatggaacacatgttggcattcattatgtgaatgctaatagaatatgcttctgctttgaaaatatccaaggtgaaacatggataaaacagaaggccactatttggggtaatgatagaatgatttgcatgaatttcacaaattaattcttaagcaaacaaggtgtaaaccagagcgctaattgatatgaataaaaggagagaccaaaaaaag

SEQ ID NO: 298162 - DNA, 568 bp, Homo sapiens
ttctacttttaaatcacttctattcctatcacagttcataaaagtgggtgaaaatttgaatcgcaatttcctcatttaaaaaaattcacctccttcatcgtcaccgtgcttgcttttcaaggaacgttctcataccgattgcaaatattacgatgacacatcttatttgtttttgacagtttggatgtaaattttcttcttaaattagcacttatagtcagagtatctctttcactttatagacattgttatataggaattaggtgatgtatgcaattgacgaccaactgagttctgcattttgtttgctcaatatttggtcaacataaggaacaattttacatattacttattttgcaactattataataatcaatttctgacataatatctaatatatttaatcggtcatgcgtaatacatactttgtttgctatacattctctctatcttttaaagaaccatgcaartatgatctaattgttctcattttgcaaaagagttaacaggttttccgagaagttcagtaacttgcccagtgccacattgtctgtaaatgttaagcctg

SEQ ID NO: 298163 - DNA, 433 bp, Homo sapiens
tttggtgtaaatcttaatcgtggaaattgttgtacttaggtcacacagttgtggagacaatgcaggggcctggccatacttgagggtgccatttacrtggtagtatatggaaatggtctcctagagctgctcatggtacagccaacacacacgtacatggaggcttgacatttaggattaccactgtttaaacaaactgtctttgcttgttcccatgtgtagtcacataatatgaaatcaaaattctactatagaaggtagcagtccacacacttcaatggaaaaaaaatatgctaggtttttcaacagaaaaaaagctcattcagaaggtctgtagtcgtttataggtttgcttattgataattttgttagtgtgtttaacttgtatcaattccttgaagtaaaataaccactttgggatattttatgtttt

SEQ ID NO: 298164 - DNA, 433 bp, Homo sapiens
tttggtgtaaatcttaatcgtggaaattgttgtacttaggtcacacagttgtggagacaatgcaggggcctggccatacttgagggtgccatttacatggtagtatatggaaatggtctcctagagctgctcatggtacagccaacacacacgtacatggaggcttgacatttaggattaccactgtttaaacaaactgtctttgcttgttcccatgtgtagtcacataatatgaaatcaaaattctactatagaaggtagcagtccacacacttcaatggaaaaaaaatatgctaggtttttcaacagaaaaaaagctcattcagaaggtctgtagtcrtttataggtttgcttattgataattttgttagtgtgtttaacttgtatcaattccttgaagtaaaataaccactttgggatattttatgtttt

SEQ ID NO: 298165 - DNA, 433 bp, Homo sapiens
tttggtgtaaatcttaatcgtggaaattgttgtacttaggtcacacagttgtggagacaatgcaggggcctggccatacttgagggtgccatttacatggtagtatatggaaatggtctcctagagctgctcatggtacagccaacacacacgtacatggaggcttgacatttaggattaccactgtttaaacaaactgtctttgcttgttcccatgtgtagtcacataatatgaaatcaaaattctactatagaaggtagcagtccacacacttcaatggaaaaaaaatatgctaggtttttcaacagaaaaaaagctcattcagaaggtctgtagtcgtktataggtttgcttattgataattttgttagtgtgtttaacttgtatcaattccttgaagtaaaataaccactttgggatattttatgtttt

SEQ ID NO: 298166 - DNA, 583 bp, Homo sapiens
cttctactaaaatgtagaaatactttaggatgggaataatttgtttaaatcaatagtttctaaatgtctcaaagcattggacaattttaactgcattttaactgttatttgattaaagatcattttcattaaatgtatgaagctactatattcaagaactccagaaagaaagttgattactaaaaaaaggcccctttttttctaacaaaaagtgttagtactaagtgcatgaacaatcaatccagagaagacagatggtcaacaaagcatttcacagaaaaccttgtactttccatatgttgttatatgcaatgcatgaagttttctgctagcacagagattaaaaaataaaagcacacatcatatttgtctgaatttttcttttctttccactactcttatrtcttgcttacatccactcagcctaatatagctttattgcaacttttataaaggtatgaagaaagcttgatatacatcacataaggacatattcagagttaagacaaaagacaatggcaataagagtgtcaaatactatatgaactatatggtatcagattacattaacatgaaagtatgt

SEQ ID NO: 298167 - DNA, 611 bp, Homo sapiens
tttgtttaaatcaatagtttctaaatgtctcaaagcattggacaattttaactgcattttaactgttatttgattaaagatcattttcattaaatgtatgaagctactatattcaagaactccagaaagaaagttgattactaaaaaaaggcccctttttttctaacaaaaagtgttagtactaagtgcatgaacaatcaatccagagaagacagatggtcaacaaagcatttcacagaaaaccttgtactttccatatgttgttatatgcaatgcatgaagttttctgctagcacagagattaaaaaataaaagcacacatcatatttgtctgaatttttcttttctttccactactcttatatcttgcttacatccactcagcctaatatagctttattgcaacttttataaaggtatgaagaaagcttgatatacatcacataaggacatattcagagttaagacaaaagacaatggcaataagagtgtcaaatactatatgaactatatggtatcagattacattaacatgaaagtatstgccaatactgcgttctccttgaggtattacagtgtttggctatgtctgtggtagcccttctgctgac

SEQ ID NO: 298168 - DNA, 628 bp, Homo sapiens
atcatttgaaaccttaataattctaatctagttatacaatcttaccttctagcttgtgtgtaagccataaamgttactgaaaacaataggaaaacattgttttgacaggtgccattatacaataaatgttcttctatttttgtacaatagattacaattgccattctgaataagtgttagggtgaaatatcaagacatcacatatcctacaattcaatttttgttattaaaaaatccctctgtgccaatataaaatgattggttattttatttctcttagtaacttaccttaaagagaatatttaaaatgattcatttagctgaattacttgataccaatttttatcaactggcagaaaatctattgaacgagtagcttatatgaagtaaaactcccacctatgcccaacacaaccaatatatattgaggatactaccacaaagattcttcaccttttgctttgaggtagccatctccccataaactcctttcccaactaaatttatatataggaaattaggatacctccaaacattctacctcattcatattaaatattttttctccatcatgtgtgagtctaccagacaaataaatatgtgacaagaaaatatcaccaggaaaaag

SEQ ID NO: 298169 - DNA, 628 bp, Homo sapiens
atcatttgaaaccttaataattctaatctagttatacaatcttaccttctagcttgtgtgtaagccataaaagttactgaaaacaataggaaaacattgttttgacaggtgccattatacaataaatgttcttctatttttgtacaatagattacaattgccattctgaataagtgttagggtgaaatatcaagacatcacatatcctacaattcaatttttgttattaaaaaatccctctgtgccaatataaaatgattggttattttatttctcttagtaacttaccttaaagagaatatttaaaatgattcatttagctgaattacttgataccaatttttatcaactggcagaaaatctattgaacgagtagcttatatgaagtaaaactcccacctatgcccaacacaaccaatatatattgasgatactaccacaaagattcttcaccttttgctttgaggtagccatctccccataaactcctttcccaactaaatttatatataggaaattaggatacctccaaacattctacctcattcatattaaatattttttctccatcatgtgtgagtctaccagacaaataaatatgtgacaagaaaatatcaccaggaaaaag

SEQ ID NO: 298170 - DNA, 537 bp, Homo sapiens
aaataatgtaaatagagtatcttagttacatggagggaattaatctgttcacctatattatgtaatatggagtttatcatgaacagagtttaacagtctcagtstgagttactctgttaaacttcttttcctaaaaatatcagaaataattacacaaacaggtacagtccagctgtctttgatctctctgttctctacaatgataaaactttatagtttttcttctaacataaatgtctccaaacaaaagttggaaagaaataataaagagaaaataagataagaaaaaattaatgctttgtgtattataaaaaccaataatcatcacgttttaaaagttgcagttacttctttaggaaggcctcctattacaatggcatcatattactgacttgacacagaggttgctatacaaaagtcaatcaggggatgccatagaagagacaagccccagacatcatggcactggggcaggcagtgagaggagagaaacccatggcaaccaagtgctgtggggactgctctgggaggctattc

SEQ ID NO: 298171 - DNA, 587 bp, Homo sapiens
ctaacaagggacagagtatgtaacaaaaacattcttctagaatattgtcaggtttttaaagaatctgaaattgttataaaaaaatagaaaatgaaaacatttaaattgtctcttaaatctgacatttaggtcatggtggtttgaaatatgaacaaatatttatttatttcagtaggagtttattttttagagccattttaggtttacagaaaaactgggcagaaagtaaagagaattcgaattacrttcctatatacttcctcctcccccttcttccctacacatgtaaattcccctgttaacatcttgcattagtgtggcacatttgttacaactgttgagtcaatactgattgattattattaactaaagtccatagtttccattactctttgagttgtacatctgtgagtttggacaaagatataatcacttgtatccaccactgcagtatcatacaaaattatttcacgaccctaaaaattccttatggtctacctgttcatccctccttcccttacccttactcctggcaatcattgatttttttttttttttttttactgtctctattatttttccttttg

SEQ ID NO: 298172 - DNA, 587 bp, Homo sapiens
ctaacaagggacagagtatgtaacaaaaacattcttctagaatattgtcaggtttttaaagaatctgaaattgttataaaaaaatagaaaatgaaaacatttaaattgtctcttaaatctgacatttaggtcatggtggtttgaaatatgaacaaatatttatttatttcagtaggagtttattttttagagccattttaggtttacagaaaaactgggcagaaagtaaagagaattcgaattacattcctatatacttcctcctcccccttcttccctacacatgtaaattcccctgttaacatcttgcattagtgtggcacatttgttacaactgttgagtcaatactgattgattattattaactaaagtccatagkttccattactctttgagttgtacatctgtgagtttggacaaagatataatcacttgtatccaccactgcagtatcatacaaaattatttcacgaccctaaaaattccttatggtctacctgttcatccctccttcccttacccttactcctggcaatcattgatttttttttttttttttttactgtctctattatttttccttttg

SEQ ID NO: 298173 - DNA, 568 bp, Homo sapiens
ggaaccagcttaggaagaggcccagaggagtgtgaatgcatgctactttcaggaaatctcagagagtttggggtgactgaaaggttggcatagtatatgcaagattgtgtggaatgtagatgaagaggtgaggaggagccagatctttactgggctgttctagaagtagtgtggaggggtttttctggacgacagcaaagctggggcaaggtgaacactgaggatgctgtagaagttgtccctataaaaaatgatagactaaagcagtaaagatagaaaggacaagcaagattaaagacagtttaggatttaaaattggtaaatgggyatgaattaggaaacaggttgaccttaatgttctaatgaatggctggatgattgtggggtgcctttgatggagccatagggttcaggaagaggagtaggtattagaaggaaaatgatgggttccatgttgggctttagaatttaaattacattaaaaatacctagcagatttcagtaggcaattagaaatgttgatctgaagttgatttacgtctttccctttctctgaaaattagaataa

SEQ ID NO: 298174 - DNA, 492 bp, Homo sapiens
catatctctcctttatccctccttgcccaaatagtaaccacctcctttgtgctctctaagtggtttataatttaatcctctggtgccactgtttgcatacttccctcctgttgtaagttccatgaggacaaaagtgttttatgtatttttacatagtaggcattcaaacatctgctgaactaataaataaaaagtaacatatttaaagaacaaagttcaaagcatgatgtaggctgaaaaayataaaacagaataaagagcaaagtatgccttcaaatatttaaatgagtatgtctacatttaatgagtttgtgaaaatacatttgtgtttccaataatttctactttatagtatctgagatcacatttagagtaaacactccaaatacacattttgaccaaatgccaaatggccaagtgttaaaaattaatattctgttgaatataactacaagaaaacaggacagaatatatatgaaacattggttttaa

SEQ ID NO: 298175 - DNA, 591 bp, Homo sapiens
cactgtatgacaaatgctttttttttaagtaggctaattaaattggctttttcttccttgcaatcaaagaatcctcaaaccattacgggaggtaaaaataaaaacactgagtaagcagctactatgtgcttcgcactaactttttgaggtgggtatgaagaaaatgaggctcatttaattaatagacctgactcccaaaccgaaactctttacaatatacctcattttcagtcaagtaacatcctctctgttccaggcctctaccccatttatttcccaagaaacattctcagattattctaaaaatgataacttttctccttttaccatgtccagtctctaatctacaaatttcaaatgcctttactccagaagttttttgttgttgttttttgaggcagagtctcactcagtckcccagggtggagtgcagtggcacgatctcggctcactgcaatctcccatctctcaggctcaagcgattcttgtgcctcagcctctcgactagatgggattacaggcatgtgccataacacgtggctaattttttattttttagtaaagacagggtttttccatgttggccaggct

SEQ ID NO: 298176 - DNA, 564 bp, Homo sapiens
agtaaaataaggtctgataaaatatcatactaattttcatgtatggtttgaggaaacggcatttcttttctgtgaaagagaagccaacatttataaggtgctacttgggtttcagtgtcaaaccctatgctcttygaagtttaatattagtctatatttttgtaactttaaaaaaattattgtgaacacttcttgctcattttactctttatgtaattctaagaattctcacctaagttccaggaaggaataaagtcctccactgaagtccactgaaatgtatactatgctatctgtttcttgatcattactacctttccacatcagcctccactgaagtacccacatttctgcctggtctctagctacgtggtcagtgcagctgtctgctacagcatcccctcattaagatatgactggatgatgccatcctacaaacagagagccctctctacagaaatgatgcttgattcttagacaccatacagaatctatattccagccccttctgccagaacatggcaaatgtttcctctccttgttctcagtaatctaatttaccac

SEQ ID NO: 298177 - DNA, 564 bp, Homo sapiens
agtaaaataaggtctgataaaatatcatactaattttcatgtatggtttgaggaaacggcatttcttttctgtgaaagagaagccaacatttataaggtgctacttgggtttcagtgtcaaaccctatgctcttcgaagtttaatattagtctatatttttgtaactttaaaaaaattattgtgaacacttsttgctcattttactctttatgtaattctaagaattctcacctaagttccaggaaggaataaagtcctccactgaagtccactgaaatgtatactatgctatctgtttcttgatcattactacctttccacatcagcctccactgaagtacccacatttctgcctggtctctagctacgtggtcagtgcagctgtctgctacagcatcccctcattaagatatgactggatgatgccatcctacaaacagagagccctctctacagaaatgatgcttgattcttagacaccatacagaatctatattccagccccttctgccagaacatggcaaatgtttcctctccttgttctcagtaatctaatttaccac

SEQ ID NO: 298178 - DNA, 564 bp, Homo sapiens
agtaaaataaggtctgataaaatatcatactaattttcatgtatggtttgaggaaacggcatttcttttctgtgaaagagaagccaacatttataaggtgctacttgggtttcagtgtcaaaccctatgctcttcgaagtttaatattagtctatatttttgtaactttaaaaaaattattgtgaacacttcttgctcattttactctttatgtaattctaagaattctcacctaagttccaggaaggaataaagtcctccactgaagtccactgaaatgtatactatgctatctgtttcttgatcattactacctttccacatcagcctccactgaagtacccacatttctgcctggtctctagctacrtggtcagtgcagctgtctgctacagcatcccctcattaagatatgactggatgatgccatcctacaaacagagagccctctctacagaaatgatgcttgattcttagacaccatacagaatctatattccagccccttctgccagaacatggcaaatgtttcctctccttgttctcagtaatctaatttaccac

SEQ ID NO: 298179 - DNA, 592 bp, Homo sapiens
taaacataaataaaatactgtctcaggaagaaagaaatctattagagaatatctgtgcaacataaaagtgaatccaatatgaratgatatgacatacttttgtaaagcaaagaaaaaaatcatctttggaaatgatgcaaagattgatgggggaagaaaggataacagctactagagcaggatttctttagcatcttatataattagagagcacatcgtttttgacagatttcacaagaagaacaaaaatacagtatattcacctaaaatacatttgtattatgataaacttttcatttagtgctttactgctttgtgccctattctggatgaagaaacaagagtcctaagcaaagaataactaagtgcgttatctatagtcaaagaaattaaagtgaacctacatggcttggaaaaaagcagatgagagacaagaaagaggcagacaaggcaaacaactacgaagtgaaccactatagctcaggaaacacacagaaaactatcactaaacaaatgaaatccccttagaaataacaaaaaagcagaacagacattgctaaaaacaatggaaaaccaagaagattttaagaaa

SEQ ID NO: 298180 - DNA, 532 bp, Homo sapiens
aaaaaaaacaaatttttggagagctgaccatatcagattaacattttctgcttgagctgtggcatgatgaagacctttcattccccatgtttatggccgatttttccacaggactagtagtagtgagtacattttaaattttacatgtttgaaacatctcttgttaactatgaaaaaaattagatagtaggtttattaatatgttgttgctaaatttattccagctttcatatgaagctaaataagtaaaacgtaaacttaataagtaaaagaaagggtagttgataaagttactttaaatttaaaaacctgtttttatcttattctcaaaaaattttaaaaaatgtttgcaatcattaaatttttgcttttactttcactacatrtaaacttgggcaaatttcttaacctctttttggttttctcatctctaatatgaggataataatctacctacttcattgggttgctgcgaaggttgaaaagttactataagtaaagtgcctagaatagtgtctggtagatagtgctg

SEQ ID NO: 298181 - DNA, 594 bp, Homo sapiens
gtgatttctgcatgaaaacttcaaggaaataataaggcatgctacactcacaaactctattgtcaacaaagtactaagttttcctccaaagtttggggcagaaagcaaaagaaaaataacagtgttgcagtcacccctaaaggtgaaatgcttgggtgtgggggtgtcactgaccaaagggaatgtttytagaatgttctagaatagaggatgcttcacatctgacccagagttccagaggactacactatggagataaaagaagaccactattcagggcagaagtaaatattactgtggtttcattagcagtaaaggtcagtgcaccagcctccccccaattccagctataaactgagaagcagataaaaatcacactatcaggagaaaaggagccaactatgtgtaacctccttgatctctcagacacaagtctgtatggacttttccttgtttaatgatagtaaaatgaaaatagggcatgttatgaaaatagggatctgggggaaaatgctgtaaaaaaaaaaaaaaaaggaacaaaggcactgaacaatccattaaaagttgatctcctccacagaataccacaagaaa

SEQ ID NO: 298182 - DNA, 641 bp, Homo sapiens
tttgggtaagtattcccattccaaatgggagaaattagacaaaacaaaggggccacaggccctaagcaagtccaaaacctgactgggcagtcattaaatcttaaagctccaaaatctcctttgactctatgtctcacatccagggaatgctgatgcaagggatgggatcccatggctttgtgcagcttcacccctgtggctctgcayggttcagctccttcagctgctttcatgggctggcactgaatgcctgtgacttttcaaggtgtacagtgcaagctgttgttggatctaccattcttgggtctagaggacagtgaccctcttctcacagctccactgtgcagtgacccagtcggaactctgcatgggggctgaatcccacatttcccttcctcactgccctaacagaggttctccataagggctctgcccctgcagcagacttctgcctggacatccaggcatttccatacatcctctgaaatctaggcaggggcttccaaaggtcaactcttgtcttctgcacagctgcagaaccagcatcatgtggaagccactaaggcttggggcttgcatactctgaagcaatggcataagctgtaccttgacccattttagccacagctagagctgctggg

SEQ ID NO: 298183 - DNA, 588 bp, Homo sapiens
ccatttttccagtgtggtgattactcctgatatctactagtctcacagaaatagaacttgatatgtaaaaaagttctatcataattatttcttttgtttcttaaagagagcaacataaaaataaatctgttgtctaatatttcattgagaattttgcatctacacatatgagtgacattggtctaccttttttatttttggaactaatgtgacattttgccagggagatttttctggcttccttaattaaattggagagctttctgcctctttccatggtctacagcaatttaaataacattgggcttattcgttctccaatggttggatacaatccagctgtggaaccatctggttttggtacattttttaataggagatctataatcattttcaaatcccttgtatggtaattggtctattcaagatttttcacatcttttatttcttaataatttatattttactaataatatcatcccatttttytagattttagaaatgtttgccttagaattgcatgtaacactgaatgatatgtgttcccttctgttatgtattctttaaaattttattataaatatttta

SEQ ID NO: 298184 - DNA, 579 bp, Homo sapiens
cctgttctttagaatcaggacactaagttcatctcacataaaagaggagggaattacacaaggacacagaaaccaagaggcagagagctttgggggccatcttagtagttggtgtaccatagcaaagatattttatcttactctccttaagttgattatttagagtttaggcaatgtagaagataataccttccctctaataagaatgtaccaactcaacagctgaaagaatcccaagccatgcttggctgtgatcaaattgcttttattgaaccaacaggagcagaatggagctggcaacattcaaggaccacattaactagataagtgctacattcctaagaaataytgaaaagatacacacaaggcttgtgtttctcatgaacttcatttatgagctgcactaaagcccatcgtattaggcagggaatgaagtacagcacatacaccacatacctttatggacgagtcttaaaatagtcccagttctaacctttgtttcaactctgttcctagatatttaatcttcatcaagaaaataattccaagacaagttcccagatgagtgttcagtggatc

SEQ ID NO: 298185 - DNA, 516 bp, Homo sapiens
ttccagcacgaggtatgaagttccagcccaaactatggccatgctcactaacattgggatatgaccctatcatcctaaacatggcatttctcatcttcgattcccttagctttgatttattattgaaacctgttgtggaacaagtggtgctaatgcagtagctcggtttctctcctcacattggtatcagctgtgccacagtgtggctagagaaaggattaagtcagaaagagaatgagattgctaacacttctgactatcttcaaatacttaatgaccaaagtagaatttcaygcaatcttttttaacatacatggactatataattttaacacgaaaaaagcactcacagaataaaccaggatcttcagcctcacatgatgtcttcagaggctatggggtaaggattggatctcctgacagctgtcagtcaatagataaaccaagaatattgtttgaattgaattcacactttctattggagctctgcaatccttagtgccaagcaccgggaat

SEQ ID NO: 298186 - DNA, 595 bp, Homo sapiens
tctacatgtattttaagtcttggtttccagaacttagaaaacaaatcacttagaataaaaatttagaagaaaatgtttgacataatagtttgagcagtctccaaaattacccttttattctcttaaaatgtaaagcatgcaagaaccctataaatgaaagagggagttgtgagctagaagttaggtgcaatatggctccatgacaagtggggaaaaaggaagagagtcatctttgaggtatgataaaacaaagactcctttagtgacaaaggaggagttcttggagagtttggagactaaaaattcaactgagactttaaaatccccctcttaaggagaattataataatagtaatacaaataataataatatcattcaatgactaagtaatatggccatttgtatgcaaagccttaaaaatcctcaccaaaatcctatgagatacccttattatacctattttacagatgaaaaaattaagccttggaaagacaattcttatcccattactccagcaacattccctgtagtaayacttgggccatactagttggtttcttcctacacacagtggagtcattcgggacattagta

SEQ ID NO: 298187 - DNA, 620 bp, Homo sapiens
ggggttctgggcattcattgctggccagagggcacccagcactggacagatgagattggcagcaggttattagcaacayacacctaaagccacagggagaaggataccagaggccatgggaggaaactttgtaaggccaagaggattaggtacccctgttgcctgccccattcccatgaggggatgtgatttgcttgtaggctggcagggaagtgagaccttttaggttgaggcccaggtagagtggagcttgtctgggggacaggggaactagctgtctggagtctgtcctgcaggtgaggaacatatctagtggagcttgtctgggggacagggggactagctgtctggagtctgtcttgcaggtgaggaacgtatctggcgagagcaggggaaccctcggttaggcccttagggcctggtgaggctcaaagatgtcaaagaatcactgaaagttttagggtttacaatatactaacctagttattctatttaaacattgaatttcatagtttatggctctaatttgtctcataaaacctggcacacactgctttgccttacagtcatttgctggcaatttagctaatgttaacctagcctctcagttagattgtaaa

SEQ ID NO: 298188 - DNA, 573 bp, Homo sapiens
aaaaatgcttctttacctcttttagcttctggtggttgctggcaattcttggcatttcaggccttctggtagactaactctaattcctggctctgtcttcacgtggctgtctttcttctcatgtgtctctgcatctttctcctaataaggacaccagtcgttggatttagggcccactttaatccaatgtgacctcattttgacttgattatttccaaataagatcttatttccaaataagttctcatgcacaggtatcaggggttaagacttcacgacatctttttgtgggacaggattccacctacaatgcatatgattagaaaagatatgtctgttgtgtctgcctaaatacactccagaaaaactcttgtaaatgatttgtccaaaattaagcaaaaagtctcaggtaggagtagaaaaagagctcagaccctaggatgcccagycaaggacttcttgctaatggctggaaatgaataatcagtgtgtcttggcacataattcgcttctcaaacatagtaaagtctactcaatgcctatgaagctcttcatgaggttaaaggactatct

SEQ ID NO: 298189 - DNA, 574 bp, Homo sapiens
catattctaacagtgaagcctcaagggaatcatcacctcctcagagaaaggctcttaattcccccaggttgaattaacccccgccttcctccctgcttccaaaacacaaatgttcaggagtcacctttgaagtatctttttgctgcacctgcctgccctctggccagcagaacatggtttccgcatttggagtctggaggccctgacttctagctcaaggtggtgcgtgsagtacatttttttagctatctctttccccaaatccaagtgaaatgacaacaaagcagtataaaggcaatatattgattacaacaaaatgagaaaaggtgggaaactttttcagcaaagagaatttttgagcatctctgaagaatgaaaagtgaatttgatcacattgattaataactaaaaatgaagtatttaggaacaatttacaggcacagcaagaggatacagcagatggcagccattgctcacaacagggcccaaaaggggctccaagctctagaaagtaggggctgaatgtgagaaagtaactggataactgcccttggaccctgttctcagcacagat

SEQ ID NO: 298190 - DNA, 541 bp, Homo sapiens
tttactggtttattataaagcatattacaaaggatacatatcagtgatcagrcaaatggaagagatgcagagggcaaggcattcaagaacaggtgcaggctgggtgtggccacacctgtaatcccagctacttgggaggctgaggcacaaaaattgcttgaacctgggagtcagaggtttcagtgagccaagatcatgctactgcactccagctcggaataagactgtatctcaaaacaaaacaaaacaacaacaacaacaaaaaatacaggtgcagagcttccatgccctctttaggtgtgtcaccccacagggaacctccacttgttcagctatctggaagctctgaacccagtccttttagattttcatgtttcatggaagcctcattatatagtcacgattgattgaattatctgccattagtgatcaacttaacctccagcctttattctatcccccaaagctggaggggcaggcaaaaagtccaaaccctctaatcatgccttggtttttcctgtgaccagccctgtggtcatct

SEQ ID NO: 298191 - DNA, 545 bp, Homo sapiens
attcttcataacacctggggcctgtacctcataagcaatttcatgatcagaaaaatagaaaaatctttcctctctactcacatagttgagagttccaccctgttgttagtggagttcttggacttcatcttgcatgctgacaggctatcactgactctggttggaccctatcaattctgcttctgagttctttaatagcttctcttccccatggttaataatgctatgacttctcgacgtagtccttctttttatatatgttgcttcttaaaatattatctccctgccaatcttattattaacttaacatagatactaccctaatctcagcttccactcyaactctccacagagttctggtccaggatttctatctcacagctacatatttcaccctgaatgcctcctcaccagttccaattcaagacatcttaaatctgacctttcctttatccaacaatagcaataaaaacaacctctcctagtcacttccctatttcacgaatgattccagtcatccataatcaaaatccaaactatctttg

SEQ ID NO: 298192 - DNA, 596 bp, Homo sapiens
gttacgtatattttggtggggttgatgtgaaggtgcaatgaagttacatatgacagtgttcagtgggccaaaaatgcttatatagaatagttggtaagattattattattcttagaggccaggcatggtggctcacgtctgcagtcccagcactttgggagactgaggcgggtgggtcacttgaggtcgggagtttgagaccagcctgaccaacatggagaaaccccgtctatactcaaaatacaaaattagccgggcccggtggtaggtgcctgtaatcccagctacttgggaggctaaggcaggagaatcgcttgaacctcggagatggaggttgtggtgagtcgagattgcaccgttgccctccagcctgggcaacaaaagcaaaagtccgtctcaaaaaaaaaaaaaaaagaaaaaagaaaaaaaaattattatttttcacttctctgataatagtagggtrgcaaagttcaggactgaccatctagcattaacacttgagtctaaactattttaacatatttgtattttggtcctaaagctcatttttgtgcctccatattctacatatttacaggatgtacaatacagtg

SEQ ID NO: 298193 - DNA, 595 bp, Homo sapiens
aaggaactggaggaggaggaagaagaagaagaagaaaggaagaaatgcaggaaagacgagaaggggaagggacaagggagggagaagaaatcctctatagtatttgcagatttccacatggacttaccttcgccgtggctaatttcaagtgacatgagggcatggttcaggaagagatgcacacatggcttctgctgagttggtaggagcccattccgatataacgctgcttctcccttctttgacactagccacctaatagcctcatcaccacatggcagccgacgtgacttgagtgggatgataccactcttctgcccaaagcctccggagaggctccccatgtcacactgagtgagatctccgaccctaacaggaactccaaagcttatttgatggtgcccaggccctgtcctctaaccctctggcctcagtgtctactgctgtcygctggctcactgcactctagccaccctggcctcctaccttgtctttcaacataccacacatgactccaccttaaagcttttgcactcacaattccctgtgcttggaccactttctctctaggtacaggcttggcacactctcttac

SEQ ID NO: 298194 - DNA, 596 bp, Homo sapiens
tttccactatccagggagggtagtttatgccctttgggtgcttttgggtgcgtatcagaggaacccactgggaacattcgactgtacttcctrtgtgttgggtaatagagtttcctctcattgtgtgtcatcctcagctcacctttttagggatctattccacacaactttctcccttatgatgtccagtatccttccaggtgttctgttagagagcttcttttcatgcttgggaacacaaatatggctcacaggctatattcatctatttttgcactgacgaattctgggaatttaagcagattatcaacattgtaggaagctcttcttgaatcgaaggctgaagcagttagctaatccaagtgtgacatttacattgtccaacaggattcaaagtcaattccactctgtcttcaaacttcagctccccaagtggtcctactgaaatctctttcattaaaattgagtggaaaggcaggcccaatgctccccaaagaaatcttcctcagaaaaccctctcacgtctcttcatttcaggccttatatagtttcaatgtgttcacagccacctactttgaaattcctactttgccact

SEQ ID NO: 298195 - DNA, 578 bp, Homo sapiens
taatgatgtttcaaattcaatttaaaaaccattaaaacgtagtgacttttaaacccattataatttagctcatttctgcaaaatttagtttaggagaaagcagctgtgcatttgaacatctggaaattacttttaattgcacttttctcaagtgagaaatgagaaactctacctgtgattctatttgtatatctgaccacacaaatcctagcaaacacctgcactttatttataatttcattttgggctacataatctcattttgctattaatccagacttttatgtgatttagcaactgcaaatttgatcttgcacgggctttaagatggaaaatggaaattgcaagatatttgattactcataagtyacttatctaaggagaaaacaaatttcaaaggtagacatgactaatctgaaagttgaaaatatgcaaatactattacatttacacttaatgacttgggtattgaaaataaaaacaaattccagatatgggttggcccaatagcttacattttatctaagacctattcattcaataaatcagcccttggtcttgaataaagcatttaaaac

SEQ ID NO: 298196 - DNA, 581 bp, Homo sapiens
ggctgaactattaggctttatagatgcacaaaaactgaaagacccaataaattaaaaatatatgtcatgataatattgcacagcaaataaggctagtatccttattttgaaagtgatcgatatgtaaaatcaaaagattcccattggatctggcttcatatatagcagtgtatagtttgatgctcagaattcttatggaatctaataaaatgctgggaaatcatttcttttgtgtccccctttttttccaatgtaagaaaatattcagcttgtttctctgaatggtctattaccatctacaaatcacccactatcacattgttttatgtatatatatatatatatctgcagtagctatagactggcagtcctatagcaacatttgttgatctcagtratcacttctttacacttcttttctgtcttttcattagacatctcatgcacaatagcagttaattcatatcatgactgttacaggctgaattgtctccccccaaattcagatgctgaagtccttactcccagtacctcaaaatccgactgtaggtggagttagtgtctttaaagaggtaattaaa

SEQ ID NO: 298197 - DNA, 583 bp, Homo sapiens
tgatgacacgaacagccatatatctaaaataagttgagataataattcataatctttccccaaagaaaccactggatccaaatggtttcacaggtgagttctaccaaatatttaaggaagaactcacatcagtttcccataatcccctccaaaacataaaagcagaggaacgctttctaacgcattgaatgaggccagcattactcctaatgccaaaattagataaatatattacaagaaaggaaatttgtacacccttatccttcatggrggtagacataaaaatccttaataaaacattagccagtataatttagcaatgtattgaaataattatacccgaagaccaagtggtctttatttcatatatgcgaggttggttcaatttttgaaagtcaacacaaaatatgatcatatcaattgacacaagacacaacatttcacaaaatccaacactcaagcaggataaaaactgttagcaaactaaaaatagaggagaacatcttcagattgatgaagaacatctacaaaatagctactagcatcatacctaacagtgagaaactagatactctcccccaag

SEQ ID NO: 298198 - DNA, 619 bp, Homo sapiens
agagacttacttctatagatactatatgtaataccatatgtcaatatctatagattctatatttgataccatacatgagtcaatcaatcartcaacacatatgtaatcaaagttggcagtgcatttactcctgagttagatgctgtagggccactgttgtgtgtgatcttgccttccagaaacttacaaccaagttgaaaagacaagagccataaaataaaataatagcaaattaatataaaacctggataaagaatgtaataactagatgaccaatttgagagtgcttattgggacttatgaagaaaaagaaattgaaaaaaggtgagcctgtgtttaaaatttagaggggtatagatataacacagactgttaatgttttctttcaatatccattttgttttactattcttttttaaggtgttttattttagttgtttttacacgttacatgaacattcattcatcgtaatgcatattttatcacattttattgattgtccaatattcattttattgtttatccattttattgattgtccagagctgacatctccctatgtcagcatttaataatttaataatttctgtgaaacttttaaagggctttgggtatgta

SEQ ID NO: 298199 - DNA, 619 bp, Homo sapiens
agagacttacttctatagatactatatgtaataccatatgtcaatatctatagattctatatttgataccatacatgagtcaatcaatcagtcaacacatatgtaatcaaagttggcagtgcatttactcctgagttagatgctgtaggrccactgttgtgtgtgatcttgccttccagaaacttacaaccaagttgaaaagacaagagccataaaataaaataatagcaaattaatataaaacctggataaagaatgtaataactagatgaccaatttgagagtgcttattgggacttatgaagaaaaagaaattgaaaaaaggtgagcctgtgtttaaaatttagaggggtatagatataacacagactgttaatgttttctttcaatatccattttgttttactattcttttttaaggtgttttattttagttgtttttacacgttacatgaacattcattcatcgtaatgcatattttatcacattttattgattgtccaatattcattttattgtttatccattttattgattgtccagagctgacatctccctatgtcagcatttaataatttaataatttctgtgaaacttttaaagggctttgggtatgta

SEQ ID NO: 298200 - DNA, 619 bp, Homo sapiens
agagacttacttctatagatactatatgtaataccatatgtcaatatctatagattctatatttgataccatacatgagtcaatcaatcagtcaacacatatgtaatcaaagttggcagtgcatttactcctgagttagatgctgtagggccactgttgtgtgtgatcttgccttccagaaacttacaaccaagttgaaaagacaagagccataaaataaaataatagcaaatyaatataaaacctggataaagaatgtaataactagatgaccaatttgagagtgcttattgggacttatgaagaaaaagaaattgaaaaaaggtgagcctgtgtttaaaatttagaggggtatagatataacacagactgttaatgttttctttcaatatccattttgttttactattcttttttaaggtgttttattttagttgtttttacacgttacatgaacattcattcatcgtaatgcatattttatcacattttattgattgtccaatattcattttattgtttatccattttattgattgtccagagctgacatctccctatgtcagcatttaataatttaataatttctgtgaaacttttaaagggctttgggtatgta

SEQ ID NO: 298201 - DNA, 473 bp, Homo sapiens
ctgctaaaacaccttagcaatttctgtgagaatgaaatccatatccagttaacagcgtttttcagtgttgtataaccttgtggacaayttgatactggtttaggttcttgaattattgaccttttaagaagtctgcaggtgaataataattggccacatacacagcaatgcacttagagcattattttaagttccgcacttggaaatttgccagcactactttggaaatggcaactaaagcaagcatttcatatattggattctatggaactttgctgaatttggagacagaaatgcattaagcagcattcaatataactggtcttaaatgtgggagggcttagtgtttatttgcaacacataattttttgggagccttaaggctctttagactccaaagtgttttcctcacatcctatcactcaatgaaattccagctttggagctcctccatctctcattggaattagata

SEQ ID NO: 298202 - DNA, 473 bp, Homo sapiens
ctgctaaaacaccttagcaatttctgtgagaatgaaatccatatccagttaacagcgtttttcagtgttgtataaccttgtggacaatttgatactggtttaggttcttgaattattgaccttttaagaagtctgcaggtgaataataattggccacatacacagcaatgcacttagagcattattttaagttccgcacttggaaatttgccagcactactttggaaatggcaactaaagcaagcatttcatatattggattctatggaactttgctgaatttggagacagaaatgcattaagcagcattcaatataactggtcttaaatgtgggagggcttmgtgtttatttgcaacacataattttttgggagccttaaggctctttagactccaaagtgttttcctcacatcctatcactcaatgaaattccagctttggagctcctccatctctcattggaattagata

SEQ ID NO: 298203 - DNA, 592 bp, Homo sapiens
ttaattgtttcaagttatccattaattatcctggttagaaaatcaggcttgattggtgtacctctttaatgaatagcgcagagaaatcacattaaaatgtgatactgttaaaccaatgtgttaattmtttgacacacttgctttccttctttcattttccagtgtgcctttctctctcaaagtttccagactctgctttttcactaacttccttattcattttgaccaattcctgccttgactaatttaccctaatcaatttgcaatctgatttctttccctaccacttcatgagactgctttgctccctcaagaagtgcaaatgactttctaagctaaatctgctacttgcgtgcatcattgacaatgctggccactttctttttcagtgaaattcttaccctcttgtaacatctgacaaacattatctcttggttcccttgctgcttctccaaacatatcttctattctcatttttgctgcttgtcttttcaaatataggcattccacaggtttattctccaaccatgccgtggttagagaatgctcaaatgctcccaaaacttcagttatcaccttcgtgcaactgact

SEQ ID NO: 298204 - DNA, 592 bp, Homo sapiens
ttaattgtttcaagttatccattaattatcctggttagaaaatcaggcttgattggtgtacctctttaatgaatagcgcagagaaatcacattaaaatgtgatactgttaaaccaatgtgttaattatttgacacacttgctttccttctttcattttccagtgtgcctttctctctcaaagtttccagactctgctttttcactaacttccttattcattttgaccaattcctgcmttgactaatttaccctaatcaatttgcaatctgatttctttccctaccacttcatgagactgctttgctccctcaagaagtgcaaatgactttctaagctaaatctgctacttgcgtgcatcattgacaatgctggccactttctttttcagtgaaattcttaccctcttgtaacatctgacaaacattatctcttggttcccttgctgcttctccaaacatatcttctattctcatttttgctgcttgtcttttcaaatataggcattccacaggtttattctccaaccatgccgtggttagagaatgctcaaatgctcccaaaacttcagttatcaccttcgtgcaactgact

SEQ ID NO: 298205 - DNA, 564 bp, Homo sapiens
aattgtttcaagttatccattaattatcctggttagaaaatcaggcttgattggtgtacctctttaatgaatagcgcagagaaatcacattaaaatgtgatactgttaaaccaatgtgttaattatttgacacacttgctttccttctttcattttccagtgtgcctttctctctcaaagtttccagactctgctttttcactaacttccttattcattttgaccaattcctgccttgactaatttaccctaatcaatttgcaatctgatttctttccctaccacttcatgagactgctttgctccctcaagaagtgcaaatgactttctaagctaaatctgctacttgcgtgcatcattgacaatgctggccactttctttttcagtgaaattcttaccctcttgtaacatctgacaaacattatctcttggttcccttgctgcttctccaaacatatcttctattctcatttttgctgcttgtcttttcaaatataggcattccacaggtttattctccmaccatgccgtggttagagaatgctcaaatgctcccaaaactt

SEQ ID NO: 298206 - DNA, 572 bp, Homo sapiens
aacaagccttggatccatagacaatgaagagatttctttgtagaatgtggcttggctgggaatgcagggaatgacacaatatctccttatccacatttaatcatggccctttcctgtcattcacctctcagcagcttgcagtattcattttgtgacactcaactactgtccttcaacctttcaatggaccgtgcacttagggaaacatcccagttttttaccatgattwgcaatatcccttctgcccattctccagcttcacccattctcccccttcaacttgagcattatgttctgacacattttatgctggccttatttttgtttctcttatatgctgaggcgatttctgcctcacaggtgtcacagtagtttttttgcccccatctcgtttaccctgtagcccccacctccctatgcacatagctttggcctcctcctttaggtctcagttgaaatgtcacctcctcggagggatcttgctccattacccaatctaagtaggtccttttctgtgtttctatctttgcaacctattaatttacttcacagcactataattttatttgcat

SEQ ID NO: 298207 - DNA, 343 bp, Homo sapiens
tagccatacagcaaatgaagaaacatttattcaagaaactctatttaacctcattaaagtggcacttgaggcataactgactccctccttctaccctcagtgtgataaaagctccactcctcatttcagaaaaacactgccaagaaaacagggttttctctttctcaagttcacagtcaaggtacgtgatagcatactggatgggcagatcaccaggatttttcagccttgcagctctgatttgcataggctaaaatcctggccaagtgcagcaggatgttgagaatcccttgctcccccaatgtsccactgataggatggttaccctaccccaagcacagca

SEQ ID NO: 298208 - DNA, 513 bp, Homo sapiens
tcccttgctcccccaatgtcccactgataggatggttaccctaccccaagcacagcaggctgagaatactggggtcccaactgccatttccccaggtcacttataataaagccgtatttatgaatatgcctgatgaatacagattttcttgaaatcctcgagaaaatactagcaaacggaatccagcaacctataaaatgaacatcatgattaatatggtttggctctgtgtctccacccaaatctcatgtcgaattataatttccaacgttgtgggagggacccagtgggaggtgactggatcatgcgggcagtttcccccttgctgtcctcatgatagtcagtgagttctcaggagatctggtcgtttaaaggtgtgtagcacttcatcctttgctctctctctcttgcagccatgtgaagacaagacatgyttgcttccctttcacccttccaccatgattgtaagtttcctgaggcctccccaaccaagcctcctgcacagcctataga

SEQ ID NO: 298209 - DNA, 591 bp, Homo sapiens
tagtcagggtagaaaaagagtggactcctcccactgaacaggatagaaatcactatctggccctttacagaaaatgtttgccctgttctaggctgttgtttatcctattattccccaatttatctcacgttacacacagtcacaatgtcctctcacatacagtctctctcctttagacttcacagtgacccataaaagtaggcagttttccccattttatagatgaggaaaccaaggtatagaaaggttaartgaattgcccaagattatgcaactgactaagaggcagagatgagactccagttcacatcttctgacttcaagtctagtgttttcccacctagcctccactcctcaggctccaacatgaaagatatacacctaaaattacccactccttacagaaagccatgcagctattgagggatgtccttgcttgaatgcatgggtatttagaagttaaagtaaggacaggcatgatgtctttcagagcattgaagaaacctggaaaggtctaatggtgatagagaaactgaggctcaggtactggaagacttttttgacactacaatgtctctgttgcaactactg

SEQ ID NO: 298210 - DNA, 591 bp, Homo sapiens
tagtcagggtagaaaaagagtggactcctcccactgaacaggatagaaatcactatctggccctttacagaaaatgtttgccctgttctaggctgttgtttatcctattattccccaatttatctcacgttacacacagtcacaatgtcctctcacatacagtctctctcctttagacttcacagtgacccataaaagtaggcagttttccccattttatagatgaggaaaccaaggtatagaaaggttaaatgaattgcccaagattatgcaactgactaagaggcagagatgagactccagttcacatcttctgacttcaagtctagtgttttcccacctagcctccactcctcaggctccaacatgaaagatatacacctaaaattacccactccttacagaaagccatgcagctattgagggatgtcctkgcttgaatgcatgggtatttagaagttaaagtaaggacaggcatgatgtctttcagagcattgaagaaacctggaaaggtctaatggtgatagagaaactgaggctcaggtactggaagacttttttgacactacaatgtctctgttgcaactactg

SEQ ID NO: 298211 - DNA, 591 bp, Homo sapiens
tagtcagggtagaaaaagagtggactcctcccactgaacaggatagaaatcactatctggccctttacagaaaatgtttgccctgttctaggctgttgtttatcctattattccccaatttatctcacgttacacacagtcacaatgtcctctcacatacagtctctctcctttagacttcacagtgacccataaaagtaggcagttttccccattttatagatgaggaaaccaaggtatagaaaggttaaatgaattgcccaagattatgcaactgactaagaggcagagatgagactccagttcacatcttctgacttcaagtctagtgttttcccacctagcctccactcctcaggctccaacatgaaagatatacacctaaaattacccactccttacagaaagccatgcagctattgagggatgtccttgcttgaatgsatgggtatttagaagttaaagtaaggacaggcatgatgtctttcagagcattgaagaaacctggaaaggtctaatggtgatagagaaactgaggctcaggtactggaagacttttttgacactacaatgtctctgttgcaactactg

SEQ ID NO: 298212 - DNA, 591 bp, Homo sapiens
tagtcagggtagaaaaagagtggactcctcccactgaacaggatagaaatcactatctggccctttacagaaaatgtttgccctgttctaggctgttgtttatcctattattccccaatttatctcacgttacacacagtcacaatgtcctctcacatacagtctctctcctttagacttcacagtgacccataaaagtaggcagttttccccattttatagatgaggaaaccaaggtatagaaaggttaaatgaattgcccaagattatgcaactgactaagaggcagagatgagactccagttcacatcttctgacttcaagtctagtgttttcccacctagcctccactcctcaggctccaacatgaaagatatacacctaaaattacccactccttacagaaagccatgcagctattgagggatgtccttgcttgaatgcatgggtatttagaagttaaagtaaggacaggcatgatgtctttcagagcattgaagaaacctggaaaggtctaayggtgatagagaaactgaggctcaggtactggaagacttttttgacactacaatgtctctgttgcaactactg

SEQ ID NO: 298213 - DNA, 500 bp, Homo sapiens
ctcattctagtgggatgaacagcatatacaataaacagacacgtgagcagggcagtacagtcagcaggggccaggtcatgggggccttgtcaaggacaaggcagattttaccctggtagcaatgaaggtatatcaaggggttttgtttattttttatgacataacatatttgagaaatattatagtggttgctgtgaggaagttggagagcagggaagaggtgctggagactatccaatcagtgtcaggctaaataatgatgaaaatgagtgcttatgttaattgttartactgtttatcaatgtccagactcctctccttcaggacatacagcaggattgcacttctagtcttccttatggtgtagtggtgccatgtgattagttctaggaagtgagttgtaatcagaaatgatgtctgtcatctccaggttgagaaattcactgccagaatgatctcctccataatgttcttgccttctgccttggcaaccgccaatg

SEQ ID NO: 298214 - DNA, 500 bp, Homo sapiens
ctcattctagtgggatgaacagcatatacaataaacagacacgtgagcagggcagtacagtcagcaggggccaggtcatgggggccttgtcaaggacaaggcagattttaccctggtagcaatgaaggtatatcaaggggttttgtttattttttatgacataacatatttgagaaatattatagtggttgctgtgaggaagttggagagcagggaagaggtgctggagactatccaatcagtgtcaggctaaataatgatgaaaatgagtgcttatgttaattgttagtactgtttatcaatgtccagactcctctccttcaggacatacagcaggattgcacttctagtcttccttatggtgtagtggtgccatgtgattagttctaggaagtgagttgtaatcagaaatgatgtctgtcatctccaggttgagaaattcactgccagaatgatctcctccataatgttcttgmcttctgccttggcaaccgccaatg

SEQ ID NO: 298215 - DNA, 589 bp, Homo sapiens
agccacaaatgctgggtagttgactagtctgagtagatgtgacatttctgctcaatctttctccccaaatggagtaagagtccacagaaaagtctacagcaaccctgtctaagtmatctgtcccatccgccacccaccactccaaccattttaatcacactttatctgtgcaagtggccttccagggccccatgctggacacaggagttcaacaactcctggctgcagtatgatatttagagtccaagaatatttcccactaactggatctgatagagtttctacctcaatgaaaatgaggaaaatatttggagtcagattaatcaatcttaatgggtcaaacaaaaggcgggaggtaagcttcaaggtcaagcatatgaggaccccaggggagctatgagtccaggaagttgagagtggctgtaggtgggcctggtctggaagaactccctgaactgaaaaacaatcagccccataaagtttccattgcacttgagtccttgtgtgggcacagacaatttcttgttacatttgttcttagcctagaataagatggtaataatcaaggatgcagagctagagaaacttc

SEQ ID NO: 298216 - DNA, 586 bp, Homo sapiens
ccttctttttgtatcaatattcactcccatttataggccagcttcctaattttcatctgactgtaaatcttcaatgggtgttaaagatgaaaaacacccattttgcatgctttattagatgaataatttctgcccagcaagatattcatgtcctagtccccagagcctataagtatgttactttacacaaaagggactttggagatgtgattaagttraggatcttgagaggggttgattatcttggatcatctgggtaggcacaatgtaatcacagggcccctgtaagagggaagcaggagggccagagtcagcaaagaagttatgaagagagaggcagagatcatggagagacttgacgatgccttagtgctggctttgaagatggaggaagggaccacaagctaaggatatgaatggcttctagaagttacaaaaaacaaggaaatagattctctcctagagcctccagaagaaaagcagctctgctgacaccttgatttgagccctggatgacccatttcagacttttgacctccagaattgtacataatacattcgtgttgtcttaagccactttgtataa

SEQ ID NO: 298217 - DNA, 586 bp, Homo sapiens
ccttctttttgtatcaatattcactcccatttataggccagcttcctaattttcatctgactgtaaatcttcaatgggtgttaaagatgaaaaacacccattttgcatgctttattagatgaataatttctgcccagcaagatattcatgtcctagtccccagagcctataagtatgttactttacacaaaagggactttggagatgtgattaagttaaggatcttgagaggggytgattatcttggatcatctgggtaggcacaatgtaatcacagggcccctgtaagagggaagcaggagggccagagtcagcaaagaagttatgaagagagaggcagagatcatggagagacttgacgatgccttagtgctggctttgaagatggaggaagggaccacaagctaaggatatgaatggcttctagaagttacaaaaaacaaggaaatagattctctcctagagcctccagaagaaaagcagctctgctgacaccttgatttgagccctggatgacccatttcagacttttgacctccagaattgtacataatacattcgtgttgtcttaagccactttgtataa

SEQ ID NO: 298218 - DNA, 576 bp, Homo sapiens
tgaaccaaacctgggtccattggcccagcacagtaaagacaaatatctgtaccaaagtttgcagcaagaaaaaggagggcatttatttgcagggtgccaagcaaggaaaatcagacagctattgtgtgagatcctacttccccagtggcttataagcaagggtttttaaagacaggggaacatttttggaaacagaagttacaggtatgaaaaaaaaatagaaccttgggaccccgaactcactataccaaagkgcaagttaagcttagaagctgagtcacaaatactgtcttcctttggctcccagatagctgtaatttcacaaccccatgtcatagcctcatttcctctactccctctttccacatttgcttcatcttatgtaaaatgtagactcactgagtgtgagagaatgcatcattgactttttcctctattccctcttttcacatgtaaaatgtagatttactgaggctaataagagcctcacaagaatgtgaccacctgcctcactgcctgcctccttttcttccccctgctgcttgcagttccccttttgtgaactgaagttcacaa

SEQ ID NO: 298219 - DNA, 573 bp, Homo sapiens
tctcttatgagagcaatttgagcctagagggatggctgttcctggctatgctccactacagacacccctgcaccaaaccacctgtgctccacatcagctggctagctgccccaccactttgcttgtctcctgggggctctaccccagagagatgtgggycagcaattgctcagtgcaatcagcccaggatggaggatctgtgccatggacctaagctaggggttccctgtctggcgatgagcagtggggttgtgtgggacccgggggagatggaccagcctcctttccttgggtcaactgcaacttgttggacgtgtggataatgcactgagggtctttgcttctttgttagtccaagggtagcaaggacagttccaccacagaggccgtgtcagagaagctttcagttgtccctggaaacactgtctggggagttgctgagttgctactggcttgatagctctgatagggggtggctagaggcccaggaccaggcctggaggacctacctattgaggagatacaggaacaggcacccatataacagtctggccacttttctgtagggctact

SEQ ID NO: 298220 - DNA, 517 bp, Homo sapiens
atgatatttggttactgttatctgtcatatctaaaatgtgagtaagaagtaatgcaagaattttggtgtaaatcctaatgctgggcaaagcttggattccagctggttcaagctgcaactattagcctgtagagcctctaccaaygaatatagttaaaataaaaacaaaagaaagtgtttgtgtggacccccatcctgggtctagcctggattccttctattccaagctacagctgctagcctcagaacccctatgaaaggaaaaattatgctgaaacaacagatagggaaataggttagaatgatttataagagaataggtacaacaaaggggaaagaaagaggggcaaattgtgcacaaatttggctaagcaaagtggaaaactttaaatggtcgttaagaaatgaggtgaataaagcaaatattaatgtagccaaaactaagtccttaatgtggtattctcagagcttgggtggagaatggcagccctgctgctctcccagtattgaaaggcct

SEQ ID NO: 298221 - DNA, 637 bp, Homo sapiens
ctgtgacacttcttcagtgtggaaatattccaccctcctctgtgatcatcaggtttgtgtgcatgtgtttgcttatttgttttagagacagggtgtctctatgttgycaggctggagtgcagtggctattcacaggtgcaatcataacacgctacagctccaaactcctgggctcaagcaatcctcctgcatcagcctcccaagtagctggacctacagatgcataccacgtcaccagctctgtgatggttagttatatgtgttaacttaggcccactccccagttattcaatcaaatactaatctaggtgccccaacacaggtattttatggatggtagttaaagtccaaaatcagttgactgtaagtaaggaaattttcctcaataacctgggtggcctgattcaatcagttgaaaagccttaagagcaaagctgaggtttctttgaagaagaaaaaattctgcctaaaactgcagctccagctcctgcccaagagttcagcctgccagtcctcctggacctgcggattttagtcttgcctacccagcccccagaatcacataaagcagttctttgctatgaatgtcttattatatgtctcctattggttctgtttctctgggtaatccccacca

SEQ ID NO: 298222 - DNA, 555 bp, Homo sapiens
acttctcctcttgagctatgaaacttctagacaccatattcttccaaaagaaggctgtttcatctacactgaaaatstgttgtttagtatagccaccttcatcaatgatattagcttgatcttctgaataacttactgcagcttctacatcagaacttgctgcttcacctcacacttttatgttacggagatagctactttccttaaacctcatgaactgatttctgcagcttctccaacttttcttctgcagctttcccacctctctcagcctgcatagaatttaagagagtttagggccttgctttggattaggttttggcttaagggaatgttgtgattggtttgatcttctgtataaaccacgcagactttctccaaatcagcagtaagggtatttcagaaaggccttatccatgtgttcactggagtagcacttttaatttccttcaagaacttttcttttgcattcacaacttagctaattgtttgccaccagaggcctggcttttggcctgtctcagctttcaatatgccttcctcactaagcttcat

SEQ ID NO: 298223 - DNA, 555 bp, Homo sapiens
acttctcctcttgagctatgaaacttctagacaccatattcttccaaaagaaggctgtttcatctacactgaaaatgtgttgtttagtatagccaccttcatcaatgatwttagcttgatcttctgaataacttactgcagcttctacatcagaacttgctgcttcacctcacacttttatgttacggagatagctactttccttaaacctcatgaactgatttctgcagcttctccaacttttcttctgcagctttcccacctctctcagcctgcatagaatttaagagagtttagggccttgctttggattaggttttggcttaagggaatgttgtgattggtttgatcttctgtataaaccacgcagactttctccaaatcagcagtaagggtatttcagaaaggccttatccatgtgttcactggagtagcacttttaatttccttcaagaacttttcttttgcattcacaacttagctaattgtttgccaccagaggcctggcttttggcctgtctcagctttcaatatgccttcctcactaagcttcat

SEQ ID NO: 298224 - DNA, 529 bp, Homo sapiens
tattgtcataaaagaaagggaccactatgaagttttgtggaatatcaagaagttcaaggttcctaccaattatattatgacaaaaagaagagttgatataaataatttaaataggataatacaatagtatcccaccaaccatgttcttctgattgtccttattaaagttaatggtaatctgcaatcattgccaatattcatctggattttgcactgaccaaaaggagagttaagtggacatgtgataggtatcatcatgtttggcatctttggtttttaatggtggtattattctcaatgattttctcaagaaattacttttggtttactattatatagcgtagaaggagaggaaagcaaacaggtagtaggagaaaaagggtaggatttaaaggagcttccaggttagtcctttctcccataaccaccctcattycctgagtcaggggaccattgtggagatgttaccagttgccaattatgtctattccatttgtacgttcaggaactagggaattaatcaaaagat

SEQ ID NO: 298225 - DNA, 604 bp, Homo sapiens
aaaatactccaaactccaaaactttttgagtgcttaaatgacacttaaaagaacatgaccatgggagcatttcagatttctgattttaaggttaggggcattcaactggtaagtatataatcaaaatatccaaaatcctaaaaaatttgaattctcaatcacttctggccccaaactttctsataagttatacttgacctgtagtggtgaatatcctttcacttttgtttttatggtacctcatgtgttttactctcaacatcctggctgcaaacacctaaggttttgctgcttgatcatctcaagaccactatgtttgagttacagtagtagcaatcacattctattttaatctatctgtttacatccctatctgttctgatagactatagctttttgagggaactaatttcttattcatctagtacagaccttattcaatacaaggtactcagtatactctctagaatgaataaaatgaaaaaaaggaaatttgaatttaaattgaaggcatgacaaacttctggcaaacttaacatatgagaggtaataacaattttaagtttgccacttctaagattcacaggattctatgtaagaaggg

SEQ ID NO: 298226 - DNA, 593 bp, Homo sapiens
taacttcctattgtaaaataaatgaatcatagacaagactatatctcttttttaactatttacctatttaaattttatgaagtgctagataaaagtatggctttgtgaggtatcaatgattgacaaagaagagctataagaaaaaaagtgctttaaatttgagagtgttgacacacatgggctagattattctgccaaaaatttatagctgtttagatgtgacaaaactcaatgtgtcctcgagatatataagaccagagtctctaaacacacagtccaggcaaaccataaagttttgatgggcaactttaaagactggawgtagttgtatggactgacaacatttgtttgggacttggcgaagacagcactaaaaatacacttagaatacagcttggtttgttgtgctacaaaacccagaagaaaagcaagtagcaacggcaaaaattttttattgcatttgaagcaaatactgactaagtcatccaatcctgataagattaaagtcacttatttagacttgggtttaaaaaaagtcaaatcatttgtctacaaaataaacaagtggcaaccaactcaatgaaatgaccatc

SEQ ID NO: 298227 - DNA, 594 bp, Homo sapiens
ttttttgtttaattcatggaaaataatttttaaaaaacacaccccttccttccatcttaaaagagtaagtagaagtgtgcatttcagtttaatttatatttaggaaaatacacaataaaattaacaaacatgaatgaaaaatagacttaaacaatggaatataaattttcaacctgaatcaaaatgactacttatttttaaaatgattgttttatctattgttcatttcttggtccatttatggtcayggtgcacagggattaccagcatcctggtagaaaagagaatccaaatcagacaatcaaagagactttaaagaaggacctattaacagagatgtggttgagtgtaggagaacaaagaagagctgttaagccagcctagacctgaaaaagcaaggggaggaaagagttactggagccccatgggaatgggaggcatggaggacaggctacttaggaggcgctgcagccctgcagtcacggagggagagtcaataccagaatctgcagcccaggcaggagggggcagaggaaaagtactcggcctctccctagaccctctcccgctctcatctcttgctggtacctcctg

SEQ ID NO: 298228 - DNA, 591 bp, Homo sapiens
tatttagcacagttcttggcacataatacatgttaaactattatttataagaggaaaagaataaatatgattaaaagttggccttagaaagatcaaaaacattttttcttaattttcctcatgtataattactcatttggtgcaactgattattttaaacacaattttcagaaatatgttgactcttagaagacaatatgtattttgaggtaaagaaaaaaaaatcgtaaaagacctgactatagtttcaaaaatccttgttttacgtaacacaaaaaaaattaaaaattattgtcaattratatcttcacaaacttttaaaaatgcctcatttttggaaagtaacattatatttcaactaaaaatagaaacaaataaaataaatagaaagtatgggcaaagagccttgaaaatgttccagacaactatttataataccctaatccaactctctaatatgaagcagtgcataaaagccactgcttatatgaaacatgtattattgtcaataaaagtaaagaacactaataatatatatcaaaagaaaaataactcgtttgcttgagaaaaataagctatttttctcaagca

SEQ ID NO: 298229 - DNA, 591 bp, Homo sapiens
tatttagcacagttcttggcacataatacatgttaaactattatttataagaggaaaagaataaatatgattaaaagttggccttagaaagatcaaaaacattttttcttaattttcctcatgtataattactcatttggtgcaactgattattttaaacacaattttcagaaatatgttgactcttagaagacaatatgtattttgaggtaaagaaaaaaaaatcgtaaaagacctgactatagtttcaaaaatccttgttttacgtaacacaaaaaaaattaaaaattattgtcaattgatatcttcacaaacttttaaaaatgcctcatttttggaaagtaacattatatttcaactaaaaatagaaacaaataaaataaatagaaagtatgggcaaagagcctkgaaaatgttccagacaactatttataataccctaatccaactctctaatatgaagcagtgcataaaagccactgcttatatgaaacatgtattattgtcaataaaagtaaagaacactaataatatatatcaaaagaaaaataactcgtttgcttgagaaaaataagctatttttctcaagca

SEQ ID NO: 298230 - DNA, 563 bp, Homo sapiens
agaaattcttttaagaattaaacatactgttggggtaaagatttcrttatctactatctgccgttgcattatgcaaatacaagaacccaaaagatacactggcattaaattacaacagacctggtatgcatagattctccctctttcctaagccagttggctctttttgtgaagccatcacagatgttacaccacagtgtttatgatgcctaaaaaagcttattatttaaatatgatctagagcccttaagaatagccaagtactactgctagatgtccataataatggtgtttctattcattcagctattctcaaattaccctgtgggattcagtcttaagcttaaatttccaaaacctgattctactaaagataatcaatacataattgcatattatcaaatgtaattccaactcctcatcttaccactcaacattccactctctctaatctcttaaaactttttattataaaataaaacacagatttgtaaaaccatgtcagaagcccctccatgtgctccatcccaatggatgcccactctcctcgcattttgcttatg

SEQ ID NO: 298231 - DNA, 357 bp, Homo sapiens
cttctttctataacactttttttctcctttaacctatgccagtactttgtctgaatggggtactttaccttgtaggataaattcaaacttctttcctacaattattgagttcttgtttctgtatttatttggttgaatggccttctaytggacaacaatattgaggaaatgagtagtcagagatgtctcaacagaatcaccagatcccaaaaggattcttcttagctcccatttcatagctgtaggtcaattccttttcattgtaattgaaatcaattaccatgctcagtacagtgactgacatctttctcaggcttctgttatttctttttatttttaagggttcaaatgaaggag

SEQ ID NO: 298232 - DNA, 534 bp, Homo sapiens
gcaaattgaaaggttaaaatatatgtattaaccaaaataactgtttaatctcaaatattcctaacttatttggcttccaaagttgatccccactgcagataatatctactaacattctgcagaatatatttttgcaaattgcttcttacattgctttacttattcttaacttacattttatgtatactacatccttaggtcactaaagtttcttctgtctttagaccacatagggacatggatttcagtcttttaaagttagaggccttttaaaagtggaaagaaytgtggccttgctatctgtcatcacatccaggttctgctactgtgcttcctggagtaatttttatactttcctgagcattagccttctcatctaaagttgagaatagtgacattacgttgctgaagtgatgcaaaaatgaaataagttatcttacataaaaagtttagaacagtacctctagatggtagccttttagtgtgtgtggcaggaaattattatgatcatcattaaaggaaacctaaaaacca

SEQ ID NO: 298233 - DNA, 555 bp, Homo sapiens
ttggctttctcccttaagtgttcaagggaatgttataaatatttaacagctgtgatttacagctataagatctggaagcagtggactgaagtaatctgcactatgtaatatgtgtagcacaataacgttcatcacaaagatgtatatatggggtgtgtgttgggcaagggtgaaaaatgcacttcctggagagccaaagaacagactgcatgaaaataccatgatttctcaacacaaaaaagtactttgaattattgcatgaaaacttaagccatgtctaagtttttaaaaattattgagcccaaaactaaggataactttaaaatcataaattaaaaacaaagaaaaaagaaaagaaagaaatttttaaatgagtatagtaaaaagtaatagaattgatagattccctatgacaaacaggaatgaaaatttataatttattaactagatatctacatatcaaaaaggtatattaattctagcaaaaamtattcagcaataagaaaatcgttctactaaagactgtagttgcatttaaacaataaaataaaatgg

SEQ ID NO: 298234 - DNA, 582 bp, Homo sapiens
tttgttttctcttggaagactgaaagttaatttataatcttcttgtatattttttattatttatcacaatcttttgctgtccttgaatttggaaaagatgttgaatgacattttcataatgttggcatatttaatattctgctgcctaagtctatgattttcaaaatttacatttaaacccaattttctaattttacagcaattttttaaaagaataaaaacttgtaaaaacactagcaaagattttaaaaatattgttattggcaaattatccaaaacrcataaaattaaatatgtttaacagtatttattgtaatttttcaggcctgtgtcacagtaactgagaaagctgatttagtcatatagttgcttccagtatagactaacagcaatgagactctttttctacacttatattcctgcaaatgtatttggatttttttctaggccttttcctcatttcttgtgaaactaaatatagataccatgcctcctgttgtccttctactaaagatttaaatttaagaaataataaatgcctgtctagacaaccctaaaattgttttagttactgatgtatgg

SEQ ID NO: 298235 - DNA, 484 bp, Homo sapiens
ccattttttgtttgtttgcttgtttccaaaacaaccttgcttggtactgcatggaaagtcaagcttttcttcttgcccactcaggaccacctgtctgggtgggcctcttccctgtgtcttcacagcgttcctaaggaagatttttgcagtgctttctggagctgaggggagtggaatattgtccagagaaggtggaaggaaatagttttcctgtttccttttctcaaggcggatgttctcagccttccttcatacctccttcccatgggtgtggctgatagtacagwcaggttgtggaggagggctgagaagaaagggacactggtccagccccaggtttggtccgagacaggtacacaccagataccatcccaccttcctctcttaagaacaggccagccacacatataacccctttccctactttactaatgtgtcccttatgtcgtaccagcaacaggggacaggcagacttatgccctgc

SEQ ID NO: 298236 - DNA, 629 bp, Homo sapiens
tcatttgtctgatttggactttgggcttgggagtgtgcaataatgaaatctttggattacacagtgttcaattaagattgtatgtacaacactaaatatctgtaatttctataacctgcacatatatgatataaatacttgtgtttatattatgttagtataattttataaatattattttatctaattatatataaaatatgtatgatatatttttatatcaacatatccatatgatttttatataattaatctrcaggcagtgctctaaacattgaggtgatgtacatacatgaaaaacaaagtaaaagagagaattaaagccaggtcctggatagtgcggagtaaagggagtttatggagtagaagtgatctccaaatagaaaacttgatttctcaaattcagctttctaacaaacattttcatccataacccctattaagcagttagattccactggtaaaatcctgccatgtagttaatctttgaactttgtaccagtgttttcaataaatctgttcctttgagtatgtagagtagaaaaatatgcaaaaatcacctgcatattaatcacactttcaaaatcactgtgtgatataaccttgcctatttttgtgtatcaaaaata

SEQ ID NO: 298237 - DNA, 596 bp, Homo sapiens
gtgaatttagtatttaagaatacaaataagagcactatcttgtttatgaataaccttccaatgatatgacttgatgctcacttgtgactcatttgtctgatttggactttgggcttgggagtgtgcaataatgaaatctttggattacacagtgttcaattaagattgtatgtacaacactaaatatctgtaatttctataacctgcacatatatgatataaatacttgtgtttatattatgttagtataattttataaatattattttatctaattatatataaaatatgtatgatatatttttatatcaacatatccatatgatttttatataattaatctacaggcagtgctctaaacattraggtgatgtacatacatgaaaaacaaagtaaaagagagaattaaagccaggtcctggatagtgcggagtaaagggagtttatggagtagaagtgatctccaaatagaaaacttgatttctcaaattcagctttctaacaaacattttcatccataacccctattaagcagttagattccactggtaaaatcctgccatgtagttaatctttgaactttgtaccagtgtttt

SEQ ID NO: 298238 - DNA, 673 bp, Homo sapiens
atactgacctccagcttcattcatgctgatgcaaacggtgtaatcttgttcttttttatggctgcataatgttccatgatatgtatgtactgcattttcttgaactaatctatcattggctgacaattaggttgattccatatatttgcaattgtgaacagtgctgtgatgaacataaacacgcatgtgtctttatgttagaatggtttatattccttttggcatatacccaatattgggattgctgggtcaaatggtagtcctttttatttatttatttatattttatttttttggttcttttttgagagagagtctccctctgtggccaggctggagtaaaatggygtgatctcggctcactgcaacctccacctcccaggttcaaacgattctcctgcttcagcctcctgagtagctgggactacaggcgtgcaccaccacacccagctaatttttgtacttttagttgagatggggtttcaccatgttggccaggatggtctctatctcttgacctcctgatctgccagccttggcctcccaaagtgctgggattaaaggcatgagtcaccacacctggcctagttctgttttaagttctttgagaaattgtcaaactgctttcttcaatggctgaactaattttctttcccaccagcactgtataagc

SEQ ID NO: 298239 - DNA, 613 bp, Homo sapiens
atgggacaataccagtgacatctaggtatatcataacaaaagtttagaaatgaaagacaaaaacaaatcttaaaagttccaagaggaaattaatatattgcattccaaaagtaaaaataacactgcaaactaatttttcaaaaaattgtggaaggtagatggtgataaaatgttatctttaaacacataaacacacacaaatgcacacacctgctaactctaaattttatacctagcaaaaatcctgcaaatatatcagcgatgtaaagatgtttggctgcaaataaaactaaaaaattttaacgcaaacacatttgcattaacacacacactcagatatataataagtagtaatagaaatactttgcattacactataaaattaataatgcatttttaatatgggtaacatatgtataactaagtagttaatggaaaaagagtactcaaattatttgattgatctaaacraataaaagaggtgtttatcaaagagatggtatagtatgaaaacaaatagtaaaatgattgctacaaaaccaaatgtacaaatatgtacactatatatcgatggaaaatatcctctaattaaaagactaaggctttgaagctg

SEQ ID NO: 298240 - DNA, 591 bp, Homo sapiens
ttgatttattttttagattacttcatccactgtacatgttggagttgagcactcaaattattctagctcatctaatgtttgcaaattatgtataataaacaaaaattttgtcaagaaatatataaaataatttaatattaaaaacagaatacatttgagactaaaaaagaaatgtattttaagttatctgaaagtggcattsagtttcaataagctttttctctttagttctaccaagcccatagaccaaacagacaatctctccccatcccatctcccaccttcacttcccccacatacagcgggcattagaaagcagtggcttttcatttagtctgaagggatcagcgtcctagaacatatgaattagcagagcctctgagaagccctatattgacctcagtcattttgttcagtaattcttcaaaagcaggccagaggctcactggtgaacatgcttgcaatactaatgtttgtgaaatggaaaattttaggaagggaattctatttccctgagcaagtttccaagcactaaactctctttcaaataataaaagaggttagagactaacttagggaacagattcaatt

SEQ ID NO: 298241 - DNA, 604 bp, Homo sapiens
tcagtatgtgattacttggccaattgagggatatttcagtttataattttgttaacagtccctacctgttatgtaagctagtcataaaagttcaaccaaccaaaagctttgaaaatttcatgagactgatggaacttataataatgcacatataaccacaccaacattttscatataatttaaatgagtagaggaaactttaaaatatcatattaaatcccttatttaaactataaggtaataattaaggaactacatgagataagaatataataaaatgtagaattaacattttattttggtcaaaatgaaaagagaaaaataccttgaataattgatcctaatgcacaaaaattcatgaggacccaaaaagataagatctaataaaaagctgatatttgggaaaaaattcagttttgtcaatgtgtaaacagtaattgtgattattttacaaatgagaaatgtgtgtgagagagagaaagacagagagagacaaagaaatgtgtgggagggagaaaatagcagatcttgacaaacagaaagggaagcaaaaaagtaatgttaaaaatacctaataagaagagacaataaaaaattacaaatt

SEQ ID NO: 298242 - DNA, 604 bp, Homo sapiens
tcagtatgtgattacttggccaattgagggatatttcagtttataattttgttaacagtccctacctgttatgtaagctagtcataaaagttcaaccaaccaaaagctttgaaaatttcatgagactgatggaacttataataatgcacatataaccacaccaacattttccatataatttaaatgagtagaggaaactttaaaatatcatattaaatcccttatttaaactataaggtaataattaaggaactacatgagataagaatataataaaatgtagaattaacattttattttggtcaaaatgaaaagagaaaaataccttgaataattgatcctaatgcacaaaaattcatgaggacccaaaaagataagatctaataaaaagctgatatttgggaaaaaattcagttttgtcaatgtgtaaacagtaattgtgattattttacaaatgagaaatgtgtgwgagagagagaaagacagagagagacaaagaaatgtgtgggagggagaaaatagcagatcttgacaaacagaaagggaagcaaaaaagtaatgttaaaaatacctaataagaagagacaataaaaaattacaaatt

SEQ ID NO: 298243 - DNA, 553 bp, Homo sapiens
tacttagtcatagaagcctattatgttctaaggtatcatttacttaagagttaaatgtgggctacatgaaaccttaaagatgcagctgttatgtttactaggttacaggaataggtgcttttctgtccataaataccttacaaatgtttcaaaccttggcaaaacaaatgaacaaaattcttttagtarctgcgtttctgtagaggagtaaatgtactaagactattaaataacttactgacaccttaactaaaacttttaggtggaaacaaaagactggttagaaaaaatgtgaagctaatttggatgttagaatttttttgtgttattttattggcagggtgtgtatgactaaaattattagattcaatgtgtgatcaattggctaaccaagggacttttcagaacataatcatgttaaatgtctcttcctggtatgtgagatatgaattcatacgatatcaaccagtttaaaggcttttttttagtgaccaactttatccccatctttactattaaaaatcacctatcaggataattttttcttttctct

SEQ ID NO: 298244 - DNA, 553 bp, Homo sapiens
tacttagtcatagaagcctattatgttctaaggtatcatttacttaagagttaaatgtgggctacatgaaaccttaaagatgcagctgttatgtttactaggttacaggaataggtgcttttctgtccataaataccttacaaatgtttcaaaccttggcaaaacaaatgaacaaaattcttttagtagctgcgtttctgtagaggagtaaatgtactaagactattaaataacttactgacaccttaactaaaacttttaggtggaaacaaaagactggttagaaaaaatgtgaagctaatttggatgttagaatttttttgtgttattttattggcagggtgtgtatgactaaaattattagattcaatgtgtgatcaattggctaaccaagggacttttcagaacataatcatgttaaatgtctcttcctggtatgtgagatatgaattcatacgatatcaaccagtttaaaggcttttttttagtgaccaamtttatccccatctttactattaaaaatcacctatcaggataattttttcttttctct

SEQ ID NO: 298245 - DNA, 641 bp, Homo sapiens
tttgagacagtaattttgattaaaaacatcaaaagctattgtttccactcaatagatgaccaaccatgtcagctaggtgcttcttttccagcctcgcttaggacataccatgtagaggaaactgctaataattgaaactcccatgacaaatggcttagtgggtgccacagcttttcactccatactggacatgctccctgttccacctggtagccatgctgctgttttctctaggccgatgtgctgaccttggttgtcaagcatttcctcaagcacagttcctaagtgctgggaattcatgttaattgtcttgtagtccttggctactgcccgaacagaaaacagcccaacttcaacccatctattctctcctaaaggatacaaaactgccctgtaccctcttaccaattccttttctggattcctgcctataccacaccagcaggtaactctgaagagagtttttgaatttttgctccagttttttattctttatgctagatcaacttctgcttcttttggcttaatattttgcacagcttcaaaaagtaaaatttgtcttttcaagtgaaayaaatgagaactgctgcagggcacccatgcagttgagcagattttaggttcttccataacctatttag

SEQ ID NO: 298246 - DNA, 624 bp, Homo sapiens
agcgcagtggctcatgcctgtaatcgcagtacattgggaggctgagatgggtggatcacttgaggccaggagtttgagaccagcctgcccaacatggcaaaaccctgcctttgttaaaaatgcaaatattagctgggcatgctggtgtgcacctgtaattacagctactcaggaggctgaggcacgagaaacacttgaacctggaagggagaggttgcagtgggcccagactgtgccattgcactscagcctgggcaacagagcgagatgctgtctctaaataaataaataaatgtttggtagcatgaactaatggcaaatcatcagaactggggatcaggataatgatggctttgatgctatagctatgactatgggtaagttaactaccttcattggtacagtatcctcatagctgtataatgagataattatcctatatattctctaaaatgcacttttagaagtgcaaatctacctgatatcctgtttaaaaaagatttatttttaagcaaacatttagccacatatatggcagcttgacttgctctgtttaatttatatctaggatacctataaattacttgaattctagggctattagtaattggtcattataaaaaa

SEQ ID NO: 298247 - DNA, 541 bp, Homo sapiens
ttagtgaattgtcataattttggctgagccatgttttcattgccattttacaaataagcttttcttgctaagagagaagcttgacaattctcagaaacccagactacttgactgaaaattcaataagtaagttaaggatagcaaatggtaaccaggccttggggaggctatacratttaaatacaacttttttttgacagtttgtagtatagctctggtggttggtttcaaaatctgtcaaaaagatataactggacttaggagtttagtttgattcttaaaccaaataatcggacagcagtgtggcattactgcctttggccgttcagaaaaaaaaatctgagttttgaaagagcaaaagcattaacatcatcagattgctgctgtgtactggcagaaaaactttctaagtttcactgcatgaacattcggtcagggcaatcagataatgaaggcatcttcacccatgtcaataggactcgacaataaacacatccccaaagaaatgatgtttaacaattatgtcatataatgtgatggg

SEQ ID NO: 298248 - DNA, 541 bp, Homo sapiens
ttagtgaattgtcataattttggctgagccatgttttcattgccattttacaaataagcttttcttgctaagagagaagcttgacaattctcagaaacccagactacttgactgaaaattcaataagtaagttaaggatagcaaatggtaaccaggccttggggaggctatacaatttaaatacaacttttttttgacagtttgtagtatagctctggtggttggtttcaaaatctgtcaaaaagatataactggacttaggagtttagtttgattcttaaaccaaataatcggacagcagtgtggcattactgcctttggccgttcagaaaaaaaaatctgagttttgaaagagcaaaagcattaacatcatcagattgctgctgtgtactggcagaaaaactttctaagtttcactgcatgaacattcggtcagggcaatcagataatgaaggcatcttcaccsatgtcaataggactcgacaataaacacatccccaaagaaatgatgtttaacaattatgtcatataatgtgatggg

SEQ ID NO: 298249 - DNA, 550 bp, Homo sapiens
tgaattcgtatccattctgcagttatgtatcttttattattattattwttttttgagatggagtttctgtcactcagactggaggacagtggcacaatcttggctcaccacaacctccacctggtgggttcaagcattctcctgcctcagccccccaagtagctgggattatagatgcctccaccaaggctggctaatttttgtatttttaggagagacagggtttcaccatgttggccaagctggtctcaaactcctgacctcagatgatccacctgccttggcctcccaaaatgctgagattacaggtgtgaaccactgcgcccagcccagttatgtatcttttaagtggagcatttaggccatttacattcaatgttagtattgagatgtgaggtaccattccattcatcatgctatttgttgcctgtgtaccttggttttttggttcttgtttttgttttttaaattgtatttttgttttataggtcctgtgagatttatgctttaaagaagttctgttctgatgtgtttccaggatttgtttcaa

SEQ ID NO: 298250 - DNA, 595 bp, Homo sapiens
tggcatatgttaccatgccagatatcaattatctgtttttatccttaacgtctctgaatgttaatgctgaaaaacaatttttgtattgatagttttgttatttcatggagcataggatctattccatattgccatgaactttccccccctttttcttgttaggttgaattattatttagcttgcaactctcttgcaataaatatattttgttaccaacatgtttttgcacagtaatgccttcagactatattcgaatactccataaagcaaaaagagtgttaacatcgatatcaaacacacactaaattcctgaattttgattttatattgaaatgattcgatactgcctccacatcagtgcttactgttttcttcagtttttgttaacttctgtttgttaatcagtctcaactataggacattaatgcttgttttcttgaatttcaataattttatctcttttaagtgaacaacctgtcacagtaagttatctgtttgacatgtgtactgatgtgcatttattcattgcaaattattttcayatcatctttgaaattcttagtcactcttgaagtgataatgactttaaaaaaa

SEQ ID NO: 298251 - DNA, 549 bp, Homo sapiens
ggctgaaaaaaagagagcaagaaaaagcctcttcgggattttctaatgacagggacttacttgtagaggtaagtaatctgagatgttgctccagaagctgctaagagctgatggtaacccccatgtggagccattgccaacacaagtttctgtacttctgggcctatacacagggagccaacccaatcaggagaccctgcctctgttctcctgtaccactggatccgttactgggacccagttcttaaatcacttccaacaaaggtaaaataggattctgggtaccccactcctaagttcctcattgcagttttccttattctgtcactcttccatctcaatcaagtcagaaaagcagggataaagtcctgattcttcatgtagttatcaccagtggtcctgagtaaaacacaccctgcaatgtttgtctyggaccctgttgagctcttttacttcctcgctacgcattttccatttactgcgtatgtggtgttgtgcttgcctctgggatctaatgttgggaaaaaaaaaaaaaagcagtcactgtcc

SEQ ID NO: 298252 - DNA, 533 bp, Homo sapiens
ttattgccagtgaaggtggctctcagcgggacggggagctagaaaggacayggagtgggaaggtggtcttccctcgagtttggctgtctctggccgaactcttctgtgaggtcccaccgtcaaaccatccctatgaagtcaggctgcttctctccgacgtctggctacttctcttctttctctgctgctctgctgttccaccagtggggcctggggtttttatgggcacaaaatggggggcagagcaggccagggtggttttggaaaaggcaacattcgagtgggaaaacaggaatgaatgttctcactttgggccacaggtccaggcctcaaagcgtggccctcactggggatcaccctcatctacccaggatttccctgcctcttgtctgtatcattaatacacctaacatactgaacatcatagcttagactagcctaccctgtgtgctcagaacacttctccttcagttcgacaaaatcatctagcacatagcctgttttataatcaaatgttaaatatttcatataac

SEQ ID NO: 298253 - DNA, 499 bp, Homo sapiens
ctataccgcttacgcaaggccatagctgttcaatggctcgccaggtttcaaatccagctttgtctggttctagaaacaaggcttatatacaggcctgcccattcggggactggagaagaaaacaatcccaggaaggtggagaagcgtcaaggaaggccctttcatagagaaaggtggccggaacctcgggtctctgttctttgcctctctagcagccagacatcagaggacggctcacactgtcaccccacatgccccacgggggcggctggagggaaggccacagcacagytgggctttctgacagtgacctgtgtctttcagaagtaggcggcacccagggccctccccccgccgaagaacacacaactgggaaatacttgcaagtggatcctctcgtatgctgctatattcggcagagacttacacgccccaaatgcctgacaacagaagctgacagacggggatggatggccccggcggcccagcaggcggccct

SEQ ID NO: 298254 - DNA, 616 bp, Homo sapiens
tgaacccggggaagtttggttgcagaggccatggtctcagcctctgtgccacctcttcaagcacccctgaggacttccaggaattccctagccggctccattctgccccaacacacatgcgcagtggacatggaggaaggggcattacttttcacagtccctcagggctttccacccacctctgccctgagggacactcacagtttaggaagtagggggtccatgaacgctggggcctcatatccaggcaagaattggccgatgtagttcatcttctccaccagggtgtgtgtggtgtccccatactacgggtggaaaacagcctggctcggcccctgggcacccatccccgccgaggacagagcacatttcatagcgctaacgtagccccgggttccaacctgcatctgaccctaaccagatgcgtgatcttgggtaagtcacttctcctttctgaaatgaattgcaatctgtcacttgtttgagagtttccrtgagggcggggacactgttttgctcatgatggtgtacccagcgccaagctcagtgcctggcacaggggaggtactcaatgaagcacctacttcatttatttcagtaggtcaactagatgaag

SEQ ID NO: 298255 - DNA, 595 bp, Homo sapiens
ggcatcatacaacacgtgactttcgtgtctggtgtctttcatttagcatcatactttcaaggctgatccatgtcacagcatgtatcagcacttcatacaataacattccattgtatggatagaccacattttgtttacctactcatcagttgatgaacacttggcttgtttctaccttttggttattacaaatagtgctgctgctgctgctgtgaacatttgtgtagaagtatttgtttgaatgcttcttttcaattcttttacatcttaccttggaattgctgagtcacatagctattccatgtttaacttgaaacgttttttgttttgttgtgttttgttttgttgagacagagtctcactctgttgcccaggctatagtgcagtggcaccatcaccatcacagctcaytgcagtctcaaactcctgggctcaagcaatcctccagcctcagccttctgagcagctgggactacaggcatgcatcaccatgcactgttaaatttttttaaataattttttgtagagatgaggtcttgttatgttgctcaggctagtcttaaactcctggcctcaagtgatcctcctgccttgg

SEQ ID NO: 298256 - DNA, 574 bp, Homo sapiens
ccaaaactgagaagagatataacatctcaggttcaagaaatcctaaaggataagctttacaaaaatcaacaacatacccacttccacatagacacatcattgaaaagctgctggggctggtgcagcagtggctcacgcctataatccctgcaccttgggagactgaggtgggaaggtcacttgaacccaggagtttgggaccagcctgggcaacacagcgagaccccatctctaaaaaaaaaaaaaattagccaggtgtgatggtgccacctgggaggctgaggtgggaaaatcacttgagcctaagaggtcaaggctgcaatgagcagtgactgtgccactgcacttcagcctaggtgatggagtgagaccctgtctcaaaaacagaacaaaacaaaacaaaacaaaaaccctgctgaaaaccaagggaaaaatctgtaaaakcagctgggggccaaggagagagacacacaacattcaaaatagggatcgacagctgacttttcaacagaaatggtagaaaccagaagacaacagaatcacatccttgaagatacgaactgctgaaagaaaa

SEQ ID NO: 298257 - DNA, 584 bp, Homo sapiens
tgcttcgaattcatgttaatttttttaaatcttaactattgatcccctgatgcaatacttgcaggtatttatgaaacttattcagcgctcagtgtctagcagcatttcctgagcatcgtccatgtgctaaggactatcacgcagtattttatttattacatgcaaaaatatcacactctagatcctattgactatttctcataatttattctctattttataaagtagcagaaaatatttcagcaactactaaaatttatgtgcaatacacacatattccacaacattaaaaaaattttttttttagaaacaaggtcttgctatgttkcccaggctggtcttgaacccgtgggctcaagtgattctcctgcctcagtgccccaactagtccacaacatattgtaaacatagttgtcatcaatgagcagatgccaaccttcagctcctctactccatctctattaagacttatagactgtcagcagctggcatacagccagtaaatggaatcctgtcatgaatcacggtgtcactccattaattcaaagggcacacactatttcctaaacacagctctttttcct

SEQ ID NO: 298258 - DNA, 429 bp, Homo sapiens
tctagtgtctacactccaggttttgccccactcagttcccaaaccaaaagtgatcagtccaaatggcatgagtcacttggcttatcagcccagttttgagattaagaattagcctttgatttggttgctatagctgtagaaaccagggagcacaaagcgtcatctgtctttgtctgattcttgccatttgggcccaacttggccccaaggcttctgccttgggtttctatacctgcaactcaaagatgccagctaggttcttgctcccaatatattgaccaccaggaactgccttcagtacttccgctgccatattccggggctgaactttcgttaactacaggcaccagtttctcttaggctctaggtcaccayatattcataatccactctatactaaactactggcttacttgctctgagctaccc

SEQ ID NO: 298259 - DNA, 494 bp, Homo sapiens
cacactgccatgggactggtgagcttctcccccttccaccatgaaaggttcttactttgattccttgggattctccctggaaatgtgtctttgtttctctgacragacaactgatagattagaaagtggttttgccttaggtaaaatttactggaatgtacctattccttgaaaatgatattggttgcacaaatctaattatatgctaagcagcatttttgtggcccttcagaatgatggctttgtgtattggggagccagttaagtaaagtaaatgtcttctgttattatatcattttaaggatacatattgatttatacactttcatgactactgtagtcatactctggtacaaggcaaacatccaaaaatgttaataaataactaaatgaaattagaggtggtatcaaattttataaatagtaataaatagatcttcaatattaaatatatgggtgagtgttaagtcacaaatgaacttcctattaggact

SEQ ID NO: 298260 - DNA, 494 bp, Homo sapiens
cacactgccatgggactggtgagcttctcccccttccaccatgaaaggttcttactttgattccttgggattctccctggaaatgtgtctttgtttctctgacaagacaactgatagattagaaagtggttttgccttaggtaaaatttactgraatgtacctattccttgaaaatgatattggttgcacaaatctaattatatgctaagcagcatttttgtggcccttcagaatgatggctttgtgtattggggagccagttaagtaaagtaaatgtcttctgttattatatcattttaaggatacatattgatttatacactttcatgactactgtagtcatactctggtacaaggcaaacatccaaaaatgttaataaataactaaatgaaattagaggtggtatcaaattttataaatagtaataaatagatcttcaatattaaatatatgggtgagtgttaagtcacaaatgaacttcctattaggact

SEQ ID NO: 298261 - DNA, 494 bp, Homo sapiens
cacactgccatgggactggtgagcttctcccccttccaccatgaaaggttcttactttgattccttgggattctccctggaaatgtgtctttgtttctctgacaagacaactgatagattagaaagtggttttgccttaggtaaaatttactggaatgtacctattccttgaaaatgatattggttgcacaaatctaattatatgctaagcagcatttttgtggcccttcagaatgatggctttgtgtattggggagccagttaagtaaagtaaatgtcttctgttattatatcattttaaggatacatattgatttatacactttcatgactactgtagtcatactctggtayaaggcaaacatccaaaaatgttaataaataactaaatgaaattagaggtggtatcaaattttataaatagtaataaatagatcttcaatattaaatatatgggtgagtgttaagtcacaaatgaacttcctattaggact

SEQ ID NO: 298262 - DNA, 583 bp, Homo sapiens
ggatgtgatccatagaggatcaataacctgttgtttgaaaaactataagttttttatatatttccatttatatttcctttggcaattaagaacatttaaaagaaagtgctggtggatttcatttgagctaagtagaatgtaggaaattcttctgccatccrtatacctcgttctatgtaggcagccacagaccaatgagggaagagtatgtaagttgcagcaagtaaaacagccttgctggagatggacacttattaagacaatctggctgctgggtcagatgccctgtcctacctggagcttctcattccagtgcctaatctgtgaagacttgaacatcctgtgttctaataagaggccttatatactagacatgcaacttttaacagtaacattataaagttggaatttttggggaccattatggctagaaagaccatggaatggagaaaggctagcgttaagatggggaatcctgttttctccccattaatcctgccattgatcctgacaaaattaatcaagggccaattgtaaggcaaaaatatacaacaaataaactaaatggggaaatgagtgaaca

SEQ ID NO: 298263 - DNA, 583 bp, Homo sapiens
ggatgtgatccatagaggatcaataacctgttgtttgaaaaactataagttttttatatatttccatttatatttcctttggcaattaagaacatttaaaagaaagtgctggtggatttcatttgagctaagtagaatgtaggaaattcttctgccatccatatacctcgttctatgtaggcagccacagaccaatgagggaagagtatgtaagttgcagcaagtaaaacagccttgctggagatggacacttattaagacaatctggctgctgggtcagatgccctgtcctacctggagcttctcattccagtgcctaatctgtgaagacttgaacatcctgtgttctaataagaggccttatatactagacatgcaacttttaacagtaacattatraagttggaatttttggggaccattatggctagaaagaccatggaatggagaaaggctagcgttaagatggggaatcctgttttctccccattaatcctgccattgatcctgacaaaattaatcaagggccaattgtaaggcaaaaatatacaacaaataaactaaatggggaaatgagtgaaca

SEQ ID NO: 298264 - DNA, 575 bp, Homo sapiens
acaaaagaaggattaatggaatctatagagaatcacagaaagctaaaactagtcattaaaagcttgcccaaatcaatttcataattggtacataattataataataaaaataattttaaaatggcatttattttgaacaatgtataaccattcattctcataatggtgaaaaacggcyttaataaaggattaaaagctggagagagacggagggattctcagagcaccagcccaagtgaagattgctgcttactgcaatggaaaagggagacagttagcattgggttaatatttaccatgttttactctctgggataggcattttatttacaatatctcttatgggaatgttttatttatttcattttctctagactgagatccttgcagagaaactgacatgcacaaaaaaatgtcctttgagttaaattggtcactttataagagatccagatttctccccaagtagagaaatttgcgcagaatgtggaagacaaactacccattggaaacacatgcaaaatcactcagtagggatactctcctaaccctgggcaagtgaggtcttcttgcag

SEQ ID NO: 298265 - DNA, 558 bp, Homo sapiens
ggcctgcaactctgcttccccttttcacagcagtgctatgaaaactcagtctgcacccacttctgcttcctggcttcctggtcattcctccactcctgcattctggtttccactaaaaattttccccataaagtaacaaatgattgcattcttgccagctgatgtaagcagatttgtttctggcctgtttagtagcacttcctcctttgygaagttctctccttccttgcttggtatttgtaattcagcccatttgattttccaggtgcttctggcttctcaggctcccagtctctccctcatcctttaaagataatttcctcatgattctaccttcaaacaccctcccactctctttctactccctaatgatcttacctgcgctctgaaaacccaaatctaacactggtcaatccccaaacttccagacgttttgaaatcttccctagtggacaatttcatccagacattttataagcataatcaaatttgaatggattatttccctcatcaatttggcacctcttctcattttccctaatttggtgaatgacatcg

SEQ ID NO: 298266 - DNA, 558 bp, Homo sapiens
ggcctgcaactctgcttccccttttcacagcagtgctatgaaaactcagtctgcacccacttctgcttcctggcttcctggtcattcctccactcctgcattctggtttccactaaaaattttccccataaagtaacaaatgattgcattcttgccagctgatgtaagcagatttgtttctggcctgtttagtagcacttcctcctttgcgaagttctctccttccttgcttggtatttgtaattcagcccatttgattttccaggtgcttctggcttctcaggctcccagtctctccctcatcctttaaagataatttcctcatgattctaccttcaaacaccctcccactctctttctactccctaatgatcttacctgcgctctgaaaacccaaatctaacactggtcaatccccaaacttccagacgttttgaaatcttccytagtggacaatttcatccagacattttataagcataatcaaatttgaatggattatttccctcatcaatttggcacctcttctcattttccctaatttggtgaatgacatcg

SEQ ID NO: 298267 - DNA, 558 bp, Homo sapiens
ggcctgcaactctgcttccccttttcacagcagtgctatgaaaactcagtctgcacccacttctgcttcctggcttcctggtcattcctccactcctgcattctggtttccactaaaaattttccccataaagtaacaaatgattgcattcttgccagctgatgtaagcagatttgtttctggcctgtttagtagcacttcctcctttgcgaagttctctccttccttgcttggtatttgtaattcagcccatttgattttccaggtgcttctggcttctcaggctcccagtctctccctcatcctttaaagataatttcctcatgattctaccttcaaacaccctcccactctctttctactccctaatgatcttacctgcgctctgaaaacccaaatctaacactggtcaatccccaaacttccagacgttttgaaatcttccctagtggacaayttcatccagacattttataagcataatcaaatttgaatggattatttccctcatcaatttggcacctcttctcattttccctaatttggtgaatgacatcg

SEQ ID NO: 298268 - DNA, 558 bp, Homo sapiens
ggcctgcaactctgcttccccttttcacagcagtgctatgaaaactcagtctgcacccacttctgcttcctggcttcctggtcattcctccactcctgcattctggtttccactaaaaattttccccataaagtaacaaatgattgcattcttgccagctgatgtaagcagatttgtttctggcctgtttagtagcacttcctcctttgcgaagttctctccttccttgcttggtatttgtaattcagcccatttgattttccaggtgcttctggcttctcaggctcccagtctctccctcatcctttaaagataatttcctcatgattctaccttcaaacaccctcccactctctttctactccctaatgatcttacctgcgctctgaaaacccaaatctaacactggtcaatccccaaacttccagacgttttgaaatcttccctagtggacaatttcayccagacattttataagcataatcaaatttgaatggattatttccctcatcaatttggcacctcttctcattttccctaatttggtgaatgacatcg

SEQ ID NO: 298269 - DNA, 494 bp, Homo sapiens
tactatgaaaagacgtatcttcagatgcttataatagtttgctaaagctggatgcaaatttaagcagcagagggtgagctacttttttttaaacttaagaacatattatgacgacctaggttaatatgcttaattaatgtgaagttcagttttcttttaaattaaatagaagaaagtaatattaaatatgccattcagttgatgtaaggattaaatgagataatatgtttgcacatactgyttgcacatactgttaagtcccatgcaaacgtgaagtaatataaaccaactttttaacattctgcagaaaccaactgcctcctgagtttaggtattattgttattgccattgttctaaaacctatgtattttctgccatgttttcttgttgctgaagggaagatgcaaatactagatacttagagtgttttcccccaaagttttgaagacctgtgggtagaattctaagaaaatatatacagaaaacaaaatat

SEQ ID NO: 298270 - DNA, 552 bp, Homo sapiens
tttacctttctttacttttaatgggaaaaccgcaattacttttgcaccaacctaatattaagtcagcattcttacttgctagcaacagatatccaacatggctgttctaagcaaaaagaaagttcagtggaaggatactgactgagaggtcaaataattcatgaggacctgggaggagttgcgttttgagattgaaaaaagaggcaacggggtagctacagagcctaggcaaaaactcacaattggagtaaataagtctaggataattctaacataagcactttacacattttatctgaaattcgattgtcaggaagccattacataatggtgctggaaaaggccatcatgaaaaactttctatcttgccrctttagttggtaagtctacttgtttattacaagacatacgtcatgatagttatatgaaggaacagaaattggaactctcataagggaattatctataaaattatctgtgacagagtctttctctgagtctgatttgagataaagccaagcttgcttctcaagtgtcatgtgatcaatataa

SEQ ID NO: 298271 - DNA, 598 bp, Homo sapiens
gcatttttctctctattttcattcatctggtattcttcacttccagtgttttaaaacacactaatttttaattcatctttggtttttcctagttgttgctttggaagtgattttcttttgctggctactaaactctacttgtaagtggaagtctgattatttattttctatgttcacatttttgtggtatctgagcatttgaaaaaacttaattaaaaaaaaagaacttcatcacaagtggtggggcggctgtacaggcaacattggactgaagagcaaggagaagggatgagggaagaggattctagcaattgctggtggtgtgactttaagcaagttttatatgttctccaagcatcatgctcttrttaacgactcaataaaggtagttgtaatggacatttttcctactccttaccttaattccttcatgatctgataagagcactctcattttccttgaggaaagaaacattctaactcattctcaggccaggtagtttgcgtgaaatgatcccacccttggccttgggaagtaggcatgtgacccaaaaacctaatcggaacattttatcccctatcccttaaccagggcaag

SEQ ID NO: 298272 - DNA, 624 bp, Homo sapiens
tatcagctactgaagatttggatgagcaggctcttggtgtgacacaatacgatatttcttgtattgcaacaacctcttctcattggtcaatcttccagaagaaacttaaccatggtcattgcccaacccattctcccaaatgatgagagttgaacmaattgaagattgctttcagcattcgctattatgtttagtctctgttttcctgtagcaccctaataattgtctttatattaaaatatacatgactgtttttgaaagaggaaagataatggaccaagattttctgtctttgaagtaagctaacgaatcagtataattggaacgagaaatcctggcacaggaagagagaactgattgtgctctgtccttggtagaattttgagtcattcatgcagtatagtgtctggagagttctagtgagtcatgcattgctaactatggaagaaaaatgtattttctaaagttgtctgttattactcatgtctttcagtcaggatcagcagatgctggtatcctattgactggtgatctaatagaaagtttctcatagacaggtctgacacaatttccctctaactctgataaatttggcacaagtccttttatttgcttgcaagatgt

SEQ ID NO: 298273 - DNA, 279 bp, Homo sapiens
aggttcatcttgacatcaggtaatgacaccattacctgagatgagaatgtggagagagctttttaaatgtcttgcatggactttcacatcagagttaatacccctcatctccactgcctgcagtgaagcttcttcttatcaatctaatgtagtccaacttggatgatgggtgattggtctttagcagttgaatgatgggttctaaacgggagaactgatcctgatcttctgtggycaggggcgcacccaatgatggtgacatggcatccttcgtcttgc

SEQ ID NO: 298274 - DNA, 600 bp, Homo sapiens
atgcttgactggtaatgtgaataaaacatccttgactggtactctggaaattgtgcaaattgttaggacttttattaataggaggacaggtctgaggatgacagaaaaggaaatctagaaacaaggtttattgatggtatttatcaccatcagcagagactaaagcgaggtaccgtattggtgaaatagccagtggccgagaggatagagccaaaggtgatgactgatttaagattctagtggtttagcacgaatactagtgttttttatggaaaatccaccaaacttcaaaaaaaatttcataaagaaatatgtgtggatgatactgagttaaagttaaactgatttctttgcatcagwcctctctctttcctttgtgttgtggactaaatgtttgtgtccttctaaaatttatatgttgaagttcttactccctatatgatggtatttggaagtggagcctttgcaatgtgatccagtttagatgcagtcatgagggtggggcccccatgatgagtttagtgttcttataagaagagaaagagagaccagagctctctctttgccatgtgaagacatagtgaaaaggtggccatctac

SEQ ID NO: 298275 - DNA, 600 bp, Homo sapiens
atgcttgactggtaatgtgaataaaacatccttgactggtactctggaaattgtgcaaattgttaggacttttattaataggaggacaggtctgaggatgacagaaaaggaaatctagaaacaaggtttattgatggtatttatcaccatcagcagagactaaagcgaggtaccgtattggtgaaatagccagtggccgagaggatagagccaaaggtgatgactgatttaagattctagtggtttagcacgaatactagtgttttttatggaaaatccaccaaacttcaaaaaaaatttcataaagaaatatgtgtggatgatactgagttaaagttaaactgatttctttgcatcagtcctctctctttcctwtgtgttgtggactaaatgtttgtgtccttctaaaatttatatgttgaagttcttactccctatatgatggtatttggaagtggagcctttgcaatgtgatccagtttagatgcagtcatgagggtggggcccccatgatgagtttagtgttcttataagaagagaaagagagaccagagctctctctttgccatgtgaagacatagtgaaaaggtggccatctac

SEQ ID NO: 298276 - DNA, 600 bp, Homo sapiens
atgcttgactggtaatgtgaataaaacatccttgactggtactctggaaattgtgcaaattgttaggacttttattaataggaggacaggtctgaggatgacagaaaaggaaatctagaaacaaggtttattgatggtatttatcaccatcagcagagactaaagcgaggtaccgtattggtgaaatagccagtggccgagaggatagagccaaaggtgatgactgatttaagattctagtggtttagcacgaatactagtgttttttatggaaaatccaccaaacttcaaaaaaaatttcataaagaaatatgtgtggatgatactgagttaaagttaaactgatttctttgcatcagtcctctctctttcctttgtgttgtggactaaatgtttgtgtccttctaaaatttatatrttgaagttcttactccctatatgatggtatttggaagtggagcctttgcaatgtgatccagtttagatgcagtcatgagggtggggcccccatgatgagtttagtgttcttataagaagagaaagagagaccagagctctctctttgccatgtgaagacatagtgaaaaggtggccatctac

SEQ ID NO: 298277 - DNA, 547 bp, Homo sapiens
cccacaggaccatggggatagtctcactcagaaacatagtgccccttgaaacatcatgctctgggcctgcatgagtttmtattctagtttgtcctccaaagagtagactcccctttcatccaggcctggggggtaaccaagggccagttgtttgcaggggtttggagacagagctggatgtagactgccgtatccacacatcaacacatgaggcgttcttggtggggtctgcagctgaggataggcagagaaatggaatggctgggaaaaatttcaccttcaccatcaagttccaatgcagaatgctatggagcctaagaatcctacatttgaacttggacttccaagttgttatgaaggtgtatttaccaaggtaggaggttactttaacagtttgctagtttgctcaataactttaaaatatttagatatatgaaacgtgggcctctattggtactatatacaacttcaagctcttcaaacattaggagggagcctggactactgtacctgaggacccaggtctgaagagcttgctttaaagttc

SEQ ID NO: 298278 - DNA, 602 bp, Homo sapiens
acattcagctgtctgcgataatatcacattgtcagagatatctttagtcctaaccctttctgaagtagcatctcctccttcattatcatacattgctccatatttgtttgtagcactaccattgcatgttatctgactccsctttctgctatgagtttttcttattcattgttgtgtcttcaaagcctaagaagcctctaaaagtagttgctgaatacataaatgattccctaatttatgaggaaatcaacattgcaaagagtgttgaggttcctctggattcactatccatggaaacatctgtggtgagagctttttcaactgtggccaaggacttagaatctagcaagaagaaataagggcattgggccaaaaagtagtgggctggacaagtgatggttaaataggttaaaactaaaccagatgagcctcatgccagcctgcctgtctgtgttctgcgtattgggtgtgacttctgagattcttccctgcacaaccatgttgctgtaactgtgacccaggagtgtttgattgccggtaactttttgtggagaacttgggagtgcagcacagtgggtggagttgaattgtccccaataata

SEQ ID NO: 298279 - DNA, 602 bp, Homo sapiens
acattcagctgtctgcgataatatcacattgtcagagatatctttagtcctaaccctttctgaagtagcatctcctccttcattatcatacattgctccatatttgtttgtagcactaccattgcatgttatctgactccgctttctgctatgagtttttcttattcattgttgtgtcttcaaagcctaagaagsctctaaaagtagttgctgaatacataaatgattccctaatttatgaggaaatcaacattgcaaagagtgttgaggttcctctggattcactatccatggaaacatctgtggtgagagctttttcaactgtggccaaggacttagaatctagcaagaagaaataagggcattgggccaaaaagtagtgggctggacaagtgatggttaaataggttaaaactaaaccagatgagcctcatgccagcctgcctgtctgtgttctgcgtattgggtgtgacttctgagattcttccctgcacaaccatgttgctgtaactgtgacccaggagtgtttgattgccggtaactttttgtggagaacttgggagtgcagcacagtgggtggagttgaattgtccccaataata

SEQ ID NO: 298280 - DNA, 602 bp, Homo sapiens
acattcagctgtctgcgataatatcacattgtcagagatatctttagtcctaaccctttctgaagtagcatctcctccttcattatcatacattgctccatatttgtttgtagcactaccattgcatgttatctgactccgctttctgctatgagtttttcttattcattgttgtgtcttcaaagcctaagaagcctctaaawgtagttgctgaatacataaatgattccctaatttatgaggaaatcaacattgcaaagagtgttgaggttcctctggattcactatccatggaaacatctgtggtgagagctttttcaactgtggccaaggacttagaatctagcaagaagaaataagggcattgggccaaaaagtagtgggctggacaagtgatggttaaataggttaaaactaaaccagatgagcctcatgccagcctgcctgtctgtgttctgcgtattgggtgtgacttctgagattcttccctgcacaaccatgttgctgtaactgtgacccaggagtgtttgattgccggtaactttttgtggagaacttgggagtgcagcacagtgggtggagttgaattgtccccaataata

SEQ ID NO: 298281 - DNA, 602 bp, Homo sapiens
acattcagctgtctgcgataatatcacattgtcagagatatctttagtcctaaccctttctgaagtagcatctcctccttcattatcatacattgctccatatttgtttgtagcactaccattgcatgttatctgactccgctttctgctatgagtttttcttattcattgttgtgtcttcaaagcctaagaagcctctaaaagtagttgctgaatacataaatgattccctaatttatgaggaartcaacattgcaaagagtgttgaggttcctctggattcactatccatggaaacatctgtggtgagagctttttcaactgtggccaaggacttagaatctagcaagaagaaataagggcattgggccaaaaagtagtgggctggacaagtgatggttaaataggttaaaactaaaccagatgagcctcatgccagcctgcctgtctgtgttctgcgtattgggtgtgacttctgagattcttccctgcacaaccatgttgctgtaactgtgacccaggagtgtttgattgccggtaactttttgtggagaacttgggagtgcagcacagtgggtggagttgaattgtccccaataata

SEQ ID NO: 298282 - DNA, 422 bp, Homo sapiens
caggctattgcatttttgtgtttcttatgctaagtacagagccttaaatatagcagaagctctgtaattgtgggattgtttttytggtctcccctgctggtaaggagtctattaaacactgaagcagatctgtgcagtggagaatggctatctctctggaattttgtaatcttgaaaagacaaatcattacacaaaactttccttccatttctctgtgattctttcagaaatctaccaacatgccattttgatccactataaccattcaatgtatttctgaaaaacatttttcagaaacatcaatacaatttccagagattctaccaaattctttattgaggctgttcatgcgtagtaaataataaaaataataaataatgaaaaagtaacaacataaacaaaccacatctctatcccattc

SEQ ID NO: 298283 - DNA, 422 bp, Homo sapiens
caggctattgcatttttgtgtttcttatgctaagtacagagccttaaatatagcagaagctctgtaattgtgggattgtttttctggtctcccctgctggtaaggagtctattaaacactgaagcagatctgtgcagtggagaatggctatctctctggaattttgtaatcttgaaaagacaaatcattacacaaaactttccttccatttctctgtgattctttcagaaatctaccaacatgccattttgatcyactataaccattcaatgtatttctgaaaaacatttttcagaaacatcaatacaatttccagagattctaccaaattctttattgaggctgttcatgcgtagtaaataataaaaataataaataatgaaaaagtaacaacataaacaaaccacatctctatcccattc

SEQ ID NO: 298284 - DNA, 422 bp, Homo sapiens
caggctattgcatttttgtgtttcttatgctaagtacagagccttaaatatagcagaagctctgtaattgtgggattgtttttctggtctcccctgctggtaaggagtctattaaacactgaagcagatctgtgcagtggagaatggctatctctctggaattttgtaatcttgaaaagacaaatcattacacaaaactttccttccatttctctgtgattctttcagaaatctaccaacatgccattttgatccactataaccattcaatgtatttctgaaaaacatttttcagaaacatcaatayaatttccagagattctaccaaattctttattgaggctgttcatgcgtagtaaataataaaaataataaataatgaaaaagtaacaacataaacaaaccacatctctatcccattc

SEQ ID NO: 298285 - DNA, 600 bp, Homo sapiens
cttgtaccgcccttaactatttatatamctttcccactccatgagatggccacatattctaaaatatatacgtttattcacaaatattttaagcaccaaatgtcagtcccagtgttaggtcctgggtatgtaaggatgaacaagaggctcatagtctatttggtgagacacttccactctttgggagtatgaaaggtagaaaagataattttgctagggagagtcagggatgatatcccaagaagggagccctgggcttgagtcttcaaaggtaagtaggatttgccatgtagagaaggaggaaagaggcttttgggcagaggaaacagcatgtaaacttatttttttctttaaaaaacaaagatttcttgatactaaatgaacatgaattatcaacgagaatgtttcttcttccttacgtatcatgagatacgctaaactgactaagatatcaacataagctttttctagccagaatccagttagctaaaattcccattatttgagaacatagccgagcaccaggtaataatctatcaaaggtctctgagtaaaaagttttgttgcaaagttcctttgcttattgaagacccgttcagc

SEQ ID NO: 298286 - DNA, 600 bp, Homo sapiens
cttgtaccgcccttaactatttatatacctttcccactccatgagatggccacatattctaaaatatatacgtttattcacaaatattttaagcaccaaatgtcagtcccagtgttaggtcctgggtatgtaaggatgaacaagaggctcatagtctatttggtgagacacttccactctttgggagtatgaaaggtagaaaagataattttgctagggagagtcagggatgatatcccaagaagggagccctgggcttgagtcttcaaaggtaagtaggatttgccatgtagagaaggaggaaagaggcttttgggcagaggaaacagcatgtaaacttatttttttctttaaaaaacaaagatttcttgatactaaatgaacatgaattatcaacgagaatgttycttcttccttacgtatcatgagatacgctaaactgactaagatatcaacataagctttttctagccagaatccagttagctaaaattcccattatttgagaacatagccgagcaccaggtaataatctatcaaaggtctctgagtaaaaagttttgttgcaaagttcctttgcttattgaagacccgttcagc

SEQ ID NO: 298287 - DNA, 630 bp, Homo sapiens
ttgctatgaaatagagatggtttcactttcacatctggtatcttcaattttgcagcttgctcctggctctcttcttagcatctattatagtgttgtctctttttctcatctcctctccaaaccttgacattttgctaaattttggaatcaatttcttcagaagtacgttgtgagattgcgtgttgatggcattagataaaagagcactgcattttgtgttgcatagcaaaaaaaggatggcatttgtgtattttggagtattgtgagatgaatgagcttccatataattgcagaactgaagtgacagggactcttctaatttttaaggcaggagggaaaacaaatttggactaaaataggcagactggagctgaaaggcatcctattacctgtgcattaaggcagccaactaatcaatctcagacagtcccgccagctcacatcttccaggtcatctctgtcttatcactccattgtgtaactcaggacaatttatagcctgcctgtggttgctttgtgtttatgtttttcggagtgtgtgctgaaaagctctaattcagctctttttrttgagttcctcatgtgtgcatttgttttttgttttttgctttgattattttgctataggga

SEQ ID NO: 298288 - DNA, 431 bp, Homo sapiens
tattaattttatattatataagatatttaatattttgtaatagtaagtagataaatattttataatgttaaaatagagcaacagacaagaaatacctgggtgacaacttttgatagggtgttcatgaagacacctctgaagaggtgacatttaatttgagatctgagtgaaaaggagccagccatgcaaaaagaagagggatgaacattacacccagaggaagctgcttgtgcagaggcagaggcgratctgtacatttgagaacagaacaaaggctggtgtggctggagagaagcgggagagggagatgaggtcaatgaggatggagcacttggggcagactcaggatgggttttggcgatagagtcaataagacttgctgatgggctggggatggggagaaagcacaagaggagaagcaaggaaaatcc

SEQ ID NO: 298289 - DNA, 536 bp, Homo sapiens
aataaattgatcaatgatgaatacatgagaattccatttagcacctcttccatgtttatctgtatagcttctttytttttttttttttgagacagagtctcactctgttaccgaggctggagtgcagtggtgcaatcacagctcactgcagctctgacttccccaggctcagctgatcctcccacctcagcctcctgagtagctgggactacaggcatgccccaccatacctggctaatttttatatttttgtagagatggggtttgctcaggctggtcttgagctcctgggctccagtgatccacctgcttcagcctccaaaagtcctgggattacaggtgtaaggcaccatgaccagcctacatagcttctttatgtgcattactctgtagttgttataaaattgtgttttaatacaatttattcaatatcattaaattattaagtaaacagttatttaaaataactacctgtggcttctactgcagctttgtttttcctcaccggctcagcctcttcccactcagtttcccca

SEQ ID NO: 298290 - DNA, 536 bp, Homo sapiens
aataaattgatcaatgatgaatacatgagaattccatttagcacctcttccatgtttatctgtatagcttctttttttttttttttttgagacagagtctcactctgttaccgaggctggagtgcagtggtgcaatcacagctcactgcagctctgacttccccaggctcagctgatcctcccacctcagcctcctgagtagctgggactacaggcatgccccaccatacctggctaatttttatatttttgtagagatggggtttgctcaggctggtcttgagctcctgggctccagtgatccacctgcttcagcctccaaaagtsctgggattacaggtgtaaggcaccatgaccagcctacatagcttctttatgtgcattactctgtagttgttataaaattgtgttttaatacaatttattcaatatcattaaattattaagtaaacagttatttaaaataactacctgtggcttctactgcagctttgtttttcctcaccggctcagcctcttcccactcagtttcccca

SEQ ID NO: 298291 - DNA, 476 bp, Homo sapiens
aatgctgcatcattggtcataagcggaaaggtataaaaatgtaatcaaagcagccccatggaccaaccctcctagtgatgcagtatagatyccatcacaaaagatttggcacagagcgtgattgacttcctgaagagatattgtagaggagattgctacatgggaaagaagttggacaagatgacctttaacttttttcacatgctaagattctttgtttctatgaaaaccataatcccttttagaaaagcaaataaacaaaaagtggtgtgaaactgctatttataataagaaatgtatatttagtctttgtcctgttgcctgacacacagctcctagaacccttagaatctccaaactaatgtgtcttcttgtaggctaacaagagatgactggtggctaggggctcctggatagcctcaggaagtgggggctggttcccagggaaaccaaccatgtcattagaatgttggaaa

SEQ ID NO: 298292 - DNA, 542 bp, Homo sapiens
gttaaacactgtgagttgaaygcacacattgcaaagcggtttctgagaatgattccgtctaattattatacgaaggtatttccttttctatcattggcctcaaagcgcttgatacctccacctgaaaattccacaaaaagagtgtttccaatctactctgtctaaaggaacgttcaactctgtgagttgaatacacacacacagaaagaattcactgagaattcttctgtctggcattacatgaagaaatcccgtttccaacgaaggcctcaaagaggtccaaatatccacttgcagattctgcaaaaagagtgtttcaaaaccgctccattaaaaggaatgttgaactctgtgagttgaatgcaaacatcacaactcagtttctgagaatgcttctgactagattttatggtaagatatttccttttctaccgtaggcttcaatgccctctaaatacacccttgcaaattctacaaagagactgtttcataactgctctataggaagaaaggttcaactctgtgagttgaatgcagagatc

SEQ ID NO: 298293 - DNA, 563 bp, Homo sapiens
aactgtatgaaaagaaaggttaaacactgtgagttgaacgcacacattgcaaagcrgtttctgagaatgattccgtctaattattatacgaaggtatttccttttctatcattggcctcaaagcgcttgatacctccacctgaaaattccacaaaaagagtgtttccaatctactctgtctaaaggaacgttcaactctgtgagttgaatacacacacacagaaagaattcactgagaattcttctgtctggcattacatgaagaaatcccgtttccaacgaaggcctcaaagaggtccaaatatccacttgcagattctgcaaaaagagtgtttcaaaaccgctccattaaaaggaatgttgaactctgtgagttgaatgcaaacatcacaactcagtttctgagaatgcttctgactagattttatggtaagatatttccttttctaccgtaggcttcaatgccctctaaatacacccttgcaaattctacaaagagactgtttcataactgctctataggaagaaaggttcaactctgtgagttgaatgcagagatcaca

SEQ ID NO: 298294 - DNA, 450 bp, Homo sapiens
ttaaacactgtgagttgaacgcacacattgcaaagcggtttctgagaatgattccgtctaattattatacgaaggtatttccttttctatcatkggcctcaaagcgcttgatacctccacctgaaaattccacaaaaagagtgtttccaatctactctgtctaaaggaacgttcaactctgtgagttgaatacacacacacagaaagaattcactgagaattcttctgtctggcattacatgaagaaatcccgtttccaacgaaggcctcaaagaggtccaaatatccacttgcagattctgcaaaaagagtgtttcaaaaccgctccattaaaaggaatgttgaactctgtgagttgaatgcaaacatcacaactcagtttctgagaatgcttctgactagattttatggtaagatatttccttttctaccgtaggcttcaatgccctc

SEQ ID NO: 298295 - DNA, 542 bp, Homo sapiens
gttaaacactgtgagttgaacgcacacattgcaaagcggtttctgagaatgattccgtctaattattatacgaaggtatttccttttctatcattggcctcaaagcgcttsatacctccacctgaaaattccacaaaaagagtgtttccaatctactctgtctaaaggaacgttcaactctgtgagttgaatacacacacacagaaagaattcactgagaattcttctgtctggcattacatgaagaaatcccgtttccaacgaaggcctcaaagaggtccaaatatccacttgcagattctgcaaaaagagtgtttcaaaaccgctccattaaaaggaatgttgaactctgtgagttgaatgcaaacatcacaactcagtttctgagaatgcttctgactagattttatggtaagatatttccttttctaccgtaggcttcaatgccctctaaatacacccttgcaaattctacaaagagactgtttcataactgctctataggaagaaaggttcaactctgtgagttgaatgcagagatc

SEQ ID NO: 298296 - DNA, 450 bp, Homo sapiens
ttaaacactgtgagttgaacgcacacattgcaaagcggtttctgagaatgattccgtctaattattatacgaaggtatttccttttctatcattggcctcaaagcgcttgatacctccacctgaaaattccacwaaaagagtgtttccaatctactctgtctaaaggaacgttcaactctgtgagttgaatacacacacacagaaagaattcactgagaattcttctgtctggcattacatgaagaaatcccgtttccaacgaaggcctcaaagaggtccaaatatccacttgcagattctgcaaaaagagtgtttcaaaaccgctccattaaaaggaatgttgaactctgtgagttgaatgcaaacatcacaactcagtttctgagaatgcttctgactagattttatggtaagatatttccttttctaccgtaggcttcaatgccctc

SEQ ID NO: 298297 - DNA, 553 bp, Homo sapiens
agcggtttctgagaatgattccgtctaattattatacgaaggtatttccttttctatcattggcctcaaagcgcttgatacctccacctgaaaattccacaaaaagagtgtttccaatctactctgtctaaaggaacgttcaactctgtgagttgaatacacacacacagaargaattcactgagaattcttctgtctggcattacatgaagaaatcccgtttccaacgaaggcctcaaagaggtccaaatatccacttgcagattctgcaaaaagagtgtttcaaaaccgctccattaaaaggaatgttgaactctgtgagttgaatgcaaacatcacaactcagtttctgagaatgcttctgactagattttatggtaagatatttccttttctaccgtaggcttcaatgccctctaaatacacccttgcaaattctacaaagagactgtttcataactgctctataggaagaaaggttcaactctgtgagttgaatgcagagatcacaacgtggtttctgcgaatgattctttgtagtttttacatgaag

SEQ ID NO: 298298 - DNA, 553 bp, Homo sapiens
agcggtttctgagaatgattccgtctaattattatacgaaggtatttccttttctatcattggcctcaaagcgcttgatacctccacctgaaaattccacaaaaagagtgtttccaatctactctgtctaaaggaacgttcaactctgtgagttgaatacacacacacagaaagaattcactgagaatwcttctgtctggcattacatgaagaaatcccgtttccaacgaaggcctcaaagaggtccaaatatccacttgcagattctgcaaaaagagtgtttcaaaaccgctccattaaaaggaatgttgaactctgtgagttgaatgcaaacatcacaactcagtttctgagaatgcttctgactagattttatggtaagatatttccttttctaccgtaggcttcaatgccctctaaatacacccttgcaaattctacaaagagactgtttcataactgctctataggaagaaaggttcaactctgtgagttgaatgcagagatcacaacgtggtttctgcgaatgattctttgtagtttttacatgaag

SEQ ID NO: 298299 - DNA, 562 bp, Homo sapiens
gatacctccacctgaaaattccacaaaaagagtgtttccaatctactctgtctaaaggaacgttcaactctgtgagttgaatacacacacacagaaagaattcactgagaattcttctgtctggcattacatgaagaaatcccgtttccaacgaaggcctcaaagaggtccaaatatccacttgcagattctgcaaaaagagtgtttcaaaaccgctcyattaaaaggaatgttgaactctgtgagttgaatgcaaacatcacaactcagtttctgagaatgcttctgactagattttatggtaagatatttccttttctaccgtaggcttcaatgccctctaaatacacccttgcaaattctacaaagagactgtttcataactgctctataggaagaaaggttcaactctgtgagttgaatgcagagatcacaacgtggtttctgcgaatgattctttgtagtttttacatgaagatatttcgttgtcaaccgtaggcttcaaagcactcaaagtattcacttggaacttttacaaaaagagtgttagaaaactgctctt

SEQ ID NO: 298300 - DNA, 553 bp, Homo sapiens
agcggtttctgagaatgattccgtctaattattatacgaaggtatttccttttctatcattggcctcaaagcgcttgatacctccacctgaaaattccacaaaaagagtgtttccaatctactctgtctaaaggaacgttcaactctgtgagttgaatacacacacacagaaagaattcactgagaattcttctgtctggcattacatgaagaaatcccgtttccaacgaaggcctcaaagaggtccaaatatccacttgcagattctgcaaaaagagtgtttcaaaaccgctccattaaaaggaatgttgaactctgtgagttgaatgcaaacatcacaactcagtttctgagaatgcttctgactagattttatggtaagatatttccttttctaccgtaggcttcaatgccctctaaawacacccttgcaaattctacaaagagactgtttcataactgctctataggaagaaaggttcaactctgtgagttgaatgcagagatcacaacgtggtttctgcgaatgattctttgtagtttttacatgaag

SEQ ID NO: 298301 - DNA, 562 bp, Homo sapiens
gatacctccacctgaaaattccacaaaaagagtgtttccaatctactctgtctaaaggaacgttcaactctgtgagttgaatacacacacacagaaagaattcactgagaattcttctgtctggcattacatgaagaaatcccgtttccaacgaaggcctcaaagaggtccaaatatccacttgcagattctgcaaaaagagtgtttcaaaaccgctccattaaaaggaatgttgaactctgtgagttgaatgcaaacatcacaactcagtttctgagaatgcttctgactagattttatggtaagatatttccttttctaccgtaggcttcaatgccctctaaatacacccttgcaaattctacaaagagactgtttmataactgctctataggaagaaaggttcaactctgtgagttgaatgcagagatcacaacgtggtttctgcgaatgattctttgtagtttttacatgaagatatttcgttgtcaaccgtaggcttcaaagcactcaaagtattcacttggaacttttacaaaaagagtgttagaaaactgctctt

SEQ ID NO: 298302 - DNA, 556 bp, Homo sapiens
attcttctgtctggcattacatgaagaaatcccgtttccaacgaaggcctcaaagaggtccaaatatccacttgcagattctgcaaaaagagtgtttcaaaaccgctccattaaaaggaatgttgaactctgtgagttgaatgcaaacatcacaactcagtttctgagaatgcttctgactagattttatggtaagatatttccttttctaccgtaggcttcaatgccctctaaatacacccttgcaaattctacaaagagactgtttcataactgctctataggaagaaaggttsaactctgtgagttgaatgcagagatcacaacgtggtttctgcgaatgattctttgtagtttttacatgaagatatttcgttgtcaaccgtaggcttcaaagcactcaaagtattcacttggaacttttacaaaaagagtgttagaaaactgctctttccaaagtaaggttcaactctgtgagttgaatgcacacataacaatcaagaagtttctgagaattcttctgtcctggtttatatgaaaaaatcccgtttccaac

SEQ ID NO: 298303 - DNA, 542 bp, Homo sapiens
ctgtgagttgaatgcagagatcacaacgtggtttctgcgaatgatwctttgtagtttttacatgaagatatttcgttgtcaaccgtaggcttcaaagcactcaaagtattcacttggaacttttacaaaaagagtgttagaaaactgctctttccaaagtaaggttcaactctgtgagttgaatgcacacataacaatcaagaagtttctgagaattcttctgtcctggtttatatgaaaaaatcccgtttccaacgaaggcctcaaagacgtttaaatatccacttgcagacttcacaaacagagggtttccaaactgctctatgaaaagaaaggttaaactctgtgagttgaacgcacacatcacaaagtagcttctgagaatgatactgtctagtttttatacgaagatatttcctttctaccattggcgtcaaagcgctagaattctccacttgcaaattccacaaaaagagtgtttccaatctgctctgtctaaaggaaggttcaactctgtgagttgaatacacacacacaaagaa

SEQ ID NO: 298304 - DNA, 562 bp, Homo sapiens
gatacctccacctgaaaattccacaaaaagagtgtttccaatctactctgtctaaaggaacgttcaactctgtgagttgaatacacacacacagaaagaattcactgagaattcttctgtctggcattacatgaagaaatcccgtttccaacgaaggcctcaaagaggtccaaatatccacttgcagattctgcaaaaagagtgtttcaaaaccgctccattaaaaggaatgttgaactctgtgagttgaatgcaaacatcacaactcagtttctgagaatgcttctgactagattttatggtaagatatttccttttctaccgtaggcttcaatgccctctaaatacacccttgcaaattctacaaagagactgtttcataactgctctataggaagaaaggttcaactctgtgagttgaatgcagagatcacaacgtggtttctgcgaatgattctttgtagtttttacatgaagatatttcgttgtcwaccgtaggcttcaaagcactcaaagtattcacttggaacttttacaaaaagagtgttagaaaactgctctt

SEQ ID NO: 298305 - DNA, 497 bp, Homo sapiens
aaggaacgttcaactctgtgagttgaatacacacacacagaaagaattcactgagaattcttctgtctggcattacatgaagaaatcccgtttccaacgaaggcctcaaagaggtccaaatatccacttgcagattctgcaaaaagagtgtttcaaaaccgctccattaaaaggaatgttgaactctgtgagttgaatgcaaacatcacaactcagtttctgagaatgcttctgactagattttatggtaagatatttccttttctaccgtaggcttcaatgccctctaaatacacccttgcaaattctacaaagagactgtttcataactgctctataggaagaaaggttcaactctgtgagttgaatgcagagatcacaacgtggtttctgcgaatgattctttgtagtttttacatgaagatatttcgttgtcaacygtaggcttcaaagcactcaaagtattcacttggaacttttacaaaaagagtgttaga

SEQ ID NO: 298306 - DNA, 536 bp, Homo sapiens
gagaatgcttctgactagattttatggtaagatatttccttttctaccgtaggcttcaatgccctctaaatacacccttgcaaattctacaaagagactgtttcataactgctctataggaagaaaggttcaactctgtgagttgaatgcagagatcacaacgtggtttctgcgaatgattctttgtagtttttacatgaagatatttcgttgtcaaccgtaggcttcaaagcactcaaagtattcacttggaacttttacaaaamgagtgttagaaaactgctctttccaaagtaaggttcaactctgtgagttgaatgcacacataacaatcaagaagtttctgagaattcttctgtcctggtttatatgaaaaaatcccgtttccaacgaaggcctcaaagacgtttaaatatccacttgcagacttcacaaacagagggtttccaaactgctctatgaaaagaaaggttaaactctgtgagttgaacgcacacatcacaaagtagcttctgagaatgatactgtctagtttt

SEQ ID NO: 298307 - DNA, 536 bp, Homo sapiens
gagaatgcttctgactagattttatggtaagatatttccttttctaccgtaggcttcaatgccctctaaatacacccttgcaaattctacaaagagactgtttcataactgctctataggaagaaaggttcaactctgtgagttgaatgcagagatcacaacgtggtttctgcgaatgattctttgtagtttttacatgaagatatttcgttgtcaaccgtaggcttcaaagcactcaaagtattcacttggaacttttacaaaaagagtgttagraaactgctctttccaaagtaaggttcaactctgtgagttgaatgcacacataacaatcaagaagtttctgagaattcttctgtcctggtttatatgaaaaaatcccgtttccaacgaaggcctcaaagacgtttaaatatccacttgcagacttcacaaacagagggtttccaaactgctctatgaaaagaaaggttaaactctgtgagttgaacgcacacatcacaaagtagcttctgagaatgatactgtctagtttt

SEQ ID NO: 298308 - DNA, 586 bp, Homo sapiens
tctactctgtctaaaggaacgttcaactctgtgagttgaatacacacacacagaaagaattcactgagaattcttctgtctggcattacatgaagaaatcccgtttccaacgaaggcctcaaagaggtccaaatatccacttgcagattctgcaaaaagagtgtttcaaaaccgctccattaaaaggaatgttgaactctgtgagttgaatgcaaacatcacaactcagtttctgagaatgcttctgactagattttatggtaagatatttccttttctaccgtaggcttcaatgccctctaaatacacccttgcaaattctacaaagagactgtttcataactgctctataggaagaaaggttcaactctgtgagttgaatgcagagatcacaacgtggtttctgcgaatgattctttgtagtttttacatgaagatatttcgttgtcaaccgtaggcttcaaagcactcaaagtattcacttggaacttttacaaaaagagtgttagaaaactgctctttccaaagtaaggttcaactctgtgagttgaatgcacacataasaatcaagaagtttctgagaatt

SEQ ID NO: 298309 - DNA, 507 bp, Homo sapiens
ctgcgaatgattctttgtagtttttacatgaagatatttcgttgtcaaccgtaggcttcaaagcactcaaagtattcacttggaacttttacaaaaagagtgttagaaaactgctctttccaaagtaaggttcaactctgtgagttgaatgcacacataacaatcaagamgtttctgagaattcttctgtcctggtttatatgaaaaaatcccgtttccaacgaaggcctcaaagacgtttaaatatccacttgcagacttcacaaacagagggtttccaaactgctctatgaaaagaaaggttaaactctgtgagttgaacgcacacatcacaaagtagcttctgagaatgatactgtctagtttttatacgaagatatttcctttctaccattggcgtcaaagcgctagaattctccacttgcaaattccacaaaaagagtgtttccaatctgctctgtctaaaggaaggttcaactctgtgagttgaatacacacacacaaaga

SEQ ID NO: 298310 - DNA, 491 bp, Homo sapiens
acgtggtttctgcgaatgattctttgtagtttttacatgaagatatttcgttgtcaaccgtaggcttcaaagcactcaaagtattcacttggaacttttacaaaaagagtgttagaaaactgctctttccaaagtaaggttcaactctgtgagttgaatgcacacataacaatcaagaagtttctgagaattcttctgtcctggtttatatgaamaaatcccgtttccaacgaaggcctcaaagacgtttaaatatccacttgcagacttcacaaacagagggtttccaaactgctctatgaaaagaaaggttaaactctgtgagttgaacgcacacatcacaaagtagcttctgagaatgatactgtctagtttttatacgaagatatttcctttctaccattggcgtcaaagcgctagaattctccacttgcaaattccacaaaaagagtgtttccaatctgctctgtctaaaggaaggttcaactctg

SEQ ID NO: 298311 - DNA, 483 bp, Homo sapiens
caactctgtgagttgaatgcagagatcacaacgtggtttctgcgaatgattctttgtagtttttacatgaagatatttcgttgtcaaccgtaggcttcaaagcactcaaagtattcacttggaacttttacaaaaagagtgttagaaaactgctctttccaaagtaaggttcaactctgtgagttgaatgcacacataacaatcaagaagtttctgagaattcttctgtcctggtttatatgaaaaaatcccgtttccaacgaaggcctcaaagacgtttaaatatccacttgcagacttcacaaacagagggtttccaaactgctctatgaaaasaaaggttaaactctgtgagttgaacgcacacatcacaaagtagcttctgagaatgatactgtctagtttttatacgaagatatttcctttctaccattggcgtcaaagcgctagaattctccacttgcaaattccacaaaaagagtg

SEQ ID NO: 298312 - DNA, 540 bp, Homo sapiens
tgcaaattctacaaagagactgtttcataactgctctataggaagaaaggttcaactctgtgagttgaatgcagagatcacaacgtggtttctgcgaatgattctttgtagtttttacatgaagatatttcgttgtcaaccgtaggcttcaaagcactcaaagtattcacttggaacttttacaaaaagagtgttagaaaactgctctttccaaagtaaggttcaactctgtgagttgaatgcacacataacaatcaagaagtttctgagaattcttctgtcctggtttatatgaaaaaatcccgtttccaacgaaggcctcaaagacgtttaaatatccacttgcagacttcacaaacagagggtttccaaactgctctatgaaaagaaaggttaaactctgtgagttsaacgcacacatcacaaagtagcttctgagaatgatactgtctagtttttatacgaagatatttcctttctaccattggcgtcaaagcgctagaattctccacttgcaaattccacaaaaagagtgtttcc

SEQ ID NO: 298313 - DNA, 547 bp, Homo sapiens
tgcaaattctacaaagagactgtttcataactgctctataggaagaaaggttcaactctgtgagttgaatgcagagatcacaacgtggtttctgcgaatgattctttgtagtttttacatgaagatatttcgttgtcaaccgtaggcttcaaagcactcaaagtattcacttggaacttttacaaaaagagtgttagaaaactgctctttccaaagtaaggttcaactctgtgagttgaatgcacacataacaatcaagaagtttctgagaattcttctgtcctggtttatatgaaaaaatcccgtttccaacgaaggcctcaaagacgtttaaatatccacttgcagacttcacaaacagagggtttccaaactgctctatgaaaagaaaggttaaactctgtgagttgaaygcacacatcacaaagtagcttctgagaatgatactgtctagtttttatacgaagatatttcctttctaccattggcgtcaaagcgctagaattctccacttgcaaattccacaaaaagagtgtttccaatctgc

SEQ ID NO: 298314 - DNA, 511 bp, Homo sapiens
gtttcataactgctctataggaagaaaggttcaactctgtgagttgaatgcagagatcacaacgtggtttctgcgaatgattctttgtagtttttacatgaagatatttcgttgtcaaccgtaggcttcaaagcactcaaagtattcacttggaacttttacaaaaagagtgttagaaaactgctctttccaaagtaaggttcaactctgtgagttgaatgcacacataacaatcaagaagtttctgagaattcttctgtcctggtttatatgaaaaaatcccgtttccaacgaaggcctcaaagacgtttaaatatccacttgcagacttcacaaacagagggtttccaaactgctctatgaaaagaaaggttaaactctgtgagttgaacgcacacatcacaawgtagcttctgagaatgatactgtctagtttttatacgaagatatttcctttctaccattggcgtcaaagcgctagaattctccacttgcaaattccacaaaaaga

SEQ ID NO: 298315 - DNA, 542 bp, Homo sapiens
ctgtgagttgaatgcagagatcacaacgtggtttctgcgaatgattctttgtagtttttacatgaagatatttcgttgtcaaccgtaggcttcaaagcactcaaagtattcacttggaacttttacaaaaagagtgttagaaaactgctctttccaaagtaaggttcaactctgtgagttgaatgcacacataacaatcaagaagtttctgagaattcttctgtcctggtttatatgaaaaaatcccgtttccaacgaaggcctcaaagacgtttaaatatccacttgcagacttcacaaacagagggtttccaaactgctctatgaaaagaaaggttaaactctgtgagttgaacgcacacatcacaaagkagcttctgagaatgatactgtctagtttttatacgaagatatttcctttctaccattggcgtcaaagcgctagaattctccacttgcaaattccacaaaaagagtgtttccaatctgctctgtctaaaggaaggttcaactctgtgagttgaatacacacacacaaagaa

SEQ ID NO: 298316 - DNA, 590 bp, Homo sapiens
tcacaaacagagggtttccaaactgctctatgaaaagaaaggttaaactctgtgagttgaacgcacacatcacaaagtagcttctgagaatgatactgtctagtttttatacgaagayatttcctttctaccattggcgtcaaagcgctagaattctccacttgcaaattccacaaaaagagtgtttccaatctgctctgtctaaaggaaggttcaactctgtgagttgaatacacacacacaaagaagctactgagaattcttttttcaagaaattataagaagaaatcccgtttccaacgaaggcctcaaagagttccaaatatccacttgcacactgcacaaactaagtctttccaaactgctctatgcaaagaaatgttcaactctgtgagtttaatacacacatcacaaagcagtttctgagaatgatactgtctagtttttatacgaagatatttccttttgtaccattggcctcatactgctagaattttccacttgcaaattccacaaaaagagtgtttccaatccgctctgtctaaaggaaggttcaactctctgatttgaatacatacatcccaaaagaa

SEQ ID NO: 298317 - DNA, 514 bp, Homo sapiens
acttttacaaaaagagtgttagaaaactgctctttccaaagtaaggttcaactctgtgagttgaatgcacacataacaatcaagaagtttctgagaattcttctgtcctggtttatatgaaaaaatcccgtttccaacgaaggcctcaaagacgtttaaatatccacttgcagacttcacaaacagagggtttccaaactgctctatgaaaagaaaggttaaactctgtgagttgaacgcacacatcacaaagtagcttctgagaatgatactgtctagtttttatacgaagatatttccyttctaccattggcgtcaaagcgctagaattctccacttgcaaattccacaaaaagagtgtttccaatctgctctgtctaaaggaaggttcaactctgtgagttgaatacacacacacaaagaagctactgagaattcttttttcaagaaattataagaagaaatcccgtttccaacgaaggcctcaaagagttccaaatatccacttgcacac

SEQ ID NO: 298318 - DNA, 438 bp, Homo sapiens
tagtttttacatgaagatatttcgttgtcaaccgtaggcttcaaagcactcaaagtattcacttggaacttttacaaaaagagtgttagaaaactgctctttccaaagtaaggttcaactctgtgagttgaatgcacacataacaatcaagaagtttctgagaattcttctgtcctggtttatatgaaaaaatcccgtttccaacgaaggcctcaaagacgtttaaatatccacttgcagacttcacaaacagagggtttccaaactgctctatgaaaagaaaggttaaactctgtgagttgaacgcacacatcacaaagtagcttctgagaatgatactgtctagtttttatacgaagatatttcctttctaccattggygtcaaagcgctagaattctccacttgcaaattccacaaaaagagtgtttccaatctg

SEQ ID NO: 298319 - DNA, 572 bp, Homo sapiens
  misc_feature (1)...(572): n = A,T,C or G
tgagttgaacgcacacatcacaaagtagcttctgagaatgatactgtctagtttttatacgaagatatttcctttctaccattggcgtcaaagcgytagaattctccacttgcaaattccacaaaaagagtgtttccaatctgctctgtctaaaggaaggttcaactctgtgagttgaatacacacacacaaagaagctactgagaattcttttttcaagaaattataagaagaaatcccgtttccaacgaaggcctcaaagagttccaaatatccacttgcacactgcacaaactaagtctttccaaactgctctatgcaaagaaatgttcaactctgtgagtttaatacacacatcacaaagcagtttctgagaatgatactgtctagtttttatacgaagatatttccttttgtaccattggcctcatactgctagaattttccacttgcaaattccacaaaaagagtgtttccaatccgctctgtctaaaggaaggttcaactctctgatttgaatacatacatcccaaaagaagttactgagaattcnnnnnnnnnnnnnnnnnnnn

SEQ ID NO: 298320 - DNA, 590 bp, Homo sapiens
tcacaaacagagggtttccaaactgctctatgaaaagaaaggttaaactctgtgagttgaacgcacacatcacaaagtagcttctgagaatgatactgtctagtttttatacgaagatatttcctttctaccattggcgtcaaagcgctagaattctmcacttgcaaattccacaaaaagagtgtttccaatctgctctgtctaaaggaaggttcaactctgtgagttgaatacacacacacaaagaagctactgagaattcttttttcaagaaattataagaagaaatcccgtttccaacgaaggcctcaaagagttccaaatatccacttgcacactgcacaaactaagtctttccaaactgctctatgcaaagaaatgttcaactctgtgagtttaatacacacatcacaaagcagtttctgagaatgatactgtctagtttttatacgaagatatttccttttgtaccattggcctcatactgctagaattttccacttgcaaattccacaaaaagagtgtttccaatccgctctgtctaaaggaaggttcaactctctgatttgaatacatacatcccaaaagaa

SEQ ID NO: 298321 - DNA, 495 bp, Homo sapiens
aatcccgtttccaacgaaggcctcaaagacgtttaaatatccacttgcagacttcacaaacagagggtttccaaactgctctatgaaaagaaaggttaaactctgtgagttgaacgcacacatcacaaagtagcttctgagaatgatactgtctagtttttatacgaagatatttcctttctaccattggcgtcaaagcgctagaattctccacttgcaaattccacaaaaagagtgtttccaatctgctctgtctmaaggaaggttcaactctgtgagttgaatacacacacacaaagaagctactgagaattcttttttcaagaaattataagaagaaatcccgtttccaacgaaggcctcaaagagttccaaatatccacttgcacactgcacaaactaagtctttccaaactgctctatgcaaagaaatgttcaactctgtgagtttaatacacacatcacaaagcagtttctgagaatgatactgtctag

SEQ ID NO: 298322 - DNA, 590 bp, Homo sapiens
tcacaaacagagggtttccaaactgctctatgaaaagaaaggttaaactctgtgagttgaacgcacacatcacaaagtagcttctgagaatgatactgtctagtttttatacgaagatatttcctttctaccattggcgtcaaagcgctagaattctccacttgcaaattccacaaaaagagtgtttccaatctgctctgtctaaaggaaggttcaactctgtgagttgaatacacacacacaaagaagctactgagaattcttttttcaagaaattataagaagaaatcccgtttccaacgaaggcctsaaagagttccaaatatccacttgcacactgcacaaactaagtctttccaaactgctctatgcaaagaaatgttcaactctgtgagtttaatacacacatcacaaagcagtttctgagaatgatactgtctagtttttatacgaagatatttccttttgtaccattggcctcatactgctagaattttccacttgcaaattccacaaaaagagtgtttccaatccgctctgtctaaaggaaggttcaactctctgatttgaatacatacatcccaaaagaa

SEQ ID NO: 298323 - DNA, 582 bp, Homo sapiens
  misc_feature (1)...(582): n = A,T,C or G
nnnnnnnnctacactttatatatttctaagattttttttcagtcatggtcattctgggtgttgctagctgtgataaacatatgtgtaggcatggtcttgtttatataaacaccttgtgcctgatgttgggctacaaataacttgacagacattgctttgcaatggtcttgcagctttgaggtggcagaaacaggatttcaacctaggtctgtctggattctagagccagtatttgtaactatgatacacttctttcctcatattcttctcargctgcataagtctccttgcagaaatttttcaccttgtttttccctttccctttcaagatttccttcaatgtccattatatatatatatatatatatatatatatatatatatatatatatatatacactttaagttctggaatacatgtgcagaacatgcaggtttgttacataggtatacctgtgccatggtggtttgctgcacccattcatttaagtagtacttggtagaatcctgttaccataccatttaggccaacagaagaaaacctgtcatctagggtttaagcaccgtatgcattaggtattt

SEQ ID NO: 298324 - DNA, 582 bp, Homo sapiens
  misc_feature (1)...(582): n = A,T,C or G
nnnnnnnnctacactttatatatttctaagattttttttcagtcatggtcattctgggtgttgctagctgtgataaacatatgtgtaggcatggtcttgtttatataaacaccttgtgcctgatgttgggctacaaataacttgacagacattgctttgcaatggtcttgcagctttgaggtggcagaaacaggatttcaacctaggtctgtctggattctagagccagtatttgtaactatgatacacttctttcctcatattcttctcaggctgcataagtctccttgcagaaatttttcaccttgtttttccctttccctttcaagatttccttcaatgtccattmtatatatatatatatatatatatatatatatatatatatatatatatacactttaagttctggaatacatgtgcagaacatgcaggtttgttacataggtatacctgtgccatggtggtttgctgcacccattcatttaagtagtacttggtagaatcctgttaccataccatttaggccaacagaagaaaacctgtcatctagggtttaagcaccgtatgcattaggtattt

SEQ ID NO: 298325 - DNA, 621 bp, Homo sapiens
cagcaggttaagctcttattaccagtgtaaaacatgccttgcgagtttcgtgtgtgatatagagacagtagttgcataaaaccatttaattcacagaaactaaatataggaatgttaatggctttggcttttatccactgaatgttcgaagatcttttattcatatacctgaaaatatagacctttgattaacattctatggagatgtgcctgagataccaggccatttgccacattgtttccagggtggactcaattttgaaagaaaactgtgcaaagacttaacattatttatcaataccctcaaacacaagaggatattgtttgtaccatttttatgtgccatttttattgtgagttcacatatatacctaatctaagaaagatttacattaccyacacgcctgcagaaactacttcattctaattaaatagaaaccaaataaataagtggaggcctgaaaaccattctttgcagaacctgctgagtctgcagcaaaatgtgaaggactagtacattagaaaaatgtatcattgtctcagccaaggagagagaagggttaatcatcattcctagaactctggagtggaacaaaagcttgcagtctgacaccaaaataa

SEQ ID NO: 298326 - DNA, 547 bp, Homo sapiens
acattgaaagatcaacagatgcatgttcaggaggaggagacattctcagattgtagttaacttggatcacaagaaggggtgggggcactggtgtcctggggcagcacacttcaggagctcaggcacagtccccttgggcatgcccccccagcatggctgcatgccctggagtgagtagatccttagtgtcatgagcaagggcttttcagtttcagaaatgagaaggtaggtcagagagagcttagccattttcgcatttctctctgtctctgtctctgtctctctctcacacacacacacagacacacacacacacaaacacacacacaccacattcacaaatctgcagttgctttgagtggggaaaacattttatttttatcatgtagacatggccaaaatgttctcaacccattaaaaacttggaagaagatgtagcccctgctacagaaatacctgttctwtttattcctcaatggagataactgcatacaagagtccttaaaatgatatgactgggattcaagtctctccttagaataattac

SEQ ID NO: 298327 - DNA, 345 bp, Homo sapiens
ttcatcatcccatagcatgggatttcttcaggagaaaataaacagcgagaggaatctcaattctactccacccccactccccatccccagctcccacccccacaaaatatataayatcttttcttccttagtctcctgtttgcctttttcttttcatttttcccagcctgtctattatggagtgatatactaggcatagaatcaccattcctttttcttctttacttgtgtaaatgtcagtggaaagtatgccaagttccagacacaatataatcataatactaccactgtgtttctggattaattaatcataatgaatgaaatttttcttgattctgtatgcca

SEQ ID NO: 298328 - DNA, 422 bp, Homo sapiens
ctagattctctcgattttaaagaatgaagaaggcaagcttcttaggttgttcatagtttggggatcaggaaccatggctttttcgtcttagcattttcccttacccataagagaaactcaataaatgtctgacagattaattacaatcctttccatttagttacaaggcctcttgcaccgccaatgatttattgaaccattttatcartcatccccatttgacttaattttacaaccttaatacatttattcatcataaaggcagctaatgtttggggaatctagaacaaaaactatctatctctgccagatacagaagggactggaaatcagacgtttgcagttacaaacaaatacacacctcttggtgtgcaaattcatttacacttggcaaatcattgcttcttgtttgttgactaaaa

SEQ ID NO: 298329 - DNA, 518 bp, Homo sapiens
  misc_feature (1)...(518): n = A,T,C or G
tgtataaaatcacacaaattgtataaacaagtctggcaaaacaaaactnaaaatccagacaggcagaaaggcaggcattaagcaccagcaaagttccaaaccttgaatataacaggagtccaggaaggacaaattaagaagagtatgactgagcttcactcttaagagtgactacgtatctatctaataacatcaagcctacaatgctctagaaagctaaagtgacagacggcatctaagacaaaaaatatgttcattaaagttaagttagtggagattaagcctcctgagcaagataaaattccagtttgcagaaatggggcctaaaaacaaggctgtttctgctgaaagaatggatrtactacgtgtggagtcaatgctccttaaagcacagagctccttccagcactcctgtctcaagtctacattgtctacattggtgtttgagattaggagagcctggtccaagtgagggggtcaagggactctgtaagaatgtgagaggagctggggagcca

SEQ ID NO: 298330 - DNA, 553 bp, Homo sapiens
gtaacagcatgagcagaattgtagtgggacatgctgaaggaaaattttcagtcctcatgcagctcactggggaggtaaaagtttgygaaaactttcctcatgtatgacctcctattaaactgaacatattccatctagctgcttaggaggatagatatttgtagcatacagttgattttctagcatacacctgtagtgtttcctccatgaaccaagattagtgctatggttgatagattgaagtgtaggctgataaataaatgctatctttaggaatctgctattatacctagatttctcagtgtaagaagggaataattaagactgatactttatttgaaaatgcattatatttctcgttacgaataaaccatagtaactaataaaaaaaaaaaaagcttacccatagtagaaagctgggaaaaaaattgctaagcaatgaagaacttgccttttctagttctagcattcagtagctgaaagcagatcattgccataaagaagtatttaccaattttaaaaggtcttggcccatcatagctagtgttagatt

SEQ ID NO: 298331 - DNA, 548 bp, Homo sapiens
tatgctgcaataacaaacaactctaaaatctcagtgctatcagaaacaaacaaacaaaagcacctgtcactggctgcctatgactctgaaccctattggcttccttctgggacccaaatgaaggaaagatccccatctgggacattacacagtcttatggaagagggraaagagagagggctgtgccacatggtgactcttaaactttgtgctcacaaatggcctgcatcattctcatccatgtttcagtggccagagtaacttaccaggccaagttgacatcaacctacatagggaggaaatcaatggactagtgatatatctgccacaccatttgtagacccagttatgacatcagagtaaaaatgtgatttatggtatattctaggtctatttttcaaagggttggctaatctatatctaaagttcatatgaaaatctcctttcagggttgactgaatgaagtgctattgagctggtacctggatacctttgttcagggaaagatttcttctggtgtagctgctttcctactagtgtctcaattg

SEQ ID NO: 298332 - DNA, 548 bp, Homo sapiens
tatgctgcaataacaaacaactctaaaatctcagtgctatcagaaacaaacaaacaaaagcacctgtcactggctgcctatgactctgaaccctattggcttccttctgggacccaaatgaaggaaagatccccatctgggacattacacagtcttatggaagaggggaaagagagagggctgtgccacatggtgactcttaaactttgtgctcacaaatggcctgcatcattctcatccatgtttcagtggccagagtaacttaccaggccaagttgacatcaacctacatagggaggaaatcaatggactagtgatatatctgccacaccatttgtagacccagttatgacatcagagtaaaaatgtgatttatggtatattctaggtctatttttcaaagggttggctaatctatatctaaagttcmtatgaaaatctcctttcagggttgactgaatgaagtgctattgagctggtacctggatacctttgttcagggaaagatttcttctggtgtagctgctttcctactagtgtctcaattg

SEQ ID NO: 298333 - DNA, 550 bp, Homo sapiens
gctttaactgattttgttcatttgccttgaaaaaaaaaatcatcttttggcttaaaccaagcatggaaaattttagccccaaaggaacattctggaagacagttgtataaacaaaagaaaaaaggtcttggattagaaaagcttttttcacatttactacaacaataccagctaatttagggtcacaaaataaatatagaggatattagtttgttctcagtgataataaaaatagctagcaatttatgtaatsataataataataaagtggctaaattttattttgtattatgtgccaatactgggcacattatatcatttaatcctcacatcaatcatatgaggtaagtaccattattatccctattttaccaaaaacaataccaaatgaaacaagaattggggttttgaaaggttaagaaatgcaaccagataacgaagttagtaaatggctaagttggtctaactgattctagaatctaaaaccaaacactgttccagtcgttctcaaatgctatctctggagcagcagcagcagtagctgggaact

SEQ ID NO: 298334 - DNA, 550 bp, Homo sapiens
gctttaactgattttgttcatttgccttgaaaaaaaaaatcatcttttggcttaaaccaagcatggaaaattttagccccaaaggaacattctggaagacagttgtataaacaaaagaaaaaaggtcttggattagaaaagcttttttcacatttactacaacaataccagctaatttagggtcacaaaataaatatagaggatattagtttgttctcagtgataataaaaatagctagcaatttatgtaatcataataataataaagtggctaaattttattttgtattatgtgccaatactgggcacattatatcatttaatcctcacatcaatcatatgaggtaagtaccattattatccctattttaccaaaaacaataccaaatgaaacaagaattggggttttgaaaggtkaagaaatgcaaccagataacgaagttagtaaatggctaagttggtctaactgattctagaatctaaaaccaaacactgttccagtcgttctcaaatgctatctctggagcagcagcagcagtagctgggaact

SEQ ID NO: 298335 - DNA, 553 bp, Homo sapiens
gaacaaagcctccaagaagtctgggattacgttatatgaccaaacctaagaataattggtgttcctgaggaagaagagaaatctraaagtttggaaaacatatttgggaaaagaattgaggaaaacttcgccagccttgcgagagacttagacatccaaagacaagaagcacaaagaacatctgggaaattcattgcaaaaagatcatcaccaagattcattgtcagcaggttatctaaagttaagatggaggcaagaatcttaagagctgtgagacaacagcaccaggtaacctgtaaaggaaaacctatcaggttaacagcagctttctcagcagaaaccctacaagccagaagggattggggccctatcttcatcctccttaaacacaacaattatcagccaagaattttgtatccagtgaaactcagcatcatcatatatgaaggaaaggtaaagtctttttcagacaaacaaatcttagagaattgaccactaacaagccactactacaagaactgctaaaaggagctctaaattttgcaacaaatcc

SEQ ID NO: 298336 - DNA, 553 bp, Homo sapiens
gaacaaagcctccaagaagtctgggattacgttatatgaccaaacctaagaataattggtgttcctgaggaagaagagaaatctgaaagtttggaaaacatatttgggaaaagaattgaggaaaacttcgccagccttgygagagacttagacatccaaagacaagaagcacaaagaacatctgggaaattcattgcaaaaagatcatcaccaagattcattgtcagcaggttatctaaagttaagatggaggcaagaatcttaagagctgtgagacaacagcaccaggtaacctgtaaaggaaaacctatcaggttaacagcagctttctcagcagaaaccctacaagccagaagggattggggccctatcttcatcctccttaaacacaacaattatcagccaagaattttgtatccagtgaaactcagcatcatcatatatgaaggaaaggtaaagtctttttcagacaaacaaatcttagagaattgaccactaacaagccactactacaagaactgctaaaaggagctctaaattttgcaacaaatcc

SEQ ID NO: 298337 - DNA, 553 bp, Homo sapiens
gaacaaagcctccaagaagtctgggattacgttatatgaccaaacctaagaataattggtgttcctgaggaagaagagaaatctgaaagtttggaaaacatatttgggaaaagaattgaggaaaacttcgccagccttgcgagagacttagacatccaaakacaagaagcacaaagaacatctgggaaattcattgcaaaaagatcatcaccaagattcattgtcagcaggttatctaaagttaagatggaggcaagaatcttaagagctgtgagacaacagcaccaggtaacctgtaaaggaaaacctatcaggttaacagcagctttctcagcagaaaccctacaagccagaagggattggggccctatcttcatcctccttaaacacaacaattatcagccaagaattttgtatccagtgaaactcagcatcatcatatatgaaggaaaggtaaagtctttttcagacaaacaaatcttagagaattgaccactaacaagccactactacaagaactgctaaaaggagctctaaattttgcaacaaatcc

SEQ ID NO: 298338 - DNA, 513 bp, Homo sapiens
gggaaattcattgcaaaaagatcatcaccaagattcattgtcagcaggttatctaaagttaagatggaggcaagaatcttaagagctgtgagacaacagcaccaggtaacctgtaaaggaaaacctatcaggttaacagcagctttctcagcagaaaccctacaagccagaagggattggggmcctatcttcatcctccttaaacacaacaattatcagccaagaattttgtatccagtgaaactcagcatcatcatatatgaaggaaaggtaaagtctttttcagacaaacaaatcttagagaattgaccactaacaagccactactacaagaactgctaaaaggagctctaaattttgcaacaaatcctggaaacacatcaaaacagaacctctttaaagcataaatcacacaggacctacaaaacaaaaatacaagttaaaaagtaaaaacaaaacaaaaaaacaacatacacaggcaaaaaatagcaaaatgaatggaatggtacctca

SEQ ID NO: 298339 - DNA, 513 bp, Homo sapiens
gggaaattcattgcaaaaagatcatcaccaagattcattgtcagcaggttatctaaagttaagatggaggcaagaatcttaagagctgtgagacaacagcaccaggtaacctgtaaaggaaaacctatcaggttaacagcagctttctcagcagaaaccctacaagccagaagggattggggccctatcttcatcctccttaaacacaacaattatcagccaagaattttgtatccagtgaaactcagcatcatcatatatgaaggaaaggtaaagtctttttcagacaaacaaatcttagagaattgaccactaacaagccactactacaagaactgctaaaaggagctctaaattttgcaacaaatcctggaaacacatcaaaacagaacctctttaaagcataaatcacacaggacctacaraacaaaaatacaagttaaaaagtaaaaacaaaacaaaaaaacaacatacacaggcaaaaaatagcaaaatgaatggaatggtacctca

SEQ ID NO: 298340 - DNA, 497 bp, Homo sapiens
agtatttatctcagaaaaacaaaaatgtatgttcactcaaaagcctgtacagtattcaaaatcgcccaggggaaaaaaaaaaaaaaaacctgttcttgtaacaggtgaatggataaacaaactatggtacagccatataattgaatactactcattgataaaaaggaacaaactattgacacatcaacttagatgaaacttagaggcactgtatcaagggaaagaagccaggctcaaaatgttacatactatatgacttcatttataagacattcttgaaaatacaaaacttgtcaaacaaagtgtttgacaagagttaggattggaagaagggatgtggccacaaagtggcagcccgagttttgggaatttgggaaactgttttttattttgactgtgggaatggctacatacatctatatacacattaatatctgtagacctatacaccaaaaagagtcaactttaccatacaataatttktttaaaattgttta

SEQ ID NO: 298341 - DNA, 535 bp, Homo sapiens
gaaacacagtaaagttctgattaattgaattagaaaaatgcattatgttagttgcataactccttctgaatgcacatccacagttgtggatattaaccaatggcgataagaccctcttacayagctgtggcattcagaaggagggctacagtttgggacaaagagaagctataaaaacagtttttcaaaatgaagaagtgcttcagttccagaggaaatgagatatgaggaagtgttcccaagcacaaaagagtaaagtagccatcctaactactccaagttagatacaaagcaagaacttggtcagttgatcaagacagaaatcattaacttaaactgaagaaaacagggcaaagccagacttgaagcaaacttgattaaatgtttcattttcccatttttctctctctttttctttcagtatctttctcatctttccctttatttttttcttaccttcaatatgaaagtgacgtatcttaaaagtcaaggttacacatggaaaaactgtaacatcatttttaaaaaatggcaa

SEQ ID NO: 298342 - DNA, 453 bp, Homo sapiens
ataaagaacatctacatgacttacaggacactattaagcaaaggcatagaaaggcagaggaagtttgtttaacaaaataatagctgaaaagttcctgactcttgggagagatacagacatccagataccagaaacacaaaggatcccatacagattcaacccaaagaggtcctctccaaggcacattataatcaaactgtcaaaaatcaaagacaaagggggaattacaaaagcagcatgaaaaatctattaaatcacatataaaggaatccatgttagactatcagcagatttctcagcagaaaccttgcaggctacragagaatggaaggatatattcaaagtgctgaaaaaaaaaaacaaaactgccagccaaaaatactattgtcaacaaagcaatccttcaaaagggaagaataaataaagcctttcctagacaagcaaaagctgaga

SEQ ID NO: 298343 - DNA, 582 bp, Homo sapiens
tggtggctactgaattaaaaaaaatttaagctgttttatataaagttattatgttatcttttaatatgttactttaaaaaaagccttgctccatttctgaatgccagattactacatagagttgatcttttgctcatgtgaaggtataggaaaaacaatgtaggttttggaattagatagatccagttttgaatttaacctcctttgctgtaacctattgactgaccttaagcamgtcagtcacttggcacttggcctttttaaaagtataatatgaagtaaataacttctttagctctaaatagttgttgacaatatgctatggtttcataatttatcccctctgaaactcatgttgaaacttaatcctcgatgtggcagtattgagaggtggggcctttaagaggtgatttggtcatgagggctctgccctcatgaatgaattaatccattcatgaattaatagaaatgaattgatgggttactggattaatagagtgggactggtggctttataagaaaagaaagagagccctgagttagcagcttagcatgctgagtcccctggccatgtgatgccct

SEQ ID NO: 298344 - DNA, 570 bp, Homo sapiens
ttgctgtaacctattgactgaccttaagcaagtcagtcacttggcacttggcctttttaaaagtataatatgaagtaaataacttctttagctctaaatagttgttgacaatatgctatggtttcataatttatcccctctgaaactcatgttgaaacttaatcctcgatgtggcagtattgagaggtggggcctttaagaggtgatttggtcatgaggkctctgccctcatgaatgaattaatccattcatgaattaatagaaatgaattgatgggttactggattaatagagtgggactggtggctttataagaaaagaaagagagccctgagttagcagcttagcatgctgagtcccctggccatgtgatgccctgcaccacttcaaaactatgaagaggatccccatcagcaagaaggctcttaccagatgtggcccctcaaccctgcatatctcagcttctataaatataagaaataaattccttttctttataagttactcagttccagctattctattataagcaaccaaaaatggactaatacaactattaaatgaggttct

SEQ ID NO: 298345 - DNA, 612 bp, Homo sapiens
agatttgttcatatcttaaggctattccaaatcatgccacagtagaaagagatttcaaaaggattcaacttgatttgagtaacggcagcctctcctggacaaggtgactaatttgaatttgataactctcatttagatgaataaattctattaatctataatcttaagagaatgatagatatattaatattaatcagrcatagtttaatagatactgatgtatttatacatcttatgtatttaatattatatattatacagcacttatcttgaattatttcattcaccagacatttattgaatacctgctatgggtctgagcaatgtatgagggacttaaaattcatggaaatgtaattaaaatataaaagtaaaaaatataaactttatttctcaacataagctctatcaagttcaaggcactttagtaaacaatgatcccagccatttagtacattcctaaagaactgagggtcctgggaagtttaccacttccacctcttggtaaccattgctttgattgtgctttgtccttaggatcatgctggtaaagccatgttccatctattattaaaattcttcaaagaaattcttcaggatcttaatctcact

SEQ ID NO: 298346 - DNA, 535 bp, Homo sapiens
aattaccaagtcacataatcagatgtgtttgcgatatcactttttctttagaggactgtgaggttatacatggaattaaatcacagttcacttttatcactatactcagaaatttgtaactcaagaattyttaaatcttaataaagatgcattcaagtggaatggagcaacttgcaacagatgaatgccccacctagaaaaactagataacaaacttgagcagtggctcacgcctgtaatcccagcattttgggaggccgaggcgggtggatcatttgagatcaggagttcaagaccagcctggccaacatggcaaaaccccatctctactaaaaatacaaaaattagccgggtatagtggcgcatgcttgtagtcccagctacttgagaggctgaggcaggagaacggcttgaacctgggaggcgggggttgcagtgagtcgaggttgtgccattgcactccggcctgagcaacagagtgagattccatctcaaaacaacaacaacaacagctagataactgaaagctcagaaa

SEQ ID NO: 298347 - DNA, 535 bp, Homo sapiens
aattaccaagtcacataatcagatgtgtttgcgatatcactttttctttagaggactgtgaggttatacatggaattaaatcacagttcacttttatcactatactcagaaatttgtaactcaagaatttttaaatcttaataaagatgcattcaagtggaatggagcaacttgcaacagatgaatgccccacctagaaaaactagataacaaacttgagcagtggctcacrcctgtaatcccagcattttgggaggccgaggcgggtggatcatttgagatcaggagttcaagaccagcctggccaacatggcaaaaccccatctctactaaaaatacaaaaattagccgggtatagtggcgcatgcttgtagtcccagctacttgagaggctgaggcaggagaacggcttgaacctgggaggcgggggttgcagtgagtcgaggttgtgccattgcactccggcctgagcaacagagtgagattccatctcaaaacaacaacaacaacagctagataactgaaagctcagaaa

SEQ ID NO: 298348 - DNA, 602 bp, Homo sapiens
taaacattttacataaggaatacaagaataggcatttcttaaactgtttttgttcatttctacttcagaaaattctactctcccaaaatggtgtgaacttgcttttgaaagataggcttttatgaagaaacacctaattattgtattattcttaagatagtatattaataatggttattagctactaatactactgcaggtagaaaattattatattttaacactcaaatacaaagaaacatattaattaaaattcmccattctggttaagggggatgcactgatatttagtaattataggaccataatatcatttttctttaaataaacaaaatattttgcataatcataatttgccatatcccaaagggtttgaaaacatattttatacaaaataaaatattaaaagatatcacaatagttaagttgaaattaaacataaaatcagtttgtaaataatatcaaatgctagtattatgagaacttataggatattattatgaaataatttgactccagatttgtttctatatatgaattatatgctcctacacttacaataagccagtattctctcatcttaaatccattgttgactatta

SEQ ID NO: 298349 - DNA, 608 bp, Homo sapiens
atttttatgttagaagtggaacaacgtactttatgagttataaagacaagtgcaaagtatatttctagctgaaaaataagaaaagactgaaaacaaagggatatctgagctaagtaacagaggaggtataaatgtattgatgttgagatggagacgcaagtacacttgaactctacagattgaagactgtctcaacaagatgtattatgtcccaaaaatgatatgtgcaagtcttaagccctggtacctgtgaatgtgaccttatttggaaaaaaggagttttgcaaatgtaaccaagttaagatgaagttataccagattaacatgagctctaaatcaaatgactggtgtgctaataaggagacagagattcggagayacacagacacacatacagagaagaaggccaggttacaacagaagtggagattggagtaatgcagccacaagctaacaaacaccaaggattgatggcaaccaccaaaagcaaagaagaggcaaggaaagattctttcctggagccttcagagggagcatggccctgctgacactttgattttggacttttagccttcagaattacgagacaagcaatttctgttgtttta

SEQ ID NO: 298350 - DNA, 608 bp, Homo sapiens
atttttatgttagaagtggaacaacgtactttatgagttataaagacaagtgcaaagtatatttctagctgaaaaataagaaaagactgaaaacaaagggatatctgagctaagtaacagaggaggtataaatgtattgatgttgagatggagacgcaagtacacttgaactctacagattgaagactgtctcaacaagatgtattatgtcccaaaaatgatatgtgcaagtcttaagccctggtacctgtgaatgtgaccttatttggaaaaaaggagttttgcaaatgtaaccaagttaagatgaagttataccagattaacatgagctctaaatcaaatgactggtgtgctaataaggagacagagattcggagacacacagacacacatacagagaagaaggccaggttacaacagaagtggagattggagtaatgcagccacaagctaacaaacaccaaggattgatggcaaccaccaaaagcaaagaagaggcaaggaaagattctttcctggagccttcagagggagcatggccctgctgacactttgattttggacttttagccttcagaattaygagacaagcaatttctgttgtttta

SEQ ID NO: 298351 - DNA, 598 bp, Homo sapiens
gattgcaatttccaagaactctgatggtgacataattaataaaatagataaccccagactttaaattatgtcttcttagatttattatacktcagatttggaagatctaagacatacctgtgatttttaagaatattaatacaccaagattatgtttgaaaataaacgagttaccagatatccccttttttgcataattgcaagtgatacgtctgcctctgagcatcatgtttgattgatattggtagtctgatgatacaattaaattaaaaatgttattttataagagtggattggtgatatcttggcattatattcaatagtattagatatcaacaggtttcttggttctttgtacaggtgcactaattaagaagtcacatagtctctgattttttcatttttgaggaatataaaacaaaaaaataccatgatgcttgttccatgcttcttaaaatgtgatttagacctatctagatgtgtatagtagtgtgctgggaataccagtgaactgcactagataaacagtgcatatattcctataggctccactttaggaagacttttaacagggaattcaatgtataatatcaaaaca

SEQ ID NO: 298352 - DNA, 598 bp, Homo sapiens
gattgcaatttccaagaactctgatggtgacataattaataaaatagataaccccagactttaaattatgtcttcttagatttattatacgtcagatttggaagatctaagacatacctgtgatttttaagaatattaatacaccaagattatgtttgaaaataaacgagttaccagatatccccttttttgcataattgcaagtgatacgtctgcctctgagcatcatgtttgattgatattggtagtctgatgatacaattaaattaaaaatgttattttataagagtggattggtgatatcttggcaytatattcaatagtattagatatcaacaggtttcttggttctttgtacaggtgcactaattaagaagtcacatagtctctgattttttcatttttgaggaatataaaacaaaaaaataccatgatgcttgttccatgcttcttaaaatgtgatttagacctatctagatgtgtatagtagtgtgctgggaataccagtgaactgcactagataaacagtgcatatattcctataggctccactttaggaagacttttaacagggaattcaatgtataatatcaaaaca

SEQ ID NO: 298353 - DNA, 598 bp, Homo sapiens
gattgcaatttccaagaactctgatggtgacataattaataaaatagataaccccagactttaaattatgtcttcttagatttattatacgtcagatttggaagatctaagacatacctgtgatttttaagaatattaatacaccaagattatgtttgaaaataaacgagttaccagatatccccttttttgcataattgcaagtgatacgtctgcctctgagcatcatgtttgattgatattggtagtctgatgatacaattaaattaaaaatgttattttataagagtggattggtgatatcttggcattatattcaatagtattagatatcaacaggtttcttggttctttgtacaggtgcactaattaaraagtcacatagtctctgattttttcatttttgaggaatataaaacaaaaaaataccatgatgcttgttccatgcttcttaaaatgtgatttagacctatctagatgtgtatagtagtgtgctgggaataccagtgaactgcactagataaacagtgcatatattcctataggctccactttaggaagacttttaacagggaattcaatgtataatatcaaaaca

SEQ ID NO: 298354 - DNA, 590 bp, Homo sapiens
tttcaccatatacaaaaactaactcaagatggacygaagacttcaatgtaaaaccctaaaactataaaaatcctagaagaaaacctaggaaacatcattctggacattggccttgggaaataatttatgactaagtcctcaaaagcaattgcaacaaagacaaaaattgacaagccagacctagttaaactaaagaacttctgcacagcaaaataaactatcaatggagtaaacagacaacccacagaatggaaggaaatattcacaaattatgcatctgacaaaggcctaatagacacaatctgtaggtaatttaaacaattcaacaagcaaaaaacataacctcattgaaaagtgggcaataaacatgaaaagacatttgtaaaaagaagacatacaagtggccaataaacatatgaaaaatgctcaacaccgttaatcatgagagaaatgcaaatcaaaaccacaataagatatcatctcacgccagtcagaatggctattatttaaaaaaatcaaaaaacagtagatggtagcgaggctgcagagaaaacgtaatactttatacattgctggtgttcgtgtaaatt

SEQ ID NO: 298355 - DNA, 517 bp, Homo sapiens
accaaaaagatgcatgcgcttttatgtttatctcagcattactcacaataacaaagacatggattcaacctaggtgcctgtcaatggtggactgcatcaagagaatgtggtccatataccccacggaatactacacagccataaaaagagcaaaaccaygtcctttgcagcaacatggatgcagctggagtacatgatcttaagagaattaacacgggaacagaaaccaaataccacatgttctcatttacaagtgggaactacatattgggtacttgtggatacaaagatggcaacaataaacactggagactactagatgaggaagggaaggagggcagctcactacctggatgatgtgatcaatcaagtcccaaacttcaacatcacccaatatacccatgtaacaaacctgcacatgtactcccgaatctaaaataaaagttgaaaaaaaaaaaaaaaagaatagcacctgaaactaaagctgaatttaaccatgaatctataaaccttggca

SEQ ID NO: 298356 - DNA, 517 bp, Homo sapiens
accaaaaagatgcatgcgcttttatgtttatctcagcattactcacaataacaaagacatggattcaacctaggtgcctgtcaatggtggactgcatcaagagaatgtggtccatataccccacggaatactacacagccataaaaagagcaaaaccacgtcctttgcagcaacatggatgcagctggagtacatgatcttaagagaattaacacgggaacagaaaccaaataccacatgttytcatttacaagtgggaactacatattgggtacttgtggatacaaagatggcaacaataaacactggagactactagatgaggaagggaaggagggcagctcactacctggatgatgtgatcaatcaagtcccaaacttcaacatcacccaatatacccatgtaacaaacctgcacatgtactcccgaatctaaaataaaagttgaaaaaaaaaaaaaaaagaatagcacctgaaactaaagctgaatttaaccatgaatctataaaccttggca

SEQ ID NO: 298357 - DNA, 517 bp, Homo sapiens
accaaaaagatgcatgcgcttttatgtttatctcagcattactcacaataacaaagacatggattcaacctaggtgcctgtcaatggtggactgcatcaagagaatgtggtccatataccccacggaatactacacagccataaaaagagcaaaaccacgtcctttgcagcaacatggatgcagctggagtacatgatcttaagagaattaacacgggaacagaaaccaaataccacatgttctcatttayaagtgggaactacatattgggtacttgtggatacaaagatggcaacaataaacactggagactactagatgaggaagggaaggagggcagctcactacctggatgatgtgatcaatcaagtcccaaacttcaacatcacccaatatacccatgtaacaaacctgcacatgtactcccgaatctaaaataaaagttgaaaaaaaaaaaaaaaagaatagcacctgaaactaaagctgaatttaaccatgaatctataaaccttggca

SEQ ID NO: 298358 - DNA, 517 bp, Homo sapiens
accaaaaagatgcatgcgcttttatgtttatctcagcattactcacaataacaaagacatggattcaacctaggtgcctgtcaatggtggactgcatcaagagaatgtggtccatataccccacggaatactacacagccataaaaagagcaaaaccacgtcctttgcagcaacatggatgcagctggagtacatgatcttaagagaattaacacgggaacagaaaccaaataccacatgttctcatttacaagtgggaactacatattgggtacttgtggatacaaagatggcaacaataaacactggagactactagatgaggaagggaaggagggcagctcactacctggatgatgtgatcaatcaagtcccaaacttcaacatcacccaatatacccatgtaacaaacctgcacatgtactcccgaatytaaaataaaagttgaaaaaaaaaaaaaaaagaatagcacctgaaactaaagctgaatttaaccatgaatctataaaccttggca

SEQ ID NO: 298359 - DNA, 546 bp, Homo sapiens
gagactttgtctcaaaaaaaaaaaaaaaaagattaaacttacaggatatttttacacctaaaactatcaatgcttttccagagggtctctagaaaatcacaacaatttgttcttttacsttttaaaaggagatgacagaagtatctaattaggtttgtttgatgagttgcatgataagaactgtcaaatcagaagagatacttagcattctttaggttacattactatttgttaaatgttattaatgtaagtatttcagaaacgatatgctttatgggaagtctttgggtactttttaaaactcttgctttcaataatatgtatcaacctcaggaaaacactgaaaaaactcttatgaaatagtttttttttttgttttcctatacttgtcagagtttaagtagtgctttatctaatattagttaacaaaagtaaaatgttatgagtcatagtttcagtttacttaaagtgttcttaggccacagccttaattttttaagttgaatctagcatcttctaagtcagtggttctcaaacagtgatgaa

SEQ ID NO: 298360 - DNA, 554 bp, Homo sapiens
tccagctaccaccttatttttcttctctctccacagccaaacttatttaaaatgatatctctactcactgtcttcatttcctcatttccattcattgcactgcaaatctgactcacctccatctctgacatggctcttgtcaaggtcacatttttactcataattctaatggaaacatgtcctttggtccttattttatttgttctctctgcaacacttaatactattrctttctctttgaaacatttactttccctagtttggcaaaaacatattgtgttgtcattcctcctacctttctaactctttgatcactctcatttgacagtttctcttacccaagctttaaagtcagctatttctaaatttctgcagtagattcttttctcttgtcttctatttacttttttgtttgttttctcttctcatataacatattctgtctaggatatatcatccatattaattagttgtttatagttaatctcatttttatcccctagctacagtcttaagtttctaacaatttctatgtaccagatataactttaacc

SEQ ID NO: 298361 - DNA, 554 bp, Homo sapiens
tccagctaccaccttatttttcttctctctccacagccaaacttatttaaaatgatatctctactcactgtcttcatttcctcatttccattcattgcactgcaaatctgactcacctccatctctgacatggctcttgtcaaggtcacatttttactcataattctaatggaaacatgtcctttggtccttattttatttgttctctctgcaacacttaatactattgctttctctttgaaacatttactttccctagtttggcaaaaacatattgtgttgtcattcctcctacctttctaactctttgatcactctcatttgacagtttctcttacccaagctttaaagtcagytatttctaaatttctgcagtagattcttttctcttgtcttctatttacttttttgtttgttttctcttctcatataacatattctgtctaggatatatcatccatattaattagttgtttatagttaatctcatttttatcccctagctacagtcttaagtttctaacaatttctatgtaccagatataactttaacc

SEQ ID NO: 298362 - DNA, 588 bp, Homo sapiens
cctagtttggcaaaaacatattgtgttgtcattcctcctacctttctaactctttgatcactctcatttgacagtttctcttacccaagctttaaagtcagctatttctaaatttctgcagtagattcttttctcttgtcttctatttacttttttgtttgttttctcttctcatataacatattctgtctaggatatatcatccatattaattagttgtttatagttaatctcatttttatcccctagctacagtcttaagtttctaacaatttctatgtaccagatataactttaaccgagttactgaagctttmtcatcctgagttttcttatctgtacaattaaaataatgacggtatatttgctatagattactgtaaatcatcagtgagataatttaaatgttttagtacagcagctagcagaaagcaagtgtttgatgaaatactagttatttgtaatctctagtgaatttaaaataatttagacaaaacctcacaaaatgaagtaattcataggaagaaagttcttcttaaatacaaaaattaataacaccaaaacaacagattgctttgtacacagaag

SEQ ID NO: 298363 - DNA, 443 bp, Homo sapiens
gttagtttaccttccaggatttgcaggtggtattttgccacaacatatttggagtctgaatctttccaatttctgaaacaaatgttcttgacacccactgacttcctattcagccatgatatmttttagatttgttgttgtggttagagttcctacttacttctaacagcaacttgtgtattagttacagtaacataagctgcttaagagataaatgccaaaatctcagcagcttaacatagtgacatatacgattaacctcatttgtataatattttcctcaatttcttaaaaactctaagtcaggaaacctatatttgttctagtattgtaagtagttagcaaccagctatataacttggtcgaagtcatttccctttttctcgtcttaaatttcatgtggaataaatgctctagaagatcccttcaactctataatatgg

SEQ ID NO: 298364 - DNA, 443 bp, Homo sapiens
gttagtttaccttccaggatttgcaggtggtattttgccacaacatatttggagtctgaatctttccaatttctgaaacaaatgttcttgacacccactgacttcctattcagccatgatatattttagatttgttgttgtggttagagttcctacttacttctaayagcaacttgtgtattagttacagtaacataagctgcttaagagataaatgccaaaatctcagcagcttaacatagtgacatatacgattaacctcatttgtataatattttcctcaatttcttaaaaactctaagtcaggaaacctatatttgttctagtattgtaagtagttagcaaccagctatataacttggtcgaagtcatttccctttttctcgtcttaaatttcatgtggaataaatgctctagaagatcccttcaactctataatatgg

SEQ ID NO: 298365 - DNA, 619 bp, Homo sapiens
agccaattctgctaataaatcccctctcatctgtctatctatgtatttatctgtgttttattgtrtctctctctctggagatccctaactaacacatctgttcattttattgatgactaaagggatattgtgaaatctttatgtaatacagccctccaaggatcaaagcaagagatcactttagagctgggattcctttattatatttactattcaaatttctctgttgaaatgaaagataagctttctttctgctgaattctttgtattaaaatgttacagtgagatttcattgtgttttgccatccatttttcagatttttcaaagtacagagagtagaatgttcttattttttttaagttatgttttggctaatttcttttaacttgggtatacaagttaatcgtattcagtttggtaaaacaacaatttatagtttatttatttaaagtttcaaatctgaatcacatacttcatagcaggaaaatatatataaaagggaacaaagcttacaaacaataaaaagtatcacagaacaataatttggtaaatatccaatcactcaaattgactatggatctcaatatgcagtttttgagttctaattggatttgataa

SEQ ID NO: 298366 - DNA, 619 bp, Homo sapiens
agccaattctgctaataaatcccctctcatctgtctatctatgtatttatctgtgttttattgtatctctctctctggagatccctaactaacacatctgttcattttattgatgactaaagggatattgtgaaatctttatgtaatacagccctccaaggatcaaagcaagagatcactttagagctgggattcctttattatatttactattcaaatttctctgttgaaatgaaagataagctttctttctgctgaattctttgtattaaaatgttacagtgagatttcattgtgttttgccatccatttttcagatttttcaaagtacagagagtagaatgttcttattttttttaagttatgttttggctaatttcttttaacttgggtatacaagttaatcgtattcagtttggtaaaacaayaatttatagtttatttatttaaagtttcaaatctgaatcacatacttcatagcaggaaaatatatataaaagggaacaaagcttacaaacaataaaaagtatcacagaacaataatttggtaaatatccaatcactcaaattgactatggatctcaatatgcagtttttgagttctaattggatttgataa

SEQ ID NO: 298367 - DNA, 608 bp, Homo sapiens
atctgcattgattggatagcattgaaaggggatttattattatttacttgttatctacccagatatatttttgtgcatttgttttagagaaaggcagcctccaaagcagtgtaaggtaktacagaattggcgacaaggcaaaagagataatgagaaaagttccaggatttaaacatcagaaatattattacatttatctatttgcatgcctatttgaatttgactaaaaataagatggaatcagaagttctaggattcacaaactttataatatatgtttatcatagacaggacatattcaatagatgactgctatgttagatcctttatttataaaatagtacattattcacaggagtgaatcagattcagaaccttggtaactgcctgggttacagagtgagaccctgtctcaaaaaaaagtatagataacagatattttaataatgtattagaaatgaaattatgcacataaacacttcgctgtgcattgattatttttaccatccttttagagcataagaagcagataacttgtcaagatgttctctagaatagagaaaatcgagtttatttccttctagaaaagtaaatgtccattgtgatat

SEQ ID NO: 298368 - DNA, 469 bp, Homo sapiens
gaactaacaggatatatatatatatatatatatatatatatatatatatatatataaaggggaatttattgtatattcatttacacaatcacaagttcccacaataggctgtctgcaagcttgaggagcaaggagagccagttcaagtctcaaaactgaagaacgtggagtccagtgtttgaggacaggaagcatccagcatgggagaaagatgtaggctgggaggccaggccagtctcaccttttcactgtcttcttcctgcttcatattcactggcagctgattagactgtgcccaccaggttaagggtgggtctgccttccccarcccactgactcaaatgttaatctcctttggcaacacccacacagacacacccaggatcaatactttgcattgttcaatccaatcaagttgacagtattaaccatcacagttggtgtattggatcttattgttttgctgaaa

SEQ ID NO: 298369 - DNA, 566 bp, Homo sapiens
tgaaagtttaaagtggtttcaggccggatgtgttggctcatgtctgtaatcccagcgttttggggggccgaggtaggtggatcacttgagcccaggagtttgaaccagcttgggcgaaatggtcagacccctatctcaacaaaaagtacaaaagttagctgagtgtgcaggtgcacgcctgtagtcccagctactctgtaggctgaggtcggaggatcacttgagcatgggatatggaggttgcagtgagctgagatcacaccattgcgctcgagcctgggtgacagagtaagatcgcgtctcaaaaaagcaaaacaaaacaaaacaaaaamggtgtttcagttgtattgtatgcattgtaagttacccaattttatgactttttaaaattgcttatcaccataaaatgagtttcatattgttaaacattactcataatagatataaaagttttatcaacaaaaaggaaaaaatttctaagatattttgatttaaacactgcttactttaaaatgtatgcagcctcagataaaacaggaatgtttctgagatgttagttaagtgtt

SEQ ID NO: 298370 - DNA, 491 bp, Homo sapiens
agtcaactgctcaaagggaaaataggaggggggcaaaattttacatgtttgattttatttccttctctggctatttcaattttatccctgactttttggggtgcagggggctctcttaagctgactttgcaaccagtcactgtaagcgtttaaaagcaaatgacaaatgacagccaaccaatrattcaggacctgcatctctccccaagcccacactctgacctgctaaaactcattatatgctcctggtttcaaattcttaattccacatttcaacttcataccttccttcaaacttcactcacgttgctctccattctgctaatagactcttagcattttggatactggtgattctccactgtgtttggccttaactactgtggatagcatttgcatttcctctacttgaaacatttttcttactcccatcttcttcttcttcttttttttttttttttttttgagacagagtctcactctgttgccca

SEQ ID NO: 298371 - DNA, 491 bp, Homo sapiens
agtcaactgctcaaagggaaaataggaggggggcaaaattttacatgtttgattttatttccttctctggctatttcaattttatccctgactttttggggtgcagggggctctcttaagctgactttgcaaccagtcactgtaagcgtttaaaagcaaatgacaaatgacagccaaccaatgattcaggacctgcatctctccccaagcccacactctgacctgctaaaactcattatatgctcctggtttcaaattcttaattccacatttcaacttcataccttccttcaaacttcactcacgttgctctccattctgctaatagactcttagcattttggatactggtgattctccactgtgtttggccttaactactgtggatagcatttgcatttcctctrcttgaaacatttttcttactcccatcttcttcttcttcttttttttttttttttttttgagacagagtctcactctgttgccca

SEQ ID NO: 298372 - DNA, 509 bp, Homo sapiens
ggattacaggtatgagccacaatgctgggccaattctttcaagacatatttacaaatatgtgtgtttttacatttattaaacacagtatctatacttgtttcttgaataaatttaaaacaaaatctgtactcrtgaacatttttctcatcaaattctatcgtactaaaagtaaagatggcctctcattgatactgcagagatttttttcgagggagtggataggtgaagacagatgatataatttgaagatttttatgttacaaaagtcatccacagagcaaagataagaacttcagtaaaataaaatcaaaaataaaatctttcttgagatccaaagctaagaaaatatcacttgtctaaaatatttaagaaagcagtatccacaggtggtatttaataatgttttaatatcacaatttataataaatttaaatgagaattgctgcatgcctttgtccactttgtattactataacagaatacctgagactgagtaatttataaacaa

SEQ ID NO: 298373 - DNA, 536 bp, Homo sapiens
aagcctaaagctttggagctcagagtttagtaaagaccattctcccactaaaatgttgaaataggattgagcagaattattcacaattcctgtcccagtttgtagcttgtacatctatttcattgtatttcgtgcatagacaccagttatgaggcagtacactgactggttaaaagtgtaggtatgctctggaggcaaacaaatttaaatttaaatgccagttttgttgtttgctatctggctagccttgggtggggatgaggtgcttactttatcaaactctacatttctttctctctaacrtaatcataataacaggattgacttgttatgttgttttgggggaaatgtaactaaagagcctagaaccatgactgatactgatctacgaggttctatctccttaattaagcataaatatgtcaataaagtgtgaatgtgcatttctatggagagatatgcaagatttatcttaaggatatgactatgtataaaatacatacacatatttctctcttatatgtgttagttaaaaa

SEQ ID NO: 298374 - DNA, 625 bp, Homo sapiens
gtgtggtggttcatgcctgtaatcccagcactttgggaggctgagacggcgggatcacctgaggtcaggagtttgagatcatcctggccaacatggtgaaaccctgtctctactaaaaatacaaaacttagccaggcgtggtggtgcacgccaatagtcccagctactagggaggctgaggcaggagaattgctggaacccaggaggcagaggttgcagtgagcygagatcgagccactgcaccctagcctaggcaacagagcaagactccatctcaaaaaaaatgatggggagggggttgatataggaaattaagaatgacccagacaatcctagaaaaggtaaaaacagaaaaaagatcaatagctatcacatcaaatagttacatggagagtaggaataactgaagaatttcaactttatagattagtcacaagtcccctaaaaaagacttgattgcagagaattgatccattgtgtcctgggagatatggcttctcagtgaccctaatgtaacagagcagctaaccaaaatctatgttcttttcttcctcctggacattcaggaagactgaattttcctgtcccactcacagtttgaggtggccttgcaactgaatactca

SEQ ID NO: 298375 - DNA, 614 bp, Homo sapiens
caacatgccaacctatttaccaagtgcctattggtaaatgtgcaagaaatgaacttccatagcataccttgtttcactgcactttgctgtattgtgctttacagatgttgcatttttataaattgaaggttagtggcagctctgcatcagtccagtctgtcggcatcatatttctaaaagcctgtactcatttcatgtccctgtgtcacattttgataattcccacaatatttcaaactttgtcaatattatatctgtgatggtgatgtgttgcaattgttttggggagccataaacagtgcccagacaaaacggtgaacttaatacaaattttatgtattcagactaatccactgacaggccattttcccatctctctttctctccttgggcctacctattccctgagacacaataatattgmaatcatgttaattaataactctacaatggcttctaagtgttcaagtgaaaggaaaaatcacatgtctctcactttaaatcaaaagctagaataattaaggtcagtgagaaagatatgtcaaaagctgagataggccaaaaggtaggcctcttatgccaaacagccaagttgtgaatgcaaaggaaaaatt

SEQ ID NO: 298376 - DNA, 556 bp, Homo sapiens
tctctgttcactgaccatatgatttcatatctagaaaaccctaaagattcctccaaaagactcctagacctgataaatggcttcagtaaagtttcaggatacaaaactaacatacaaaaatcagtagcacttcttaatactaataatgttygagctgagaatcaaatcaagaatgcaatcccacttacaagagccacacacaaaataaatacataaataaaacacctaggagtacatctaaccaagaaggtgaaagatatctacaaggataactacaaaacactgatgaaataagttatagatgacacaaacaaatggaaaaatattccatgctcatggattggagaaatcaattactaacatgtccatactgctccaagcaatctgcagattcagtgcaattcctttcaaattaccaatgtcatttttcacagaagtagaaaaaaattctaaaactcacatggaaccaaaaaataccctgaatagccagagaagcctaagcaaaaaagaacaaagccagaggcatcacatgacccaactccaaactatactacaa

SEQ ID NO: 298377 - DNA, 556 bp, Homo sapiens
tctctgttcactgaccatatgatttcatatctagaaaaccctaaagattcctccaaaagactcctagacctgataaatggcttcagtaaagtttcaggatacaaaactaacatacaaaaatcagtagcacttcttaatactaataatgttcgagctgagaatcaaatcaagaatgcaatcccacttacaagagccacacacaaaataaatacataaataaaacacctaggagtacatctaaccaagaaggtgaaagatatctacaaggakaactacaaaacactgatgaaataagttatagatgacacaaacaaatggaaaaatattccatgctcatggattggagaaatcaattactaacatgtccatactgctccaagcaatctgcagattcagtgcaattcctttcaaattaccaatgtcatttttcacagaagtagaaaaaaattctaaaactcacatggaaccaaaaaataccctgaatagccagagaagcctaagcaaaaaagaacaaagccagaggcatcacatgacccaactccaaactatactacaa

SEQ ID NO: 298378 - DNA, 581 bp, Homo sapiens
ataataataaaataaaaaaattaaatatttaccatgagttcagtgagaagaagcaatttacaaaattagccatgtttctagtgtctttgagtatgtatctctaagactacaaacgtgctggaattttccataacataaaaataaacaaaaacaaaaaacaatacttctcttagccatattatttcatcaggaatagtcagcctagtttcatctacaatgaaaccgaagttttactagccatcatacccaacactgaattctagattcagatatgtacctccctgcttcgtatccctcccttactggaaaaaaatacataggcatctctatttggagagctctaatcttctatcaattaaggtaatctttttcatctagataaatgacacagccattcaccaaattgctcaaggaamaaaccaggaaattttccatgactcttcaggtacttcccctcatccttttcatcctgttttcaacaagtgaagtctatgtatgaaaaacacaaccaaaatccatcaacctctctcaacttgttgagctaccactgttttctagactaatggaatagtttttttttt

SEQ ID NO: 298379 - DNA, 561 bp, Homo sapiens
agtgctgagcatgatttggatcctctgctgtctcagggcctgcctggtgaaaagctattctctgtactctgtgttgatgctttaatcttagagctgaggagtgaatatttatgaagaatttactttaggtagggcttttgcttactttattattatatcatcaaatttaatcctcacttaatgttattgatgagaaaaacagagattaggtaaattgtaccaaatcatacagctrttgtttcagagtctaaattttaacctctgataagactgaagtcttaaccgatattctgtagagcccaagagagggaacctttaagaatattacctcagggaagctgacaggagaaagttcattatatatatatatatatatatatatatatatatatgtatatatatgtatatatatggatttcaagttctaaagttggccatttaaaagacttattcacagtattccccatatatatataaatatatatatatttaacttttattttaagttcagggcctgctatattttttcatccatctttggtgatcatttagaatattgct

SEQ ID NO: 298380 - DNA, 561 bp, Homo sapiens
agtgctgagcatgatttggatcctctgctgtctcagggcctgcctggtgaaaagctattctctgtactctgtgttgatgctttaatcttagagctgaggagtgaatatttatgaagaatttactttaggtagggcttttgcttactttattattatatcatcaaatttaatcctcacttaatgttattgatgagaaaaacagagattaggtaaattgtaccaaatcatacagctgttgtttcagagtctaaattttaacctctgataagactgaagtcttaaccgatattctgtagagcccaagagagggaacctttaagaatattacctcagggaagctgacaggagaaagttcattrtatatatatatatatatatatatatatatatatgtatatatatgtatatatatggatttcaagttctaaagttggccatttaaaagacttattcacagtattccccatatatatataaatatatatatatttaacttttattttaagttcagggcctgctatattttttcatccatctttggtgatcatttagaatattgct

SEQ ID NO: 298381 - DNA, 561 bp, Homo sapiens
agtgctgagcatgatttggatcctctgctgtctcagggcctgcctggtgaaaagctattctctgtactctgtgttgatgctttaatcttagagctgaggagtgaatatttatgaagaatttactttaggtagggcttttgcttactttattattatatcatcaaatttaatcctcacttaatgttattgatgagaaaaacagagattaggtaaattgtaccaaatcatacagctgttgtttcagagtctaaattttaacctctgataagactgaagtcttaaccgatattctgtagagcccaagagagggaacctttaagaatattacctcagggaagctgacaggagaaagttcattatwtatatatatatatatatatatatatatatatgtatatatatgtatatatatggatttcaagttctaaagttggccatttaaaagacttattcacagtattccccatatatatataaatatatatatatttaacttttattttaagttcagggcctgctatattttttcatccatctttggtgatcatttagaatattgct

SEQ ID NO: 298382 - DNA, 620 bp, Homo sapiens
acccattttgagattgtctcaggtaagagtaatccagtccctgttactccatattggatgcatgaagaaatccctaaggagctattttaaaatgtagatttgtggtatygagagattctgattcagtaattctggaggggatatctgtaataaattctttttaaaagcctcagtgtgactcttaggttaccaggatatttaatcacttgtctagataattaattcaataaagttcaaggtctaagaaggctttatgaagagagtacacttcgaattagattttaagaatggattgaatttggcgggcacatgctctgtgccaggtgccagtggatgagcaaatgtttgaggaatggataaattgtttgatcctcccctgtttgcttagaaaacttctatttcacgttttaggtttatacctctctatagctttctctttcttccccagacagaatgtaaaatgtacagctttttgcctttgttgtgatagttcacacattgtcatcatcaaatttacatgtaccttatatcatagttattttgtttcttccactaacctgtatgttgctttggagtaattaatttatttttgacccccagtgcctagcacagtggttaga

SEQ ID NO: 298383 - DNA, 716 bp, Homo sapiens
atatatatctcagtattattcttatatatgtatttcagtagtagcatttaatatatatatctcagtattttatatattgagtatatataatatatatctcagtagtagttttttaatatatatatatcagtggtattattatatattactattatattaatagtattattatatgtcaratatgtctttttatatatcagtactattattattaaatataatcatatatttatataaatatatattctatacatttaataatattaaacacatatttaataataatattaagatgtatatttatgtcagttatataaatctaagtatgatacaatttatatccttaaagtgtttaaagatttatatccttaaagtatattaagatagctgtcataaaatctgtttctagtttaaaattttactagttatttttttctgagaaaaaaaatcatgaccatatagtctcacaaaaaaattcaaaataacagaatatataccatgcaaaaatgttaataatatatttaaaactccaataacaggtcttggaatatagcaaacacttgagatttgctgaaggttaatttgaaatcaattatcaataaatgtttgatgaattgaattatttaaaaattctatcatataattaagtcctaattattaatgtttatattaccttatgcctggtggcatatataccttccaaatttgtactttaa

SEQ ID NO: 298384 - DNA, 656 bp, Homo sapiens
tctttctaaatgaacacattctcaataaaaagttaataggatcctagctgaagatggtaatttgcaatttatgcttcaattcttacaccagacagtagtatttcctggaaaaccttccctgatccctcccaagtttgggttaggtattgcttcattgtactctcttagctcctagtacttactatgctgtgtatgctactgtatattattacttagttaaatctttmtatcttcctctatattagcggtcacaatctcacatattttaaggatgacataaataaatgaaagacagacaatgataaatgggaagtaaaactcaagactgaatatttttgagatatgagagagtggcaaagactgtggtaacttagaaaacatatgccccatgtaaagggaatggtcactcttcagcttcagctaatcattgtcatgtaaaaatgtagacccattatttcccaaaatttcagagaatcataaattatgtgaagtttcctaatatttaaatgctggccattaatgcagatttttagtcataaatactcaacaggctaagccatatatatttccattcctcttgtagcctgtttgtaatctctgatagtaattatgagcatcatcaaggcagagaccagatccaagttgcttatcatctt

SEQ ID NO: 298385 - DNA, 470 bp, Homo sapiens
tgtggaacttgggtatacctacctaaagattgctaaagaaatgagactgcaactgtcaacagattcaatatcttttttcagaaggctggaaaatgaagggaataatagagataaaatcagcttagcttcagtgggaaaaaaaaaacaaaactttttttttaaaacggagaaaacataagtttatagttcaagcatatagagccaatgaaagaagaaaggttgaagaygcaatatttatttcactttcttgggagagcaggtagaaaaacgggaagatttggagactataacattaattttactatttgtagctctttaccaaagttttttcattttttagaatttcttgtaggcctttatgcaggtgtgacagcattaagaaatcaaactttgccttttaatggtaaaattttcttaacaaacagtatttgatgttatatgtatgtaagtcataaatgcactggcctatc

SEQ ID NO: 298386 - DNA, 470 bp, Homo sapiens
tgtggaacttgggtatacctacctaaagattgctaaagaaatgagactgcaactgtcaacagattcaatatcttttttcagaaggctggaaaatgaagggaataatagagataaaatcagcttagcttcagtgggaaaaaaaaaacaaaactttttttttaaaacggagaaaacataagtttatagttcaagcatatagagccaatgaaagaagaaaggttgaagatgcaatatttatttcactttcttgggagagcaggtagaaaaacgggaagatttggagactataacattaattttactatttgtagctctttaccaaagttttttcattttttagaatttcttgtaggcctttatgcaggtgtgacagcattaagaaatcaaactttgccttttaatggtaaaattttcttaacaaacagtatttgatrttatatgtatgtaagtcataaatgcactggcctatc

SEQ ID NO: 298387 - DNA, 509 bp, Homo sapiens
tataaaactaaggctcttatatagtaattgccttgacaaattacaaagctattgaggaaaagagccatgtttggaatcctgatcattttactcaaaatcccatgattgtcacactctatcaattgtggaaacaccaatagctcaacaatgtaaaagatgagaagtctgacatccttattattaaatagttatgttcccccttttagtcatgttgcaattcaattataccttcttcactaatacacacacatatacgcacacaaactgtgaacaaatagagctgcatataaaattatacttgaagcctgtaaaacagaggtgatccatctcycttaacagtgtcacttcaaagggctcttacattcaatacaaattaaaatatctcgttgagagcaaaatagtttccttcatgttgacatttccactcctttccatatcaccttatttcctggaaaataaatccttttagtgagattcattgtaaatataggtgagtttgtgttacttat

SEQ ID NO: 298388 - DNA, 532 bp, Homo sapiens
cttgcaaaacatgctctaaattaaattaactgctacccatttgtatgccccgtgtttctacaacactatagtctctttatggttcaccttttctacccatccccaaagcccagatgaaatgccactttcatgaaactgttggatccatctatcctgaagtttttctatgctctgaacaaccacaatgtttttttgtacctttctaataacatgtaacaccacctgtttcatgagcatagttttattygattattttattatactcttttttgagcacaggaactgcacactagaaatcatcatatttctcacaggttccaatattgtgatttttgcatacagtagatttttaataagtttctgtcaaatgactaaactaataattattcaagtgttttaggaattaaacagaatgaggaaaattatttctactctccataaaagcagaagagattataatgatacgtttcatgaagaaagtagcttacaaaattacaagcaattttcatgaataacttcaaacaaattagtc

SEQ ID NO: 298389 - DNA, 532 bp, Homo sapiens
cttgcaaaacatgctctaaattaaattaactgctacccatttgtatgccccgtgtttctacaacactatagtctctttatggttcaccttttctacccatccccaaagcccagatgaaatgccactttcatgaaactgttggatccatctatcctgaagtttttctatgctctgaacaaccacaatgtttttttgtacctttctaataacatgtaacaccacctgtttcatgagcatagttttatttgattattttattatactcttttttgagcacaggaactgcacactagaaatcatcatatttctcacaggttccaatattgtgatttttgcatacagtagatttttaataagtttctgtcaaatgactaaactaataattattcaagtgttttaggaattawacagaatgaggaaaattatttctactctccataaaagcagaagagattataatgatacgtttcatgaagaaagtagcttacaaaattacaagcaattttcatgaataacttcaaacaaattagtc

SEQ ID NO: 298390 - DNA, 592 bp, Homo sapiens
aaatagcaagtattgacaagaatatgcagaaaagtgaaacggtacagcagttatggaaaagagtataaagattcctcaaaaaattcaaaatatgactaccatgtgatccaacaacctcatttctgggtatatattcaaaagaattaaaatcagcatrttgaagatatatctgcattcccattttttaaaaatggtgtctcattctattgctctctcattcgtattgcaacattattcacaatagccaagatgtgaaatcaaccaatcaacctaagtgtccatctatttatgaatggataaagaaaatgtgggtatagaatagtatacatatcatatatgtgaatattatttatcttaaaatgaagaaaattctctcatttgcagcaacatgaatgaactgggaggacattatgccaagtgaaataagctaggcacagaaagacaaatgcttcatgatctcacttacatgtaaaatcttaaagccttaaaattacagaagcagagagtagaatggtggttgccgggggctggatgtgaagaaacagggatgcgttggtcaaaggatacgaagttttagttatgaagaatgaat

SEQ ID NO: 298391 - DNA, 592 bp, Homo sapiens
aaatagcaagtattgacaagaatatgcagaaaagtgaaacggtacagcagttatggaaaagagtataaagattcctcaaaaaattcaaaatatgactaccatgtgatccaacaacctcatttctgggtatatattcaaaagaattaaaatcagcatattgaagatatatctgcattcccattttttaaaaatggtgtctcattctattgctctctcattcgtattgcaacattattcacaatagccaagatgtgaaatcaaccaatcaacctaagtgtccatctatttatgaatggataaagaaaatgtgggtatagaatastatacatatcatatatgtgaatattatttatcttaaaatgaagaaaattctctcatttgcagcaacatgaatgaactgggaggacattatgccaagtgaaataagctaggcacagaaagacaaatgcttcatgatctcacttacatgtaaaatcttaaagccttaaaattacagaagcagagagtagaatggtggttgccgggggctggatgtgaagaaacagggatgcgttggtcaaaggatacgaagttttagttatgaagaatgaat

SEQ ID NO: 298392 - DNA, 572 bp, Homo sapiens
tgtgaaataaatgtagcacagatgaagccacctatctttgaaaacaacctgtattgagcgttttcagtatgccaggtattttctaagcactttacattgattatctctttatattatcataactgcaaagataggtggtattattatcttcattataaacatgaggaaactaagtcaccctattgaatgtgagaatattcaaggtgaaggaaacagcataaataaattcacagaggcaagaagcatcatggtrtatgtagaaaaatactagcagttttatgtggctggaccttgaagtttaacataacagggtttggagaggatgctgaagagacaggcagtggctcttttatgaagatatttgtatgttatcttctagagcaataagccaatatttgctacattgtattagctaaattattagtttatatttacatatcaacaaatacatactgttaaagatgtactaaatggcatattcattaaaatttcattcatttttgttcatattcaagaagttttcaaaactttctagctaattttataacttagaatcctatatatttgcgtct

SEQ ID NO: 298393 - DNA, 598 bp, Homo sapiens
acagcccatttgagctcctatatagatgctcctttttattaggccccagtctcactccagacaccagactaacttagactgtgccccaacaaaacttgtcatccctactatcttctgtctagtcatactcctattcaccgttctcaactactcatacatgccctgctcttgtttacactgccagtttaaactgtttctccaagccatcacagctgatatctcccggtgctatccccaaactgccactcttaactcttgaagtaaataaataatctttgctgacaggackatgctgaatttccttaggcactctaattagatgtcctaggtcctcccaattcttagacctttaatacctgtttttctccttctcttattccatttagtttttcaattcatacaaaactgtatccaggccatcaccaataattctaaatgacaaatgtttcttctaacagtcccacaatatcacccctttccacaaaatcttccttcagcataatctctcccactctaggttcccacaccgcccctaatcccgctcgaagcagccctgagaaacattgcccattatctctccataccaccccccaaaatt

SEQ ID NO: 298394 - DNA, 571 bp, Homo sapiens
tagctttttttttttcatgttggcgaatccttctcatgtttggtttaatagaaggcagctggattctgctcttgccttcaatctgttgcaatatgttttttggttgaataatctgaagaaaattcagcctcacacagacatgcagttggaaaaggcaggcatatttttataccagtttcagataatggtggattttcttatttgatattatgatgatgattgacaagtggtagtttctgaaaagttagtgcaatgcrttgaatctgaaaccaggtcagtgaagttttcacacgttgctgtattaaaatccatgatagcatcttgcattttgaaagaatcccttatccatgcataattttgttaacatcatatgttggtcatatggaaaatattggttcactgagttaggcagatctcccaaatcttgacacgtttcattatacaataccaaaaaatcatatttggtaatatttccatgcacctcatcagaaaagtctttcggtattaagaagctgtcaagctcacagtgctggacacatgttttttaaaatcctgattttcacttgaaagc

SEQ ID NO: 298395 - DNA, 494 bp, Homo sapiens
ctccactgtcactctgtggtatggccataaatgcctcagcgccgcctcactgataggtctggtactgtttgaacaggaagatcaaaatgaatacaaaatgagagaaaccaatttctggattgggggtggggacacggtaatagaggaggaagcctgcgatctttaggatccgcctccaggcccagmggagggagagtcacaaatgacagccttggccgtgagagggggcctcttcttactaacccccactgcgccatatgggtaaatggaatgctgaggcttaggcgcccccttcccctgctgggatccgggtaggatccggttgcctttctgcggtggaggaggaagtgttggatttcagcgctaaggcgtcggcggtgcacctcacgtgcatgtgtagcatgccttggtttttcctttggcatctgaaaaaggcacaacctgaaagacctagaacccagtgtcggtccccaggccctttgggacaggaagag

SEQ ID NO: 298396 - DNA, 301 bp, Homo sapiens
tgggtaaatggaatgctgaggcttaggcgcccccttcccctgctgggatccgggtaggatccggttgcctttctgcggtggaggaggaagtgttggatttcagcgctaaggcgtcggcggtgcacctcacgtgcatgtgtagcatgccttggkttttcctttggcatctgaaaaaggcacaacctgaaagacctagaacccagtgtcggtccccaggccctttgggacaggaagagaagagccgtgtggccgcggggaggatgtcctgaggcggggctgtcctcgcggactgactggactc

SEQ ID NO: 298397 - DNA, 301 bp, Homo sapiens
tgggtaaatggaatgctgaggcttaggcgcccccttcccctgctgggatccgggtaggatccggttgcctttctgcggtggaggaggaagtgttggatttcagcgctaaggcgtcggcggtgcacctcacgtgcatgtgtagcatgccttggtttttcctttggcatctgaaaaaggcacaacctgaaagacctagaacccagtgtcggtccccaggccctttgggacaggaagagaagagccgtgtggccgcggggaggatgtcctgmggcggggctgtcctcgcggactgactggactc

SEQ ID NO: 298398 - DNA, 562 bp, Homo sapiens
atctccttgatctacttagtcaatgattttttccccacctaaacatgcaaggaaaagaaacaaaggggatagaacacgaaaaacatgaatttctgaaagccagagttggcacattctgcagcatttctatttactctcagtttctgcctgacctagtcagacatttgaggcctctaactggatccaggtcagttagttttcaggtttattctgatcctggatccagaccagtttctgttgtgacttctgaacaagtttggattaaaaaaaattgttcaaacaaccatggacagcccaaaacacaaatctgtggtgcttcagaatttgagagagaacttatttatgatccccaagcactgtaagaaaccaatggacaaaatgggctggaaggtacttctttttgttacttgatgatcctgggggtcactagaagctctacttgggatcccacttctgacactgactgttaaaaactttaggcaaattatatttaacaggrtttaatttagcaaagaacaattaacaaattgggcaggcctctgaaccagagtagatttagaga

SEQ ID NO: 298399 - DNA, 624 bp, Homo sapiens
aaaaatgatcttatattccctttctgtcaccaaataaagaagatgagcacatatattacacatttttaaaactactacgtagtttttgatgcagttgggacaaaaagtaaggtagaagtctcttaatcttaatatgtaccaggttaaataaaaactattttaaatttaagtctatatttaaagtattacaatacaaaacatcatgaggaaacttatgtaaattattttattaaaaaggttagttcatactgaataacatgccaccaatttaaagtgttccaaaaggcaaayaaagaaaataatgaatgatttatataaaataaataaaggaaatgaatagttcgttcacatgaaaaaaataaaaacataggaaaagatgttgtacctcactaataatttgaataatcaaattaaaacaatgagatttatgttttatttataaaactggaaaagacattttaagcagtttgataatttactgtgaaaggatgtggaggaaataagcactctcatacactgttgatagaagtgtaaattagaaaaacattttatgaaggtaagtttacagtatttatcaaaggaaaaaatgtctgctctctttgctacatatgttgccattgttag

SEQ ID NO: 298400 - DNA, 624 bp, Homo sapiens
aaaaatgatcttatattccctttctgtcaccaaataaagaagatgagcacatatattacacatttttaaaactactacgtagtttttgatgcagttgggacaaaaagtaaggtagaagtctcttaatcttaatatgtaccaggttaaataaaaactattttaaatttaagtctatatttaaagtattacaatacaaaacatcatgaggaaacttatgtaaattattttattaaaaaggttagttcatactgaataacatgccaccaatttaaagtgttccaaaaggcaaataaagaaaataatgaatgatttatataraataaataaaggaaatgaatagttcgttcacatgaaaaaaataaaaacataggaaaagatgttgtacctcactaataatttgaataatcaaattaaaacaatgagatttatgttttatttataaaactggaaaagacattttaagcagtttgataatttactgtgaaaggatgtggaggaaataagcactctcatacactgttgatagaagtgtaaattagaaaaacattttatgaaggtaagtttacagtatttatcaaaggaaaaaatgtctgctctctttgctacatatgttgccattgttag

SEQ ID NO: 298401 - DNA, 624 bp, Homo sapiens
aaaaatgatcttatattccctttctgtcaccaaataaagaagatgagcacatatattacacatttttaaaactactacgtagtttttgatgcagttgggacaaaaagtaaggtagaagtctcttaatcttaatatgtaccaggttaaataaaaactattttaaatttaagtctatatttaaagtattacaatacaaaacatcatgaggaaacttatgtaaattattttattaaaaaggttagttcatactgaataacatgccaccaatttaaagtgttccaaaaggcaaataaagaaaataatgaatgatttatataaaayaaataaaggaaatgaatagttcgttcacatgaaaaaaataaaaacataggaaaagatgttgtacctcactaataatttgaataatcaaattaaaacaatgagatttatgttttatttataaaactggaaaagacattttaagcagtttgataatttactgtgaaaggatgtggaggaaataagcactctcatacactgttgatagaagtgtaaattagaaaaacattttatgaaggtaagtttacagtatttatcaaaggaaaaaatgtctgctctctttgctacatatgttgccattgttag

SEQ ID NO: 298402 - DNA, 580 bp, Homo sapiens
atgttgctgcaaagaacatgattttgctcttttttagggctgcaatgtatgccatggagtatattttctttattcaatccactgttgatgagcacctaggttgattccatgtctttgccatggtgaatagcactgtgattaacagtcgtgtccatgtgccttttgatagaatgattcatttgcctttgggtatatgcccagtaatgacattgctgggtcaatagttgttctgttttaagttcttcgagaaatctccaaactgctttccacagtggctgaaccaatttatattcccaccaacagtgtgtaagcatacccttttctctgcagctttgtcagaatctgktattttttaactttttgataatcaccattttgactggtgtgagatagtatctcattgtggttttggtttgcatttctctgatgattcgtgatattgagcatttcttcatatgtttattggctgcttatatgtcttcttttaagaagtgtctgttcatgtctttacccactttttaatcacgttgatttttgcttgttgagttgtttaagttccttatagattctggatattaga

SEQ ID NO: 298403 - DNA, 517 bp, Homo sapiens
tcattgtggttttggtttgcatttctctgatgattcgtgatattgagcatttcttcatatgtttattggctgcttatatgtcttcttttaagaagtgtctgttcatgtctttacccactttttaatcacgttgatttttgcttgttgagttgtttaagttccttatagattctggatattagacccctgatgaactaaatttaaatagcaaagtttccagaacagtggatatcaaccttctgtggagctatcaacagctccacagaagaatcacctgggggtacttttcaaaaaatactcatgcttaggccccaggcacagagattctggttggtgtacgggttgagcattagcacggttttagaattctcaaatgcagtcattattgagaaccactgytctagaaaaactggcataatgcctccagttagggaaaaataaagaagaggcacagggaacaaacaaatgataaatacagcttatttttatttgctcatgaaatacttgtaagatgata

SEQ ID NO: 298404 - DNA, 555 bp, Homo sapiens
actaaatagactactagtaatacaaatggaatactagtaatgctaaagtattcctaagactgcatgctatgcaatcagactaggataaacaaataaagacaaacttatggatagaagaaaagtagaggggttaagtagctgcacagcaagaaaggagtgaagctgtggtcagasagaaagataaatgaattagtgacttcagggatggagtgaatatggttgagaaggtgaacaaagtgcaatgacagagaaggtcataagagatgggatggtcaaggaactgagagccaggttctcagttatgtcatgtacatgggctctcatggcattcagaaccttttaacaactacgaaaacacttattgtggtattctgaatatgctttcaatgagagagcattcacaatagtaaaaggttcacatttgatatggtttggttgtgtccccacccaaatctcatcttgaattctcacatgttgtgggagggacctggtgggaggtaattgaatcatggggggcaggtctttcctgtgctgttctcatgatagtgagtaagt

SEQ ID NO: 298405 - DNA, 375 bp, Homo sapiens
ttcttctgtcttgtaaaaccttatctagaatgccttcttcaactaatacttcaaacagttaaccaaaactttttcctatagaatctctgttagaaagcctgtataggccttctgaaggcctatacagaattcataatgaattctgaraaaaataaacgcaggtagaacacagctgttgataaggaaaagtcacagaaaaatgtcaaggttttttctctctaacttaaagacacatatgtcaattcagacaaaatacagtttcatcattaagaaaatcaaaggtttgtacatattattttctgagcacaaatcttgctaacaaatcctagatgtttgacacttaagttgtgtggctattattatgttcaacagact

SEQ ID NO: 298406 - DNA, 578 bp, Homo sapiens
tgccccatcttgatattcttttactccttgcatttgggcaaaaagaatcagcttactagtttatttccttttggggccacatagtacacyatagacctgtcttagtttgttttgtgttgctataacagaatacctgagtaatttatgaagaaaagaagtttatttaggtcacagtcctgtaggctgagaagttcaaaaactatggcaccggcatcttcttggcttctggtgagggcttttgtgcatcatcttaacagggtggaaggtcaaagtggaagtggccatgtgtgaaagggcaaaactcaagaaatatccttgctttataacaacctgctcttgagggagataatccatttttatgagaactaatgccatcttgcaggagtgaaaactccctcactaccatgagaagggcaccaagccattcataagggatctgccctcatgaactgagcacctcccactaggctccacctcccaatactgccacatcaaattttaacatgagttttggttgggacaaaccatatccaaaccatagcaagacccaaagttcaaagataatataagtaaagcac

SEQ ID NO: 298407 - DNA, 503 bp, Homo sapiens
cgcttgaaccagggaggcagaggttgcagtgagccaagactgtgctacagcactgcagcctggccaacagagtgagactctgtctcaaaaaaaaaaagtgaaattttagcagctttgttactggggagttgattgcaataggaaggagaattaattaawcatcatcacattcatctaaacaaattaatatatttattatatttattaagtacagtagccaaagtaggttgaacttatttgtgggcattaaaagttttttgtatgagcaaaacatcaccaccaccactaccacacagaccaaaagccagttcctctttagactcacctaggaatcacagcccaaccatgacatatggtaggcttgaaccagtcattgttttcctatgatgtaagcataaactcttccgtctatattaaaggcctattcttttacctgaatgcaacactaatgcaactaggatgttttaacaacactgtattctatgattgggtctcataataaa

SEQ ID NO: 298408 - DNA, 591 bp, Homo sapiens
tcttcatgttgagtatgctgaggaggaggaagaggaggggttggtcttgctatctcaggagtggcagaggcagaaaaggtagaaggggaggcaagagaggcagacacacttgatgtaactttatggaaataaattgtaatttctgaccttttcgctttttcatttctctaaaactgtttccatgagatgcgatccttcttccaccatttattttagtttcagtgcacatattatagaagggtccatgttgtaaaaaaagttgaacctagtcttgaataattgtaactcttctgccagattgtctaatgtgaatttgttttctggcactgctttttcaatgttttcttccttatcttctggcgctggtttaraaatactcatcttcatcgagtcatcttctattaattcctctgacatggtttctgtttgctgttgagtttctccaagatccatatcctgataccttttacccccacctttttcgccatattcacaatctgtttcataatttccttgattggctgtgttgtaaatcttgtgatgtcatgcacactggaacacagttttctccagcaggaatttgtggtttca

SEQ ID NO: 298409 - DNA, 515 bp, Homo sapiens
ggatcagggactcacttaacgaagcactctggctaccccttggcagagctggtgcactgctctggggaaaatcccctttgtctggtctgcctgcactcttcagagccagcagacaggaaagactaagtccactgaacccacaagactgcgtcctctcctccccacagggcctccatcccagggagatcagatttctctctgtaaacgcctggatggagttgctgaaattctcacagggatgccctgcctggtgaggagggatggatccaaatccgacctaaagaagcagtctggccacaatctgccgcagctgctggactgcactgtagggaattcctccaggtccaaactactcagtatccctagcactggtaggggaaagcggcygactgatgctgcagtgatggaggctgtccctttccctcagttcgtcttaggcactctccagcctgctgcccgtggtcacaacctgagcctgccgagagtcctcacagccctgtgcttgggtcccaagg

SEQ ID NO: 298410 - DNA, 515 bp, Homo sapiens
ggatcagggactcacttaacgaagcactctggctaccccttggcagagctggtgcactgctctggggaaaatcccctttgtctggtctgcctgcactcttcagagccagcagacaggaaagactaagtccactgaacccacaagactgcgtcctctcctccccacagggcctccatcccagggagatcagatttctctctgtaaacgcctggatggagttgctgaaattctcacagggatgccctgcctggtgaggagggatggatccaaatccgacctaaagaagcagtctggccacaatctgccgcagctgctggactgcactgtagggaattcctccaggtccaaactactcagtatccctagcactggtaggggaaagcggctgactgatgctgcagtgatggaggctgtccctttccctcagttcgtcttaggcactctccagcctgctgcccgtggtcacaacytgagcctgccgagagtcctcacagccctgtgcttgggtcccaagg

SEQ ID NO: 298411 - DNA, 608 bp, Homo sapiens
ctgtctgtataaattggaaacatcttgcagttatttggaatgtagctcaactccttgtgggtcacattttgtacctcacctttcaaggcctactggaacttaagtctagtcaaagatctaaaagcaaagatatgcagtggggggtaagctaatgagaatcagcagcgctttgcaaggcaagaactatatcctctttcctcatttcttcatgatagatcacctcattagttttgcttgattagattttgactttagcattttccttatatgttcccctcagaaggttaccaatgatcatgtagtccaagttcaacaacattggaaaataattttgcatcatttttaaaaatgtctatatgttgtttgacattattgattcttctttcatttctcttctccttactgtaattcttcatgtgcgctatttataagaattctccaagattgagatattgaaatttttcctccccctctytctgttctttccatgctcttaaattaacagtaatttctttcttttctggattcccatgactcttgtattcactactacatattatggcactctgtcaaaagatttcttccttaatggaagaaaggcaggtccc

SEQ ID NO: 298412 - DNA, 503 bp, Homo sapiens
atgtgtttcttgctgtgactctgacctatacacatgtgtcatgtttattttaatgactaaaactccatggctccaaattgtgtggaaatggacatgtaattaggatggcaacctacgtacacgactttgagtaagaaacatctttcaaaaaaatattgccaaataaagggtagagtagaaaatggtagggaagaaactctggatcataaaaaattgctcaacagaatgattaattcaaaaaagtttaatttctgcccaaaataaaaaagagggtataaaaataaacttctggatgtgtgaaaagaagtaaaaargaataactaataaaatgtaagtatggaacactttcaaagaagttttctcataactcaaggaatgtatggtctctctcaatctatgggttagtatcttcattaatataaataaaacattttctgatattaatttaaggagcagtaaaaatatatggacacatatattttataaacatgacctaagagcta

SEQ ID NO: 298413 - DNA, 556 bp, Homo sapiens
attacactaaagctcacacaggtagaaagctgagatttgaacccaggtgtgtctcctccctggggctataatatttcctgtaaaaaagacatcttggacaagatctgattgggttctaactcaggaagttaagcaaagttcattattttgggagaagtcctcttagaggagctggaaatcatgttcagtcttagtgtatgtgttggaataggaaagacaaaatcaaaagaagagggcatggagcagttattcctctactgagtgcacagcctatggacttgaatagtaggagacacatttggagagaataggaggctgcagtggccacaacacagtgtgcatatcctgccttccctccttccttcattcaatcattcattccacaaatgttcatacaatacctcctgtgtagcacagtcctggcagcttggggaatatgagggacaaccaaggagacatagtccctgcycacacatggctagagccaagtggaagaaacagatactaacaaataagcacagataaatgccttgtttctttgatctaagacattatc

SEQ ID NO: 298414 - DNA, 541 bp, Homo sapiens
ggctatttattattttaaagctgctttctaaatagcggaggcagtgaggcctctccccttcctaacagcaccttacatctgctgacagcttttgtccccagaaaaagcctgacatttggtctctgaagaaaatatgttttctgcctgggaaggatccaggtataggattgagcctgagtattgaaacaaatcttttggtaactgtagccatcaccctgattagattcttagggaaccaaaaaggcagctccacccaggagtaaaatacactgaagggcaatactcccagactacagccctccttcttttgtccctctagggttctcctggctgctccatgcccttctaccctatagagaggcccgtgcccacttaatcagagcacacagccygctcccctatttatgggagaggtttgttgggtgaacagccttgtcctacaaaaaaacaagggaaccttatgaccaaaggtcatctcatgttgaagaaaagctgattccataaaaggattggatgaatacagacatcagtggtaattcag

SEQ ID NO: 298415 - DNA, 544 bp, Homo sapiens
aaagatgagggtgatgttctggaatctacaaygaagcaaaccactcataatgcagagcaataagacaatgaaatggaaagtgtaataagaaagttaggagacaaagaggagaaatctaccagatccagtatatgtccaataaaagttttagaaggcaagaacagagacaagggaggggagaaaacaatcaaagaaaggaggaataaactttccctaggttggggagcaataagaatctgcagattggaaggggttcttaagatctcaacaaaatgccggaaaaggttccaccctggggataggaaatattacagtattttaaaaaataaaaagaaaacttcaaaagtttctaagagaaaaagtttttagaagggaacttgaatcacactaacatcagactacttgttgctaaaacagtagatgctacttgttgctaacagtagatgctagaagtcagttaagtaatgcaaatatacacaattggagagaagcaagggacccagaaaatgcagctgtgtatcatgcaagaaagctggaggaagac

SEQ ID NO: 298416 - DNA, 564 bp, Homo sapiens
atttttctaagagtttttcatgaatgggtgctgaattatgtcaaatgctttttctggataattgatatgatcctatgattttttttcctttaacctgtttatataataaattacactgattaattttcaaatattgaaacagccttgcatccctagaagatacaaaaatcaaggattattcatgtaaactggttgtggtatctttgcaccatcctttctctgacctcaccacacttcctcatgggctggagaggttggcaacgctagctgtgtggacactaattcaggcaaggactgctaggccatggagctggcatgcgttgtggggcagccagtgttccaagcaaggaagtgccatggatgcatcaggctcaggggagaagtgagatgtgccctccatgccaagcttgctgcctgcagtgcccaktgaggcaccagccttcagttggccaacaattcctactagagaacaatgtggttggttaattctgactaactatgcctacaaccatgcaaagcaggaaggaagaatgtatccagctattattggaatgtagtactcat

SEQ ID NO: 298417 - DNA, 572 bp, Homo sapiens
gggaagaagggatggggaataataaaagccatgcttctcagcagcccagtggtgatgtctgacccattaatgacaagaaaacaggacctccttctccctgttgtctcccttccaaagcctttgactcctttacccccataataatgacatgcaaatatgcctttaggttgttgtcataacagatctggccactgctccacctgacctcaactccattgttcaaatctgcttggcttgaccttagtgactcagtccaaattgttgagagagggactccaattggctctgctttggacagaggttcatgagggattcaacccgatgtggacataaaagcagatcaccagggaagaacatgtcttcctaggtctatttattcatcaaggcttatggctggggtgactgtatcataatatcaatgaaacttaggcattttagagagtgaaagggacactcttccccaaggccarcaggcataagctgggactttcctgaataaaccagaatggatgtatgccctacacaaaggaacttccaaagaaggaagcgtagctagacaagtacaccaggta

SEQ ID NO: 298418 - DNA, 618 bp, Homo sapiens
tggcctgtgtcttgcactgtccttcaacctagctggggaagtgaatgattagttaatgacctagtatgaggcagaacccagagttctaaaagatccttgagaagagtgtccttgaggtgatgcgggggaggcgcaacaagaaccatcttttaaatgattgaggaccatggttgtgtgccctgaaggcaccagaaaaattagtgccagcccctctgtatcatgacagggctctgtgtttgagatggcaagtttacaaggcagcatagcatggggttaagagtaagagtgtctttcgctctttcagtagccagagggaaggagggaggataggagaaagaaggaggaaggaagcaggcaaggagtgctaatagtaattccatcatcaacgtgtgctgtgctcttcacagacagcatctcatttaaaactcccccaaacctatgggatttatcattcaaaacacgrcattttaaagtataccctcttgattaaataaagctcagaagtcatataattaaatgttccatttgatctgtagccctcagcccatccctgaactttacctcaacttcaccccgtcttgagctttattccaacccaaaccctctccatccctaaca

SEQ ID NO: 298419 - DNA, 544 bp, Homo sapiens
ttattgtcatgaattttctacttcatatcagtccaaaagataccacttcatgaaaacatctgaaattactagcactaaccaatcactttcattttgtatgttttagggaaaaatatgttaatgaggtgccattatgtcatcgatccatagcttaccatttatagtccatctgaatctctgcttgagtcaaaagccaaagagcttcctggagataaagccataattttcagttcaaagatttgcaagtgcttgttctcaagagcctgatattcctacgtctctcatcacagagggcctatcccatgtctaattgcagaaaaggcctcagtttaccttcttggctctacttccagagctcttggttgtcaacttttcatgttggwgaaaagaatcggaagtaaaagctatgctgcaaccctccctgtgtctatttttttttctctagcagaatgaggttatttcttgcttgtttttgttttgttttgattttgtttttccatttaacctcccctgcttgctgattcactcttgtggctgagactgc

SEQ ID NO: 298420 - DNA, 566 bp, Homo sapiens
aaaacttaatgaatcctaagcagaatgaagacaaacctagccatataataatcaaaatgcttaaaactaaagataaagagaaattcataaaagaaaaaagacattctacaaacaggagaacagtcataaaattgactgctaaattctcattagaaacaacacaacccagaagacaaaagaaagcatttttaaaacactgaaagaaaaaaaaaatcaaggaagaattctgtatcccacaaaaatgcacaaatagctttcaaagattaaggtacaataaaagacatttttacataaacaaaagctcagagaatttgtcaccacccaaaccagcactaggaaaaaaagttaaagaccttcagtcagaaggaaaatgattctaggtagaatctcagagctagaagtaataaagagatctggaaatgccaaatatattgtaaatgtaaaagaccttttttttcttttttcctagttttccctaaagactaatagactgcttaaagcaaaaatagcaacaatatgttttgyggtttataacaaatggagaattaaaatgtattcaaagtaca

SEQ ID NO: 298421 - DNA, 614 bp, Homo sapiens
aagagaggaaaaggatctaattagaaaggtgaacagagggttccctgargaagtgagctacaggctcagtaagcaagagaagccatcattgtctgaataaggaagagaaaccatcattttccaggcacaaggaatagtgtaccaaagttctgatggcaggagaaatcaggagagaacaaaggatggaagaagtctagtgtgcatggagtggagagccatgtagggccttatctgaaaccatcagaagagttctgttttagcttcataaaaataggaagtcatttaaagattttagatggtaaaagggatcagatgtttttgtggaaaatggtttgtaaagaggccagtgaggatgcagggggacccctgggctagtagcacacaaaaaatagtgctgaacatcactagttatcagggaaatgcagatgaaaatcacaattatatgtactattcacccactagaatggctaaaaataaaaatgctgtcaacactaagtcttggcaaggatgtggaacacccagaagtcacatacatggctgttaggaggtataaaaatggcactaccatgtattagtctggcataacaaggtaccatagactaggtggcttaaac

SEQ ID NO: 298422 - DNA, 554 bp, Homo sapiens
ggctgctctccccgggacgggagctgcggagggaccgcggggctggcggctgtcggggcttgaggactggctcccggagggcgcgcgcggcactggcaatggggggctcctcttcctttctctcattcattctttcattcattcattcactcagcgacaacggcattcgaaatttcaagctctggcgcgctctaggggagctcccgagctgggtggaggttggaggtcaggcggacagacacatgaacagtcataatactgcgggcacaggaaaaaaaaaggattgrtttaccgagcagaagacaggagtcatagcccagagtcaaggcgtgggtgcgagggactgcagcggggccggggccttgggaaggtcgactgggcctctgaccttgatcctcctccaaatcccacactaccggagcagaacccaagcagggggcacttcccacgcgctctcctaatctctccccctttctgaaccatcctttgcttcagctcataccattctttctcttaactttcattttccttctcccctggttctgaacctgcct

SEQ ID NO: 298423 - DNA, 614 bp, Homo sapiens
ttacatgtgcccaaggtggtcagggtacagcttacttttattcattttagggagacatgagacatcaatcaatatgtgtaatatgtacattaattcggtcccaaaagatgggacaattcaaagtggggagtggtgtggggaggcttttacgtcataggtagataagatacaaaaggctgcattcttttgagtccttgatcagcgtttcactgaatacacaatttagtctggctcagtgaatctgcatttytacataaacaataggggaggccggacacagtggctcacgcctgaaatcccagcactttggaggccaaggcgagcagatctcctgaggtcaggagttcgagaccagcctggccaacaggatgataccccatctctagtaaaatataaaaatcagctgggcatagtggcgggcacctgtaatcccagctactcgggaggctgaggcaggagaatcacttgaacccagggggcggaggttgcagtgagctgagatcacgccattgcactccagtctgggcaacaagagcgaaactctctctcaaaaaaaaaacaaaaacaaacaaaacaaaacaaaacaatagggcagaggaagcaatcagatatgc

SEQ ID NO: 298424 - DNA, 660 bp, Homo sapiens
agaatacagtacacaacattagaatacagtaagtgataaacagatactattggttgtaattgttatcattaagccaacgtgttctgaagacaactggacttctagtttgctgtgccaaaatctctgcatggagyacagtgccacagcagaagtaaactactgatagttctctgcacacactaagatggttttttcatgcagttctctctgcctggatcaccttttgccacgctattgatcggattaaccctcttgtgctttgaaattcagctcagccagtatctcctgtggtaagcagaataatgggttcctgaagatgtccatatcctgatccccctgtaaatatgtatcctgaaatggcaaaggggctttgcaggcatggttaaacttgtgataggagattattctggattattcaggtgagcccaaatataatgataaagttccttaaaagtggaaaagggaggcagaatattagggcaagataatgatatgttagaaattgacctattggtgctgcctttaaagatgaagaagtggagtataaggcaagaaatacaggtaacctctaaacctggaaacgtcaagcaagtgaatactactcagaacatacagaaagaaatgcagctttgcctgtgtcttaattatagctcagtgaga

SEQ ID NO: 298425 - DNA, 620 bp, Homo sapiens
tgtgtcttaattatagctcagtgagacccatatcagacctatgacctatgcaactgtaagataatgtatttgtgttgtttaagcyattaggtttgtagtaatgtgttacagcaacaaaagaaaattaatacatcttctccagatgctttccagatttgcagacagggtcaagtttccctctgtttccatcatcctaaaatctagtatatttttctatcattaccctattcatagtgtttgatctgtgtaccttctgctgacaggggttaatgcttaagtttcaacattctatttagattgatatacacaaagcctggcacagcagtgtgacagcaaatgtttaagggtttactgaactcaaccaccattccagtggtaacagagacttctctttcaaaaaacttcaaatatgtcacctgaaaatgggtctcagagtgcgattacctctgcttacctccctttatatttactccaaatgacttgctcatttgaaagtaaaccagagtttgatatatataccagtcactttcaaaacatactttcctcaaaatattttctttgctcaaccaattacaatcctaccaagtttgagatgaaatttgaccctctgttcatacccc

SEQ ID NO: 298426 - DNA, 545 bp, Homo sapiens
acttatctcaagcgattttcacattccttttttaatttcacmtttgacatattagttaaggagtgtattgtttaatttccacttctatacattttccaatttttcttctcttattatagtttcaatctattgtggttggaaatgatacttgctattattttaatcttcttaacaaataaatccagaattagcagaagaagcgaatcataaagattaaagcagaaataaccaaaatagagaatagaaaaacaatagaaaaataccaacaaaaccaagagttttttaaggaaagaagcaaaattgacaaaattttaactagattaagaaaaaaatagaaaacaaataaaatcagaaatgaaaagagaagatattaaaactgatgccgcagaaataaaaagattataaacaactactatgaacaataacaagtcaaaaaatagggtaacttaaagacaatttgtgaaaagacattctagaaatattaagtaatgaagcaatgatagttgcagtggttggtggggaagaattctaacagggtttcccaa

SEQ ID NO: 298427 - DNA, 545 bp, Homo sapiens
acttatctcaagcgattttcacattccttttttaatttcacctttgacatattagttaaggagtgtattgtttaatttccacttctatacattttccaatttttcttctcttattatagtttcaatctattgtggttggaaatgatacttgctattattttwatcttcttaacaaataaatccagaattagcagaagaagcgaatcataaagattaaagcagaaataaccaaaatagagaatagaaaaacaatagaaaaataccaacaaaaccaagagttttttaaggaaagaagcaaaattgacaaaattttaactagattaagaaaaaaatagaaaacaaataaaatcagaaatgaaaagagaagatattaaaactgatgccgcagaaataaaaagattataaacaactactatgaacaataacaagtcaaaaaatagggtaacttaaagacaatttgtgaaaagacattctagaaatattaagtaatgaagcaatgatagttgcagtggttggtggggaagaattctaacagggtttcccaa

SEQ ID NO: 298428 - DNA, 546 bp, Homo sapiens
tagaaatagagtttttaatgcctgaaaatgactgaaaagatagaagatatgcccaagattgtcaagaggttaaaaaaaaaaaggaactacaagagagtctgtttgaaagcagtaactcgagaaaaaaaattctcctctgtatccccaccaaatttaaactgtgaaagatagcaactttttacaaattatacaaaatatgttaaaagcattgcttcagaataaatatgctgcaaaatcaaaaatcatgtggcaaaagaaataaattaaaaacaaaaaacaaaacatacgaatatgatgaaaaactgaacatacaataacatggtatagaaatagggaattactttgcaagcacagcaactataaaacaaagtcacagactttttwaaaaaaaacacagttttgactacactgcatttaaaattatatatatatatgtatattatgtatttatatacatatatgggtataaatggtttaaaagtccagtagacagttacagatttctattattttgttttactgtgtaatgttattaattttagcaat

SEQ ID NO: 298429 - DNA, 546 bp, Homo sapiens
tagaaatagagtttttaatgcctgaaaatgactgaaaagatagaagatatgcccaagattgtcaagaggttaaaaaaaaaaaggaactacaagagagtctgtttgaaagcagtaactcgagaaaaaaaattctcctctgtatccccaccaaatttaaactgtgaaagatagcaactttttacaaattatacaaaatatgttaaaagcattgcttcagaataaatatgctgcaaaatcaaaaatcatgtggcaaaagaaataaattaaaaacaaaaaacaaaacatacgaatatgatgaaaaactgaacatacaataacatggtatagaaatagggaattactttgcaagcacagcaactataaaacaaagtcacagacttttttaaaaaaaacayagttttgactacactgcatttaaaattatatatatatatgtatattatgtatttatatacatatatgggtataaatggtttaaaagtccagtagacagttacagatttctattattttgttttactgtgtaatgttattaattttagcaat

SEQ ID NO: 298430 - DNA, 238 bp, Homo sapiens
gttggcaattgactgaagtctgaattacttatcygtcatttcaaaaagagctacaaaagtgatccacggcaataaaacaatcaacgtcgtcatgccatacacagacaaagggcaatggagtaaagaggtgggaggaaagatgccgagaagagaatgtgaaatatgcaaaggacgtagtcataaaacagagccctgtcactttggcaaggaacactatttttgtgcgacctagattgaa

SEQ ID NO: 298431 - DNA, 579 bp, Homo sapiens
tataaaactaaaaaaaaagaaaagacaagtatctctttttgggatatcatattctagtcacagagacaagaagacaagttaatgaactagggtgcatggtaattattgctgagataggaaaaaacaattaagtgggtcacatgtgcatgaggatggctgaaattttagatgagggagacaagtactgtcctcactgagaaaatgacatttgagtaattacttgaaagaaatgatgggagggaagggccaggtaggttcctggaggaagaacatttcaagtagattatatgactctcagagcaggtatcattgagatctaattcccagatttggatgctattcctgaacagtggttcaacaataaataagttttgaatgtagaatgattatccacaaagaataatcttttagaatatctttcatttttaatcattttattwattttggcaagtaaatgatgccctcttcagaatgaaaaattccagtggaaatttttcatagcaaaagggcaaagataggcatttgtagaccagggagataagctaggaaaaaattatgattagtaagaaagaaatatca

SEQ ID NO: 298432 - DNA, 621 bp, Homo sapiens
aagccaaacaacagcaaaaaaaatctaaaaatctgrttaacaaatgggctaataatctgaatagatatttctcaaaagaagacataagatggtcaccaagtatatgaagaaatggtcaacatcacgaatcattaaataaatgtaaattaaaataatgatgagataccacatcaacatagtgagaatagctattatcgaaaagacaaaaaacatgccactaccacatgagcatatgcacatgtgtggaaactgttgcattgttgctactagtgtgcatggatgatgatgctccatcaccacacatgcgcatccagacatgaatcctctcccacgctagagtacatgtgcatgctggccccacttccaccaccccactcaagtgcttttgttagcaacccccataagagtgttggttgcctgtggactgtgagccctcagcccctccagcatagcaggtgcttaatcttgaggggtcagagaataatacaatgccctgatacctgccgcttatggttagggtatgcagtcagcagtgctaagctcaggtatggccaccagaaatcatccagaatgaaaccattcatctgaactcaacttataccacagtcaaatcctcaaagg

SEQ ID NO: 298433 - DNA, 621 bp, Homo sapiens
aagccaaacaacagcaaaaaaaatctaaaaatctgattaacaaatgggctaataatctgaatagatatttctcaaaagaagacataagatggtcaccaagtatatgaagaaatggtcaacatcacgaatcattaaataaatgtaaattaaaataatgatgagataccacatcaacatagtgagaatagctattatcgaaaagacaaaaaacatgccactaccacatgagcatatgcacatgtgtggaaactgttgcattgttgctactagtgtgcatggatgatgatgctccatcaccacacatgcgcatccagacatgaatcctctcccacgctagagtacatgtgcatgctggccccacttccaccaccccactcaagtgcttttgttagcaacccccataagagtgttggttgcctgtggactgtgagccctcagcccctccagcatagcaggtgcttaatcttgaggggtcagagaataatacaatgccctgatacctgccgcttatggttagggyatgcagtcagcagtgctaagctcaggtatggccaccagaaatcatccagaatgaaaccattcatctgaactcaacttataccacagtcaaatcctcaaagg

SEQ ID NO: 298434 - DNA, 621 bp, Homo sapiens
aagccaaacaacagcaaaaaaaatctaaaaatctgattaacaaatgggctaataatctgaatagatatttctcaaaagaagacataagatggtcaccaagtatatgaagaaatggtcaacatcacgaatcattaaataaatgtaaattaaaataatgatgagataccacatcaacatagtgagaatagctattatcgaaaagacaaaaaacatgccactaccacatgagcatatgcacatgtgtggaaactgttgcattgttgctactagtgtgcatggatgatgatgctccatcaccacacatgcgcatccagacatgaatcctctcccacgctagagtacatgtgcatgctggccccacttccaccaccccactcaagtgcttttgttagcaacccccataagagtgttggttgcctgtggactgtgagccctcagcccctccagcatagcaggtgcttaatcttgaggggtcagagaataatacaatgccctgatacctgccgcttatggttagggtatgcagtcagcagtgctaagctcaggtwtggccaccagaaatcatccagaatgaaaccattcatctgaactcaacttataccacagtcaaatcctcaaagg

SEQ ID NO: 298435 - DNA, 578 bp, Homo sapiens
aaggccaactctatcaagccaacagcagacatttcaaaaaataacaaatgctgatgagaatgtggagaaaaaataactcatacacagtaagtgggaaggcaaattagtacagccactatgaaaatagtattgargttctttttaaaaatacaaatagaactatcatgtgacccagcaatcttactactgggtagttttccagtgaaaaggaaatcattatatcaaaaagatatctgtatccccatgtttactgcagcactattcacaataaacaagatatggaagcaacctacgtgtccatcaacagatggatgaatgaggaaattgtagtatacatacttggaatgctatttagtcatacaaaagaatgaaatcctgcactagcatcaatatagatgagtctgaaaaatattatgttaagtgaagtaagtcaggcacaaaaataaatactgcatgttctcacttatctgtgcagcaaaaaaagtgagctcctagaagtagagagtagaattacaatgactagaagctgggaaaggtggtgtgggaaggagatagggagagattgtttagagaataca

SEQ ID NO: 298436 - DNA, 657 bp, Homo sapiens
cgaacactatttactgaatatggtgttctttcctcattgtttatttttgtttactttgtcaaagatgagttggttgtaggtgtgcagttttatttcagagatctctatagtgttccattaattcgtgtgtctgtttttgtaccaataggatgctgataggttactgtagccttgtagtatcatttgaagccagataaygtgatgcctctggccttgttctttttgcttaggatcgctttggctacttgggctctttttttttaatcccatatgaattttggaatagttttttgtgtttctatgaaaatgacattggtagtttgataggaatagaattgaatctgtagattgctttaggcaatacagacattttaacgatattgattctttcaacccatgagcttggaatgcttttccatttgtttgtgtcatctatgatttctttcagctgtgctttgtagttttccttgtacagatcttttacctccttggttaggtatattcctaggtattttatctttttgtggctactgtgaatgagaatgtgttattgatttgattatcagcttgaacattgttggtgtatagaaatgggactaatgaaactaacaagctactacacagcaaaggaaattcaacagaacaaacagacaacct

SEQ ID NO: 298437 - DNA, 657 bp, Homo sapiens
cgaacactatttactgaatatggtgttctttcctcattgtttatttttgtttactttgtcaaagatgagttggttgtaggtgtgcagttttatttcagagatctctatagtgttccattaattcgtgtgtctgtttttgtaccaataggatgctgataggttactgtagccttgtagtatcatttgaagccagataatgtgatgcctctggccttgttctttttgcttaggatcgctttggctayttgggctctttttttttaatcccatatgaattttggaatagttttttgtgtttctatgaaaatgacattggtagtttgataggaatagaattgaatctgtagattgctttaggcaatacagacattttaacgatattgattctttcaacccatgagcttggaatgcttttccatttgtttgtgtcatctatgatttctttcagctgtgctttgtagttttccttgtacagatcttttacctccttggttaggtatattcctaggtattttatctttttgtggctactgtgaatgagaatgtgttattgatttgattatcagcttgaacattgttggtgtatagaaatgggactaatgaaactaacaagctactacacagcaaaggaaattcaacagaacaaacagacaacct

SEQ ID NO: 298438 - DNA, 511 bp, Homo sapiens
ccctcaggctagcaaaaagtagagaaccattaccactctcaggcttgaatgcgaagatgtagttactggaactaagagagaggggctatagtacagggagaagtccratcaatataatttctggctttagtttgagggactcagccaatattgagacttggtggagagggagaccaagatcagatcttactctctgtgagcactttgatctcctgctggagtctccaattggcagaactcaattgggggccagaaggcaagatcccagtggatgtagcccatatgggtctgattctagggactagagcagagttgagaatgattacatatcctctgaaggagcaactaaaaaaaaatccatcacacaactgaaagaagtattcagtcactaggaatgatgctaaagaaaaaatattcatagatatgacacaatgtatacatcatgtttataatttttataaagtgggttataaattcacatttcataattaagattaatatagataaatag

SEQ ID NO: 298439 - DNA, 608 bp, Homo sapiens
gccaagtgccaaaccaccaatttttttcttcttttaatcaataatcttaagttccactaaattttctaatatactaaaatttgcttttgccatccttagatttccatcctgtgtcataaatgtatgaagagctmatgctgtatcatgctgttttaactgtatgttttcagtatattctaatatctgctatcataaacctattttatgcttccaaatccatcctcactctaattgctgctctttcttcaaaatatctcaggctgtataattttctttatagttctgggttatatttaagataatctcttcaaataaaaaagcctttatactatatgttaatttttagagaagattacaattctgaattttgccatctaggaatatttttgtctctccaactgtttaatacttcatttacaatctttcaaaatatttgtaatttgctttttcatataagtacatcacatttctttgcaaggttcatatattttaattctatgtttaacaagaagatccttcctttccatgttttccccctttgtttattgttagtacataagaaagttatttgtttttataagtatatttcaacggaaaatttactgagc

SEQ ID NO: 298440 - DNA, 608 bp, Homo sapiens
gccaagtgccaaaccaccaatttttttcttcttttaatcaataatcttaagttccactaaattttctaatatactaaaatttgcttttgccatccttagatttccatcctgtgtcataaatgtatgaagagctaatgctgtatcatgctgttttaactgtatgttttcagtatattctaatatctgctatcataaacctattttatgcttccaaatccatcctcactctaattgctgctctttcttcaaaatatctcaggctgtataattttctttatagttctgggttatatttaagataatctcttcaaataaaaaagcctttatactatatgttaatttttagagaagattacaattctgaattttgccatctaggaatatttttgtctctccaactgtttaatacttcatttacaatctttcaaaatatttgtaatttgctttttcatataagtacatcacatttctttgcaaggttcatatattttaattctatgtttaacaagaagatccttcctttccatrttttccccctttgtttattgttagtacataagaaagttatttgtttttataagtatatttcaacggaaaatttactgagc

SEQ ID NO: 298441 - DNA, 543 bp, Homo sapiens
  misc_feature (1)...(543): n = A,T,C or G
gataattttgaaaacagaagcctcattgcatcatctttcaatgacaaggcaataggaagagaatagcttaaggtcaagttccagcttttgcaatagggaagatacacaatctttacctccataaaataaaccgtaaaatgaaacaataaatattgttttcattattataattatcaggtaaggagtaaggattagatgggaatggcagaatattgataattgttgaagctgactgatgaatacttggatttcattataccatttttggttgtttgtatatagttgatccttccttccttccttccttccttccttccttccttccttccttccttccttcctttttctttctttttttggagacagggtctcactgtgttgcccaggctggagtatagtrgcatgttcttggctcactgcanacctctgcctcccaggctcaagcgattctcccacctcagcctcctcagtagctggaaccacaggctcggctcgtgccaccacatcccactaaatttttgtatttttggtagagacggggtt

SEQ ID NO: 298442 - DNA, 525 bp, Homo sapiens
gattttagtaatgaccatggcaaagtatagagattgaaacattatttttgtttgtgtagcatgattataaagccaaycaatctggtggtggcttcttgtctttacattgaggccagggaagtgtgatcctgtagccagcacttgagacaatgccaatatttttcatcagatgtacgactgtaacatgcgaaactattcccttgataggcaacctgagttaccttgtcctaggagtaaattttatggaaccagcccaaccaccaaatttgtaagcatctaatttgctgtgtctatattccttattcttaaaactggtagataagtttctcttatctgctactaaattctgtatgatgcagtttctgtaacattctcttgttgttctctttatttctcttgttgctactttggagtcttctcagctaacaacttttcttctgctcaacctcaaacactaaagtacatcaggtatctatcctgaaagcatttctcttctttaattaaaagaagatttaatttattttc

SEQ ID NO: 298443 - DNA, 525 bp, Homo sapiens
gattttagtaatgaccatggcaaagtatagagattgaaacattatttttgtttgtgtagcatgattataaagccaaccaatctggtggtggcttcttgtctttacattgaggccagggaagtgtgatcctgtagccagcacttgagacaatgccaatatttttcatcagatgtacgactgtaacatgcgaaactattcccttgataggcaacctgagttaccttgtcctaggagtaaattttatggaaccagcccaaccaccaaatttgtaagcatctaatttgctgtgtctatattccttattcttaaaactggtagataagtttctcttatctgcwactaaattctgtatgatgcagtttctgtaacattctcttgttgttctctttatttctcttgttgctactttggagtcttctcagctaacaacttttcttctgctcaacctcaaacactaaagtacatcaggtatctatcctgaaagcatttctcttctttaattaaaagaagatttaatttattttc

SEQ ID NO: 298444 - DNA, 489 bp, Homo sapiens
gaacagttactttgcatgaacaagacagacctgcaggatatgaagctgtggtctgtccacagaagtacagtgtgcgaagaaagaagagcctctaaattaggggaaccctaaggggagggatgagtttctctcatgatttctccttcttctcctcctcttgctgcttcttctccccctcctctttctatttattcctttcctccttcttctcttcctctctacattttttttcctctgtctaccacttttccccctccttcttccaattgtgtcctttattttgaaagacattttcctaaaagtgagaaaaagaaatgtcagggttggaactctaaagtccagaagcaagaaatggctgttcagagttggttrctgaaatctgaatttcctttcttgtcattttcaagagttcagggatgagtaaaatttcagagcacatcttgtccagtaagccattcattccttgcttttagtcatgaagtctttgcc

SEQ ID NO: 298445 - DNA, 640 bp, Homo sapiens
ggaggtttcagaaagatagatcttgataaatgggaaccaacatgaattcaccaaaacaagtcataagatactagcctcatttcctcttttaaaataaacagtagaatarggagtcaagatgtatagtaaatgtagcaactctaaaattcaggaaataatttgaaacaatctctcaaattattcttgtagagaagatgaaaagcttaactaatttaccaggtgtggtcagggatatataaacgcaagtcacctcatcaatggcgaaagctaatgactgttacagagcattgctattattccttgctatcaaaagatgtatctgtcacttatttgaatgcagagaacacatatgtaccaaaggagaaattaatatgaaagcttaaatatataggagacaactttcttgaaaaacagaatgaggagccacaaaattcagaacagtagaccaaatcaataaaaaggaagtgtatggtcatcacaaaactaaaacattaaccacacaagtgtgaaaagacttaattagaaatgctaaatttcagaaaacatataagtaaaacatgttatatggctgtcaaaaatgctaacaggctctatgactacaatatcataaaaaatgtagcataaggattggctgaagtta

SEQ ID NO: 298446 - DNA, 554 bp, Homo sapiens
agcaccttactaaatgagtggcaccactaaagatggagcccactttagtggagcacttcaaaagcatacataacaactacttaagtgagagggaaatttataaaataaaaaagtgaaagatcartatttgctttatttacctatcaggagagctacagggtgaaaacaatacttaacgtgtactctatttaatttactggagaataagaacctatgggtaaaatttacaagatgtttgaaattaccaaaaataatatggaacactcataaaataattagaaccattcatgtgtggaaagggctgcctttgagtggtgagatctttgtcactggaatcattaatgaagagatgggaaagccactcacagaaaattttgtagaagtaaatcccagaagggcatgaactctgtttttaagaatctgtaactgtttaccaacttatttcttcgttctgtcttcttcctttgtctagttttattttttttttctcacttggctctctttttccattcttcgtgtactatattgcaataaacttgagatatatcatgcca

SEQ ID NO: 298447 - DNA, 613 bp, Homo sapiens
ctatgcactaaaaaatcaaaaattaagatatatatataaattagagatgggtctagtactgttgaccaggctggagcacagaggcacaatcatagctcactgcagcctccatctcctgggcttaagagatcctcccacctagtcttccaaacagctgggattacaggcatgggcaaccataccctgctaatttaaaaaatatatatttttcgagatagagtcttactacattactctgactggtctcaaactcctgtcctcaagcaatcctccagtctcagcctccctagtaggtggaattatagaaacaaggcaccatgtgcagctctacaatagcattttaaaaactgaagtacttaggagtaagcttgaccaaggaggtgaaagatctgttcactgaaaactagaaaamagtagtgaaagaaattaaggaagacacaaataaatagaaaaatatgattgctgaactgcactccagccggagtgcatgtgtgagacagcaaaaccctgacctaaaaaaaaaagagaacaatatcccattcatggattggaagaattaatattgtcaaaatagcaatactaaccaaagtaatctacaaatttgttgcaatcc

SEQ ID NO: 298448 - DNA, 400 bp, Homo sapiens
caataatttaaatgtaggacctcaaattataaaatttctagaagaaaacctagaaataatccttctcgacgttggttttggtatagagtttatggctaagtcctcaaaaataattgcaacaaaaattgacaaatgggacttaattaaactaaagagcttctgcccrgcaaaagaaagtatcagcagaataaaaaggcaatctatggcatacaaaggcatacaacagattgtctaaaggcaacaacagattttggtgaagatgtggagaaatgggaatgcttactgtagcattcccatttctgggagacaggaatgtaaattagtacaaccgctatggaaatcggtatggagatttcttgaaaaactgaaaatttctgtttttctaagctatccagattgt

SEQ ID NO: 298449 - DNA, 604 bp, Homo sapiens
gcccaatgacatctaaaaacctcaacaaacaaggcaaaatttctcttgcttttattattgttttctcttaaagggtcttttctggaaaaccacaggactatggmatatttcatgttctgccttcttttgttctccacagtttcacaatacacttttagttttgaaaaaactatatttttggtctaccttaattgagttatcttattaatccccaaactatggtgtatgattgttaggactttcattttatagatgagaaaattggaaataagaaaaattaatttgctcaagtaccctgattataattcagttagtaaatgaacgaggatttgaaatctagtcagtatggttcatccactaccctgtttgcctcagcataaaatgaccaatatcattacactgactaaatacattccaaatcaagtaattgtatttatttagcttgaataactttgggaaacagtgataatatccattatttttttaaatactgaatataaccattattacctttaagaaattatgaaatttcagagaccccagagttggaatactggatacatctttcctaatatgccaagtataataacaaaaaagttgtaat

SEQ ID NO: 298450 - DNA, 604 bp, Homo sapiens
gcccaatgacatctaaaaacctcaacaaacaaggcaaaatttctcttgcttttattattgttttctcttaaagggtcttttctggaaaaccacaggactatggcatatttcatgttctgccttcttttgttctccacagtttcacaatacacttttagttttgaaraaactatatttttggtctaccttaattgagttatcttattaatccccaaactatggtgtatgattgttaggactttcattttatagatgagaaaattggaaataagaaaaattaatttgctcaagtaccctgattataattcagttagtaaatgaacgaggatttgaaatctagtcagtatggttcatccactaccctgtttgcctcagcataaaatgaccaatatcattacactgactaaatacattccaaatcaagtaattgtatttatttagcttgaataactttgggaaacagtgataatatccattatttttttaaatactgaatataaccattattacctttaagaaattatgaaatttcagagaccccagagttggaatactggatacatctttcctaatatgccaagtataataacaaaaaagttgtaat

SEQ ID NO: 298451 - DNA, 604 bp, Homo sapiens
gcccaatgacatctaaaaacctcaacaaacaaggcaaaatttctcttgcttttattattgttttctcttaaagggtcttttctggaaaaccacaggactatggcatatttcatgttctgccttcttttgttctccacagtttcacaatacacttttagttttgaaaaaactatatttttggtctaccttaattgagttatcttattaatccccaaactatggtgtatgattgttaggactttcattttatagatgagaaaattggaaataagaaaaattaatttgctcaagtaccctgattataattcagttagtaawtgaacgaggatttgaaatctagtcagtatggttcatccactaccctgtttgcctcagcataaaatgaccaatatcattacactgactaaatacattccaaatcaagtaattgtatttatttagcttgaataactttgggaaacagtgataatatccattatttttttaaatactgaatataaccattattacctttaagaaattatgaaatttcagagaccccagagttggaatactggatacatctttcctaatatgccaagtataataacaaaaaagttgtaat

SEQ ID NO: 298452 - DNA, 495 bp, Homo sapiens
atttttgtttttttaaggaacttcatattgttttccatgatggctgcactaatttacactcctacccacagtgtgctagggttaactttcctctacgtcctcaccaacacttgttatcttttgtctttttttataataaccactctgacaggtatgtggtgacgtctcattattttgatttgcaattccctgacaaataataacrttgaacatatttttcatataccattgaaaatattagccatttgtatgtgttattttcagaaacacctattcagatctttgctcatttttaaatcaggttatttgttttattgctattgagttgtttgagttgattgtatagtttgtatatgaaccctttatctgaggtatagttggcatatattttctcctattctgtagtttctctcttgagtctgttgtttcctttgctgtgcagaaatttttaatttgatgtaattccattcacccattgttggttttgtcacctgt

SEQ ID NO: 298453 - DNA, 571 bp, Homo sapiens
attgttttccatgatggctgcactaatttacactcctacccacagtgtgctagggttaactttcctctacgtcctcaccaacacttgttatcttttgtctttttttataataaccactctgacaggtatgtggtgacgtctcattattttgatttgcaattccctgacaaataataacattgaacatatttttcatataccattgaaaatattagccatttgtatgtgttattttcagaaacacctattcagatctttgctcatttttaaatcaggttatttgttttattgctattgagttgtttgagttgattgtatagtttgtatatgaaccctttatctgaggtatagttggcatatattttctcctattctgtagtttctctcttgagtctgttgtttcckttgctgtgcagaaatttttaatttgatgtaattccattcacccattgttggttttgtcacctgtgtttttgtggtcatataaaaaaattgcttagacttatgtcatgaagcttttccaatatgttttcttctagtagttttatagtttcaggttctgcacttaaag

SEQ ID NO: 298454 - DNA, 629 bp, Homo sapiens
aatcaggtattatgaatattccaactttgttcttctttatgaccaagttgcctattacaggatgtttgtttctttatctaaatgttagaatcagtctgactgtatctacaaaatagcatgctggaattttgattgagattgtattgaatctataggtcaagttgggaaaaaatataaataagcagyattgaatctttaattccaaaaatgggaatatgtcttcatttatttagttcttctttgatttttccatcattgttttgtcattttctgcatatagattctatacacatttatttgggatatgcgtaagtactttattttgagttgctactattattattattttttcatttcaatttctaattgctcattgctggtttttaggaaagcaagtgacaatgtatcctacaaccttggtatacttgcttattagtttgagaaatatttttgcaatctgggatttttctaatctgggtagttgttactactttttcttattgtattgaactggttagatcttcaagtatagttttgagtaggcttagtaaaagtgaatatccttgttatgctcacaattgtaaaggtagatggtaatcatttcacagttgaggatgatattagctata

SEQ ID NO: 298455 - DNA, 586 bp, Homo sapiens
gacctcttcagcctggacttccttgtccatattactatcagcattttggtcaaaaccatttacaagtctctaggaagttgcaaacattcctgcattttcctgtcttcttctgagccctccaaactattccaacctctgcccattacccagttccaaagccacttccacattttcaggtgtctttatggcagtgcccactctcctggtaccaattttctgtattagttcgttctgtcactgctataaataactacctgagactaggtaatttatgaagaaaaraggtttaattaactcgcagttccacagacttaacaggaagcatgggtgggaggcatcaggaaacttaggattatggtggaaagcgaagaggaagcaacaacatcttaacatagtggagcagaagagagagagagaaaaaaagggggaagtgtcacacacttttaaaccatcagatcttgtgataactcattcaccatcacgagaacagcaagttgggctccttctcatggtagcaagataattgccaacaactcttcacactttatgcttactcattcatatccaaataaaaagaaggtcactt

SEQ ID NO: 298456 - DNA, 586 bp, Homo sapiens
gacctcttcagcctggacttccttgtccatattactatcagcattttggtcaaaaccatttacaagtctctaggaagttgcaaacattcctgcattttcctgtcttcttctgagccctccaaactattccaacctctgcccattacccagttccaaagccacttccacattttcaggtgtctttatggcagtgcccactctcctggtaccaattttctgtattagttcgttctgtcactgctataaataactacctgagactaggtaatttatgaagaaaagaggtttaattaactcgcagttccacagacttaacaggaagcatgggtgggaggcatcaggaaacttakgattatggtggaaagcgaagaggaagcaacaacatcttaacatagtggagcagaagagagagagagaaaaaaagggggaagtgtcacacacttttaaaccatcagatcttgtgataactcattcaccatcacgagaacagcaagttgggctccttctcatggtagcaagataattgccaacaactcttcacactttatgcttactcattcatatccaaataaaaagaaggtcactt

SEQ ID NO: 298457 - DNA, 586 bp, Homo sapiens
gacctcttcagcctggacttccttgtccatattactatcagcattttggtcaaaaccatttacaagtctctaggaagttgcaaacattcctgcattttcctgtcttcttctgagccctccaaactattccaacctctgcccattacccagttccaaagccacttccacattttcaggtgtctttatggcagtgcccactctcctggtaccaattttctgtattagttcgttctgtcactgctataaataactacctgagactaggtaatttatgaagaaaagaggtttaattaactcgcagttccacagacttaacaggaagcatgggtgggaggcatcaggaaacttaggattatggtggaaagcgaagaggaagcaacaacatcttaayatagtggagcagaagagagagagagaaaaaaagggggaagtgtcacacacttttaaaccatcagatcttgtgataactcattcaccatcacgagaacagcaagttgggctccttctcatggtagcaagataattgccaacaactcttcacactttatgcttactcattcatatccaaataaaaagaaggtcactt

SEQ ID NO: 298458 - DNA, 532 bp, Homo sapiens
tttaatgtgttgtgtatttaatggcacagaatagaaaatatcccagggaatttttcatgggaaattcaaaagagtatgcattcttttgttcaatattttatgtcaactacgaactttgtctaattattagaaattatctttattattagaaagtttattgattgtgctgtttgagatatctacatttttattgagttttttcccatttgatgtatcaattactggcagaggaatgttaaagtctttaaatataatagaagttctgtctctttcttctttcakttttatcatttttgccttaacgtattttcatacagatgttggatgcattcaagtttaggactgttacgtcttcttgaagaaatgaatgctttatcatgatgtaaggcccttctttagccgtgaaaattttgcttgttcctatagggccaaagaggaaggctcccctttcaccctcagaaaattcaccaaaaaataaacttataaaaggcagattaagtgaacaggcaacctacaaaatgggagaaaattt

SEQ ID NO: 298459 - DNA, 598 bp, Homo sapiens
tacaaacatgtaagccgtgccaagaaatattagttattaaaggccagtctccaaatgagaaactcaagaaacacaaaaatacttggaaatttaactatacagcaggtagagaacacagcatggaagggctggctaccaaaatagtaaaatataatggaagccaatggtccaggaagcamaaatatcattatcttaaaattaaggcagtatctaccatggcctagagggtgcacaactagaattagaagtttaggagagtggtcacaggtagagatgagtggtcacaggtggagattagtagctacattcgagattggatgggactagatgggggagtcagacggatccaaaaaaatgaggaaatggtatggtttatctctaaatgtcatgccttgaaaggctcaagttccagacataagacatcacttggtcgctgacatatgcttcaaagcaactatctccctacctctgtctcctagtcttccttcagactggataaacttggttctcgtgtcagctctgagatccaccatcccttgtcttcttcccacttcatttgtatagttcatattcattacgctggctgagttttcccctc

SEQ ID NO: 298460 - DNA, 598 bp, Homo sapiens
tacaaacatgtaagccgtgccaagaaatattagttattaaaggccagtctccaaatgagaaactcaagaaacacaaaaatacttggaaatttaactatacagcaggtagagaacacagcatggaagggctggctaccaaaatagtaaaatataatggaagccaatggtccaggaagcaaaaatatcattatcttaaaattaaggcagtatctaccatggcctagagggtgcacaactagaattagaagtttaggagagtggtcacaggtagagatgagtggtcacaggtggagattagtagctacattcgagattggatgggactagatgggggagtcagacggatccaaaaaaatgaggaaatggtatggtttatctctaaatgtcatgccttgaaaggctcaagttccagacataagacatcacttggtcgctgacatatgcttcaaagcaactatctccctacctctgtctcctagycttccttcagactggataaacttggttctcgtgtcagctctgagatccaccatcccttgtcttcttcccacttcatttgtatagttcatattcattacgctggctgagttttcccctc

SEQ ID NO: 298461 - DNA, 528 bp, Homo sapiens
tgaaagacaatattaagaattgtttatcagtaacagatactatacaatttgacagataatatataccatgaatctataatcacatgactcctcaaaagtttatatacaataaatggaaaatgttactcatattatgacagaaggcacaagtagggagagtttaaatgaattccaccaagtcataggctgggataatgttactaagtcttaggccagacccacaatttctcccaagcaattagtcaacttaacagagcaatctgactttargtgaacattttgtggcaccttgattctgtaggcaatttcaactgcttttaaataacacttcctccaggcttcagaggcattgtcactttatgggatggaggaattaggctattacatatcacaaagctcatggtaactgaatgatcacattaattccaattagttcagatgtgagcaagatcctgaataaaaaagacagcctgaagcactgaggaaaaaaatctaaaatggaaatacattgagttaccaagaggattc

SEQ ID NO: 298462 - DNA, 534 bp, Homo sapiens
tcacatcacatttacagacattagtgaattatattggatctgcacttctcattatatgtgtggtagtcctcagcatctgattacagggctttattcaaagtgtttgcttggcaagtatctatggccttgtcacaatgctgtttagctagaaaaagaagacacagctaatttctattccttcttaagttgttgtgtgaacaggtttaacctctccatgcttttactaatctgtaaaatgaagaccatattagctctctttcctatatcacataatttatgagaataacccatgtattcatgtcccacacaaatttggaactacagtaggaaacytaaaatggtagcagaaccatattctctttgtctctgatgccatttgtagaattttagaaattctgacctaattgaaattactgcgttagtttggaaaattccaggggcctgactggcatgcaccgtcctacagtgtatttccttctttacagttcctgaatgtgatgtcttaggatgatgtcactttgctaaagtgggaac

SEQ ID NO: 298463 - DNA, 534 bp, Homo sapiens
tcacatcacatttacagacattagtgaattatattggatctgcacttctcattatatgtgtggtagtcctcagcatctgattacagggctttattcaaagtgtttgcttggcaagtatctatggccttgtcacaatgctgtttagctagaaaaagaagacacagctaatttctattccttcttaagttgttgtgtgaacaggtttaacctctccatgcttttactaatctgtaaaatgaagaccatattagctctctttcctatatcacataatttatgagaataacccatgtattcatgtcccacacaaatttggaactacagtaggaaacctaaaatggtagcagaaccatattctctttgtctctgatgccatttgtagaattttagaaattctgacctaattgaaattactgcgttagtttggaaaattccaggggcctgactggcatgcaccgtcytacagtgtatttccttctttacagttcctgaatgtgatgtcttaggatgatgtcactttgctaaagtgggaac

SEQ ID NO: 298464 - DNA, 526 bp, Homo sapiens
cctatgcttataggcatgagcaaagaaatgacctgaaactggaacttacattttaagaggaaggagaatgtaaatgcttaggaaatttacagcccagccatgtggtagaaaagaaaagactgttttcaggggaggaattcaagcaggctgcagaaatttgaagaaataaaaaggagccaagtgctaatatccaagacaatgaggaaaaggccttgaaygcattgaagagaccatcctggcagcccttccaatcacagacccagaggcctatgagggaagaatggtctcataagccaggcccagggcgctgccaccctgcacaggctctggacactgctccctgcattccagtcacttcagctccaggctaaaagtgtcccagtgacagcaagagccactgcttcagaggatgcaaacagtaagccttggaggtttccacatggtcttaagcctgtgggtgcacagattgtaagagttgaggctttggagcctccaactagatttcagaggatgtatggaaaagcct

SEQ ID NO: 298465 - DNA, 472 bp, Homo sapiens
tgcacagcaaaagaaataatcaacaaagtgaagagaaaacccacagtatgggagaaaatatttgcaaattatccatctgaaaagggattaataatcagaatatataaggagctcaaaccactctataggaaaaaaacctaataatctgatcaaaaataggcaaaagatctaaacagacatttttcaaaagacatacgaatggcaaacaggcattttaaaaggtgccaacatcattgaccatcagagaaatgcaaatcaaaactgcaatgagatataatttcaccccaattaaaagggcttatatccaaratgtggcaggccaggtttccattagcaaccagaacagtcaatttccactaaccctttactataatgctggtgaatgtacaaattaaacattaaagaactggagaaattgatacctgagtaaaagggctggaatgtgaaaacaaactcattacaactcagcctg

SEQ ID NO: 298466 - DNA, 472 bp, Homo sapiens
tgcacagcaaaagaaataatcaacaaagtgaagagaaaacccacagtatgggagaaaatatttgcaaattatccatctgaaaagggattaataatcagaatatataaggagctcaaaccactctataggaaaaaaacctaataatctgatcaaaaataggcaaaagatctaaacagacatttttcaaaagacatacgaatggcaaacaggcattttaaaaggtgccaacatcattgaccatcagagaaatgcaaatcaaaactgcaatgagatataatttcaccccaattaaaagggcttatatccaagatgtggcaggccaggtttccattagcaaccagaacagtcaatttccactaaccctttactataatgctggtgaatgtacaaattaaacattaaagaactggagaaattgatacctragtaaaagggctggaatgtgaaaacaaactcattacaactcagcctg

SEQ ID NO: 298467 - DNA, 573 bp, Homo sapiens
ttactgtgcttttaatttgcatttccctgattagtgatcctgagcattttttcatatacccattcgccatttgtatattgtctttgaaaaaattaatatctaaaatatgcaaggaactcacagaactcaatagtattttatatcacacacacatataggagctcacacatctcaacagcattttaaatatatatatatatatgtttgtgtgtgtgtataatgctattaatttttgtgagttccttatatattttagatattaatcccttttcagakgcatagtttgtaaatactttctcacattctgtaagttgcattttcactctattgagtgatttattactttttagtagaagattgtgacataaatcaagaaagtaatagagataaaataatcataggcaaaattaagtaaatcaagtttgttaactttcaatcagtggaacatagttcactagatatttgatggttttcaactggggttgaggaatgagaatgcaatcatgattcatttgagaaagtgtccttggtgggtatcgctaactctctccctcccaactctctttagggtgt

SEQ ID NO: 298468 - DNA, 435 bp, Homo sapiens
ttaaatcaggctctaaaatatttatgaaagcaagaagataccatctatacctactccaagtacgcctttgtgggtagtgcacaccttcggaaaaatttggactgagcggggtctaattaacagcaaagggcaggaccttgtccacaaaggattaatcactcaagttttaaaaagcttacaattacctgaagaaatagctgttgtgcatgtcccaaggcaccagaaaatttctacctttgaaagccgaggraataaccttgctgatcaaattgcaaaacaagctgccctctttcaaaaagcacctatcttctacctgactccctgtctctctcccctagttgcaatccctatcttctctcccgctgaaaaggaaaagttagagaaactagtagctaaggaaaactcagaagggtagtgggtgttaccagaccaaag

SEQ ID NO: 298469 - DNA, 435 bp, Homo sapiens
ttaaatcaggctctaaaatatttatgaaagcaagaagataccatctatacctactccaagtacgcctttgtgggtagtgcacaccttcggaaaaatttggactgagcggggtctaattaacagcaaagggcaggaccttgtccacaaaggattaatcactcaagttttaaaaagcttacaattacctgaagaaatagctgttgtgcatgtcccaaggcaccagaaaatttctacctttgaaagccgaggaaataaccttgctgatcaaattgcaaaacaagctgccctctttcaaaaagcacctatcttctacctgactccctgtctctctcccctagttgcaatccctatcttctctccygctgaaaaggaaaagttagagaaactagtagctaaggaaaactcagaagggtagtgggtgttaccagaccaaag

SEQ ID NO: 298470 - DNA, 575 bp, Homo sapiens
tgattgtgagccctccccagcaatgtggaactgtgagtcaattcaacctgtttcctttataaattacccagtcttgggtatgtctttattagcagtgtgagaacagactaatacagcatcctttactaycccgtagtttcagggtcctcttctgataaaaagggatagtgggatggagtaagcaaagtcaaatttgacactttttctagcactcttgaactacatcaagatttgccactttttctagccctcttgtactacctcagtgtctttgcactccctctccttccaactctcatacagcatgatttctgggtcttaaattaggcatttataaaattatacaaataaagctacttgccatattatctctcttggagtgtatttgcattacaagctttatctaattgtgtatttaaggctttgcttcctatggaaggaagagcagactccagggaggaggtgggagatggagggcctttttcttaaccctggaatcacatctctgccccatgcataaggcagccctgtggggaattgttatgtgcattgctctcgagtaacaggtgagaatg

SEQ ID NO: 298471 - DNA, 492 bp, Homo sapiens
ttaggtccatggtgatccattaggtggcagtttttttagttcctaaatgtatattcataatggaacactcacatttgttctttgacctgtaaatccaattattttagcargaaaagccaagtagaatccttgaagttgttctctccctatccctgccaatacagtaagtcaaattataatgcatcccaaggaaaatgacagagattagtgccatattcaaagaccaaaataatgcagacatggtggtctcaatcataacttcatttaatttactagtataaaacttgcaataacttgatgaattgtgacatatcaaagtggattaccaggcacttaactaagtactagccctaaatgaagtctctatgacacagtttgcagctatcaatcttgtgaatacattctttccataccaccagggaagaataaatgattcaccttcatattgaatagtcaaagtgcctatcacagtctgtctccaggtcaatgtta

SEQ ID NO: 298472 - DNA, 556 bp, Homo sapiens
gcttaagtgtataaaaactgaaatacaagtaggcttgtgaaatcaggaactggaaaaccagagatcaagacttcctcaatccaccttttatttgtgtctaagtacctgctccatcttctgcttctgactacatcccacctgcttagttgttggcatacatatagctaaaaatgactacgtcaggttgcctctatcgaattcaatcacatatctcatttccacaccctacaacttgtgcctcttagtgtaagtatagacaatatgattgatcaccagctggttaaagcactggatactttcagtccaatgcataccccgaattcaatgagctgttgtkttgagaccacatggcacaaatttgactgaaggcacctgcaattttaacaggcagctgctagagaagagagttatggggaggcagacacctcaagacatgtttcttttatttagtcacacttaatcctttaatgtcttacacctgaagagtgagtcaattttttattaggtttatgacctagaccaagggttttcactatttaacttttaagtatttcat

SEQ ID NO: 298473 - DNA, 622 bp, Homo sapiens
catttacatgtatacaagttttttagttcataattgcttttttccctctaagataattctcctttctcaagaaatatatccagtcaatataaatatatccaatatttcctttctctggaaatagatcatcaatgacgatctgctagtrgtaaataaatattttttttctgttctaaacatgctttaattctactttgatttcttctatgctatgtttttaatgctatgttgttattattttattattttaatatactttattattaaaattattagtataataatttttattattatgttttagttgtagatttacaggaagctgcaaggatagcacagagaggtcctgtgcacccttcacccagcctccctctatggaatatcttcttcggttatagtacagcttcaattccaggaaattggtgttgatacaaactagagttcattcagatttcactccctagatacacactaatttctctctctctttctctctcccctccaatcccctttcaattattgtcagatggataactccatgacactacactaggtcaagatacttacctgtgctatcttcgcaggttcccttatgctaccctttaaagatacccactcctta

SEQ ID NO: 298474 - DNA, 622 bp, Homo sapiens
catttacatgtatacaagttttttagttcataattgcttttttccctctaagataattctcctttctcaagaaatatatccagtcaatataaatatatccaatatttcctttctctggaaatagatcatcaatgacgatctgctagtagtaaataaatattttttttctgttctaaacatgctttaattctactttgatttcttctatgctatgtttttaatgctatgttgttattattttattattttaatatactttattattaaaattattagtataataatttttattattatgttttagttgtagatttacaggaagctgcaaggatagcacagagaggtcctgtgcacccttcacccagcctcsctctatggaatatcttcttcggttatagtacagcttcaattccaggaaattggtgttgatacaaactagagttcattcagatttcactccctagatacacactaatttctctctctctttctctctcccctccaatcccctttcaattattgtcagatggataactccatgacactacactaggtcaagatacttacctgtgctatcttcgcaggttcccttatgctaccctttaaagatacccactcctta

SEQ ID NO: 298475 - DNA, 584 bp, Homo sapiens
actcacatttcttcacttatacactgcctttcaggcctgaaggacttattttcccagttactgggagttctacccgctgacagctgaagcctggggattttccttagctaaaggtcaggcctgtttcttaggagcagcctgcattcaatggtacaaaagctgggctccctggaccccacctgaggacaactctgaagtactrtccagcttcagaactccctgtggggctggacaaggccttgccatgggtatgtggcagttctgcttctcctgcccaatcctgctcccattcttccccacacaggcatcaatcctaagagcaccactagtaaactgtcctgcatgctaagctctgcctcatagtcttatttccagggagaagaacctgtgacaacaggcatgccctcttcccctgaccgtctcatccatttgggcatttaggggtctggattaatgcaggtagctctagttacacttcccaccttctgcaaacacaaatcctcattttctgtccttgcttggcttttcgtttcttatttgcccctgataatttttctgagtgtcttacaaattcagctttgcat

SEQ ID NO: 298476 - DNA, 528 bp, Homo sapiens
gaacctgtgacaacaggcatgccctcttcccctgaccgtctcatccatttgggcatttaggggtctggrttaatgcaggtagctctagttacacttcccaccttctgcaaacacaaatcctcattttctgtccttgcttggcttttcgtttcttatttgcccctgataatttttctgagtgtcttacaaattcagctttgcatgaaaggaatgtttactatatttgattcagtatttctcagtgctgtgtagcaacagggtttttcagttatatagatcactgcaatgccagaacagatgattggcatgaggacttcggatgggactgcttgatagcattgttaccattattggcatgagtgatcactgttgttctttctatgaaagtagaaatttgtgaatttgccctttccatattttgtggatgttttgtgtttttgcatctatttattgcctctttgtgggtgatttttggatacactgacttctcagttaacaaagctctcttatccccagagaatggaggat

SEQ ID NO: 298477 - DNA, 559 bp, Homo sapiens
attctgttgtgtgtatcagcagttcattcctctttactgctaagtatttttcaattatatggatgcaccataatttgttgatccattagtcagttgatggacattagggtggttcctaatttgggctattatgaataaagctgcttataaacatttaaagacacaggacttctaattttcttataaactctcctgtcctctgtcccaaaagatttgggattccaaagcccttaayctcttagatatcataaggtatttatgagatgagataaattgagccccactatgccactgtgttttcattttattctgggaataaatatataagtcaaatgggaaaaaacagtaacaaagacatgaattctttagaagatttgtacaaatcttattttgcttattgtccatattatttttggctaattcttccatgtttctacatacttgattatgtatgtctatctgtggttggtgccaaatgttttaaaccctattttcttccttatttcccttcctatttatcattgattttagcccttctaacaaatatataataaaatat

SEQ ID NO: 298478 - DNA, 559 bp, Homo sapiens
attctgttgtgtgtatcagcagttcattcctctttactgctaagtatttttcaattatatggatgcaccataatttgttgatccattagtcagttgatggacattagggtggttcctaatttgggctattatgaataaagctgcttataaacatttaaagacacaggacttctaattttcttataaactctcctgtcctctgtcccaaaagatttgggattccaaagcccttaacctcttagatatcataaggtatttatgagatgagataaattgagccccactatgccactgtgttttcattttattctgggaataaatatataagtcaaatgggaaaaaacagtaacaaagacatgaattctttagaagatttgtacaaatcttattttgcttattgtccatattatttttggctaattcttccatgtttctacatacttgattatgtatgtctatctgtggttggtgccaaatgttttaaaccctattttcttccttatttcccttcctatttmtcattgattttagcccttctaacaaatatataataaaatat

SEQ ID NO: 298479 - DNA, 521 bp, Homo sapiens
atttttgtgtttttcatgttctatgttctcttactaaataaatacattttatgtagttatagctgtaatgtaggcacagttccatactctgttttccatttaacattttatttcataatcattttttctatgtcattactgcagcttcaggctttgcagcccagagcgtgtgctccacctagtttttccatttctcttgaggaagcatcagatagagctgggtgaggtctgtcctttggggtcagtgggggcttcccactgcccctctggccgagtgcgtggtgggagcttaaagtatcataggggctgagagttgtggcaaaaagacccttgaagttgcatggaaagatcaactttaaaattatttttcccagcatagatcctgttggagtttgctgggattataacaccaatgaggctgatggacaaayggagaagagggaactcagaacttggagctactttgttaatcagcagacctgggccttgggaggatagtcctcaccatagggccgagaata

SEQ ID NO: 298480 - DNA, 581 bp, Homo sapiens
ccattcaatttatttattctggattcttactctgcctccttccataaaagatttgagacgtcttgacactgcagagtcagtgattccagctyggggtcttagaatttgtgccccttttatttagacctacatagtatggagtgcatagaaagaagaataggaactggggaaagacaaacaaagcttaaggagggttgtaaaatacacagaagtaagcaggtgatcttggctagtatttatttcttaggcaggacacaccgggaataaaaaaatacacagcctactattcctctgaggaaatgatgaatgaagtaaatgttattagaggcccaggaggatgcttttccttatttgttaatgtacctcgtgctgaaaatatgccgagggctgtcagcgctgggcggcagaattctaagaagcctttcctgccgactcttctgtttcgtggaggcagtctaacttccacctcacagagagccaccagaaggaaagcctacgttcccttctctcttcccatgtctttttattcctctccttcctggccagcatttgacagtggaatgtcttcccaggatgtacac

SEQ ID NO: 298481 - DNA, 581 bp, Homo sapiens
ccattcaatttatttattctggattcttactctgcctccttccataaaagatttgagacgtcttgacactgcagagtcagtgattccagctcggggtcttagaatttgtgccccttttatttagacctacatagtatggagtgcatagaaagaagaataggaactggggaaagacaaacaaagcttaaggagggttgtaaaatacacagaagtaagcaggtgatcttggctagtatttatttcttaggcaggacacaccgggaataaaaaaatacacagcctactattcctctgaggaaatgatgmatgaagtaaatgttattagaggcccaggaggatgcttttccttatttgttaatgtacctcgtgctgaaaatatgccgagggctgtcagcgctgggcggcagaattctaagaagcctttcctgccgactcttctgtttcgtggaggcagtctaacttccacctcacagagagccaccagaaggaaagcctacgttcccttctctcttcccatgtctttttattcctctccttcctggccagcatttgacagtggaatgtcttcccaggatgtacac

SEQ ID NO: 298482 - DNA, 581 bp, Homo sapiens
ccattcaatttatttattctggattcttactctgcctccttccataaaagatttgagacgtcttgacactgcagagtcagtgattccagctcggggtcttagaatttgtgccccttttatttagacctacatagtatggagtgcatagaaagaagaataggaactggggaaagacaaacaaagcttaaggagggttgtaaaatacacagaagtaagcaggtgatcttggctagtatttatttcttaggcaggacacaccgggaataaaaaaatacacagcctactattcctctgaggaaatgatgaatgaagtaaatgttattagaggcccaggaggatgcttttccttatttgttaatgtacctcgtgctgaaaatatgcygagggctgtcagcgctgggcggcagaattctaagaagcctttcctgccgactcttctgtttcgtggaggcagtctaacttccacctcacagagagccaccagaaggaaagcctacgttcccttctctcttcccatgtctttttattcctctccttcctggccagcatttgacagtggaatgtcttcccaggatgtacac

SEQ ID NO: 298483 - DNA, 628 bp, Homo sapiens
atccttgccttgttcctgaaattaggggaaaagcattcagtctttcacaaattagaatgatactagctatagctttttgtggatgctctttattaagttaaagaagttctctgtattcctactttgctgaaagcttttgtcataaactaatatcgacttttgtcatatacttttctgcatctattgagatgatcataaagtttttttcttttttttatttgagacagagtctggctctgttgcccaggctggagtgcagtggtgcgatgtcggctcactgcaagctctgcctcccaggttcacgccattttcctgcctcagcctcccgagtagctgggactacaggcacctgccaccactcctggctaatttttttgtatttttagtagagacagggtttcactatgttagccaggatggtctcgatctcctgacctcgtgatccgcccaccttggcctcccaaagtgctgggattacaggcgtgagccactgygcccggccaaagtttttgtctttcatctgttaatatggcaaattacattgactgattttataatattagagaagctttttactactaggataaacccccattatttgggatgtagaatgctttctacatattgt

SEQ ID NO: 298484 - DNA, 599 bp, Homo sapiens
taaaatgtaaacagaatataaatgattcattcagcacatttctagcctcccatagtgtacatgagactttccycagatgagcacaagattaatttgtttcacatgatttatatagtaattgagacctcagcatactcaaacagtaaataataatacatggtactgcctggtgctatttacctgagttattcataaacttagctctactattacaggcagctgtacctacaatgataccactcaggatttggagtgggctcagcaagcattgtgtaccattgtgatcataggcaagctcaataaaatcttcctccatcccaacatggtaagcaatgaatagagctttggggagcaaggtttcatgtatctgcaaaatgcttgacaattcaaagccattctttgttcttattggtaaggaacttggtgataattcaattgctgcctgaggtttagaagaactaagcaaatcaatttcatttctttagatgtcgtccttgagttattaaattattttaaaatttaattgcattggaagagttatttctgtgctgtgatcaagtcatagttcacaagcatgtggaaggtgtcagtcagtcagg

SEQ ID NO: 298485 - DNA, 288 bp, Homo sapiens
tgggggcgcgggaggctggtgggtgtsgggggtggagatgtagaagatgtgacgccgcggcccggcgggtgccagattagcggacgcggtgcccgcggttgcaacgggatcccgggcgctgcagcttgggaggcggctctccccaggcggcgtccgcggagacacccatccgtgaaccccaggtcccgggccgccggctcgccgcgcaccaggggccggcggacagaagagcggccgagcggctcgaggctgggggaccgcgggcgcggccgcgcgctgccgggcggg

SEQ ID NO: 298486 - DNA, 288 bp, Homo sapiens
tgggggcgcgggaggctggtgggtgtcgggggtggagatgtagaagatgtgacgccgcggcccggcgggtgccagattagcggacgcggtgcccgcggttgcaacgggatcccgggcgctgcagcttgggaggcggctctccccaggcggcgtccgcggagacacccatcygtgaaccccaggtcccgggccgccggctcgccgcgcaccaggggccggcggacagaagagcggccgagcggctcgaggctgggggaccgcgggcgcggccgcgcgctgccgggcggg

SEQ ID NO: 298487 - DNA, 255 bp, Homo sapiens
tgcatacttttgcatcctttcaccatgagaagagcttattgagggtacttgctgcccctttaatctgagcctcagaataaatacacattgaatagagctattccaccctatctatagacttgcagtatgaagcagagccaaccaggtgccacagatcgaggctgaactgccctacccatgagcaamataaattcttttgttaattagcactgagcttttggtgattatttgttatatagcaatagctgactcttg

SEQ ID NO: 298488 - DNA, 530 bp, Homo sapiens
ttgctctttaattcagattcagtaacctgcccctttaatataaattactggtgcaatatgtaacagagttttttgactgcctactctagtccttgctgacagaactttcatttggataggggtgggaggctgtttccttctccccagcatgacttaagtagacactgattaattaaagcttgtcacagtactttcatttcccttgtcaatgattgttttttgcaaccgagttctggccagttaaacaaaatgggagtctgctggagaaattctggaaaaggttactgttatggtttggctctgtgtccccacccaaatctcatctcgaattgtaatccccacatgttggaggagaggcctggtgggaggtgactgaattatgggcrgacttctcccttgcaagtgagttctagtgagttcttgcaagatctgaatgtttgaaaatgtgtggcacttccacctttgctctctttctctccctcttctctctctcctgccatcaagtgagacatgtcttgcttcccctttga

SEQ ID NO: 298489 - DNA, 592 bp, Homo sapiens
accagtttataaaagacaaaaaataataattataccttgtagggatttgaatatatttagaagtaaaatacatgacaatagcacagtagatgagggagataaacagagctaatctgttgtaaaattattccatctttagggaattgttacaagtaggaattaaatgttaaccgtaataactctaagatgcatgtaatattctattgtttaaatagccaccacaaaacttactggtctaaaacaatcacagcatttattttattcatgaatctacaatttaggcagggtttagtgggagcagattgtctattatgccctactcagcattagctaggatgactcaaaggcttgctaacttgtctgtttggtagttgatgctagctcttggctggaatctccatggcactatgtccagaacaccaaaatgtggtctttctatatagctccctgacttgggatggtgrctaggttccaaggctgggtgccaggctagagagccaggcagaaactatatctccttttctaacctatcctcagaagtcatatagtgtcacctttaccacattttattggttaaaagcaagtcactgaa

SEQ ID NO: 298490 - DNA, 548 bp, Homo sapiens
ctttgacagagaaatatctttgtaagcaaacattaagaatgctggctgggtgtggtggctcatgcctgtaatcccagcactttgggaggcctaggcaggaggatcgcttgagcctggtacttcaagaccagactgggcagcatggcgaaatcccatctctacaaaaaaaaatagaaaaattagccgggtatggtggcatgcacttgtagtcccagttacttgggaggctgaggtgggagaatcacctaagcccaggaggtcgaggctgcagtgagccatgccactgcactccagtctaggtgacagagygagaccctgtctaaaaaataaaaataaaaagaatgctaatcatttctgagttcgctgtgacttgtaatactggggatctcccttgtaacactggaactgaaagactgacgaaagctatgtcaagcattcattattctgaagaggaggagaaatgccacatacctttcccattgaacctgtggtggaataaatccatggttgtgtcttgctttgaacagacttttgttctgagcactgct

SEQ ID NO: 298491 - DNA, 580 bp, Homo sapiens
gacaccaatgaaattatttgggcctagagttttctttgtggaaaagtgtttattttcagattcaatttcttaaataattacagaagcatttagctttcgctccatttccttatatccccagttttctgcttattctcagacttgactgtgatccatccaatatgaatttttatccattctggaatgaaagcaagaactgaaattgggtgttgtggcctctttgatgtgtttgttatcagtctgtctttggagttgcaaaagttctgtcagcacaaaccataaattttccccacttctgatactacctgaaacctggcagrtggttaatttcattgccaacaatctgcttattgcaactaaaatataaatcagaactccaggacatctatactaaacaacagcttagaggaagaaagtatttgagtggcaggttcagggtggcaggaactgcaaaatgggatgtttaaaaaagttcttaatagccctctcattggtgaactaaagtccccatgatatctaagctacagaaagaggcagcaaactcactgagtttcagatgcgtgtgtgacaagcaaatagt

SEQ ID NO: 298492 - DNA, 517 bp, Homo sapiens
cgagatcaaggggaatggtcacttctttacctatgtatttgtgaattttttaaaagaatgtatccatgtattatttatgcaaaattttctgagaagaatgaatgggaagtgaagaagtggatgcagatgttgaatacttttctctgaggtgcatgaatgtgaagggaaggagagagataggatagcagccagaagaagttcctgtttcgggaaacacttgtggactggggttttttgccgtcagtcacacgatggatgcacgggtgggctgtggagcactcctgggaagsgggcatggtcaggcctgtgcccgcgcattacaaggggcgcattcctcactcattcatctgccccttggcttatttcttttcaagtcccacacagagaagcaaggccttgatcattatcagcacaactgctttactttccttcgggaaatgatacttaattagtatttgaaagcagtacattatcttgaattcactgtctattctaaggcaaagcaccccaaaaatct

SEQ ID NO: 298493 - DNA, 524 bp, Homo sapiens
gtctattgctgtgtaacaaacatctcaaagctgtgtggtctaaaatagtgattttatattttatgattctgtgggttggcctgggtgcaactgcatagttcccctggtataatttagaatgtgtcatgcagctgcagtcaagtggtcacggggacaagaatatctgaaatggctttacttacatgtccaacaccttagcagggataactggaatcctaatgatatctttctccaggtgctgtctctctcaggttagcttgggctttttcagtggctggatctcaagaggaaagggttccaagagagcaagctccattgtgtaagccgctgkttgcatcctgtttgctaatatcaaaattgccaatgtcacatcagtcaacatgtctaggactagattcagtttgggaagagctacagaagatataaatatcaggtggtgtggtacattggagccaccaaaataagtctgccatcagataaacaattaattcctcgcttttatgagcatggaattggtgctagat

SEQ ID NO: 298494 - DNA, 666 bp, Homo sapiens
taaataggtgggacttaattaaactaaagagcttctgcacagcaaaaggaacagtcagcagagtacacagacaaccgacagagtgggagaaaatcttcacaatctacgcatccaacaaaggaycaatatccagaacctacaaggaattcaaacaaattagcaagaaaaaaaacgatgccatcaaaaagtgggctaaggacatgaatagacaattctcaaaagaagatatacaaatggccaataaacatatgaaaaaatgctcaacatcgctaatgatcagggaaatgcaaataaaaaaccacaatgcgataccactttactcctgcaacaatgaccataatcaaaaaatcaaaaaataatagatgttggtgtggatgcggtgaagagggaccacttctacactgctggtgggaaggtaaactaatacagccactatggaaaaaactgtggagattcctcaaagaactaaaagtagaaataccatttgatccagcaatcccactacttttcccagaggaaaagaagtcatcatacaaaaaagatacttgcatatccatgtttatagcaacagatacttgcacatccatgtttatagcagcacaattcgccattgcaaaaacatggaaccagcccaaatgcccatcaatcaacaagtagataaggaaa

SEQ ID NO: 298495 - DNA, 585 bp, Homo sapiens
ggttcccatcccgagatgtggactccgtgtctgagggaacagcgcctgccccgccctccaccatgaccccaccctcttcctggggctgtcccaagcaagtcatctgggcagctagaatatgaatggcagattctagaacaagctggctcagcctctggcatggtcaccacctgtgccctggccatgcatagagtgggatcctgtgtgaaatggactgtgctgggttaggctgagggaccagatgagcagcgatcggacayggttatgtaagaatctgctttcatagcaattttctactttgtagcttacttttctatactattcgcaggtttatgacatactaccacattcctcagatgcgagaacgtagcaagtgtggaggtctctgagggtgctgggcctgtccccaaggccagtgccgcccatgggagggaaggtcacgacacggtgagggggcaccacacaggccctgtggagcagccacccgccatcagactttgctgggcagtttcacaattgtcaacgtccaccaggacagtgaggatcccacataggggcaccaggctcaaaagcaaggtctgcaga

SEQ ID NO: 298496 - DNA, 556 bp, Homo sapiens
accatttatcaacttcagccctactgacatmtggggtcaggaaacttttttgttgggggctgccctgtgctttgttgggcacttaacagcacccctggcctctccccactagctggcacgcttccctccccgggtgttaggaccgacactgtgtccgggcattgtcaaatgtcacaggcggcagagtcattcccagctgaaggccactgatgtaggaggacgtgggtcccatgatctggcttcgtcactcatctgtccagctggctggggggagacggggcctttctcggggagtttggagacagccaagctctcctgaggggccccctaacagcctgatgcagttaggctaatgcagtgaggcaccactgccgagctccgtgttgaaagtagaacaggtgccctttgcccattttgttaaactaaaggacagaaaacatttgtctaattttgcctttctcacgtctttctaccaggaaatattaaactcactcgctcaatgcatctttggactgattgttacaggataggagcatttcagtggcatatttcaagg

SEQ ID NO: 298497 - DNA, 575 bp, Homo sapiens
tttattttttatcttaaacatatccagagttgtatggctacacacwcaagctgtagcagttggtcaggatttaagctactagaagaaagttaagcttctgcgtcaactggctgagataccagccataagctgacaagtaattaaaccggtatatctataacaactgtcatctcttatttctgtgcaacttggatgtaaaccaagaaagccagagagagagagaatgagtgaacctccatcatcgaaggccaccgccctgctgaacagtttagtagacttgagcatttagcggtttgacgcccggatcaaaagggtcagcgctccctttaccaattaacagcagggagaagcacagcagctaaggtgtaaatttcaactctgcagttttgaggaagccgagcataaaatgcactctcgcactcttgagtggctgctgctcaatggtgatgccaccactgctgtccctagaagctgaaaggcaggcggtaccctgcccagggccagcagggcctggccccctccccaggtggtcttcttggggttggtgcctgcattacctgtggtctgaacaaaaa

SEQ ID NO: 298498 - DNA, 528 bp, Homo sapiens
ggtctgaacaaaaactcccttctgcccacactctctctccaccaagacacatgacagatattctacagagatctctttccgtgtggagatatttcacattaatagagagagaagaagtggcgccggtggagctctcaatggttcaaaatgatgggaaaagttaagtggcagccaacccacatttccaggcttgaggctcaatctaatggacggtctgagctcctttttgtgcggggacttcgtttgtttgatgcatttgaaaacaatgttatggggactattagctcaattgagatggctcctcactttccaagataaacaggcaattaggttcctctgcatttttggtcctgggaggatgagagacctgggttaggtcagaagcccagctttcaggggagggggactcagggtgactccctatgccwttatctcctgcttggcaccccagtgatttgcaaaggattacttgcctgacactggatgccactatatagcaacgagagagtgaaaggaaaaatactgcag

SEQ ID NO: 298499 - DNA, 574 bp, Homo sapiens
aagctctgaagacacttctgcaaggtagtatccaatatgacagagamcagccagaaaatatgaattgtgtgccttgatgcttggcgtcaaatcaagtttaggctaaagctgcctccttatgaattttaagttcagcctaaagggttctctgcacatagtgaacggcagcttatgtggaggtggaaacagactaacctcctgctcttcggccaatcacagagttttggccaatcaaagggcgctgactggtcaaactgtgttccaataaggcaaacgccgggctacaacctctctggctgtttctgtacctcacttccgtgttctgtctatacatcttccaccacgtggccgcgctggactctgagtctactcaggctcggaggctgccggatcagtgaatcgttatttgctcaattaaactctgttaaatttaatttgtctgaggttttcttttaacattgtgtttagggagggggacactcgcaaagtgctcctgggatcccatctgccccacacacgtggcagcaccagcggccttgtgtgggtgcagttccccctttgcttcaatactgag

SEQ ID NO: 298500 - DNA, 602 bp, Homo sapiens
agtaagggaaacaggaaggggccaggagcggggagccggggagcccgcaggactcctgggtctcctcccccagattcccaaactgccagccggtcttagccgtgtcttccagtgaggggaacccgcacagttcatcccgacccttcagaacgtctctttctgaggagtgtgtagtttctctaagctgaaggctgatttaaagaagaatttgtgcctgggggaaaggccccgttggccttttagtacaatacaattccgaaggcaatcacaaaagaagataggcttgccggagttaatgagattcctcaccaaaaacactaatctgggttaaaactaaaagaatgctgataaggatattacagctcacactgagaacaagaacggtgctccgctaagatcaattgtgcatattaggaggcagcctttaatagtgtttaaaaaaatctgaggaaatggatgttagagacaaagcctcttagatgaggagcggctgaaatagaataaaacataccattttcattttttttttwaaatagcgttccaggtacaaatcaactaatattaacagaagtttaacatcactttaaaagaaagcgattgac

SEQ ID NO: 298501 - DNA, 602 bp, Homo sapiens
agtaagggaaacaggaaggggccaggagcggggagccggggagcccgcaggactcctgggtctcctcccccagattcccaaactgccagccggtcttagccgtgtcttccagtgaggggaacccgcacagttcatcccgacccttcagaacgtctctttctgaggagtgtgtagtttctctaagctgaaggctgatttaaagaagaatttgtgcctgggggaaaggccccgttggccttttagtacaatacaattccgaaggcaatcacaaaagaagataggcttgccggagttaatgagattcctcaccaaaaacactaatctgggttaaaactaaaagaatgctgataaggatattacagctcacactgagaacaagaacggtgctccgctaagatcaattgtgcatattaggaggcagcctttaatagtgtttaaaaaaatctgaggaaatggatgttagagacaaagcctcttagatgaggagcggctgaaatagaataaaacataccattttcatttttttttttaaatagcgttccaggtacaaatcaactaatattarcagaagtttaacatcactttaaaagaaagcgattgac

SEQ ID NO: 298502 - DNA, 515 bp, Homo sapiens
agaaaacccacttagatcagctcaaaaccagaggatgtgtaagctggtataaatgaaagtggaaggagagacacagagttttactccccctctctattagacctaatttccatgtccagtttctggcagcctccagttcctcccaggccccagtgcagacatctccatgcagcgcccctgctgcctgctctctggggatctgacggccgggctcagcatggactcaagccaccagccctgatccccctggagatcagggagaggccctggcagctccrcctctccagggctccacggacctgggaccagccacccaggggtaagtgccacagcctggaggtgctggaaggagggcccctggggcaaatactgggccatctgggccgtcttggaagccagcggataaatttccctcccttctaacctctgcaaccacctggggctgttctcagcaggtggtttcacacgccctgcccagagctgagcccctgacttccctggtgcggctgggccag

SEQ ID NO: 298503 - DNA, 579 bp, Homo sapiens
aaatttccctcccttctaacctctgcaaccacctggggctgttctcagcaggtggtttcacacgccctgcccagagctgagcccctgacttccctggtgcggctgggccagatcagaagtgctcaaccttgaacctgtgcctcgccttcctcactgcttgtttcccacctgcccctgccctgcatcacactccttgaaattgccamctcttaaatgcaggctcagcacctattttctggcgtgcctggcctaaggagacctctaccattgaaactcagacagacgtgatcccatagttatccttggaggcctatggatgcagctttaacatattctgtggagaagggaaaattatgtttttaaaattctttctcatggcagccacatgctcccatgactatgtcctcaagtctgtcctcacctgtagccagcaaggccccaataatatggtctctaactctgattgggggaaatgtggaataaacacatgtccctgagcatttcctagctggggtgcagcctctgaccttctgcagcttctagcacaggctgtgcctccaatggcctctaggacattca

SEQ ID NO: 298504 - DNA, 563 bp, Homo sapiens
gggctggggagggaaggctgacagggcaggaggaggaagcctggcccacctcaaacctcatctcctggatgaggcttccagacagcggtcctctgaaaacatgacggcccgaggggttttgtactccgagtcgtgttgaatttgtgtttcttcttcaacatttctcatcaaaatgtcatgtttcaggaataagaatggcatcagagttttttattaaatttatttttaattttatgtatttaaggttgtataacatgatgctttgatatacatatatacacagtgaaatgatgacgaagtcargaacttaacccatccatcgccttccatagttaccttttttatttgtttgtttgtagcagctaaaattgattctcttggcaaattttcagtacacaatacaatattattatctctagttttcatgctgtaacagatccctcctggcatgtggtagatttccctagaggtccctcttggctcatggtagatcaccctgtggatccctcctgacacgtggtagatccccctgaaggtacctcctggcatgtagtagatgcccc

SEQ ID NO: 298505 - DNA, 244 bp, Homo sapiens
ttagttatttcccttcctgacctcagctggcagctgctgtcatcagcagggacaatagctttctcggtgctttccatctgaccccacagattttcatatatatttaatgcccctctatgtccaagatcatataaaaaatttgaatttcttttttccttcattagaagaacaaagaaaataattgaataacaaagtagttaaasaaaaatttaaattggctgattgccactgcaaggatgatctc

SEQ ID NO: 298506 - DNA, 593 bp, Homo sapiens
ctgtaagtagctgaaatggacaccactgtttgcctataaagcatttatcccacacttttttccttcacaatgtgaaactcagttttttcaggtatccaccccacccccacatgattcagagaatggagacccatacccagacaacagaccttgattagtcttaggcagtaagtccagacattctactgataataccataggcatgatacattgttacaggtcatatttgagaaagagggatttttctccccctttttcctgctggaaaaaaataagaaaataactacccttaaaagccactggcagccaccttggaaccatgagcaaagccagcattacgatggcagagaagcaagataggatattctgtttttgacatatcatyaaacttctaattataaccaagtccatcatccaactcaacttccagttatggtactaataaatatcctggtttgagacagaccctattacttccaatcaaatacaacacaacacaacaccctttaaaatgttttattaatttggaagatactctttctaaaactgtaaccattttgattatatatggccattatttagaacttgaatta

SEQ ID NO: 298507 - DNA, 593 bp, Homo sapiens
ctgtaagtagctgaaatggacaccactgtttgcctataaagcatttatcccacacttttttccttcacaatgtgaaactcagttttttcaggtatccaccccacccccacatgattcagagaatggagacccatacccagacaacagaccttgattagtcttaggcagtaagtccagacattctactgataataccataggcatgatacattgttacaggtcatatttgagaaagagggatttttctccccctttttcctgctggaaaaaaataagaaaataactacccttaaaagccactggcagccaccttggaaccatgagcaaagccagcattacgatggcagagaagcaagataggatattctgtttttgacatatcatcaaacttctaattataaccaagtccatcatccaactcaacttccagttatggtactaataaatatcctggtttgagacagaccctattacttccartcaaatacaacacaacacaacaccctttaaaatgttttattaatttggaagatactctttctaaaactgtaaccattttgattatatatggccattatttagaacttgaatta

SEQ ID NO: 298508 - DNA, 639 bp, Homo sapiens
cacccagccaccctagcagctagaagtgaccagatgacacactcctttatttatttatttatttattttttgagatggagtctcgctctgtcgcccaggctggagtgcagtggcgcgatctcggctcactgcaagctccgcctcccgggttcacgccattctcctgcttcagcctcccgagtagctgggaccacaggtgcccaccaccgcgcctggctaatttttttgtatttttagtagagacggggtttcaccatgttagccaggatggtctcgatgtcctgacctcatgatccgccctcctcagcctcccaaagtgctgggattacaggtgggagccgctgcrcccggctgacacactccttcctaataacatacagcagaagtctggaaaggatctctgacagtgttctgcgtttacaatgaatagaacaggagcagtacataaagctattttccctccatccttccctggacacagatgaaggcagagcagtccctatgttgtaaacagaaaactaagatattaaagatagaaagcccctagatgacatcatcaatcccctgcatcaggcttgttctacctatccttctactttttttacatgaaattttaaaaaagaggaagaaagaaaactt

SEQ ID NO: 298509 - DNA, 470 bp, Homo sapiens
attactctaataacctaccacttatattaatgttatttacctccttctatttaaccaatttttatgtcctacataacaaatgagtgcaaattctgaaagtactctatctcaaatatgacctattttctttattctgaattatcttttgatatttcaaattttattttctcatatgtctatggactagatcatatacatatattttactatttgataatgtggctaagatatgtaaaataaagagcaaatcctattgtctgcagagttactgatcactgaagacctcttcactctgtaggcagttttgagctgcttgcagatagcgtctcattatagatagctgagatagartaacaatggacaacagcaggtaaaactgcccaaggatttggaggtcagatacaaattgtagtaagtgggtcaagacatgtaagcaattgcttaatagcactgtctctattgcattaata

SEQ ID NO: 298510 - DNA, 582 bp, Homo sapiens
gaactccttgcccaccattaagaactaaaagctagaccttgcttcctccaaaaagccttctctttattcttttcttgccaacatggagggaaggcacccctgctttttcatactgtcttggccacatctttacccatcatagttagtcaactgtgatataatcctttgttttactatatcctccctatattctgtgttgcttaagggcaaggaccttaaatttatatccataatgtcagacatgtcaatttccttttaagcaatataatcatatttctatttgagttggaattttcctgaacatttkctcaacatctttatcaagataaagaataaaagatgaaattctgagcatttaatacctggcaagcaccatgctaaggatcttatttgcaagatctcattaaactccatcaaaaagcctacagaaaagactgtatcttaatcactattttaaggaaggagaaattgagtcttgaacagcaaaggtagctggctaaagaagcaaactcagtaaatggcagagtcatcgtttacacctatgtgttctgaccccaaagtcatacatttaaccactaagtc

SEQ ID NO: 298511 - DNA, 609 bp, Homo sapiens
ctctaccattccaaaccataggagatagtgtacttgctcacacattgagtgcattgattgctactacaaccagcatatgggaaagccatcgyacaaagactcttctataaccaaggaactctacagagtcttcacccctgaaagcaccaagaaccaaattaggctataattaactataagtattaaggtatcatctttaagggaaaaaataaatttaaaaacaaacaaaaaaaaagaagcacagtcaaatctaacatatattcaagaataattagaagaaatagtctatccaaatgagaaggaacaaaaaaacctttgaatatatgagaaaatagggtgctataacacccccaaaagatcacactagctctccagcaatggacccaaaccaagatgaaatctttgaaacaccagataagaaattcagaagatcaattattaaggtactcaaggagatatcagagacaggcaaaaaccatcttaaagaaaattttaaaagcagttcgaaatgtgaatgaaaaattttctagagagctagatatcatcaagaaaaaccaattagaagttctggaaatgaaagacacagtgaggaaattacaaaatgcagtg

SEQ ID NO: 298512 - DNA, 609 bp, Homo sapiens
ctctaccattccaaaccataggagatagtgtacttgctcacacattgagtgcattgattgctactacaaccagcatatgggaaagccatcgtacaaagactcttctataaccaaggaactctacagagtcttcacccctgaaagcaccaagaaccaaattaggctataattaactataagtattaaggtatcatctttaagggaaaaaataaatttaaaaacaaacaaaaaaaaagaagcacagtcaaatctaacatatattcaagaataattagaagaaatagtctatccaaatgagaaggaacaaaaaaacctttgaatatatgagaaaatagggtgctataacacccccaaaagatcacactagctctccagcaatggacccaaaccaagatgaaatctttgaaacaccagataagaaattcagaagatcaattattaagktactcaaggagatatcagagacaggcaaaaaccatcttaaagaaaattttaaaagcagttcgaaatgtgaatgaaaaattttctagagagctagatatcatcaagaaaaaccaattagaagttctggaaatgaaagacacagtgaggaaattacaaaatgcagtg

SEQ ID NO: 298513 - DNA, 609 bp, Homo sapiens
ctctaccattccaaaccataggagatagtgtacttgctcacacattgagtgcattgattgctactacaaccagcatatgggaaagccatcgtacaaagactcttctataaccaaggaactctacagagtcttcacccctgaaagcaccaagaaccaaattaggctataattaactataagtattaaggtatcatctttaagggaaaaaataaatttaaaaacaaacaaaaaaaaagaagcacagtcaaatctaacatatattcaagaataattagaagaaatagtctatccaaatgagaaggaacaaaaaaacctttgaatatatgagaaaatagggtgctataacacccccaaaagatcacactagctctccagcaatggacccaaaccaagatgaaatctttgaaacaccagataagaaattcagaagatcaattattaaggtactcaaggagatatcagagacaggcaaaaaccatcktaaagaaaattttaaaagcagttcgaaatgtgaatgaaaaattttctagagagctagatatcatcaagaaaaaccaattagaagttctggaaatgaaagacacagtgaggaaattacaaaatgcagtg

SEQ ID NO: 298514 - DNA, 576 bp, Homo sapiens
atttccttactatattcttagttatttgatgctttcaataattttaaaatatattttacctgacatttgtttgtcctcagcgagataagtgacccaaattaccccaccaacatttccctaaaacttagtctatttatctttcactactggtatttcctttattcggtaactttccctccattcagasagttgttataatgttttatgcccatgtctaagggaagaaatgaaaagtataaggcaaagaataaaaagcctaattgtttacttttgcatttcagcattgataaggacaaaatttattagttttggtagattgcacgttgaagatcaaaattgcttactcataatgtctcaaatggaaaaaggaagtctatgggaaagctaaaaagtgagatactagtcaatgtactcttaaaaggagcaaaacctgaaacctgcaaaatctccctactggctaaaacaaatactcaaattccaaaaccaaaaaggtgatatagggaatccagaaaccacatgtaggtttccaaccacacagagcccagtaaagcccttttgtgcccttgccagtcaaat

SEQ ID NO: 298515 - DNA, 599 bp, Homo sapiens
attttctccctctttccttaaacctaggctttatcccaaagctggtgtgtattattctcatacatattcctattctttcactacttacatctttatctacaacattgcatgaaattgtttaatctagacataataaatggcatctttaatgtgtatagtgcatcacaacttactttttctaaataagaaactagaaaactgtcaacttatagcattattataataacattattttaagaatttgattctgcataaagtctcctcaatacttagggccacttttttatatttaaaacttaacttttaattttgaggtaagtttgaattcacttaataatagtaacaaataatacagagaaaactctgtgttctttacagtcttctccaattataacgtcttgcaaaactatagtacaatataataatcagaatatcgacgttgataaaagccataatctscatctaaccatgagaaaaatagtaaaaacccagttaatggagattctacaaaatacctggaaatatctggcccattctcctcaaagctgtcaaggagatcaaaaccaaggaaagtctgagaaattgtcatagacaagatg

SEQ ID NO: 298516 - DNA, 513 bp, Homo sapiens
gactggcctttcaaaaggctgtaggctgcttgggagctagatgaggcctgtggctgctggctttccccccacctwccctggatacctttgtgatgcagtggaggcagccataatcccctgggaacataactccattggcctgggaaccacacccccaacccccagagcagccacaacaaaccccacccagggagagtctgagctcagatacacctaaccctgcccccacctgatggtctttgtctacttgcctgggtagctgaagacaaaggaaatagtctcttaggagctctgtggccctgaccaccacctgagaaacttgaatacttatccaaatgtgaccctagggcaagtttgtatcctccctgtacaactacagctaataagctcttgaaagctccacctcctgattagaagccaaccagcacaaaacctgtgtacataacagaaatacaaccaaggactctgacagagtttacttcactcctttgatacctccaccagagtaggtgc

SEQ ID NO: 298517 - DNA, 659 bp, Homo sapiens
gcatattcatagtagcattatttgtaataagcaaaaactaggaaaagaacaaaagtctatcaaaagtaaggtggcatgagggggatgagggaagctgaaggggcttctgatgttaataatgctctagttcttgatctagattgtgacttgatatgggtatrttcactatgtgacgacacatcaagatatacacttatctgtgtgcttttctatatttaagtttttcttcataaaatacatttaattttttaagtcaccaataaacgtgctaggcagatgaaggagagtggacagtaaaaatggaaaagagtagtagggtaatgcctataaaagaagggacctgggtagtcaagcaggagtactatctgtacccattctggaaatgttggccaagagcacactttccactaggaaatggacagccctttcatatcaactttgctctgtcttttactggctctgcaatcttgagctagtaagttgaactctctaatacctatttttctcatctgtagaggtagcttgtagctttattgaaaagattaaatgaatgaagaaaagttgcaagtaaatacctagaacaactcttggtacatagctgataatcaacaaatgtaagatctttgtcactttctccatttattcagttagttaacagg

SEQ ID NO: 298518 - DNA, 606 bp, Homo sapiens
ccatttgatccagtagtctcactgctgggtatctacccagagaaaaagaagtcataatttgaaaaagatacttatacatgtttacagcagcacaatttgtaattgtaaaaacatggaaccagctcaaatggccatcaatcaatgaatagataaagaaaatgtgatatatatatatatatatatatatatatatatatatatataatagaatactactcagccatgaaaaagaatgaaataatgacattcacagcaacctggatggaattggagaccattattctaagtaaagtaactcaggagtggaaaaccaaacrttgtatgttctgactcataagtgggagctaagctatgaggccacaaagacataagaatgatacagaggaccttgggaatttgggagggtgggagtggggagagggatgaaagactatacattgggtacagtgtatactgctcaagtgatgggtgcaccaaaatctcagaaatcaccactaaagaacttttttatgtaaccaaagcacctgttcccaaaaaacctactgaaataaaaaaatacaaaaataaaaaagttggcaaatgacagacatttctcaaaagaaaatg

SEQ ID NO: 298519 - DNA, 516 bp, Homo sapiens
aaggacatttcagggaggggatcaccacacacacagttactgaggaggttaagaattcgaaggtttcaaagtataaagagctgagttggtaaaggaaatgaaaaatgactggactgagagataggaaaaaagccaggagaatttgttgtcacaagaatcaagagaagtatgatcacataaggtcaagtaagtttaagattttttaagaggtccattggaggatgtttgtgacctttcattttttgatatcagcattaacacaagggctgttttaaatggctttctaaaaaatttcaagtgcatgttttcctatcragaactgtgttctcaaggttctgagtaaagaagtgtctagttaatggccgatgagaaagtcatcataggtgtgtgtagataatatttaaaagcagttgaatatgcaaggaagagagaacagtcagtagaaatgaaggtgcattcagggagttcttctttcctttgcttgagaccaattagagaaaattaaaatgctgtttt

SEQ ID NO: 298520 - DNA, 488 bp, Homo sapiens
tgtatatttgatgacaatatcaattatgatttttaggaagcgtgcagtgcacatttaatatagaatgagaaagggtaggagttggggagaaagagaggtcaggtccttgaagtcagtaaaggatggttgtggagagtgggaaagtgaacttagagaaacggtaagtatgccaaccagtgttgggtaaccacttgaactaacaaccaggaatttatagtgagatcagcaaattagaatcgagtttcmttgggcctagagctgaaatgggagtagtttacatacagtttctctctcaaatatcttgatattatatccagggctggtccaatgtttctacagttattaagagcccaggcccattctgttttggcactctgctttctccatcatttgacttccatttcatggcaaagatggttttctgttccaatcagcaagaaggggaaagagacaaatagagtacatctacccatcttttaaatttgtcg

SEQ ID NO: 298521 - DNA, 550 bp, Homo sapiens
tttaaagccactaatgtgaagtcatggaactggatttgggaacaaatgcacacagtagctctctttagctagtgtaagtcaactccgacacaacactggcttacacatacagtgttgctcccttctctctccctaggacctcaaggcttcgaaacccagttggaaaaccactttaatacaaccaggaggagaatgaaggcagccaactgcaaaatagaatttatttcattcttggaatccctmtccttgattccaactcctgtcctgcttgtcctgcctggcttgtccttggatcctctgccttgatccactttgtgacactggcatccctctcatatcattgatactacactagtggctctgaactgtatcaatattgcccattgctcaagatcagaatctaacctgcaatgtctcataatttttaaactaatgataaagtgtacaagttcacaaatgatttccttttctatataaagtaattcaaatttctattcaaaaaccactctataaatatttagggaaacttttctattgctggcactgtaat

SEQ ID NO: 298522 - DNA, 572 bp, Homo sapiens
tttaaagccactaatgtgaagtcatggaactggatttgggaacaaatgcacacagtagctctctttagctagtgtaagtcaactccgacacaacactggcttacacatacagtgttgctcccttctctctccctaggacctcaaggcttcgaaacccagttggaaaaccactttaatacaaccaggaggagaatgaaggcagccaactgcaaaatagaatttatttcattcttggaatccctctccttgattccaactcctgtcctgcttgtcctgcctggcttgtccttggatcctctgccttgatccactttgtgacactggcatccctctcatatcattgatactacactagtggctctgaactgtatcaatattgcccattgctcaagatcagaatctaacctgcartgtctcataatttttaaactaatgataaagtgtacaagttcacaaatgatttccttttctatataaagtaattcaaatttctattcaaaaaccactctataaatatttagggaaacttttctattgctggcactgtaataattactttttttttttttttt

SEQ ID NO: 298523 - DNA, 572 bp, Homo sapiens
tttaaagccactaatgtgaagtcatggaactggatttgggaacaaatgcacacagtagctctctttagctagtgtaagtcaactccgacacaacactggcttacacatacagtgttgctcccttctctctccctaggacctcaaggcttcgaaacccagttggaaaaccactttaatacaaccaggaggagaatgaaggcagccaactgcaaaatagaatttatttcattcttggaatccctctccttgattccaactcctgtcctgcttgtcctgcctggcttgtccttggatcctctgccttgatccactttgtgacactggcatccctctcatatcattgatactacactagtggctctgaactgtatcaatattgcccattgctcaagatcagaatctaacctgcaatgtctcataatttttaaactaatgataaagtgtacaagttcacaaatgatttccttttctatataaagtaattcaaakttctattcaaaaaccactctataaatatttagggaaacttttctattgctggcactgtaataattactttttttttttttttt

SEQ ID NO: 298524 - DNA, 579 bp, Homo sapiens
tcataacaaagatgtcaaaagcatttgaaacaaaaatataaaattgataaatagaataagctaaagagcttctgcacagcaaaataagctatcaacggagtaaagagacaacctgtagaatggaagaaaatatttgcaaactatgcatctaaccaaggtctaatatccagaatctataaggaacttaaacaaacttataagcaaaaaacaactccattaaaaagtgggcaaaggatatgaacagacacttttcaaaagtcatagacaaggcaaacaagtatacaaaaaaaaaagttccacattgctaatcattagagaaatgcaaatcaaaaccacartgatatattatctcataccagtcagaatggccattattaaaaagtcaaaaaataacagatgctgacgaggtcttggagaaaaggtagtgcttatacactgctggtgggaatgtaaattagttcagtctttctggaaagcagtttggcaatttctcaaaaaacttagaattaccattcaacccagcaatcccgttattgagtatatacccaaaggaatctaaatcattctatggtaaagata

SEQ ID NO: 298525 - DNA, 597 bp, Homo sapiens
gggaatgctaatagcatatgcccaaattattcttttttatctacataaaagaagatttaaaaacttcttgaactaataaacatatcaggcttctctatatgaagcttggcatatttattatttcaagaacttcacaactctatgaagaatatgtagtgctaatacagcctttgaaattccactattaatttattctgctttccatatttcatcaacattttcatcaacacattttttctttattttggcaatgaatcctttccacggactttcacacgtttcacatgctaatgctgcattgtttcctcaaaatcttgaaatctgaggcagagataatgactccatgtcttcttccagagmacacaggtaaagtaccaaccactgctgtaggtaggctggggccacctcactgagttttggtcgatgacacatggctagaggagatgtaaaataccttaaaatatgttgtgtgttctgcaagcttctcttttcttctaatggttttagtggaagtcatttgttccacatgatatagctttaacaccgaaaaattctaggtccctgagtcatcacatgaaagacagctatactcaagag

SEQ ID NO: 298526 - DNA, 597 bp, Homo sapiens
gggaatgctaatagcatatgcccaaattattcttttttatctacataaaagaagatttaaaaacttcttgaactaataaacatatcaggcttctctatatgaagcttggcatatttattatttcaagaacttcacaactctatgaagaatatgtagtgctaatacagcctttgaaattccactattaatttattctgctttccatatttcatcaacattttcatcaacacattttttctttattttggcaatgaatcctttccacggactttcacacgtttcacatgctaatgctgcattgtttcctcaaaatcttgaaatctgaggcagagataatgactccatgtcttcttccagagcacayaggtaaagtaccaaccactgctgtaggtaggctggggccacctcactgagttttggtcgatgacacatggctagaggagatgtaaaataccttaaaatatgttgtgtgttctgcaagcttctcttttcttctaatggttttagtggaagtcatttgttccacatgatatagctttaacaccgaaaaattctaggtccctgagtcatcacatgaaagacagctatactcaagag

SEQ ID NO: 298527 - DNA, 544 bp, Homo sapiens
ttccatctaccctgggaagtgattttgatctctctgaaactccagcaccatatttatcagataactgtacttggtcagccttcttctccatttcaatactaccaactataggctcaggtctttgatgtctgactcgatgacagaatcgaatgattcactgggatcatttgtgcatcactgatttccttcattttgatatttacttaggacagcaactctaactgaccaatgtacgttataaacacagattgtaactgaaatttctgcatatatgatgatgacatagaatcaaatatcttttagttagtatttcttcccatttcttcagatttaggcactattatagccaacaaacaccctccatacgcttttrattaaacaggaccaccagaaagtaaattataaaattttttaactttcactttttcccttgataagtggtttatataaatatgatattcatttaatctatgttgatagaagtaaaagattccattaatttcaaagcatcaagagcacacagatccacgtagttcttttccat

SEQ ID NO: 298528 - DNA, 558 bp, Homo sapiens
acaaacattgataaaacaaatggacactactgacaaaagaaaaaataaacccaacctaaacctcacaccttatataaaaattaactctatatggttcacaaacgtaaatagaaaatatttaactrtaaaatttccaagtaaaaagaataaaatcctctggttgtaaacagtttttagatgataccaaatacatgaaaaaaattgataaattggactttatcaaaatttaagatgtgatctgcaaaattcttccaatgagatgaatagacaagctacagagtgggagaaaatatttgtaagccatagattccacaaaagactattactataaaaaagactcacaaaaaccaaaagtataaaaaccaaacaagccaattagaaaatgggtaagacaggaacagccattttaccaaagaggatatccagaataagcacatgaaaaaatgtacaagccaggcacagtggctcatgcctgtaatcccaacaatttgagaagccagtgtgggaggactgcttgagcccaggagtttgaaataagcctgggcaacgtagcaagac

SEQ ID NO: 298529 - DNA, 610 bp, Homo sapiens
aatctttctacttttttgatgtaggcatttaatactgtaaacaaccttttagcactgcttttgctgtatattgcaggtttggggatgtatttctattttcacttgtttcaagaaaatttttcattttatcttaatttcttcattgacccaatcattattcaggagcatgttgtttaatttctatgcatttgtatagtgtccaaagtttctcttggtattgatttccagttttattccattgtggtctgagaagatacttaatatgactttaattttttaaagatttgttgagacttgctttgtggcytgatatatggtctatcataaagaaggttccagtgctcaggaaaagaatgtatgttctgcaattcttgaatacaatattctgtaaatgtctgttaggcccatttggcctaaagtctagtttaaatccaatgtttctgtattaattttctgttagatgatctgcctaatgctgagagtgagatgttgaactcccgactattactatgttgtagtctctctctttagatgtagtaatatttgttttcaaacccattcagccattgtgtacttttaagtggagaatacagtttgttcacattcaagg

SEQ ID NO: 298530 - DNA, 613 bp, Homo sapiens
accatattcttactgctcaggcctatgtgttaaaatgtaggaaacttagcaggtgaaggcaaggcatagtattcatagaacatactgctatgtcaatcatttgtccatatccagaaagaatttttagaaattttagaaccaaaattcatatttgtaaactatgccacatcaatgcaaagtgggcaaaatccaaaaggtctctacaatttcaaatacactatctcactttatcaccatttcaaccctttaatgtaagtttgataggtattttagcttctactttaaaacataggaacttagacattgagagggcacatgatttccaaaagttatacattaatttrtggcagaaacagaattaaaacatatcctgattctctcagatgtttattggaaagaacatacctccttctctcacatcatgctagcagctcagtgaagtaataagcaccatttttctgacttcacagttaaaatgatggagagaattttaaaataggtgattgctattctataatttaaattggcaataggataaaagaagttgtgcaaagagattgagatgcaggcttttaatggcatatttgtttaaaatattgtagagggaattacc

SEQ ID NO: 298531 - DNA, 613 bp, Homo sapiens
accatattcttactgctcaggcctatgtgttaaaatgtaggaaacttagcaggtgaaggcaaggcatagtattcatagaacatactgctatgtcaatcatttgtccatatccagaaagaatttttagaaattttagaaccaaaattcatatttgtaaactatgccacatcaatgcaaagtgggcaaaatccaaaaggtctctacaatttcaaatacactatctcactttatcaccatttcaaccctttaatgtaagtttgataggtattttagcttctactttaaaacataggaacttagacattgagagggcacatgatttccaaaagttatacattaatttatggcagaaacagaattaaaacatatcctgattctctcagatgtttattggaaagaacatacctccttctctcacatcatgctagcagcycagtgaagtaataagcaccatttttctgacttcacagttaaaatgatggagagaattttaaaataggtgattgctattctataatttaaattggcaataggataaaagaagttgtgcaaagagattgagatgcaggcttttaatggcatatttgtttaaaatattgtagagggaattacc

SEQ ID NO: 298532 - DNA, 560 bp, Homo sapiens
gctcagcagcacatttggagctgtttattgagcactatataattttgtgctatagatggtatggctttgtgcaagaaccctcagatctacttatgattctcctattggtgcttgctagaaactccacacagtgtcttttcccaccagagataccatagggtctgctgggtcatatggcccaagtggcaaggctgtttacacacagtttggacctgctatagaacatatccttcatctgggccacactgaaagctggtatccttacaggttatgcagtaaatcatcagagtaccattaccaaatggggcataggctacctccaggattcaaaaaaccaggttttgtggttgttttttcataataggaatccaagaggaataatttgtgttttactttgacagacttgtcctaagctcctcaatggtcccttaaacatttcatygatctggtacatctttgaatctttataggatttatctcccatcctatacagtgcatgtttcttaccaaggcctccaatgtacttccacttattgatcatcttgttaattaattatgac

SEQ ID NO: 298533 - DNA, 540 bp, Homo sapiens
aatttttacggtttcaggtcttagatttaactctttgatgcatcttaagttgatttttgtataaggtgagagatgaggatccagtttcattcttctacatgtgcctgctaattatcccagcactatttgttgaatagggtgtccattctccactttatgtttctgcttgctttgtcaaagatcagttggctgtaagtatttggctttatttctggcttctctattctgttccattgttctacatgcctattttttttttttttctagtataatgctgttttggtaactataaccttgtagtatagtttgaagtcagataatrtgatgctccagatttcttctttttgcttagtcatgctttggatatgtggactcttttttggttcaatatgaattttaggattgttttttctagttctgtgaagaatgataatggtactttactgggaattgtagtgaatctgtacattgcttttgggagtatggtcattttcacaatattgattccacccatccatgagtatgggatgtgtttccact

SEQ ID NO: 298534 - DNA, 540 bp, Homo sapiens
aatttttacggtttcaggtcttagatttaactctttgatgcatcttaagttgatttttgtataaggtgagagatgaggatccagtttcattcttctacatgtgcctgctaattatcccagcactatttgttgaatagggtgtccattctccactttatgtttctgcttgctttgtcaaagatcagttggctgtaagtatttggctttatttctggcttctctattctgttccattgttctacatgcctattttttttttttttctagtataatgctgttttggtaactataaccttgtagtatagtttgaagtcagataatgtgatgctccagatttcttctttttgcttagtcatgctttggatatgtggactcttttttggttcaatatgaattttaggattgttttttctagttctgtgaagaatgataatggtactttactgggaattgtaktgaatctgtacattgcttttgggagtatggtcattttcacaatattgattccacccatccatgagtatgggatgtgtttccact

SEQ ID NO: 298535 - DNA, 464 bp, Homo sapiens
tttatgaggaaaaaaaatcaagcatttcagttgaattatggatgctgaagtcactttcaagcatttaaaataagcatagtattaaaataagggcactgggaaagcttttatagaactctaaattttcaaggctagaaaaaataagtaatcaaattaacaaattagcttattcaaacttgactattaattcttttgtggctagtctgtgcaatttcgtsagcattaaagtatttcttgtcttccctacatgcctgtagcatttacttgtggagacgtatccaagccactgaacaattatacttcaaagacactggctctgtaagggaaaaagataattacttttttttttctttcttttttattttatttattattattatactttaagttttagggtacatgtgcacaatgtgcaggttagttacatatgtatacatgtgccatgctggtatgctgcacccact

SEQ ID NO: 298536 - DNA, 620 bp, Homo sapiens
gtttcttacagggcagggctccactacatttttcacataatgttccatacaaaatgatatttgtacaaccataacactctatgtcaaacaaaggggcacctggctccccagtatccatccactcrcctgaaggccaagaggctaattgtcagacacaaccgcaacagttgggaagctttgccttacggtagcccctcattgtcttcaacacagaggggaaaagtactgtgatcaaattctaaaaccataatggtaaaaatcagacagccatatcaaatgagaataaaaagcagatccacgtctatctagattcagacatagtgttacctggtgatggctattgttaaagctgaggttcaaaagagtgaatgtagggataggagaggaaataaaaacattctcctaggtgtaaattaggactcaggtaaataaggaaagcaaaaggccacagagcagctgcgttttccagatctttgatatgtgagctgatgtggggcacacatacattccattttcagagtccacacacaagtgaccagacatccaaaaacaagttttacatttcagttgtgtcatgtgacaggtgtctgtcaaaattaggtcaaggctgctctcagcac

SEQ ID NO: 298537 - DNA, 620 bp, Homo sapiens
gtttcttacagggcagggctccactacatttttcacataatgttccatacaaaatgatatttgtacaaccataacactctatgtcaaacaaaggggcacctggctccccagtatccatccactcgcctgaaggccaagaggctaattgtcagacacaaccgcaacagttgggaagctttgccttacggtagcccctcattgtcttcaacacagaggggaaaagtactgtgatcaaattctaaaaccataatggtaaaaatcagacagmcatatcaaatgagaataaaaagcagatccacgtctatctagattcagacatagtgttacctggtgatggctattgttaaagctgaggttcaaaagagtgaatgtagggataggagaggaaataaaaacattctcctaggtgtaaattaggactcaggtaaataaggaaagcaaaaggccacagagcagctgcgttttccagatctttgatatgtgagctgatgtggggcacacatacattccattttcagagtccacacacaagtgaccagacatccaaaaacaagttttacatttcagttgtgtcatgtgacaggtgtctgtcaaaattaggtcaaggctgctctcagcac

SEQ ID NO: 298538 - DNA, 553 bp, Homo sapiens
ttggctactgccggcagctcagagttagagtcacttaactcctaagccaaccatcctagaataacatcttcaacccttatttactcaaaatattcagatacaatctggagaactgaagaaggaaaaaatgaccttccacagaagataatgggtaggtttgatttaccagttcaggacttcatctgttgttgytgtctttaaaccacacttaccataacaatagcccttggagaagtcccatgcacaatttttgctcatttcattttggggaccttcagaacattgtgttatatctgattcaacaaagaatgtttctaacattttaccattacataaactatttgctgcagcttgaagtagatttcctcttctgttcctaatttaccaaagaacttttaatcaaatgatatttctaaatctattgagaatattgtcatttttatttttactttctattaatgcaataaattcattattagattttctaacataactctgaccacaaattcctgagataaaacattttcaacatgatctattacattattatata

SEQ ID NO: 298539 - DNA, 538 bp, Homo sapiens
ggaggctgaggtggaggattgcttgaggccatagacctgggcaacatagaccccatctctaaaaaaatgtttaaattagctgagcatggtggtacccatctgtagtcttagctacttgggaggatgtggcaggagcattgcttgaatccaggaattcaagactgcagtgagctgtgattgcactactacactccaacctgggcaatagctctagcctgagcaagactcggtctcaaaaaaataaaaataaaaagtaaaaactaatagcattgaaatctaagactgacaattgccagaatctttgaaaacctcccaattgagtcaaattgagggaagagcaggcaatccatgtgagcttttcatgctttactttggaaaacagggtagtcacatctcaaaaaagcccaaaaggagtttcatctctatcactacatatactctatcactgcatatactctatcactgcatatacyctatcactacatatgcactatcactacatatacactatcactacatatactctatcactacatat

SEQ ID NO: 298540 - DNA, 538 bp, Homo sapiens
ggaggctgaggtggaggattgcttgaggccatagacctgggcaacatagaccccatctctaaaaaaatgtttaaattagctgagcatggtggtacccatctgtagtcttagctacttgggaggatgtggcaggagcattgcttgaatccaggaattcaagactgcagtgagctgtgattgcactactacactccaacctgggcaatagctctagcctgagcaagactcggtctcaaaaaaataaaaataaaaagtaaaaactaatagcattgaaatctaagactgacaattgccagaatctttgaaaacctcccaattgagtcaaattgagggaagagcaggcaatccatgtgagcttttcatgctttactttggaaaacagggtagtcacatctcaaaaaagcccaaaaggagtttcatctctatcactacatatactctatcactgcatatactctatcactgcatatactctatcactacatatgcactatcactacatatacactatcactacatatactctatcactrcatat

SEQ ID NO: 298541 - DNA, 598 bp, Homo sapiens
tttgtaatagtgataagggctgtctttgctgggtaccwgccatgtgccaggcataggaactagattgggtccttggcctccaagagttatcaatctgataggcaagtcagacaagtaacatgatgataaacaagtgatgtaagtacaataaaagaaatacagagtgcaggagcacaaaaaagcaaaaacaggagaccctatctgagactgcattggctaggaaaattccttggaggaaccaaagtctaaaggatgaacagagagaccaatgaaggctgaagggcactttaagaaggaacagcatgtcaaatatgcaccttgtgcttcagtaactggaaaattcagaaaggcaggagttataaaggcttgagaaagattagcagcagatgagaaaggggtacagtcattggtgtttctcctatcacgtaaggggcttagattttatttggaagcactacagaattttgagcaggacattgcattttgtaatacaggttgagcatccctaatctgaaaatccaaaatacaaaatgctccagaatcctaaaatttttgagcaccactatgacaccataagtacaaattccatacttggcct

SEQ ID NO: 298542 - DNA, 598 bp, Homo sapiens
tttgtaatagtgataagggctgtctttgctgggtaccagccatgtgccaggcataggaactagattgggtccttggcctccaagagttatcaatctgataggcaagtcagacaagtaacatgatgataaacaagtgatgtaagtacaataaaagaaatrcagagtgcaggagcacaaaaaagcaaaaacaggagaccctatctgagactgcattggctaggaaaattccttggaggaaccaaagtctaaaggatgaacagagagaccaatgaaggctgaagggcactttaagaaggaacagcatgtcaaatatgcaccttgtgcttcagtaactggaaaattcagaaaggcaggagttataaaggcttgagaaagattagcagcagatgagaaaggggtacagtcattggtgtttctcctatcacgtaaggggcttagattttatttggaagcactacagaattttgagcaggacattgcattttgtaatacaggttgagcatccctaatctgaaaatccaaaatacaaaatgctccagaatcctaaaatttttgagcaccactatgacaccataagtacaaattccatacttggcct

SEQ ID NO: 298543 - DNA, 611 bp, Homo sapiens
actacataatttcctcataaccttgacacagaagttgtttaacaacatctattaggaattcacttagtacaaggcacttgataaaacattatcaagaaggaaaggaacaagattttatgagcattgtctctaaagactttaaaaggaaacaatatatgaattatatatagtgatgcaagacaactaatcaggaaaaatgagagtatttgaacttcaaagagcctcgtgaaaatggcatccctttaagaatagttctgcttcattttgttttcttcccccccaaccctcagaggctgtagtgagctattaccatgccaccacacttcaatctgggcaatggagcaagaccctatctcaaaacaaaaagcaaaacaaaatgaaacaaaaacaacacaaaaccttcattatgaaagaatgagaagaatcaatagaaacagatcccaactaagggagaaacctccaaaccaatttagtcatctttgtgtgtggcctgctgacttaaaactactacctctcttcattatccactaagtaaaattcgtttggctactcattttgaattcaagytactcagagaaatttatatgtgtaatgattacactgtatgtggt

SEQ ID NO: 298544 - DNA, 611 bp, Homo sapiens
actacataatttcctcataaccttgacacagaagttgtttaacaacatctattaggaattcacttagtacaaggcacttgataaaacattatcaagaaggaaaggaacaagattttatgagcattgtctctaaagactttaaaaggaaacaatatatgaattatatatagtgatgcaagacaactaatcaggaaaaatgagagtatttgaacttcaaagagcctcgtgaaaatggcatccctttaagaatagttctgcttcattttgttttcttcccccccaaccctcagaggctgtagtgagctattaccatgccaccacacttcaatctgggcaatggagcaagaccctatctcaaaacaaaaagcaaaacaaaatgaaacaaaaacaacacaaaaccttcattatgaaagaatgagaagaatcaatagaaacagatcccaactaagggagaaacctccaaaccaatttagtcatctttgtgtgtggcctgctgacttaaaactactacctctcttcattatccactaagtaaaattcgtttggctactcattttgaattcaagttactcaragaaatttatatgtgtaatgattacactgtatgtggt

SEQ ID NO: 298545 - DNA, 338 bp, Homo sapiens
ggtgctcatcaatggtggattggataaagaaaatgtggtacatattcactatggaatactatgcagccataaaaaatgaaattatgtcctttgcagcaatatggatgcagccggaggccattatcctaagtgaactaacacagaaactgaaaaccaaatactccacrttcttacttacaagtgggagctaaacactgtgtacacatggacataattatggtaacaatggacactggggactattagaagggggagagaggtagggggccaagggctgagaaactacctattgggtactatgctcactacctgggtgatggattcattcatactccaaa

SEQ ID NO: 298546 - DNA, 338 bp, Homo sapiens
ggtgctcatcaatggtggattggataaagaaaatgtggtacatattcactatggaatactatgcagccataaaaaatgaaattatgtcctttgcagcaatatggatgcagccggaggccattatcctaagtgaactaacacagaaactgaaaaccaaatactccacattcttacttacaagtgggagctaaacactgtgtacacatggacataattatggtaacaatggacactggggrctattagaagggggagagaggtagggggccaagggctgagaaactacctattgggtactatgctcactacctgggtgatggattcattcatactccaaa

SEQ ID NO: 298547 - DNA, 578 bp, Homo sapiens
gccaaacattcagtttcaattccgtgggagagagaaggatcgaagagactagatattccactaaactcaaaaggacagaatatattttttacagagttggatacttctcaacagaagayttgccaggagcaagaattgctgaaacaagaagatatttctatgacaaacctggggtctatggcctgccccattatggaacctcttcatttggaaaacacaggaaaggtaactgaggaagaagatgtgtacattaacagaaaaattagttcacatgtattgggaaaagaaggattaaaggaaactgatatatttgtaggttctaaaggacagaaatttctttgtacaaattcagaggtacagcacaaagtgcctgcagagcagaaagaacaggtgaatccagatcatgttcccgaaagtattctggattctgaatctttcctcagtaaggaccctcttcacttaaaacaggcagtgaatacagcaagaaaagaaaatgttaccatctctgaaagtttcaatgaaaatctttggggaaaagagcaatcaaagttggatattacattaaaatcaaatagaca

SEQ ID NO: 298548 - DNA, 615 bp, Homo sapiens
ctagacccaagtttgctaattttagtcacgtccctcatcagaacactgattcagtgttccagatgaaaccctaacacactgaacatcacaacactctagtttataataaatttaaatcctcttctggcctaaaactccttgccaaggcctgttataactactgcaacaaattgatgctaagttgttttatatacatatataaacattggtaatttggccatggacattcacttcctggatgaatttttcattttctcacttcattgccttaatctcactcagtatggatttcccatccagatgccatattaaatgtgtgccaataactagcatgagttgggctcaaaaaccccttgcttrtattgttatcttgtttacttagtaccctcttacaaagctagtgacaaaaaattgattaaatattctggggggaggataaaagacacaaagtcagagctattggttactttcaaaagatcagatcaacaggtgtttggatcagtaagtctaattacttacttttccttattgaagggactttctaaccagagagaatctactattattgaaaatcagccaaaaacaaaacaaaacaaaaaccttcttcaggaataa

SEQ ID NO: 298549 - DNA, 551 bp, Homo sapiens
tggcacctagtggtacattctttttcttttccccctcttttgttctgcttcaaattatcaacaggtacactttgaatacacattgagtactcattataacaactttattaatgaaatgcttactaccaccacttccctaaacttatagaaacaaatcattttggaatttgaaatctcatattttgaaaatacgtgacacgaaaatgttgttgacagaacggaagctcattggtaatatttactgacaatgaaagttctaaaatggaatataaaaatgagatgtttctttaaaaatcaagaaatgtaaaaggcatgctaatatgataacggccatcccaagacaataactcaagaattaactgtctgcaaataatcatctgtgaaacagtaccttgactttaaagtccttaaaaatgcaagcatgaagataasggagctaatcatactaattaactcactgtgccttgtaacaaattaattttgagtaaaggaacaggcaactagagaaaaaggccaaaatctcaattagttaatctgaatagaacataaat

SEQ ID NO: 298550 - DNA, 636 bp, Homo sapiens
tatatcatatattctctgtctgagtactatayacttctactatgtgaatgagtacagtattgaccacaattatgtgtattttttccttaaagaagagaaggtaatacaaggacaatggaatgacgagggagagggacaacaatgtactttttggccaattacacctttgtgtgatgtctgcaaagcacaccccattctgagtagctagatgtgtggtttaaaggagaacttggagactcacaggacataggagacatctggccttctgagaccaattgggtgcattctaaatacctcctgagcccccagcaggcctactaacagatatgaccttaggtagattacattgattcatagccttttccaatagcttatttgtttttaacattatcatttactgtgtttaagatttctattcaacagactttttaaaaaaagttttaaaccgtaaggatatgctctgaccattttttgaaattatcaggtgtcagtttgacaaaattaccaactctgagtatattcttaatattaaaattacaaatgttttgtcctttatttagttattcaagtaagcagaggaaggcacattctctaaaggcaattagaggaagcttgttgaaaagatcattttggttg

SEQ ID NO: 298551 - DNA, 636 bp, Homo sapiens
tatatcatatattctctgtctgagtactatatacttctactatgtgaatgagtacagtattgaccacaattatgtgtattttttccttaaagaagagaaggtaatacaaggacaatggaatgacgagggagagggacaacaatgtactttttggccaattacacctttgtgtgatgtctgcaaagcacaccccattctgagtagctagatgtgtggtttaaaggagaacttggagactcacaggacataggagacatctggccttctgagaccaattgggtgcattctaaatacctcctgagcccccagcaggcctactaacagatatgaccttaggtagattacattgattcatagccttttccaatarcttatttgtttttaacattatcatttactgtgtttaagatttctattcaacagactttttaaaaaaagttttaaaccgtaaggatatgctctgaccattttttgaaattatcaggtgtcagtttgacaaaattaccaactctgagtatattcttaatattaaaattacaaatgttttgtcctttatttagttattcaagtaagcagaggaaggcacattctctaaaggcaattagaggaagcttgttgaaaagatcattttggttg

SEQ ID NO: 298552 - DNA, 521 bp, Homo sapiens
aaatactcagagatagggcttcattttccagtacaatggatactgaactgaaagagtagaatggtataactgttggtattgacaggcgtgcctgctaaaagcagccaacattttccccagcattaggtagtcatcctcaagagccattgaaatgggagcaaacagagacattctctattaggaagagtcaataccaaaggtcattgaaaggcatttttggctgcctcttaggcataagaaatatttaagaattcatagatggataaaaaatgtcttaaacrtgttccaaatcaattaccctaagcagtctaacattggtccaatttttgaagtttttcatcattgatttacacaacagaaagatgagcctaaaagtatatgttgttctatgctaaagtcatgttagtgcaattatttggctgctaaatctttattaatgctgtgccattcagggcctagatttttgaaatatagcaccaaggcctatagaagggcctctcaatggaatgcagagcattggt

SEQ ID NO: 298553 - DNA, 542 bp, Homo sapiens
ggcctggctcctggggaagtggttggaggtgcggacttcatcatctattcaagaggggtaactgacygtcctctagccagggcctcaaaactgagtcaagacaccaatttaaaaactaagagagggaaagatggctgactagtcccagccaggtggaacagctctcaccaagggactgagatgacgggcatgcttttaacaaatcttcatagggaaggcaccaagaatggatggagggaagacacagaagctgggctgaagtgggagaaaactgagaaccttgcatgaggctaccatgcactgggactcatttctagaccacaacagctccagggtaacaggtgagttgaactggcaaggagcaacctcctgttaccactggactctggaaccccagcaggtcaacccccttgacgacttttagggacaaactaccccaaaaagcttcttggtactgctgacactcccccaaaacccctctgtactgcccacccctccccttaatgccctgcaactcttcttcgtgccgttcacccttcccc

SEQ ID NO: 298554 - DNA, 566 bp, Homo sapiens
accacaaaacatggctttgcagggctatttcaaaatatgtcaaaaatgtactttgcagtaaaatgtttttatttccttcagagtctgctgtcatgtgatgtgataccagagtcaggtcataaaataagccatacgatacacatttaattaaaaagtaaaccctgtttaatgagattttatggtttgtaggatgtgacttaactcttgccctgcatagccttaggttttgtttataatctggtatcttattgccacaaagagtctgttttttcagtcttgagatctctgttttaatcttaatgccagtcagttgtgcctaaactccaaaagggagggggtataatgaggcgtgtctgatttgcccatcaagaccaggaattcagttttttaggtttctttggggtctcattgggatctattcaatagatagagggggayctattcaatcagttgcggggcttagaattttatttttggtttacaaaaccataaactggcccataaatatagagcctcacagttattcaagtcagagtctttcctactgccctgctagaatatttgtc

SEQ ID NO: 298555 - DNA, 604 bp, Homo sapiens
ctttgggcatattctttatcataggtaaatacttgaggaaatactctagaggaaattggtagatatctggattatatggtagatgtctgtttaacttataagcaacaataacgttgttttccaaagtcatcataccgttttacattccaaccagtagtgcatgagagttccagttcttccacatccttagcaacaaatggtatggccagtcttttaaattttagtaatcctagtggatgtaaagtagtatctcattggagttttaattatttattttttttaatgacatatgatgttcagtatcttttcatatgtttatttgtcctttgcataatttttgttgaagtgtgttcacttttttccccatttttaattgagttgtttgtttcttactgagttctgagttttttgtttattgkggatattcttacttttaagttttggcgggtcggaccagggcagtgctcagtttagggctaattatcccccagtactgaagcaaggctcttatgtgttttctatccaagccctatgaatcttaaattttccaagtctggctggtggcaacaggcactattcctggactcctgggaaaaccaagtat

SEQ ID NO: 298556 - DNA, 637 bp, Homo sapiens
aaggctcttatgtgttttctatccaagccctatgaatcttaaattttccaagtctggctggtggcaacaggcactattcctggactcctgggaaaaccaagtatcactagctctaattcttttgggtggatctttcctcagccttaggtaatttcttaaagaatatgtgttgatcagtaatcaactgaaaacctgaggagaactctgcgggtctcaggcactcctgttctacacagttttctcctctctggtatgctgtcctgagaattctagcaaccttggtttcctcaactcaggagatctgctgggtacttcctgcttttcttctccctgcagcatggcttgggaatttaaaatagtaagctgaggcacattttcacttaccttgttgggtttctgtctctcaaagatcattgtcctttgttgtctgatgtacagtgtcttgaaaaagtttttttttwaattcttttatttatttattttttggaaccacaggaaggagggtaaatttggtctcttttactcctgttttgaccagaaattgagtgatttttaatgcttatttctttaagttcacatgacaacttaatgtgagccactggccatttggaaactaaattttctcactcacaatctc

SEQ ID NO: 298557 - DNA, 540 bp, Homo sapiens
aaaatgcccactcaagttctttgcccattttgaataggatatttttgttgttgagttaaagaactctttatactttttgtgtactaaacccttgttagatatgtgatttgcaaaaattttcttccattctttggggtttttcactttttatatagagatacatgcattaattattttaattttgataaagttcaatttatttttcttttgttgcttgtgcttttggtgtcgcattgaagaaaccattgccaaatccaaagcgatgaagatttacccgtatattttcttgtagtagttttatmtgtgcaagtgctgctgaacttaaaataaaagttggaaatcacaaaagaaagaaaacaaaataggacacgtcaaacttgtagattagtgctgttcttagagggggtgctataatcttaaaagcatatatatcaacagatgtggtgaaaacatttgataagactgggtgtggtggttcatgcctgtaatcccagaatattgtgaggccgagaagggtgaatcacttgaggccaggagttt

SEQ ID NO: 298558 - DNA, 556 bp, Homo sapiens
tctcaaaaaaaaaaaaaaaaaagaagaagaagaaaacatttaataaatgcaatatccatctgtggaaaaaaataacccatagcaaaatgccaacacaaaagaatgttcttaattcaaaaagaattaagatggtggataagaggcagcactagcttttagctcctgtttggatgaacagagtagtgtgtggaaactcacatcgtgaactttttctccaagaactgctgcaggaacataccagaaaagccaagagaatccgcagaccctttgaaggaactggatcacttctgcaagctccctgagacactgaaaacccatgagtyggcttgctttctcagcaggaggcttgcggtctggaaaaagttctcagccctggtcactggctgcctggaaatagactccgtgctatggggggcatggtagaagtgagactggcctttgggactgtgagctgcatgggtgtggggtgaggcctgtgactgcaggctttccccaatttccctggtgacttatatgactcagcagaggcagccataaaccccctgggaatataact

SEQ ID NO: 298559 - DNA, 571 bp, Homo sapiens
atactatttttagcttccttaaacaaaacaattattggccaagaattttgtacccagtgaaactaagcttcataaatgaaggaaagatacagtcatttccagacaaataaatgcggacagaattcaccactactaagccagcactacaagaactgctaaagggagctctaaaccttgaaacaaatcttcaaaatacaccaaaatagaactccttaaagcataaatctcacaggacctatataacaataacacaataaaaacaacaacaacaaggtattcaggcaacaaamaacatgatgaatagaagagtacttaacatctcaatactaacatcgaatgtaaatggcctaaatgctctacttaaaagatacagaatggcagaatggataaggatttaccaattggccaggcatggtggctcacacctgtaatcccaacactttgaggctgaggtgggtggatcacctgaggtcaggggtttgaaagcagcatggccaacatgggaaaccctgtctctactaaaaatacaaaattggccaagcatagtggctcatgcctgtaatcccagcaa

SEQ ID NO: 298560 - DNA, 571 bp, Homo sapiens
atactatttttagcttccttaaacaaaacaattattggccaagaattttgtacccagtgaaactaagcttcataaatgaaggaaagatacagtcatttccagacaaataaatgcggacagaattcaccactactaagccagcactacaagaactgctaaagggagctctaaaccttgaaacaaatcttcaaaatacaccaaaatagaactccttaaagcataaatctcacaggacctatataacaataacacaataaaaacaacaacaacaaggtattcaggcaacaaacaacatgatgaatagaagagtacttaacatctcaatactaacatcgaatgtaaatggcctaaatgctctacttaaaagatacagaatggcagaatggataaggatttaccarttggccaggcatggtggctcacacctgtaatcccaacactttgaggctgaggtgggtggatcacctgaggtcaggggtttgaaagcagcatggccaacatgggaaaccctgtctctactaaaaatacaaaattggccaagcatagtggctcatgcctgtaatcccagcaa

SEQ ID NO: 298561 - DNA, 621 bp, Homo sapiens
aaatttttccatgaagccagtatcactttaataccaaaaccagggaaagatataacaaaaatagaaaattggagaccaatagatgcaaaagtcctcaataaaatactagtgaaccaaatccaacaacatttcaaaaaggcaaaacaccatgatcaagtgggtttcataccagggatgcagggatggtttaacatatgtaagtcartaaatgtgatacaccacataaagagaatcaaaaacaaaaatcacatgatcatctcaatagatgcagaaaaagcatttgacaaaacccagcatccctttatgattaaaacccttagcaaaactggcatagaagggacataccttaaagtaattatagccatctatgacaaacccacagccaactgaatgaggaaaagttgaaggcattccccctgagaactggaacaatacaaggatgcccactttcaccacttctattcaacatagtactggaagtcctagccagaacatcagacaagagaaagaaataaagggcagccaaaaaagtcaaactgttgctgtttgctgatgatatgagagtatacctaaaaaaccctaaagactcccccagaaagctcctacaactagtaaatgaat

SEQ ID NO: 298562 - DNA, 563 bp, Homo sapiens
ctaaactataaggctatagtcatcaaaacagcatggtactagtttaagaatagacacatagaccaatggaacagaatagagaacccagaaataaagccaaatacttacagccaactgatctttgagaaagtaaacaaaaacaaagtggagaaagggcaccctattcaacaaattgtgctgggataattggctagccacaggtaaaggaatgaaactggattctcatctctcattttatayaaaaattaactcaagatggatcaaagacttaaatctaagacctgaaaccataaagattttagaagataacattggaaaacccttctagacattagcttaggcaaagacttcatgaccaagaacccaaaagcaaaggcaacaaaaacaaagataaataggtgggtcttaattaaattaaaaagcttctgtacagcaaaagaaataatcagcagagttaacagacaatccacaaagtgggagaaaatcttcacaatctatgtatctgacaaaggactgacatccagaatctacaaataactcaaacaaatcatcaagaaaaaaac

SEQ ID NO: 298563 - DNA, 563 bp, Homo sapiens
ctaaactataaggctatagtcatcaaaacagcatggtactagtttaagaatagacacatagaccaatggaacagaatagagaacccagaaataaagccaaatacttacagccaactgatctttgagaaagtaaacaaaaacaaagtggagaaagggcaccctattcaacaaattgtgctgggataattggctagccacaggtaaaggaatgaaactggattctcatctctcattttatacaaaaattaactcaagatggatcaaagacttaaatctaagacctgaaaccataaagattttagaagataacattggaaaacccttctagacattagcttaggcaaagacttcatgaccaagaacccaaaagcaaaggcaacaaaaacaaagataaataggtgggtcttaattaaattaaaaagcttctgtacagcaaaagaaataatcagcagrgttaacagacaatccacaaagtgggagaaaatcttcacaatctatgtatctgacaaaggactgacatccagaatctacaaataactcaaacaaatcatcaagaaaaaaac

SEQ ID NO: 298564 - DNA, 565 bp, Homo sapiens
taaacctcagtataatttaaaatatataataattaatttttaaygttcttggtattatatgttctttataaaactattcttggatattcatatttgccaaacacctgctgtaggtagttttaaaaaatccttctgtagattcagtctattcagtacattcagggataatagattaaaatcactgtgccattaggtgactttctggctttaagtttactgagtgtatgcattaacatagacagtacagaaaacattaagaagagaggtagacttgcttcatcctataggattcagggaaaatttctagtagatgacacttacagtgagttttggaggaaaaatgatgttagctagacagtggagtgggagaggtgagcattccaaaaatagcaagaaacatatgtgcagagacctgaatatggaaaatctgaaaaattgctaatatgcagtacagctggagcaaaagatgcatatggggttatgggggtagatatggccagaaagctgggcaatggccagatcatgaagagctttgtaaactgtaccaaggattttggcctttatt

SEQ ID NO: 298565 - DNA, 611 bp, Homo sapiens
taggtctagtaatatttgttttatgaatctgggtgctccagctgttgggtgcatatatatttagtattattatatctacttgttgaattgatccatttatcattatataatamacttctttatcattttttttttactgtttgtgatctaaagtctgttttgtctgacataagtatacctctgctgcttgcttgtggtttctgtttgcatagaatgtctttttatttttagtctaaatgtctctctagagataaggtgagtttcttgtaagtggcatattattggctcatgtttttaaaattcattctgtcaatatatatcttttaaatgaagcatgtaatccatttacattcaaggttaatattgatatgtgagttttgtttttgctgtcatattcttgttatctaattgttttctaaattctttctctgtttttctttgtgccttggtaaaattttctcatgttgccagttgattcctctgtcttcctcctttgtgtgattgttttatacgactttgagttttatatttttgtgtgtttttattatagcacatatcaacctttcttttccatgtttaggactcctttgagcatttcttgtaggactgga

SEQ ID NO: 298566 - DNA, 611 bp, Homo sapiens
taggtctagtaatatttgttttatgaatctgggtgctccagctgttgggtgcatatatatttagtattattatatctacttgttgaattgatccatttatcattatataatacacttctttatcattttttttttactgtttgtgatctaaagtctgttttgtctgacataagtatacctctgctgcttgcttgtggtttctgtttgcatagaatgtctttttatttttagtctaaatgtctctctagagataaggtgagtttcttgtaagtggcatattattggctcatgtttttaaaattmattctgtcaatatatatcttttaaatgaagcatgtaatccatttacattcaaggttaatattgatatgtgagttttgtttttgctgtcatattcttgttatctaattgttttctaaattctttctctgtttttctttgtgccttggtaaaattttctcatgttgccagttgattcctctgtcttcctcctttgtgtgattgttttatacgactttgagttttatatttttgtgtgtttttattatagcacatatcaacctttcttttccatgtttaggactcctttgagcatttcttgtaggactgga

SEQ ID NO: 298567 - DNA, 611 bp, Homo sapiens
taggtctagtaatatttgttttatgaatctgggtgctccagctgttgggtgcatatatatttagtattattatatctacttgttgaattgatccatttatcattatataatacacttctttatcattttttttttactgtttgtgatctaaagtctgttttgtctgacataagtatacctctgctgcttgcttgtggtttctgtttgcatagaatgtctttttatttttagtctaaatgtctctctagagataaggtgagtttcttgtaagtggcatattattggctcatgtttttaaaattcattctgtcaatatatatcttttaaatgaagcatgtaatccatttacattcaaggttaatattgatatgtgagttttgtttttgctgtcatattcttgttatctaattgttttctaaattctttctctgtttttctttgtgccttggtaaaattttctcatgttgccagttgattcctctgtcttcctcctttgtgtgattgttttataygactttgagttttatatttttgtgtgtttttattatagcacatatcaacctttcttttccatgtttaggactcctttgagcatttcttgtaggactgga

SEQ ID NO: 298568 - DNA, 608 bp, Homo sapiens
cttgtttctatgaaaattaatttatgacagactgagtgcttactttatgtcctttcctgtagaaatggtttctagatttaacacttttttgtgaaatagtaggccgtaatcaattaataaatggttatttttagaagatactttctccactgatgatcaacattggcaaagttaaatacacccttagygctatagaagtatttagaaatatgtgtggtaaattaaggccaaaatatattatattcatttttaaattaaaaaaattaaaattaacacattgtagttgtgcatgtttataaggtataatttggtctttcaataactctttaacatattgattttatttcctttggatttttacccaggagtgggattgctgaatcacatggtaattccatttttaattttttgagaaacttccctactgttttttataatggctgtactaatttacatttgtgccagtggtgtgtgagtgttcttttttctctacatcctctccaacacttattttcttttgtctttttgatagtagccattctgactgaagtagggtaatatattattatggttttgatttgcatttccctgatgattagtgatgtgaa

SEQ ID NO: 298569 - DNA, 384 bp, Homo sapiens
ttataggacacattttaaggactttattatactaattatttgaggcaaatgatattcccaatggcgatttttagttagtttttagttttaaaattaagcaaggaccaaacatcaccacaactggatagttcttatgcctgcgtttccttcagttcctccacatctcaagtaatttttgacttacagatgaaacccctgcaacacatccatgcctaccsctccccatttcatcctgcgcttacccccaagtgcaactcaacacaagagctctagctcttgctcccatggcaatcagaaaactctgaattcaaaaatagaactgagagaagtaagaagtcagaccccaaggcagcctgccctgtggggacggacggtcagtctaca

SEQ ID NO: 298570 - DNA, 616 bp, Homo sapiens
tcagcaggagttatttatttttgttaagcacaacatattcatctctgttagttgtcatatgggagcaagagagtcaagccatcgggatgtaaagctaattaatggaaataacctttggattactaaactgtcagtctgacactgctgattagattatcatgggaatattcagttgtgaaaaatattactaaaataaatccagatttttattttattataggaaagggatttcagcaactttctaatcaagaactctttgttgttgtttggcatgagggtagttgcagtatttttcacttttttcttattctaatattatgtaaacatagcccaagatacattatttttcgtgtgggttytgctcagagaagagacgtaactctgaataaattactcacaaattctctactagggagtgagaaggatgacattttgaaaggctctttttgaggcaaaagagaaaaaagaaaatttaaaaaggaaaagaaaatgactatcccaaaacaacctataccttttcaggaatataaacaccttcatgctaatgtagctggagaaaaatttcatacagttcttatccaaaaaaaatgaatctaaagactatccttaaaatatt

SEQ ID NO: 298571 - DNA, 575 bp, Homo sapiens
agcagatttttcaggagaaatcttataggccatgagagagtggcatgacatatttaaagttatgaaggaaaaagaattttaccctagaatagcatatctggcaaaaatatccttcaaatatggagaaataaagactttctgagaccaaaaaagaaaaagttgagggatttcatcaacatcaggcctgtcctacaagaaattytaaaggaaatgcttcaattagaaagaaaagaatgttaatgatcaataagaaatcatctgaagttacaaaactcactggtaataggtagacagaagaacaccgaatattataatactgtaactatgttgtataaactactctttgttttttgtttttgttttttttttttagagtctcactctgtcacccaatctggagtgcagtggtgtggtctcagctcactgcaacctccacctcccaggttcaagtgattctcctgcctcagcctcccgagtagctgggattacaggtgcccaccaccatacccagataattttttgtatttttttttttagtagagatagtgtttcaccctgttggccaggctggtatt

SEQ ID NO: 298572 - DNA, 493 bp, Homo sapiens
ttaatgatcaataagaaatcatctgaagttacaaaactcactggtaataggtagacagaagaacaccgaatattataatactgtaactatgttgtataaactactctttgttttttgtttttgttttttttttttrgagtctcactctgtcacccaatctggagtgcagtggtgtggtctcagctcactgcaacctccacctcccaggttcaagtgattctcctgcctcagcctcccgagtagctgggattacaggtgcccaccaccatacccagataattttttgtatttttttttttagtagagatagtgtttcaccctgttggccaggctggtattgaactcctgacctatggtgattcacccgccttaccctcccaaagtgctgggacccactcttaagtaaaaagactaaccaaggaaccagtaaaaaataataactataatttttcaagacataaacggtacaataagatataaatggaaacaacaa

SEQ ID NO: 298573 - DNA, 493 bp, Homo sapiens
ttaatgatcaataagaaatcatctgaagttacaaaactcactggtaataggtagacagaagaacaccgaatattataatactgtaactatgttgtataaactactctttgttttttgtttttgttttttttttttagagtctcactctgtcacccaatctggagtgcagtggtgtggtctcagctcactgcaacctccrcctcccaggttcaagtgattctcctgcctcagcctcccgagtagctgggattacaggtgcccaccaccatacccagataattttttgtatttttttttttagtagagatagtgtttcaccctgttggccaggctggtattgaactcctgacctatggtgattcacccgccttaccctcccaaagtgctgggacccactcttaagtaaaaagactaaccaaggaaccagtaaaaaataataactataatttttcaagacataaacggtacaataagatataaatggaaacaacaa

SEQ ID NO: 298574 - DNA, 493 bp, Homo sapiens
ttaatgatcaataagaaatcatctgaagttacaaaactcactggtaataggtagacagaagaacaccgaatattataatactgtaactatgttgtataaactactctttgttttttgtttttgttttttttttttagagtctcactctgtcacccaatctggagtgcagtggtgtggtctcagctcactgcaacctccacctcccaggttcaagtgattctcctgcctcagcctcccgagtagctgggattacaggtgcccaccaccatacccagataattttttgtatttttttttttagtagagatagtgtttcaccctgttggccaggctggtattgaactcctgacctatggtgattcacccrccttaccctcccaaagtgctgggacccactcttaagtaaaaagactaaccaaggaaccagtaaaaaataataactataatttttcaagacataaacggtacaataagatataaatggaaacaacaa

SEQ ID NO: 298575 - DNA, 569 bp, Homo sapiens
tcactgtataatgataaacgggtcaattcagcaagaggttataattttaaatatatatgtccccaacactagagaacccagctatataaagcaaatattattagagctataaagagagataagtcccaatacatacatagctggagacttcaacaacctactttcagcattgaacagatagatctttcagactgaaaaccaacaaagaaacatcagacttaatctgcactatagaacaaatggacctaataaatatttacagaacatttcatcccatggctccataatacacattcttctcctcagcacatagatcattctcaaggatagaccatatattaaatcaygaagcaagtcttaaaacattcaaaagaaattgaagtattatcaagcatcttctgtaactgcaatggaataaaactagaaatcaatagcaagaggaaatttggaaactatacaaatacataacaatcaaacaatatactcctgaatgaccagtgggttaatgaattaattaataaggaaatggaaagatgtcttgaaacaaatgataatggaaacacaacata

SEQ ID NO: 298576 - DNA, 569 bp, Homo sapiens
tcactgtataatgataaacgggtcaattcagcaagaggttataattttaaatatatatgtccccaacactagagaacccagctatataaagcaaatattattagagctataaagagagataagtcccaatacatacatagctggagacttcaacaacctactttcagcattgaacagatagatctttcagactgaaaaccaacaaagaaacatcagacttaatctgcactatagaacaaatggacctaataaatatttacagaacatttcatcccatggctccataatacacattcttctcctcagcacatagatcattctcaaggatagaccatatattaaatcacgaagcaagtcttaaaacattcaaaaraaattgaagtattatcaagcatcttctgtaactgcaatggaataaaactagaaatcaatagcaagaggaaatttggaaactatacaaatacataacaatcaaacaatatactcctgaatgaccagtgggttaatgaattaattaataaggaaatggaaagatgtcttgaaacaaatgataatggaaacacaacata

SEQ ID NO: 298577 - DNA, 564 bp, Homo sapiens
ccaaattggagtggaagaaatcaaattatccttgtttgcagatgatatgttcttgtatttggaaaaacctaaagactccaccaccaaaaaactattagaactgataaagtcagtaaagttgcaggctacaaaatcaacatacaaaaatcagtagcatttctacataccaacaggtaactatatgaaaaaaaaaatcaagaaagtartcccatttttaatcactacacataaaataagatacctaggactaaaattaaagaagtcaaagatctctacaataaaaactataaaactctgatgcaagaaattgaagaggacaccaaagaaaggaaatatattccatgttcatggatttgaagaatcaatattgttaaaatgtccatactgtgacatgcatccatgtgaagagaccaccaaacaggctttgtgtgagcaatgaggctgtttattcacttgggtgcaagtgggctgagtccaagaaaggagtcagcaaagggaaatagggatggggcagttttataggatttgggtgggtagtggaaaattagttataggtggttatct

SEQ ID NO: 298578 - DNA, 564 bp, Homo sapiens
ccaaattggagtggaagaaatcaaattatccttgtttgcagatgatatgttcttgtatttggaaaaacctaaagactccaccaccaaaaaactattagaactgataaagtcagtaaagttgcaggctacaaaatcaacatacaaaaatcagtagcatttctacataccaacaggtaactatatgaaaaaaaaaatcaagaaagtagtcccatttttaatcactacacataaaataagatacctaggactaaaattaaagaagtcaaagatctctacaataaaaactataaaactctgatgcaagaaattgargaggacaccaaagaaaggaaatatattccatgttcatggatttgaagaatcaatattgttaaaatgtccatactgtgacatgcatccatgtgaagagaccaccaaacaggctttgtgtgagcaatgaggctgtttattcacttgggtgcaagtgggctgagtccaagaaaggagtcagcaaagggaaatagggatggggcagttttataggatttgggtgggtagtggaaaattagttataggtggttatct

SEQ ID NO: 298579 - DNA, 603 bp, Homo sapiens
acaataaattgtttctcttatggataaatgcatgcaaacacttgcgaaacccacacagggactggcagataatcttaagaatgcccatgttggtaggcacttaaacttcattrtctcttttgtagacagagcactatacatagaaaatgcctcaatatatatattgagttctacactaaagtatttttttcttttaattttattttttaagttccagggcatatgtgcagaatgtgcaggtttgttacataggtaaacatgtactatggtggtttgctgcacctatcaacccatcacctaggtattaagtttagcatgcattagctcttttttctgatgcactcccccacctccaccctctcccaacaggccctatacactaaagtattaatagaagaagaatggcagtagctgtttccctgggcaatctaaaattaatctgtattttcatgaaatatattatatggtttgagacaatagcttctccttgggtaagactgaatttgtattgtcaaagtataaacttgttccagaagtaaagactggattaggatctaaaattagattatgacttacataatagataatattttaaaaactaac

SEQ ID NO: 298580 - DNA, 603 bp, Homo sapiens
acaataaattgtttctcttatggataaatgcatgcaaacacttgcgaaacccacacagggactggcagataatcttaagaatgcccatgttggtaggcacttaaacttcattgtctcttttgtagacagagcactatacatagaaaatgcctcaatatatatattgagttctacactaaagtatttttttcttttaattttattttttaagttccagggyatatgtgcagaatgtgcaggtttgttacataggtaaacatgtactatggtggtttgctgcacctatcaacccatcacctaggtattaagtttagcatgcattagctcttttttctgatgcactcccccacctccaccctctcccaacaggccctatacactaaagtattaatagaagaagaatggcagtagctgtttccctgggcaatctaaaattaatctgtattttcatgaaatatattatatggtttgagacaatagcttctccttgggtaagactgaatttgtattgtcaaagtataaacttgttccagaagtaaagactggattaggatctaaaattagattatgacttacataatagataatattttaaaaactaac

SEQ ID NO: 298581 - DNA, 603 bp, Homo sapiens
acaataaattgtttctcttatggataaatgcatgcaaacacttgcgaaacccacacagggactggcagataatcttaagaatgcccatgttggtaggcacttaaacttcattgtctcttttgtagacagagcactatacatagaaaatgcctcaatatatatattgagttctacactaaagtatttttttcttttaattttattttttaagttccagggcayatgtgcagaatgtgcaggtttgttacataggtaaacatgtactatggtggtttgctgcacctatcaacccatcacctaggtattaagtttagcatgcattagctcttttttctgatgcactcccccacctccaccctctcccaacaggccctatacactaaagtattaatagaagaagaatggcagtagctgtttccctgggcaatctaaaattaatctgtattttcatgaaatatattatatggtttgagacaatagcttctccttgggtaagactgaatttgtattgtcaaagtataaacttgttccagaagtaaagactggattaggatctaaaattagattatgacttacataatagataatattttaaaaactaac

SEQ ID NO: 298582 - DNA, 617 bp, Homo sapiens
gctaagcactatgctaaacattttgcatgtattagcaaatttaaccctcacagcaactgtattgttattttcttcattttatatatgaaggaattaagacctggaataacaacaaaacttaaccagaatctcacagttagaagttggacccgcatctactttacgatttcaycatcctaagataactactggaaacatttcaataaattttcttcacttacatgtgttctttgcctatatgtgtatatgcaatatacttattttttattaagaaactttatataattttaaatttatttatggtttcatgtcattaaatagtatttaaatagaggttttagtagctgcataatactttacctcatgtttatgtcaaaatgtgtttgagccagttgcctcattgattttgccaacttcaatttttttttttaatagaaaaggtctcactctgtcgcacaggctggggtacagtggtgcaatcatggctcactgcagcctcgaactcctgggctcaagtcgtcattccatcttagcctcccaagtagcttgggactacaggcatgcaccaaaccaccacacatagctaattttttttcatttttagtagagacaaggtc

SEQ ID NO: 298583 - DNA, 548 bp, Homo sapiens
aatactttacctcatgtttatgtcaaaatgtgtttgagccagttgcctcattgattttgccaacttcaatttttttttttaatagaaaaggtctcactctgtcgcacaggctggggtacagtggtgcaatcatggctcactgcagcctcgaactcctgggctcaagtcgtcattccatcttagcctcccaagtagcttgggactacaggcatgcaccaaaccaccacacatagctaattttttttcatttttagtagagacaaggtctcactatgttgcccaggccaattttattcacaaaactttgacaaacattcttaaacatggagttttattatcacttccaattatgtatctagtgtcaaaactagaagtattaagagatctgatcattttaagattattcatattttcaaaatgtattcaagaaacgttgaccagtttattctcataccaaagtccaaaggccttatgtatyatgtccaaagtcaaattttgaaatgtgtgtgtatgtatttaatcctactgaatttttattggaattgtat

SEQ ID NO: 298584 - DNA, 642 bp, Homo sapiens
  misc_feature (1)...(642): n = A,T,C or G
ttcccacttttcagatgctttgcagacattgctgaccaacttctaacattggttccccgaattctggaaggacggcatgcagcctaggtgtttgtgtctctcacagtcacagatttgtcagctttcaagatcccaattcatgcgaatctaccccattctttggctgactaagtcatgggtntgacactggggagataaagcaattctgggggggagatgagtttctgaatttgttttaaatgtaggatttgtatcaaattgtattgctgattaaaggaaatttatagttcttgttcacatattcagtctacttggtttgaaactattttgatgttttcactcttcagatattaaggaaaggacagactagctacacagagttaacggataaaggtaaaaacacaccataaaatctgcagagcaagaaaacacctaaacttcagtccctgaaaaacagaatatagttcttaattttctttaaaacttttcaaagtttctcctgaagtctgcctatagccaggcatcaaatacacacttacacttatatatacaaatgtacatccatttatgtttgtgctaataaakgtatgttttacatatgcgaatatatgtggagacagacaggaaaataaataggcagat

SEQ ID NO: 298585 - DNA, 383 bp, Homo sapiens
gagggaaattattagaccatccatttctctaggtacattatgtcataagtcaagttcactaaaattaaatatttaagcatttaaaaatattctgtcatagtaatgccagtcttcaatatggtaagttayatggagaggatttctgaagttgaggtatcattacatttccagtcaactctacttaattgttgtgcatttatgtgtgtgtgagtgtattttctaattctttgttttcttcattcattggtttcttttgaaataagttgttgactactttcgatggtttgtgaacttttcataaacatcattgtaaatggttaataatgattatttctatttttttgcttttataaaatacactctaatatatttttgtacccaaa

SEQ ID NO: 298586 - DNA, 526 bp, Homo sapiens
acagtgactggccctagtagcaaaaagccagatttgggaagtctctgaaaccacagtttcctatgttctctttaactgagtaggtttactgcatgaatcaacccttcaatcccacacaccctccaccaaacttcagtagagacaagaatggccataaatagccggagagtaattcctgttttttgctttgttttgtttttgtttttgtttgggggggggggggttgtgtgtgtttgtatgtgtgtgtgtgtgtgtgtgtgtgtgtgtgtgtgtgtgtgtgtgtggtttttttttttttttttttttttgacacagagtctccctctgttgcccaggctggagtgcagtggtgcgatcttggctcactgcaatctccgcctcctgggttcaagtgattctcctgcctcagcctcytgagtagctgggattataggtgcataccaccacacccagctaatttttgtatttttggtagagacaaggtttcaccatgttggccaggatggtcttgatctcttgacctcat

SEQ ID NO: 298587 - DNA, 624 bp, Homo sapiens
tgtcatagtaatgccagtcttcaatatggtaagttacatggagaggatttctgaagttgaggtatcattacatttccagtcaactctacttaattgttgtgcatttatgtgtgtgtgagtgtattttctaattctttgttttcttcattcattggtttcttttgaaataagttgttgactactttygatggtttgtgaacttttcataaacatcattgtaaatggttaataatgattatttctatttttttgcttttataaaatacactctaatatatttttgtacccaaagtaaaactattgggcgtcaaattttatttttgtaagacttgtaccaaggtacttccaccagcaatgtgtgagtgtgactgttttgctggacccctagcaggactgagttttcttatgaaattagcaaaaattcttgctaattaaaaggcaagaatagttatctagtttaaattttcattttttattaacaagattaaacatttttctgaatattgaaataccagtgttgtctcctttcttgctcttaaatttttgttttttatgaaaatctaacatatattcagagaagtgctcagactaataaaaatctataaagctctgcacctgacaaca

SEQ ID NO: 298588 - DNA, 435 bp, Homo sapiens
cgattactagcaaatttccttctgccattaayatatattcctccttccctcgaaacaccatacattttcctttacattttttctattctccttttctttttaccttctctttttcagaaggaagtatttgaggaattctgtcctgcatcttgcttgttcctgtggtcttggtgtttgtccaagtgtgagacctgaggctacacctcacattcgcagcaattgtcctcatgtaagacacacaaaaagagacagcaagcaggattatcctagacttagtatacgtgacaagaaaggcatgagctgtaacaagtaaaaagctgttttgtttcaaaaaataggggttgctgatgaaggaatcacatctgaaagaaacaacacttttcatggaggccagatgaaaggagcttagggtcttccagtgtgtgtgtgtgtgtg

SEQ ID NO: 298589 - DNA, 435 bp, Homo sapiens
cgattactagcaaatttccttctgccattaacatatattcctccttccctcraaacaccatacattttcctttacattttttctattctccttttctttttaccttctctttttcagaaggaagtatttgaggaattctgtcctgcatcttgcttgttcctgtggtcttggtgtttgtccaagtgtgagacctgaggctacacctcacattcgcagcaattgtcctcatgtaagacacacaaaaagagacagcaagcaggattatcctagacttagtatacgtgacaagaaaggcatgagctgtaacaagtaaaaagctgttttgtttcaaaaaataggggttgctgatgaaggaatcacatctgaaagaaacaacacttttcatggaggccagatgaaaggagcttagggtcttccagtgtgtgtgtgtgtgtg

SEQ ID NO: 298590 - DNA, 435 bp, Homo sapiens
cgattactagcaaatttccttctgccattaacatatattcctccttccctcgaaacaccatacattttcctttacattttttctattctccttttctttttaccttctctttttcagaaggaagtatttgaggaattctgtcctgcatcttgcttgttcctgtggtcttggtgtttgtccaagtgtgagacctgaggytacacctcacattcgcagcaattgtcctcatgtaagacacacaaaaagagacagcaagcaggattatcctagacttagtatacgtgacaagaaaggcatgagctgtaacaagtaaaaagctgttttgtttcaaaaaataggggttgctgatgaaggaatcacatctgaaagaaacaacacttttcatggaggccagatgaaaggagcttagggtcttccagtgtgtgtgtgtgtgtg

SEQ ID NO: 298591 - DNA, 466 bp, Homo sapiens
ctcacattcgcagcaattgtcctcatgtaagacacacaaaaagagacagcaagcaggattatcctagacttagtatacgtgacaagaaaggcatgagctgtaacaagtaaaaagctgttttgtttmaaaaaataggggttgctgatgaaggaatcacatctgaaagaaacaacacttttcatggaggccagatgaaaggagcttagggtcttccagtgtgtgtgtgtgtgtgcacacttgggcatactataaattagcctcagacagaggtctgctatgaaacagttaattctgaaaagttttctataaactccagtgataatgtttctttttcaggttcatggaaaaccagtttagcatcactaacaagccaccttacgggtgtagataaaggactggcgccacaacgtctatatggactaaacttttcattttcatcactttttggtaaggacctgaaaacaaa

SEQ ID NO: 298592 - DNA, 466 bp, Homo sapiens
ctcacattcgcagcaattgtcctcatgtaagacacacaaaaagagacagcaagcaggattatcctagacttagtatacgtgacaagaaaggcatgagctgtaacaagtaaaaagctgttttgtttcaaaaaataggggttgctgatgaaggaatcacatctgaaagaaacaacacttttcayggaggccagatgaaaggagcttagggtcttccagtgtgtgtgtgtgtgtgcacacttgggcatactataaattagcctcagacagaggtctgctatgaaacagttaattctgaaaagttttctataaactccagtgataatgtttctttttcaggttcatggaaaaccagtttagcatcactaacaagccaccttacgggtgtagataaaggactggcgccacaacgtctatatggactaaacttttcattttcatcactttttggtaaggacctgaaaacaaa

SEQ ID NO: 298593 - DNA, 466 bp, Homo sapiens
ctcacattcgcagcaattgtcctcatgtaagacacacaaaaagagacagcaagcaggattatcctagacttagtatacgtgacaagaaaggcatgagctgtaacaagtaaaaagctgttttgtttcaaaaaataggggttgctgatgaaggaatcacatctgaaagaaacaacacttttcatggaggccagatgaaaggagcttagggtcttccagtgtgtgtgtgtgtgtgcacacttgggcatactataaattagcctcagacagaggtctgctatgamacagttaattctgaaaagttttctataaactccagtgataatgtttctttttcaggttcatggaaaaccagtttagcatcactaacaagccaccttacgggtgtagataaaggactggcgccacaacgtctatatggactaaacttttcattttcatcactttttggtaaggacctgaaaacaaa

SEQ ID NO: 298594 - DNA, 466 bp, Homo sapiens
ctcacattcgcagcaattgtcctcatgtaagacacacaaaaagagacagcaagcaggattatcctagacttagtatacgtgacaagaaaggcatgagctgtaacaagtaaaaagctgttttgtttcaaaaaataggggttgctgatgaaggaatcacatctgaaagaaacaacacttttcatggaggccagatgaaaggagcttagggtcttccagtgtgtgtgtgtgtgtgcacacttgggcatactataaattagcctcagacagaggtctgctatgaaacagttaattctgaaaagttttctataaactccagtgataatgtttctttttcaggttcatggaaaaccagtttagcatcactaacaagccaccttacgggtgtagataaaggactggcgccacaaygtctatatggactaaacttttcattttcatcactttttggtaaggacctgaaaacaaa

SEQ ID NO: 298595 - DNA, 508 bp, Homo sapiens
gcacatactacaatatgaatgaattttgaaaacagtaagtgaaatgaaagaaaccagtctcaaaaaagccacatataatgccatttgtatgaaatgtccagaatagacaaatatatagatacagaagtagattcgtggttgcttaagcctggggatatggggagcttggggtgtgacagggaaaggttgtgcgactcctttttgaggtgataacatgttctaaaattgtgtggtgatagttgcacaactctaaaaatgtcattaagtggtactgtctaaataggtgaattttatgatatgtgaattacractcaatacaactgtaaccaaaaaagagaaagaaaaaagaactcacagctcactctgcttctgcacagcacaagacctccttgctactctagttcagcaagtatccacccagggacgtgacaaatcctgcagtagcaaatccactggctgagtgatttcgctcatgctccccttacatggggaagggggttaaataagc

SEQ ID NO: 298596 - DNA, 577 bp, Homo sapiens
tttcacgatagccaacagatgcaaagaacccaagtgtccatcaacaatgaatggagaagcaaaatgtattatatcccttcaatggaatattattcagccataaaaagggatgaagtgctagcacatactacaatatgaatgaattttgaaaacagtaagtgaaatgaaagaaaccagtctcaaaaaagccacatataatgccatttgtatgaaatgtccagaatagacaaatatatagatacagaagtagattcgtggttgcttaagcctggggatatggggagcttggggtgtgacagggaaaggttgtgcgactcctttttgaggtgataacatgttctaaaattgtgtggtgatagttgcacaactctaaaaatgtcattaagtggtactgtctaaataggtgaattttatgatatgtgaattacaactcaatacaactgtaaccaaaaaagaraaagaaaaaagaactcacagctcactctgcttctgcacagcacaagacctccttgctactctagttcagcaagtatccacccagggacgtgacaaatcctgcagtagcaaatccactggc

SEQ ID NO: 298597 - DNA, 615 bp, Homo sapiens
cttgtgtaatctattgccattttacaagcgtatattctcttgaatgacaaacacatgacattaaaaataaaggaagcagagaaatggagtggagagaacaatttatagcattttccaaagcttttaaaaccaagttattagatgtcgtttaacattttaaaatctccatcctttaaaatgcataaggcctgaaattaaagcaaaagatttagagagttccaaacacagagccagcagcaccatctaggttcatgttattttctttgaaagactattttatgtggtactgagtaaaaatgaaacatgatgaaatgggtttactaaaagtctgtcctaaaaatcaccactcttccctaaatccatactctcgatctagttttcattatatcagagaaaccacagtttgacttcccaatttttgctgtgaggtgaattaaaaaaaawcatattacaatacagcttttcagcatctgtgttggcatacttatttttactgcttatttgatcttcagagtgttcagcttgctatcaatgatgcatttttcacagggtttattatccagcaaggaaaaccatgcagagtttggttactttcctacacttggttcattgttt

SEQ ID NO: 298598 - DNA, 512 bp, Homo sapiens
atctgtgttggcatacttatttttactgcttatttgatcttcagagtgttcagcttgctatcaatgatgcatttttcacagggtttattatccagcaaggaaaaccatgcagagtttggttactttcctacacttggttcattgttttcacttttctcatgtgggacaggccttctgtggcttcacacgaaatcccttcccccagtcccgaaatgtttccaytaggtttgtggaggtcattctgatagataaattgcaaatcacatggttttcatgtgaattggtgtttatctctttaaaagaagtcagaactggcagaaaattaatgaaaaatataacatgcacaggctattctttgcagtataaatgataatagcaaaatacaagaaacaacccaaatatctatattgtgagaatggctgaataaattatgatgcatccacgcagtggtgtactaagcagttataaaatggaataaaggatatctttatatactgctatgtggaattgca

SEQ ID NO: 298599 - DNA, 605 bp, Homo sapiens
ttggtgtttatctctttaaaagaagtcagaactggcagaaaattaatgaaaaatataacatgcacaggctattctttgcagtataaatgataatagcaaaatacaagaaacaacccaaatatctatattrtgagaatggctgaataaattatgatgcatccacgcagtggtgtactaagcagttataaaatggaataaaggatatctttatatactgctatgtggaattgcaagatgcattgttaatgagaaaaagcagagttcagaatagtacttacgatgtaatcaatttatatgtatctgtgtgtacacatatttgagtatgtaaacttgcttatattgtcagaaagaaacaatagacagtcaatccaaaagctaataaaaatattcacctatgtggggagggagaaaacagggattaagaggcagggatggcagctagaattctctaaataagtttattttttattttgacttggagcgatgcaatgtcttacaaaataaaaccagaaaaaaaagtaaaggaggctatctcccactgccagaaaacctaaaaccaactaaaaaaaatgttggttggttggaaacaaatcttaataaaaatg

SEQ ID NO: 298600 - DNA, 605 bp, Homo sapiens
ttggtgtttatctctttaaaagaagtcagaactggcagaaaattaatgaaaaatataacatgcacaggctattctttgcagtataaatgataatagcaaaatacaagaaacaacccaaatatctatattgtgagaatggctgaataaattatgatgcatccacgcagtggtgtactaagcagttataaaatggaataaaggatatctttatatactgctatgtggaattgcaagatgcattgttaatgagaaaaagcagagttcagaatagtacttaygatgtaatcaatttatatgtatctgtgtgtacacatatttgagtatgtaaacttgcttatattgtcagaaagaaacaatagacagtcaatccaaaagctaataaaaatattcacctatgtggggagggagaaaacagggattaagaggcagggatggcagctagaattctctaaataagtttattttttattttgacttggagcgatgcaatgtcttacaaaataaaaccagaaaaaaaagtaaaggaggctatctcccactgccagaaaacctaaaaccaactaaaaaaaatgttggttggttggaaacaaatcttaataaaaatg

SEQ ID NO: 298601 - DNA, 559 bp, Homo sapiens
gtcatgttctcggatttcacgggtttgtaacgaggatggctgcgcaagtttctcctttgtctgattgcccatttattcattcatggctgtcaaacactagtgggtggaggttcctgttccyttccagatgtactgatgaatgctttttggcttgctgaccttcttgggatttgaagagttacccatgagggtaaaactttcttccagactttgcctaccttatagaaatcattattagtactaacattgttaggggtcttgtcattttaaatacaacaaattgttcaaatgagtggtaaaatttaaatggaaaatagtgaaaatacttactagaagtagaacaaaggaaaattatgataacataaattatatgaatcatagctaatgaacagctgaagaattgctggtaatttagaagacttgaactacaccaaagacaattgtgtcaaaaccaaacctggtgtgtaaattgatctgccagtaggttgcaacttggagaatcaatcaccttagtatgtaaacctagctgtcttgtacttgtttcatcaaagcagtatgt

SEQ ID NO: 298602 - DNA, 566 bp, Homo sapiens
tcctacctacatcttggagccttcctaccatggtctcatgagaatttctgcgcaaaggctttttctggcgtgtctaggtctggatagctgatgcccctggagcagtccctaggtgatgatggataggagattggaataaataatccagcttcctcatctctggcataaaatcatttatgttcatttctttcttttaaaaattaattactttttaaaaatgattatattataatgtacatatttatagggtacagtttgatattttgacatctatgttatataatgatcaaatcaaatgtatcatttctttgtggtgagaacattcaaaagccccttttctagcawtgttgcagtatacctcactgttaatcatctttacccaactgagcaatagaatgccagattctatctaattgaaactttgtacccattgatcaacctctcttcatcctctcctccctcatctctctggtaaccactgttctactctcagtttctatgataccaatttttttttcacagtccatatacaagtgagataaagtggtatgatagtgcctgattta

SEQ ID NO: 298603 - DNA, 583 bp, Homo sapiens
taagttagatcttagggagatgttctcctggtagagtgttaatccaagataactttaccaaaaggtggtttatatattgcagcaggagctactggagttcctacctacatcttggagccttcctaccatggtctcatgagaatttctgcgcaaaggctttttctggcgtgtctaggtctggatagctgatgcccctggagcagtccctaggtgatgatggataggagattggaataaataatccagcttcctcatctctggcataaaatcatttatgttcatttctttcttttaaaaattaattactttttaaaaatgattatattataatgtacatatttatagggtacagtttgatattttgacatctatgttatataatgatcaaatcaaatgtatcatttctttgtggtgagaacattcaaaagccccttttctagcaatgttgcagtatacctcactgttaatcatctttacccaactgwgcaatagaatgccagattctatctaattgaaactttgtacccattgatcaacctctcttcatcctctcctccctcatctctctggtaaccactgttct

SEQ ID NO: 298604 - DNA, 565 bp, Homo sapiens
aacatttttattatcatgccctatattaacatctttccgttttctgtttcatttctctatgctttacagttctttcctgagatcacctcccaaatccacaactttcccttttcatccttttctcagtttctgtttctggtcgaaccctaaactaaaacactctcctcttctgatagagctgtagcaaaaattatatgtaaaaatgcttttaaagtgacttgaggggtgttctctcagaagcagggagatagataaactacatggcatttaattgttatcttawgctatttcattctatttccaaatatatgaccatgtgtttttacactcattttaatgggaatttatatctcccattagatgtgactccacaaagaaagggaaaagatgtctggctggcaccctgaacctctaaattctctatcagttgcccaaagtagttctgagtgcacaaaaatataaagaagaaacaatacaaaaaattgtgttaattatcttgggtctttggcctcgaatcctgtgtggagctcttggatcttgttagccaagctgtgctggcttctgg

SEQ ID NO: 298605 - DNA, 513 bp, Homo sapiens
aaccctaaactaaaacactctcctcttctgatagagctgtagcaaaaattatatgtaaaaatgcttttaaagtgacttgaggggtgttctctcagaagcagggagatagataaactacatggcatttaattgttatcttatgctatttcattctatttccaaatatatgaccatgtgtttttacactcattttaatgggaatttatatctcccattagatgtgactccacaaagaaagggaaaagatgtctggctggcaccctgaacctctaaattctctatcagttgcccaaagtagttctgagtgcacaaaaatataaagaagaaacaatacaaaaaawtgtgttaattatcttgggtctttggcctcgaatcctgtgtggagctcttggatcttgttagccaagctgtgctggcttctggtagatagataccctgttattttattcacactcatcttttccctaaggaagaaaggcaagggttgggattgttcagattccagagtactaa

SEQ ID NO: 298606 - DNA, 578 bp, Homo sapiens
aataaacctaacaaaaattacaccaagagaatgagaacgttttatactctaaaatcaagaggatagcagataccagcttcaatgatccatcttttggcatttctgggtgctaaaagggccagattctcaagcagtagtttttgtcattcattccatctgtacttattgagtatctactgaacactagaaatatcacaatgaaaagaattataaagtcaagtgcctgccttaatgaggcttactctraactggctgtgtgataataacaaagtaaagaattgagaaagaaaagagatagaaattcctactccaggatgttgtttcaaatataaaatattatttttaagcagaacccacaattatgaatgtacattaaaggcttaaagtcattcacatggcaaaaagacataaataaatctgctagaggcttccaggagatattcctagctcatgacacagtcatggaaagcaaccctgtttctcccacttgacctgcgtttattgttgtccttcctagagccttgaggtgaaatcacattaggatgaatccaacacagtgtaaagaagaagaaacacaa

SEQ ID NO: 298607 - DNA, 571 bp, Homo sapiens
ataaacctaacaaaaattacaccaagagaatgagaacgttttatactctaaaatcaagaggatagcagataccagcttcaatgatccatcttttggcatttctgggtgctaaaagggccagattctcaagcagtagtttttgtcattcattccatctgtacttattgagtatctactgaacactagaaatatcacaatgaaaagaattataaagtcaagtgcctgccttaatgaggcttactctgamctggctgtgtgataataacaaagtaaagaattgagaaagaaaagagatagaaattcctactccaggatgttgtttcaaatataaaatattatttttaagcagaacccacaattatgaatgtacattaaaggcttaaagtcattcacatggcaaaaagacataaataaatctgctagaggcttccaggagatattcctagctcatgacacagtcatggaaagcaaccctgtttctcccacttgacctgcgtttattgttgtccttcctagagccttgaggtgaaatcacattaggatgaatccaacacagtgtaaagaagaagaa

SEQ ID NO: 298608 - DNA, 608 bp, Homo sapiens
tctggaattaactacagaggttccatttgtttctctctagttcttaggtgggttctccagactgcctgtgaatccttgcttctgtcgtagggagagaaatccgatattggtgaagagcaatcagtctaccatattcccactagttattacaagtttaggctgacttcatctcttggtaccttaaataacaccctggtgaacttcttttatcaagtctcttcatagacctggatgaaatttacccaacaaaatgttgggtaaatccaaggaaggagggctgataaaggatataawcaagttaattagctaacattggcaaattacttctaggatggctgcaccagtttaccgatcttacactgcattttcttagctttgccatgcgtgtgagtgaatattgagttttcaccatactgttgagtggaaaattgtaacatcactatttatagttaaataaaattaggcatttgttcatttacttggctttgtttttatattctaaaatttcttaggtttttaagtaattttattcagtgctatatatacaatgtatatttttatacttacataatatataatatttatatgtaaatactatatatacttgt

SEQ ID NO: 298609 - DNA, 529 bp, Homo sapiens
gtgactgcaaatctccctagaaactgctatagccacatgtttataataaacattcaaggccagtagaatactgagagagtgtacttaggatacaagttcttgattccaagcccctgatcaaactagaggaaaaacttggaggccaagaatttgctttcttttactagtttaaatgtaagacttgacccctaatttttgatcatcccaggggaggaggtggcaattctccaatcatgcagcttaaaagtcttgaaagccaaaggttaggatgcttctctgagtcaaatgttgcatcctaaaaggtccatctgcattgttctagaattraaagggccacagatgatcatacacttgcttttgtctctgtgcatttctccaataaatgccgtctcagaagacctagtatatatgctattagatcctttgcccttacttgtttgacagtggtttacccaatacgtgctttttactaatccctgagatacagaactccagtgattacaggtctaacatgagtggagttaatgag

SEQ ID NO: 298610 - DNA, 476 bp, Homo sapiens
acattaactagaggttaatgataataaatatctctcaatgttgttagggcattcagtggattagtgcatgtagtgtctggcacttagtaatgcttattttatttagggctatcgttctttttagaataatagaatctgtcctttktggaacaggacctgtaaccctgcagaacccagagttgcagggccaggaagcacaaagtctcctgacggatgattaggaatgatgatgatttactcctgcttctactgcacccaaattgatgtattcttcatactagaggccatagtaccatataaagttttctaattcattttacataatgcatcctggaagatgggctcccatcctcacagagtattattactctcgagctggcacttaagctgtgctttctgttgtttattccaatgcttgcagaacaccttcctgatctagtcctcattcactgcatggatgggtcagagcagttttc

SEQ ID NO: 298611 - DNA, 476 bp, Homo sapiens
acattaactagaggttaatgataataaatatctctcaatgttgttagggcattcagtggattagtgcatgtagtgtctggcacttagtaatgcttattttatttagggctatcgttctttttagaataatagaatctgtcctttttggaacaggacctgtaaccctgcagaacccagagttgcagggccaggaagcacaaagtctcctgayggatgattaggaatgatgatgatttactcctgcttctactgcacccaaattgatgtattcttcatactagaggccatagtaccatataaagttttctaattcattttacataatgcatcctggaagatgggctcccatcctcacagagtattattactctcgagctggcacttaagctgtgctttctgttgtttattccaatgcttgcagaacaccttcctgatctagtcctcattcactgcatggatgggtcagagcagttttc

SEQ ID NO: 298612 - DNA, 581 bp, Homo sapiens
attatcagtggagtggccagcaattcagtcctggaaccgcatctttactgcytaatttctcagactactattggtgtcggttgtgttctctgggaaacagatactgggccagggataaaaaactgaaaaaggatttttgtgaaaggaaaaggaaggaagcaggattgtgtggaaggaactgttagcctatgaggcagataggacaaaatgtttgccagaccaatgaggagctccagggcaaggtcgacctgttagagaggttctgagttgggaagaaatagagaagagtttgtacctcagccttgctcagtcatcacctgaggtcatcctgaaaaagggtggcctggtaatgaaacagaatgatgaggcagtttctaagaatggagtcaggacaattcttccccagtagaaaaatatttgtatacattattttcagttttgcctttttaaacttaacagcctcccaaagaattttccaagatccacagaattccatagtcatcattactataattttaaacgactgtattatatgatatctggtgccttaaaagatactttaaacatggtttgaatgggca

SEQ ID NO: 298613 - DNA, 581 bp, Homo sapiens
attatcagtggagtggccagcaattcagtcctggaaccgcatctttactgcctaatttctcagactactattggtgtcggttgtgttctctgggaaacagatactgggccagggataaaaaactgaaaaargatttttgtgaaaggaaaaggaaggaagcaggattgtgtggaaggaactgttagcctatgaggcagataggacaaaatgtttgccagaccaatgaggagctccagggcaaggtcgacctgttagagaggttctgagttgggaagaaatagagaagagtttgtacctcagccttgctcagtcatcacctgaggtcatcctgaaaaagggtggcctggtaatgaaacagaatgatgaggcagtttctaagaatggagtcaggacaattcttccccagtagaaaaatatttgtatacattattttcagttttgcctttttaaacttaacagcctcccaaagaattttccaagatccacagaattccatagtcatcattactataattttaaacgactgtattatatgatatctggtgccttaaaagatactttaaacatggtttgaatgggca

SEQ ID NO: 298614 - DNA, 581 bp, Homo sapiens
attatcagtggagtggccagcaattcagtcctggaaccgcatctttactgcctaatttctcagactactattggtgtcggttgtgttctctgggaaacagatactgggccagggataaaaaactgaaaaaggatttttgtgaaaggaaaaggaaggaagcaggattgtgtggaaggaactgttagcctatgaggcagataggacaaaatgtttgccagaccaatgaggagctccagggcaaggtcgacctgttagagaggttctgagttgggaagaaatagagaagagtttgtacctcagccttgctcagtcatcacctgaggtcatcytgaaaaagggtggcctggtaatgaaacagaatgatgaggcagtttctaagaatggagtcaggacaattcttccccagtagaaaaatatttgtatacattattttcagttttgcctttttaaacttaacagcctcccaaagaattttccaagatccacagaattccatagtcatcattactataattttaaacgactgtattatatgatatctggtgccttaaaagatactttaaacatggtttgaatgggca

SEQ ID NO: 298615 - DNA, 560 bp, Homo sapiens
tagtgaaacaatgatagtgtcattgattactgtttaaaaagttgagcgcagattgaatttattatcaaagaaactgttcggactgctccaaaataaatcaatgtgcttccaactttaccttaggtagaacatggtctgataaaaaaatttttcccatattgtgtggagtgaaatccttgatctaaagcatgttagggttgctacattagtttctttattctagtttcagtaagtattttaaggtgattgagaaaagaagatctctgtgagattaaaaacctgctgtgtagcccaaggaatgtaacgttaaataaaatgtcagaaagaattcactgtacatgtttgagcttgtagactaactgtgttaaatggatattaaactgasaaaaaattcttttaatatagccaatacatgagtatattagacagttagatcagaatgtctatatcagaaacttttattgaatacgtattcattccttttctctgatgataagagctaatgtttacggagccctgtttctatagcccagctattgtacgaattacgttgcgcattt

SEQ ID NO: 298616 - DNA, 560 bp, Homo sapiens
tagtgaaacaatgatagtgtcattgattactgtttaaaaagttgagcgcagattgaatttattatcaaagaaactgttcggactgctccaaaataaatcaatgtgcttccaactttaccttaggtagaacatggtctgataaaaaaatttttcccatattgtgtggagtgaaatccttgatctaaagcatgttagggttgctacattagtttctttattctagtttcagtaagtattttaaggtgattgagaaaagaagatctctgtgagattaaaaacctgctgtgtagcccaaggaatgtaacgttaaataaaatgtcagaaagaattcactgtacatgtttgagcttgtagactaactgtgttaaatggatattaaactgagaaaaaattcttttaatatagccaatacatgagtatattagacagttagatcagaatgtctatatcagaaacttttattgaatacgtattcattccttttctctgatgataagagctaatgtttacrgagccctgtttctatagcccagctattgtacgaattacgttgcgcattt

SEQ ID NO: 298617 - DNA, 649 bp, Homo sapiens
acaaccttacctctgagaaaaactcaaagctccacaaaagataaaacaaaacaaaacaaacaaacaaacaaacaaaactgtcttcttgggcatcaaaaagctaaaatgaaaaggataattgtttaatctgaatagatacttggaatctcattgtattcttctttttcattctgaatgttggaatctttttttttaattactgaaccatagtctgggaagagacaagaaccctaaataatgagcccagaagctgagacttcttttatcctgggaatatgtgcagattctggagaaggtggctgagaagttaaaaagctgaatagaatagaattattggaaatttacatgcctagtaagatacaagcaggagttcagagctatacatatgggaatcaggmtgcagagagagtctccgtgtttagactggcatccaatgagccacattctaaaagttagtatgaacccccaccaggaattttctcaatttctaagacaactctcaatttattgttatatttaaaaaataccatatttggcacacaataaaaaataacctagttcctgaaagtataacattttataaagagcagaattaaatgacagtagaatcatgtacccatggtggttgtggtaccgaatttaaagtaat

SEQ ID NO: 298618 - DNA, 568 bp, Homo sapiens
cacagataaacttgaagacaaaataaagaaaaaattgggataaacatttgctaaacttatcatgtagrgttaatttctttaacatatgaagagatctgataaatcagtaaaagttaagtatcttatttttaagtggttaaatatgaagatacagtatatagaaaataatatacgaatgattttaaaatacaaaatatactcaatctcactgaaatttttagacatcacctttggaaattagaattgaagcactatgatctatttttaaaagagatttcattgattgactagcttgaaaaccactgagctagatattgcctgagatccactgatctctgaaggtacctgtgatcaccctgtctttatcaatctgtgattctagctattgtctcgtgtcactttccctaccgttgatagggaatagtgcggcatttatagtgccatgcttcctacagccaccccacactgcagcaaccatatacacagccctctgcatttctttagctaagggcctgggtgtggctaggaggaaatcatacacatatcgcattgggatgttttgagagtc

SEQ ID NO: 298619 - DNA, 568 bp, Homo sapiens
cacagataaacttgaagacaaaataaagaaaaaattgggataaacatttgctaaacttatcatgtagggttaatttctttaacatatgaagagatctgataaatcagtaaaagttaagtatcttatttttaagtggttaaatatgaagatacagtatatagaaaataatatacgaatgattttaaaatacaaaatatactcaatctcactgaaatttttagacatcacctttggaaattagaattgaagcactatgatctatttttaaaagagatttcattgattgactagcttgaaaaccactgagctagatattgcctgagatccactgatctctgaaggtacctgtgatcaccctgtctttatcaatctgtgattctagctattgtctcgtgtcactttccctacygttgatagggaatagtgcggcatttatagtgccatgcttcctacagccaccccacactgcagcaaccatatacacagccctctgcatttctttagctaagggcctgggtgtggctaggaggaaatcatacacatatcgcattgggatgttttgagagtc

SEQ ID NO: 298620 - DNA, 609 bp, Homo sapiens
ctctctctctctcacatttcccaaagggaaaaaaaaagcagcctattaagtctcttatcagttctttagttatttctttaccaaatcaatttacttcttggcatctttaaattcttcccttcagctattaacctaagagacttcagcaagtctctaagaaactagaagatgaaaagaaaaatatcccagaaagggggtagagaagctgagaatacttacatgaaaataagctttactccagtgacactttggtacagtacaaaactaaatgaagaaatacaggtatagtctttgtcattcaatcccctgttatatatttagagacttgtgtgaatcttgcttggagtcagggtccataaatccyccattcagacaaagcagggagaacaacttttccccttttccttggtgactaaaacaaagggataaagacatgaactgaacaacaacaacaaaatcagagatctgcccttgagtgtacaaggttatcattccaatcaaactgttcctgaggtgtaatcttggttttgtgtcctctcttggttcatgccaattacttaaggttgattttccagtttttcatagtgatctgatattatgccagtaatt

SEQ ID NO: 298621 - DNA, 609 bp, Homo sapiens
ctctctctctctcacatttcccaaagggaaaaaaaaagcagcctattaagtctcttatcagttctttagttatttctttaccaaatcaatttacttcttggcatctttaaattcttcccttcagctattaacctaagagacttcagcaagtctctaagaaactagaagatgaaaagaaaaatatcccagaaagggggtagagaagctgagaatacttacatgaaaataagctttactccagtgacactttggtacagtacaaaactaaatgaagaaatacaggtatagtctttgtcattcaatcccctgttatatatttagagacttgtgtgaatcttgcttggagtcagggtccataaatcccccattcagacaaagcagggagaacaacktttccccttttccttggtgactaaaacaaagggataaagacatgaactgaacaacaacaacaaaatcagagatctgcccttgagtgtacaaggttatcattccaatcaaactgttcctgaggtgtaatcttggttttgtgtcctctcttggttcatgccaattacttaaggttgattttccagtttttcatagtgatctgatattatgccagtaatt

SEQ ID NO: 298622 - DNA, 523 bp, Homo sapiens
gtgtgactgcaggggttacagcttgctgagataactgttttcctcagcctgaaataaatggatggcatgtgggcagctagagattccaggccaagtacaaccagttttgctgacttctccatttactctggtataccrtagacatattattttctatgcatgccatgatgtcaaacaggctgaaagccctgtcttgtaggagcgacccagtaacaaaaatcataactacatataaacagtgttcctcctagacttttccaaagaaatactaatctctttacccatcaatctgtgccctggaaaattagatctacccaaatgtttcagtggacattgactttgaacttagacaatatatggggacctagaaagactgttcagtccattggtcagagggagagtttccaaagatcaaatgactgacggattttggtccaagttgtactactgaacctcagtaaaattttagaatagaggttcttatctacaaatatctaaatatagatatagatgaagatttaga

SEQ ID NO: 298623 - DNA, 550 bp, Homo sapiens
cattttaaatgaaaaaaagatgagtaaatctgattaagtctttaaaattttaaaaattgccamacatatagctgacgaaatattgacaactaaaattattaagctgtgaatactaaaatttaaaaatacaagtgaaaagagaaaactttcaaaggctataaacagagatgctatagaagaggaaacccaaatggccaataaacatataaacagatgctccaatttggaaaataccaaatactggcaaaaaatgggggaaaggaactcacagacaactggcaaagtgtgaattggtataactatttagggaagccaatttttagtattcttaattaaaattttaaaattttcattcagtaaagttgaagacataggccccctagaacctagaaacccacttcttcaactatacactctagagaaattagatatatgtgccaaagggaatatgtaggaagatgttcaatacaacataatttctgcgaaaaaaatgggagaaaattaaatagccatcaatagaaaataaataaacatatatttatacaatgct

SEQ ID NO: 298624 - DNA, 550 bp, Homo sapiens
cattttaaatgaaaaaaagatgagtaaatctgattaagtctttaaaattttaaaaattgccaaacatatagctgacgaaatattgacaactaaaattattaagctgtgaatactaaaatttaaaaatacaagtgaaaagagaaaactttcaaaggctataaacagagatgctatagaagaggaaacccaaatggccaataaacatataaacagatgctccaatttggaaaataccaaatactggcaaaaaatgggggaaaggaactcacagacaactggcaaagtgtgaattggtataactatttagggaagccaatttttagtattcttaattaaaattttaaaattttcattcagtaaagttgaagacataggccccctagaacctagaaacccacttcttcaactatacactctagagaaattagatatatgtgccaaagggaatatgtaggaagatgttcaatacaacataatttctgygaaaaaaatgggagaaaattaaatagccatcaatagaaaataaataaacatatatttatacaatgct

SEQ ID NO: 298625 - DNA, 244 bp, Homo sapiens
tcgggccctattctgagctatgctggagcctgccaaaagtcacctcattagaacaaaagatgcttctatcacccagcaaatttcaagggatttaggagctcagcaccaggaactgsaatcaaagaccaaataggaaaacagaagagtgtcctagcgcccctatcgacaggggtttttgaagctctgtgtcaggaactgggggcagaaaccaaatatatatgtgtgtgtgtgtgtatatatataa

SEQ ID NO: 298626 - DNA, 244 bp, Homo sapiens
tcgggccctattctgagctatgctggagcctgccaaaagtcacctcattagaacaaaagatgcttctatcacccagcaaatttcaagggatttaggagctcagcaccaggaactggmatcaaagaccaaataggaaaacagaagagtgtcctagcgcccctatcgacaggggtttttgaagctctgtgtcaggaactgggggcagaaaccaaatatatatgtgtgtgtgtgtgtatatatataa

SEQ ID NO: 298627 - DNA, 595 bp, Homo sapiens
tggatcagtcaacaaccagtcaggaaaacaaaatcatgctaagcattttaggtagaaggaaattggatacaaaggacctacaaggactagaggaactraaggaaaaagagaaaggggtatcaagggaccaaaaaaggaaggagtgatgggtggagattaagactcttgcgctatccccctgagccaagctccctggaaccagcttcttcagcgttctctggaaattctgacaattctagagcaatcagcacctaagtgagtggctactgcttccaggggctgtggagccttcaggcagcccctccctgctgctcttgtagcaacaaccaacaactgtcagcaatggccattgggatctgaaccacaaggaagaaatgcctcagtttctcccactttctgatctcctggtagcactttcaaatgacagaactgaatgagaagccaacagggaagggagtgtggaaatgtagcttgcagactagcagccccagaaactctaagcagaacagagaggggcaggcatggaactagaggcaccaggtaaataagcaacatagacacccaggtagaagcaatgatgttttccccattaaca

SEQ ID NO: 298628 - DNA, 595 bp, Homo sapiens
tggatcagtcaacaaccagtcaggaaaacaaaatcatgctaagcattttaggtagaaggaaattggatacaaaggacctacaaggactagaggaactgaaggaaaaagagaaaggggtatcaagggaccaaaaaaggaaggagtgatgggtggagattaagactcttgygctatccccctgagccaagctccctggaaccagcttcttcagcgttctctggaaattctgacaattctagagcaatcagcacctaagtgagtggctactgcttccaggggctgtggagccttcaggcagcccctccctgctgctcttgtagcaacaaccaacaactgtcagcaatggccattgggatctgaaccacaaggaagaaatgcctcagtttctcccactttctgatctcctggtagcactttcaaatgacagaactgaatgagaagccaacagggaagggagtgtggaaatgtagcttgcagactagcagccccagaaactctaagcagaacagagaggggcaggcatggaactagaggcaccaggtaaataagcaacatagacacccaggtagaagcaatgatgttttccccattaaca

SEQ ID NO: 298629 - DNA, 595 bp, Homo sapiens
tggatcagtcaacaaccagtcaggaaaacaaaatcatgctaagcattttaggtagaaggaaattggatacaaaggacctacaaggactagaggaactgaaggaaaaagagaaaggggtatcaagggaccaaaaaaggaaggagtgatgggtggagattaagactcttgcgctatccccctgagccaagctccctggaaccagcttcttcagcgttctctggaaattctgacawttctagagcaatcagcacctaagtgagtggctactgcttccaggggctgtggagccttcaggcagcccctccctgctgctcttgtagcaacaaccaacaactgtcagcaatggccattgggatctgaaccacaaggaagaaatgcctcagtttctcccactttctgatctcctggtagcactttcaaatgacagaactgaatgagaagccaacagggaagggagtgtggaaatgtagcttgcagactagcagccccagaaactctaagcagaacagagaggggcaggcatggaactagaggcaccaggtaaataagcaacatagacacccaggtagaagcaatgatgttttccccattaaca

SEQ ID NO: 298630 - DNA, 626 bp, Homo sapiens
gaagccaacagggaagggagtgtggaaatgtagcttgcagactagcagccccagaaactctaagcagaacagagaggggcaggcatggaactagaggcaccaggtaaataagcaacatagacacccaggtagaagcaatgatgttttccccattaacatttgacacacataaaatcaggatataattgacatcaaaaacgagatacagatgttgggcgcaaagggaggtacaagaaagggagaattgtcacaaaagcacagcaagtgatctgtggagtgtattaaagtagaaatggcatttgcctttgtagcctgttggcctttctttttatataaactaagacatgggagattttctaaaattattactttcaagtttttcaaataatacatgaatataccctccttgtaaggcattaaaatttatggatgtaggttaatcccctttgattaccaagccaatcctagtycctttcccagaaattactactgtcagtttgatgtatatccaaagagggtgaaatatccaacagtaggaaaaatgaccaagtacattgtagcatatttacaggatggagtatgtgtttgcttttcaagagaataaagtagatatgcaaaggtttcat

SEQ ID NO: 298631 - DNA, 626 bp, Homo sapiens
gaagccaacagggaagggagtgtggaaatgtagcttgcagactagcagccccagaaactctaagcagaacagagaggggcaggcatggaactagaggcaccaggtaaataagcaacatagacacccaggtagaagcaatgatgttttccccattaacatttgacacacataaaatcaggatataattgacatcaaaaacgagatacagatgttgggcgcaaagggaggtacaagaaagggagaattgtcacaaaagcacagcaagtgatctgtggagtgtattaaagtagaaatggcatttgcctttgtagcctgttggcctttctttttatataaactaagacatgggagattttctaaaattattactttcaagtttttcaaataatacatgaatataccctccttgtaaggcattaaaatttatggatgtaggttaatcccctttgattaccaagccaatcctagttcctttcccagaaattactrctgtcagtttgatgtatatccaaagagggtgaaatatccaacagtaggaaaaatgaccaagtacattgtagcatatttacaggatggagtatgtgtttgcttttcaagagaataaagtagatatgcaaaggtttcat

SEQ ID NO: 298632 - DNA, 626 bp, Homo sapiens
catgcaggacttgtttctctcccctagttttcctgtctcttatcctcaaagtcagcctataagcacacagtcttttgttattttcatgtctgccatgttcagctcatattttaaattatggcataaaatcgttgttggtttcagaagtggtatgagcagagatataagttatggagtaatatctggagcctgcagtgggccaccctgaatttgttgttaccctgtcactgtcttctcaacaaatgggccagatttcagaaaacgtaattacttaaatggaaaccatgaaatgcaattctaaatcagttgataatgtgtctctgcttgtaggcagagtcccatctaagaaggatgctggcttctcctgctgttggtctgtttacaccaaactgacttgatatttttatctgtttacgaagtggtgcaaaatgtttacatagtagtgacctggtttctgtggatctgggagtgctgtttgcagtagartgtttgctaatcttccgtgacgctctaatcgtttgtatttagtgaggcctcagttttggttgatagagctatttagaaaatggctccacttcaataccaaccttgttttcttttgtcttcggaagagtggttttagaaga

SEQ ID NO: 298633 - DNA, 584 bp, Homo sapiens
acagtttttaatccacttttaatagagcattctccagcttgagtagagagatatgacatgtatgttgtacagtcatgatggaccataggactcttttatgtgagaaaatctcaagggaccaggttccttgggacacactttgagaaatttagtttttattgttaaggaattaaaattaactgagaaagtaaatattcactgagactctaaagtgaggaaacctcgcagctagtgttattcactcatgtgtgctactggaatggtacaattgcatcaggttcagtcatattaaggattagttagtagttttatatttgtttgagagcatattttaccaattaaattaattggctttgtatggtactcagtatactaycaagaacatagagatgtttcacaaatgctttggatgctggagttaaaggtttttagaccttttttttgtagccaattagtaaagaatttatggctgcctcattctttacctcttttcttttctcctttctttaacaaacattcactgagtgccaagtcccaagcgtttttctaggctctggtgctatatcattgaccactaagacaga

SEQ ID NO: 298634 - DNA, 442 bp, Homo sapiens
cttgtcattgtgcctaacccccagcctctttcccttgtgcccacttatagatattatttctgtaataattgctaaattaatatatttcatttataataatatttaaattgcataattaagaaatacaataaagcccggtactccctccttgggtgctggtgggagatccaaaccaagcaagcccctgcccatgtgtgagaaccttcaacccaatcccaccccttaaacacaaktattaaaatcctagccagcctccttcccttgctttctctgtccctgttggagctactcataaagcctgccttgctttccccagagaccttgatttcatcttctcttgctgtgtatatggtactatcagtctaggcatttgaaccaaatttggagtgaagggtccatcttatatcttgaaagtggtcacaataagtgagattgccaaata

SEQ ID NO: 298635 - DNA, 442 bp, Homo sapiens
cttgtcattgtgcctaacccccagcctctttcccttgtgcccacttatagatattatttctgtaataattgctaaattaatatatttcatttataataatatttaaattgcataattaagaaatacaataaagcccggtactccctccttgggtgctggtgggagatccaaaccaagcaagcccctgcccatgtgtgagaaccttcaacccaatcccaccccttaaacacaagtattaaaatcctagccagcctccttcccytgctttctctgtccctgttggagctactcataaagcctgccttgctttccccagagaccttgatttcatcttctcttgctgtgtatatggtactatcagtctaggcatttgaaccaaatttggagtgaagggtccatcttatatcttgaaagtggtcacaataagtgagattgccaaata

SEQ ID NO: 298636 - DNA, 591 bp, Homo sapiens
actctgtgtctagctaaaggattgtaaacacaccaatgagcactctgtaaaaacgcaccaatcagcagtctgtgtctagctaaaggattgtaaacgcaccaatcagaactctgtaaaaacgcaccaatcagaactctgtgtctagctaaaggattgtaaatgcaccaatcagcactctgtaaaaacgcaccaatcagcactctgtgtctagctaaaggattgtaaatgcaccaatcagcactctgtaaaaacacaccaatcagcactctgtgtctaactaaaggactgtaaatgcaccaatcagcactctgtaaaatggaccaatcagcactctgtaaaatggaccaatcagctctctgtaaaatggaccaatcagcaggatgtgggcagggccaaataagggaataaaagctggccacctgagccagsagcagcaatcccctggagtctccttacgcactgtggaagctttgttctttcgcttttataaatcttgttgctgctcactctttaggtttgtactatctttatgagctgtaacactcaccgcgagggtctcccgcatcactcctgaagtcagcgagaccacaa

SEQ ID NO: 298637 - DNA, 591 bp, Homo sapiens
actctgtgtctagctaaaggattgtaaacacaccaatgagcactctgtaaaaacgcaccaatcagcagtctgtgtctagctaaaggattgtaaacgcaccaatcagaactctgtaaaaacgcaccaatcagaactctgtgtctagctaaaggattgtaaatgcaccaatcagcactctgtaaaaacgcaccaatcagcactctgtgtctagctaaaggattgtaaatgcaccaatcagcactctgtaaaaacacaccaatcagcactctgtgtctaactaaaggactgtaaatgcaccaatcagcactctgtaaaatggaccaatcagcactctgtaaaatggaccaatcagctctctgtaaaatggaccaatcagcaggatgtgggcagggccaaataagggaataaaagctggccacctgagccagcagcagcaatcccctggagtctccttacgcactgtggaagctttgttctttcgcttttataaatcttgytgctgctcactctttaggtttgtactatctttatgagctgtaacactcaccgcgagggtctcccgcatcactcctgaagtcagcgagaccacaa

SEQ ID NO: 298638 - DNA, 591 bp, Homo sapiens
actctgtgtctagctaaaggattgtaaacacaccaatgagcactctgtaaaaacgcaccaatcagcagtctgtgtctagctaaaggattgtaaacgcaccaatcagaactctgtaaaaacgcaccaatcagaactctgtgtctagctaaaggattgtaaatgcaccaatcagcactctgtaaaaacgcaccaatcagcactctgtgtctagctaaaggattgtaaatgcaccaatcagcactctgtaaaaacacaccaatcagcactctgtgtctaactaaaggactgtaaatgcaccaatcagcactctgtaaaatggaccaatcagcactctgtaaaatggaccaatcagctctctgtaaaatggaccaatcagcaggatgtgggcagggccaaataagggaataaaagctggccacctgagccagcagcagcaatcccctggagtctccttacgcactgtggaagctttgttctttcgcttttataaatcttgttgctgctcactytttaggtttgtactatctttatgagctgtaacactcaccgcgagggtctcccgcatcactcctgaagtcagcgagaccacaa

SEQ ID NO: 298639 - DNA, 558 bp, Homo sapiens
ccacagctctacaccttaatttattgactggacattatttcagggaagaaaacaattcttattagaagttacacagagtactttccttagaacttttagtctaacaattcttatgcaaaatgaagaatgaactccattgggaaccctggattctagacttaagtttatcttgatgtggacttcagccttcttgtctaaagaaagtatgttaayaatatctcttatttgcctccacatggaatctttcttggaggaaatatacatacaaatgaatggtataatacattaaagcaaatacaataattatatttaatgtttacacctgaaaaataaaatcacagacacacactcatagtatttcaagatactattcaaaattcctaaactccacctaaaattaatcatagaatatctgtgtcatatgagtactaaaaatttttaagagataatatacactttcaatctgtgatttcaaaaagactttaaatgaaactaacctggaaaatatggcttattaatttcatattaatttataaatggctggtcttgaatccttcc

SEQ ID NO: 298640 - DNA, 569 bp, Homo sapiens
ataaatagataatatttgaagagacaaagactgacaatttttcagaactgatgaaagatatgaatccccagatttaaaaagtaagaataacaaacaggacaaattaagcaaatcaacccacagacataattttttaaagttagaggcaaagagattttcagaactatcagagagaaaaaaggagctatattgtcaggaaaacaaatgtttaaagcataggaaagacttttactaagaggattactttaggaaaatgctraaacaaacacaagaaggctgtgaggtgagctgcaagaatagttggtagcaaagaaatttgtaaacgtgggttcttataaatcaatttgattatataaaactataatagcaataatgatttgaataatgtataattaatgctgatgtgaactatcagaaaaaaatgcaatgagagacattagcagctaatgaaatattttagtatttttgagaggagatatcattactaaatttatttttaagtcaactatttatttagaaatgttaagatgagctaaaagaaatagaacacaggcatggtggcacattcc

SEQ ID NO: 298641 - DNA, 537 bp, Homo sapiens
  misc_feature (1)...(537): n = A,T,C or G
attttagaaatgttactcagaaagatctttgacaatcacatctgctgcaatttgaaataaattagtttctttttkcttttttctatcatgaaatgtaagtcatgatattctagtattctaactcaatattaatgagggggcagcaattgcttctattttcaagagcagacctgccagaagaagagaaaggtgttaacatatgaaatatatccttaaaaagtaataatatccatgatgagaattatacagttagtacacattacccttatgctttgatgattataatatatcagtcaaaggcaagtgaaaccatgcattaattactgagtcatttgttaaatacaaaattgtgaatcaattttaatcaaaagaaagagagttcacctgaatttagagaaagtgatgactaatagtgcatctaggtagacttaatccaatttacctaaaaacattacatatatatttatctttgccagtgcttttaatcccagctggatccatgttacacaagtcattttacctttgggggggattctn

SEQ ID NO: 298642 - DNA, 537 bp, Homo sapiens
  misc_feature (1)...(537): n = A,T,C or G
attttagaaatgttactcagaaagatctttgacaatcacatctgctgcaatttgaaataaattagtttctttttgcttttttctatcatgaaatgtaagtcatgatattctagtattctaactcaatattaatgagggggcagcaattgcttctattttcaagagcagayctgccagaagaagagaaaggtgttaacatatgaaatatatccttaaaaagtaataatatccatgatgagaattatacagttagtacacattacccttatgctttgatgattataatatatcagtcaaaggcaagtgaaaccatgcattaattactgagtcatttgttaaatacaaaattgtgaatcaattttaatcaaaagaaagagagttcacctgaatttagagaaagtgatgactaatagtgcatctaggtagacttaatccaatttacctaaaaacattacatatatatttatctttgccagtgcttttaatcccagctggatccatgttacacaagtcattttacctttgggggggattctn

SEQ ID NO: 298643 - DNA, 604 bp, Homo sapiens
gtggctattctaaagagttctgcaataaacatagaaatgcagatatctctgggatattttgatttcccttcttttgggtacatacctagcagtgggattgatggatcttatagtagctctatttttagatttttgaggaagctccaaactgttctctgtagtggttgtactaaytgacattttcaccaacagtgtatgagggttcccttttcctcatatcaactccaacatttgctattatctgtcttttggatataagccattttaactgggtgtgataatatctcattgtagtatcatttctctcataattaatgatattgagcaccttttcatatacctgtttatcatttgtatgtcttcttttgagaaatgtctattcataacttttgtctattttttattggattattcgatttttcctataaagttgtttgagctccttatatattctggttttagtcccttgtcagatgggtagtttgtaaatattttctcccattctatgggttgtctcttcactttgttgattgttttctttgcaatgcggaagctttttaacttgatgtgattccatttgtccatttttgctttggttgcctgt

SEQ ID NO: 298644 - DNA, 559 bp, Homo sapiens
ggcttttctttactgggagactttattgtggctttaatcttmttacttgttattggtgttttcaggttctggatttcttcatggatcaatcttggtaggttgtatatatctaagaatttattcatttcctctagattttccagtctctcagcatccagttgctcatggtaaaaagcagagtaattcctaatcatcatatcagcaatattttgaaaataaatatttagaaatgtatttctggagaagacaagaagatacttggaaatacctttaaattaaaagttaataattggttttctatatgattaaattcactgaacctaacttaaaatgtttctattggctcattgtgcttttaagttgccttaagttaactttcaagattagtaactagtgaattgttctaaaacaattagcttcacttaactacaataaagttgatataaaaatgtaaaaagccaggaaaaacaaagtgatttcactaaggtgcaaataaaattgtgtgtatcgtgtatgtatgtatgtttatatgtaattgatataaacattttaatacatt

SEQ ID NO: 298645 - DNA, 584 bp, Homo sapiens
cccaaaagaaaggaagtcagtatattgaagagatatctgcactccttttgttgcagcattgttarcaataggtaagatttggaagcaatctacgtgtccgtcaatagacaaatggataaagaaaatgtggtacacgtacacaatcgagtgctatttagccataaaaatgaatgagatccagccacttgcaacagcatggatgaaactggaaatctttataagtaaaataagccagctatagaaaaacaaacattgcatgttgtcgcttatttgtgggatctaaaagtcaaaacagtttaactcatggacatagagcacagaaagatggctaccagaggctgggaaggatagtggggggtggtgaagaggtaaggataattaatgggtacagcaaaacaaaaagaatgagtaagacctactatctgataacatgacggagtgactatagtcaataataaccatacactttaaaataatttaaagagtgtaactggatatttgcaagtccatggataaatacttgggggaatggataccccattcttaacaatgtatttatttcacattttaatgactttattgaa

SEQ ID NO: 298646 - DNA, 607 bp, Homo sapiens
gaattaaaaattcaaacaatttatgaaataaaagaaataatttattttttatccttcctcttcttaacaggatacccataatgttaatcagattcctcaattattcagaatactattgtacattatcaaaatgtccttaagtatatgcatatcttttgtatatgcaccatttattgattccacaaatgtttattaagtatccaatgggygacagatatttttagatataatcaagtatatcccctaactaccttcaagttgttttacttttgtagaatatgcaaaaacaactaatgataacatgataaacaacattgggacaaaatgaaaagagatcagctggtagaaagaggtgaatcaggcaagagttcatgtatggattttaattgctttattatttcccttccagactacaaacctattgagagcaaacttcatgatagaattgtcattttgtccttcaacaggtccccacacaaagttttcctcataataaacacgctgcatatctgctaaatactacagaaactagaaagtaactatgatttgcattcaactatggtagctttgctagaaacacaaccttccaacagaaattgtatactct

SEQ ID NO: 298647 - DNA, 603 bp, Homo sapiens
tgagaccagtcaactgtgtttttctgtggtgatattcagctgwtttagtacaggtgagaagttagaagttagagtttggtttatctgaattcagattttgtgaagccaataaaataaaaagtcaagaaaattaggtatatatgcaaagtgcaaaatgcgatgggccttggaattaaacttgtaaagaagggaataaagacatcaaggagatgaaggacactcactaatggtattaaaatggtatggttaactactagaggtcctaatgcataaaaagtttgttagactctgtcttatggagaattactccataagacatagttagagtctgtcttatggagaattactccataagacatagttagagtctgtgttattttagactctgtttcatgcttctgtaataaaaaacttggactggatagtttattaagaaaagaagtttgtttctcctagtcctggaagctggtgagtccaagatcaaggctctgacagttttggtgtctgatgagtgcccagtctgcttccaagaggatgccttcaaggctgtgtgcttgcatggaggaagagacagaagaacaaaagggctcctctatttccctt

SEQ ID NO: 298648 - DNA, 510 bp, Homo sapiens
tgcacttaggaacacagatgcattttatttaaccaataaatcagaaaaatacactcagatataacttaacaattttccccaaaatttataaaatagaatttggcttgaaatgaatacyatttttctgagatttgattcataatgctttcttatttcctcttaatctaaagtcttttgggtaaaactgttcaacagcataaaatgtttatctaatactcataagaaatatccactccacacacaagtgggctgtgatttttctggaattagaagtctatatagttattgataaatctcttgatttcattttgtctccctgttgcaatgcagcaggaagatttaattttttttatacaacactatttccagcatgaatcaaagtaagtaagaagtaacttatgcattctcagaaataagcctacatctcattttgcttcaggcatttcaaaattttttttcttctctattctcatactttaagaagaactttaaatctgaagccctaggact

SEQ ID NO: 298649 - DNA, 572 bp, Homo sapiens
aggtagctgatctcattcataaggatagagtcttcataatttaactaccttctaaatgtgccataccttaatacgatcacattggtgattaaatttcaacctgaatattggaagggacacaaacattgaatcatagcaaactcatagattctaaaataagtaacctagattaaaattattcatttaaaatctacaaaaataaatacaaaacaaaagccaattaagttgcacttaggaacacagatgcattttatttaaccaataaatcagaaaaatacactcagatataacttaacaattttccccaaaatttataaaatagaatttggcttgaaatgaatactatttttctgagatttgattcataatgctttcttatttcctcttaatctaaartcttttgggtaaaactgttcaacagcataaaatgtttatctaatactcataagaaatatccactccacacacaagtgggctgtgatttttctggaattagaagtctatatagttattgataaatctcttgatttcattttgtctccctgttgcaatgcagcaggaagatttaattt

SEQ ID NO: 298650 - DNA, 650 bp, Homo sapiens
gtttatttatttcactgacggctgttttctagacaactggaatatcaatatgagtttttaagatgcccttcttcacaatcatattttacttttttccattctcattaatttttttaatttgaaacattcaatagttgtttgcgttaataattttctagtcttgttttcaataacatagttactttaaaaaatgttttgttgagacttctacttttgcttagaatgtaaaaagttgccaaaaatgttgctcccacaacagcaatgagaataatatggataatccacacacaaaaatcaactttttaaagcccatcagagaggtgaagttgtaaggaaatgaaagaacaaaaaaaggctccaaggaaagatggggacacaaaggatcycagcttttgcacggaacagaagaaggatatggccactgtacaaggggttaacaaaacatcagctaaaatgttaacaagttcttaaaggcaaagcgtgggctagtattggttgggaatggccaaaaagaaggtcattatcactttcaagctcttccccagagacctccaaggggagtccacattaaagactgaggacagagcacagagagccctccatgaagcagaagcgaaagaagtgatggtgtctgtgggagaggagcagac

SEQ ID NO: 298651 - DNA, 578 bp, Homo sapiens
tacaaaattgtgaatcaattttaatcaaaagaaagagagttcacctgaatttagagaaagtgatgactaatagtgcatctaggtagacttaatccaatttacctaaaaacattacatatatatttatctttgccagtgcttttaatcccagctggatccatgttacacaagtcatttttaccttttgggtaatttgtcactatgtaaatttaagtgaaattatttatacagataatgaaaactgaaaatgatttaaatttgtggattaattataatgagaatattctccatatacatgttagacatacaaaagggaactagcaaagtaaagttgggaactccaaataaatacaacatggttttatttagccctgtatttgcaatgacccatatgtctgacmcatctcaggggctaataactaattagtaaaataattctagacatataaaaaaggcattgtgatattgttgcataaaagtgttagctacgatgctacttaagataggtttgctggctattaaatgcctagttggggtgatttctaactgcacattctaccaatattttcagataccaa

SEQ ID NO: 298652 - DNA, 578 bp, Homo sapiens
tacaaaattgtgaatcaattttaatcaaaagaaagagagttcacctgaatttagagaaagtgatgactaatagtgcatctaggtagacttaatccaatttacctaaaaacattacatatatatttatctttgccagtgcttttaatcccagctggatccatgttacacaagtcatttttaccttttgggtaatttgtcactatgtaaatttaagtgaaattatttatacagataatgaaaactgaaaatgatttaaatttgtggattaattataatgagaatattctccatatacatgttagacatacaaaagggaactagcaaagtaaagttgggaactccaaataaatacaacatggttttatttagccctgtatttgcaatgacccatatgtctgacccatctcaggggctaataactaattagtaaaataattctagacatataaaaaaggcattstgatattgttgcataaaagtgttagctacgatgctacttaagataggtttgctggctattaaatgcctagttggggtgatttctaactgcacattctaccaatattttcagataccaa

SEQ ID NO: 298653 - DNA, 637 bp, Homo sapiens
ttggaaactcaactattaagaaaaatattatgctttttattaacacaagagacaaatgaaaggtcatgggttactagacaatacactgaattcaatgaaaatgaaaacacaacatataaaatttatagggtacagataaaagagtgctgagaggaacatttatagtattaaatgtttatatcaaaaaagggctcaattaagtrataacatcttccatggtaacaaaaaacactaattttatgtaaacttttccaacatataaaagagaacaatattttcaatttattttatgaggccacaattacataccccaaacaggaaactataaaaaaaactactgcccaatatgccttatgaatataagcacaaaaagtcttaacaagatatcagcaattagcaaattagcaaaattttgctgtatataaaaatatatatataaaaataacattgtatataaaaatacagttgtatttaaaatacagttgtatataaaaataacattgtaacacaaccaagtctgttttattccagtaatggaaaatgcaagtttttttcaacttttgagtattaaaataattcacatattgattgattagcaaagaaaaatatatgtatattaacatatctagacagaatt

SEQ ID NO: 298654 - DNA, 542 bp, Homo sapiens
tttactgatgtggcttcagtttgttttccaactcaaatatcatgttgaattgtgatccccaatgttagaggaggggtctggtggaaggtgactaggtcctgggggctgactgcccccttgctgttcttgggctagtaagagarttcttaggagatctggctgtttaacagtgtgtggcacctcccccttcatcctcttcctcttgttcccctttgccttttatgactgtaagtttcctgaggcctccccagccatgcttcctgtacagcctcaagaactatgagctaattatacttcttttctggataaattacccattctcagctagttctttatagcagtgagagaacaggctgacattcaccattctgaaaatcatagagcccttaagaattatgctaaatatactctgtctgtgctcagtaaattgaataataaactcggaatgacagtgcatgtgtttacagcatagtttactgaatatttaagcccactgttgagaactgattagagaaaaatatttctttcaatgtattagtgct

SEQ ID NO: 298655 - DNA, 619 bp, Homo sapiens
ttaacctcttgcaccatgcttttatttactgygttgtaccaccttatgtattccttttgttgtgctcatatgctctgatgataaaagcaaataaatacataaaaatataatgagcttctggtcaaaggtgaaaagtgcatgctattttcttctgcctgcctgacatagtgattctcactattgtattaactggatcttattataatatcagacgctattgtttacatcaaaacaaaattatataagacatttagaaatttggcacctctttgctcttattctgtaatgtaggatatttttgctccataaatctaattcctaacacaatctgcaagatgagcagtttactgatttcaagggaggcttctggcaactccttgttaacttaaaacatgaccattcacttggatattttcaaacacattttctttctttgctatggagattctaactgccaacattttatcaacatgttttcaatgggaaatttatttcacactttctcataaaacctcaatagaccacacttctcaaatttgataggtcagaatgtgctgcctgtgtactgctatgataaggggaaaatcccaaaatgccggcttggacttttccattctgg

SEQ ID NO: 298656 - DNA, 569 bp, Homo sapiens
cagaataatcctacactctcttttcctaataaccctctgaatgtgctttttatttgcaaactcatattccatttaatatctctcaaaactccattctacggctttgatttgagtgcctgtctgattctctagtgttttttgtcctttgaagagcggaactgtgtcttattcatgagtagacttgaaagcagtgagagctccctgatctcttattttaaacaccctttcaattttgtacctagaatgattttgcacataatgaaaacaaaaaacaaaaacaagacagctggtrtccactgagcaacagtatgagtaaagatgtatttcataaatgaacacagttaatcctcacaataatccaatgagccagatataattatcatccccattgtatatataaggtcaccgaggctcaggaaggctaggtaatattcccatgtccaaagtactggcaaacttaaaacaggattttaatccaggccatctgactccaaagcctttacttttagccaccttgctactttatctcctgtgataggtaattataatgtatttatcagaaagaagaa

SEQ ID NO: 298657 - DNA, 450 bp, Homo sapiens
tttcttagggttaatattttctaattcttaaattttatgtgtatggggatggaaaactaaagagttgatgtcatgcccaggatcataagctagttcatgatagacaaatagctctgctgttctgggtcccaaatcaagcttaacttcargtgaatagattcaaacaaaaaatcctggctgctctgttacactacagttgctgagatatgttggcattaggggtagaattaaattctggtcatttaattaagatgatgatggtgatgatgatgatgatgatgatgatgatgatggcagaacatttttaattgctggtcatcatatgccagattctgggctaagtcattctttagcccaaacacataacaatcctatgagttccaattctgtagtccagtacatccattctacacacaggtagcacaggctgagagaggttttatgattggc

SEQ ID NO: 298658 - DNA, 538 bp, Homo sapiens
gaagagaatggaatggtaatggcagaggctggtcagagggaaaaaaaagaagaggagtattagtcaaaaagtacaaagttttggttatataagtaagtcctagatctactgtacagcaagwgtttatttttaataatatggtattgtatacttaatttttttctgaggacagatattacattaagtgattacatcatagataaacaattatagtaaataagaggatgggagaaaacttctggtggtggtaaataggtttatgccatagattgtggtgatggtttcatggatgctatttagctccaaactaatgaagttgtatatattaattatgtatggctttttgtatgtcaataactacttgtttgaaaaagagaaaaagttgaagttatactgaagtaggatgggcctctaatccaatatgactggtatccttataagaaggtggccatgtgaagataagcacaccgaggagaatgctctgtgatgatgaaggcagggactggagttactctgttgcaatctgagaaaagccagg

SEQ ID NO: 298659 - DNA, 538 bp, Homo sapiens
gaagagaatggaatggtaatggcagaggctggtcagagggaaaaaaaagaagaggagtattagtcaaaaagtacaaagttttggttatataagtaagtcctagatctactgtacagcaagtgtttatttttaataatatggtattgtatacttaatttttttctgaggacagatattacattaagtgattacatcatagataaacaattatagtaaataagaggatgggagaaaacttctggtggtggtaaataggtttatgccatagattgtggtgatggtttcatggatgctatttagctccaaactaatgaagttgtatatattaattatgtatggctttttgtatgtcaataactacttgtttgaaaaagagaaaaagttgaagttatactgaagtaggatgggcctctaatccaatatgactggtatccttataagaaggtggccatgtgaagataagcacaccsaggagaatgctctgtgatgatgaaggcagggactggagttactctgttgcaatctgagaaaagccagg

SEQ ID NO: 298660 - DNA, 608 bp, Homo sapiens
taaataatgaatgctagaggcttaaaggtttgcaaaggttattctaattgtgtttcaaaaacaaatacatttgtattttaatataattggttaaacagaaaaacaaaccagaaaaaaaactcaccagtttttctagtttctgtcactctttttacttgacatttgtatcaaatgttggacttgccccattatgtgggtgaagtactagcctctgatttcagattgaaaattatgtcctttttttctccacaaagaaggaactagaagggatcatttattttaaaaatactagcttcggggggagggggtagggatagcattaggagatatacctaatgctaaatgacgagttaatgggtgcagcacaccagcatggcacacgtatacatatgtaactaacctgcacattgtgcacatgtaccctaaaacttaaagtataataattaaaaagaaaaaaaagaaaaaaaaaactagcttcacactcaggaaatcatgaacatcagattatttaaaaaaattacttaatgtctcaactgcagtgctaacttaggtaggttatgtgttatttaaagccttactcatttcaraaatgaacaaaggaaagatac

SEQ ID NO: 298661 - DNA, 562 bp, Homo sapiens
gagcaatttacaaaacaaataagtttattggacttacagttccacatggctggagaggcctcacaatcatggtggaaggagaaaggcatgtctcacatggtggcaaacaaaagagcttgtgcagggaaattcccgttttttaaaaccatcagatttcatgagacttattcagtatcacaagaacagcatgggaaagacccatcccatgattcagttatctcccaccaggtctctcccacaacacatggaaattatggaagctataagatgagatttgggtggggacasagagccaaaccatatcaccattaagtagtaactctcagttttctccttcttctggccccagcaaccaccattctactttctgttgctatggatttgaatatgctaggtaacaaatataagtgaatcatacagtatttgtcttttgtgtctgactcatttcactttgtataatatcttcaattcaaggctcatctgcattgtagcatgtgtcataatttcatttatttttaaggctgaataatgtctcattgtatgtacagactacattgtgttt

SEQ ID NO: 298662 - DNA, 562 bp, Homo sapiens
gagcaatttacaaaacaaataagtttattggacttacagttccacatggctggagaggcctcacaatcatggtggaaggagaaaggcatgtctcacatggtggcaaacaaaagagcttgtgcagggaaattcccgttttttaaaaccatcagatttcatgagacttattcagtatcacaagaacagcatgggaaagacccatcccatgattcagttatctcccaccaggtctctcccacaacacatggaaattatggaagctataagatgagatttgggtggggacacagagccaaaccatatcaccattaagtagtaactctcagttttctccttcttctggccccagcaaccaccattctactttctgttgctatggatttgaatatgctaggtaacaaatataagtgaatcatacagtatttgtcttttgtgtctgactcatttcactttgtataatrtcttcaattcaaggctcatctgcattgtagcatgtgtcataatttcatttatttttaaggctgaataatgtctcattgtatgtacagactacattgtgttt

SEQ ID NO: 298663 - DNA, 477 bp, Homo sapiens
atagtgtcataaaaggcaagaaaggttatggtttcaaggaataatatagtctataatattaaaactactgaatggtcaagaagaacaaaagcaagaagattggaccattgaatatatatgaatgattatttaagagtactctcagtggaatagtgcggccagaattggactgaagtggaccaaggaatgagtagtaaagaagaaattgaagaatagcttaatcaaggaagagaatcaaccttcattttggcacttgagaggctttagtatataaagaagtagagatataaaatgatagmaagaggaaaatatgtcatcctagaggatacctaacagcagggaaaccaaaaaatgcataattacgagtcttgaggaagtcataagatgaaacatagaaaagaataggaatttatttgggggaaggcttttttagggaaaatttaaaatcacatataacaggcatgggagtcaaacata

SEQ ID NO: 298664 - DNA, 605 bp, Homo sapiens
gaatttaaaacagactacccttagaccatcaatcctgttactgggtctatatccaaaagaaaataaattgttctaccaaaaagacatgcactcatacgttcatcccagcattattcacaattgcaaaggcgtgatattaacctaggtgtctatcaatggtagattggatgaagaaaatgtggtatatatgtgtatataccatggaatactrtgcagacatagaaaatatgaagtcatattctttgcagcaacatggatgcagcttgaggccattatcctaaccaaaataatgcagaaacaggaaaccaaataccccatgatattacctataagtggaagctaaatgctgggtacttatggacatgaagatggcaatgatagacacagaggactactagaggatgggaggaggaagggttaattaattattggttagtatgctcattacctgggtgatggcatcactcgtaccccaaacctcagcattacacaatatagtcatgtaacaaatctgcacatataccttctgaatgcaaaatacaagttgaaattatttttaaaaattggatctagatagatctcacataaaagcatctaccgttctc

SEQ ID NO: 298665 - DNA, 574 bp, Homo sapiens
tttaattaacaaaggacagaatttaaaagtgccacaatgagcacacaattagattctttcctccaatttagctgttccaataataaagctgccgttttaatattcacctggcaatttatgtgtttactgtcttcaatttgtacataacactggaggaaggaaaaacatattaattatgtcctgggaccttaaaatttaaatatactggtatgttggcttggaacattgaaagagccagcaatgggttgatgttgtatgaaacaaagtgtcatgtggataaattgatgcttcaagtgtggctccagttcttgacttttaggatcatagcagcttactgcagtggatgtctatggtgtttagcagctattttaaaagtagcacagggctcagtaaatacatctcacacagacttttgtagctgactttgactgatggaggtgcagscttgacctacgcaggaataagtgagatagggattcgactgtatgaagggaaagggagtcttttcgtttcagttaaggctcacctgatacaggctttccaggactcaaggggtgaatttttttttccttgt

SEQ ID NO: 298666 - DNA, 470 bp, Homo sapiens
ggagaatgacctgaacccaggaggcaaaggttgcagtgagccgagattgcatcattgctctccggcctgggtgacagagcgagactctgtctcaaaaaaaaaaaaaacagaaaaaaaaaaaaaagaaaaaaggaagaaaaaagaaatacagggatctacctgagagctatcttgaggtctttaccaccaaatcagaattagatgaaaggaaaaatgagctayatgtataccaaatgctcttcacttgtattaataacagtaaaacttcttagcagtgaacttgagtgacctccctagaaggaactcatcttcaagaaagcattgagaagcatcataatataagagcagatgggaggcctgtagcaacagcaattaggaaaccatttcatgaacactggaaaagtcatatgaagccattatggattattcaaacctttgaggggagaaactagacagatcataaagcactt

SEQ ID NO: 298667 - DNA, 586 bp, Homo sapiens
tttatttgcaaactggccaattggttcactatctcctgtgtcaatcagggaacacatgagagtatataaaccatttcagagaactaaattttcatatttcagaggagggaagagcctgctgtctttgaagagttaatatgtgtctctgagcatctgctttattgctagagctacttgagtactgcggaaaatctagtttagagtttggggatgttgcgagatagataatctcttcacacatttgtaaagtgcatgccacagcaygacataaaatttgtcaaattgtgttcatttgtgagaagagtcctggagttagacctccttctcaaaatttctattctgtcatctctgaaatttaagaaaggtttcaagaccaagtactgtcagttacatgtgataccgtaccagccaccagcgataaatcacacttgtaactgcttgaggtgcatttactcacagatgatatatgctttacaattcatagcaagctttacaactcatctgatttgaagtaggtcacaaagaaatgttagcgtttcaaaactcaatcttttttgtgtttttttttctgtcaaaaaatcttgtt

SEQ ID NO: 298668 - DNA, 531 bp, Homo sapiens
agtgaccaaggaagtccttaatgatgggaatggaactcaaagggatgacaaaagaatgtgaaaaagcagacacataaggccaacacaaaaatgaagacaaaagagaaaactagagagaccaaaaatgaattagagactgggcctggtattatgtctcctactagggagtctgagcatacaaaatctagaggattaggtgaagaaaggacaagtctggaactgagagaggagtaagaaagagaatgaataaaacaccacaagcartgctcaccccccatgtgatgggaaaggaaagcagtcagtgtagggagtggataagaatgtccaaatctccacaaggcctccagaaaggagaaacaggagggaatcagagcatctatggaatagctcactacgatggaaaaagatgctgcagtggtaaaagatggattttgccatcaaaatagaacacattattccaattctgaaaaaacccaatagcaaagcagaagaatggtcacctttggaatgagctcaaatggcaaggttgca

SEQ ID NO: 298669 - DNA, 531 bp, Homo sapiens
agtgaccaaggaagtccttaatgatgggaatggaactcaaagggatgacaaaagaatgtgaaaaagcagacacataaggccaacacaaaaatgaagacaaaagagaaaactagagagaccaaaaatgaattagagactgggcctggtattatgtctcctactagggagtctgagcatacaaaatctagaggattaggtgaagaaaggacaagtctggaactgagagaggagtaagaaagagaatgaataaaacaccacaagcagtgctcaccccccatgtgatgggaaaggaaagcagtcagtgtagggagyggataagaatgtccaaatctccacaaggcctccagaaaggagaaacaggagggaatcagagcatctatggaatagctcactacgatggaaaaagatgctgcagtggtaaaagatggattttgccatcaaaatagaacacattattccaattctgaaaaaacccaatagcaaagcagaagaatggtcacctttggaatgagctcaaatggcaaggttgca

SEQ ID NO: 298670 - DNA, 531 bp, Homo sapiens
agtgaccaaggaagtccttaatgatgggaatggaactcaaagggatgacaaaagaatgtgaaaaagcagacacataaggccaacacaaaaatgaagacaaaagagaaaactagagagaccaaaaatgaattagagactgggcctggtattatgtctcctactagggagtctgagcatacaaaatctagaggattaggtgaagaaaggacaagtctggaactgagagaggagtaagaaagagaatgaataaaacaccacaagcagtgctcaccccccatgtgatgggaaaggaaagcagtcagtgtagggagtggataagaatgtccaaatctccacaaggcctccagaaaggagaaacaggagggaatcagagcatctayggaatagctcactacgatggaaaaagatgctgcagtggtaaaagatggattttgccatcaaaatagaacacattattccaattctgaaaaaacccaatagcaaagcagaagaatggtcacctttggaatgagctcaaatggcaaggttgca

SEQ ID NO: 298671 - DNA, 590 bp, Homo sapiens
ccacaactttagttgacaacaccatcattttgaagcccaggtgtttaagggaacaaaatctgagggagggaggaggattttctttcccctgtcatcatgtgaggcatgcttcctctggctagctcaccaaccacattaatttgttattctgagcagggtgaaaaagagagaaggaaactaaaagtctatagcaatgcatgggtaaatttcttctcagccgactctatggcgatagggctgattgcttatccaacccaccttctccaacctcatgctagctgccaaaagctgagatggtaatgtccattttttttcagataactgatamagacacatttgtcatttcaaacttcacaagtagcctccctcactttaaagctaagtaaaccattactcagaattaagcaactttctcagagacacacattaagtgtcaagaaagaattcaaaactagatctactccaggcagtcagagcagccccttgctagttcagcagcatgagctgccccaccctttctgcacggagactgtgatacaaccaggccctctctgctcaatgcccagggataactccaggcatttgaagca

SEQ ID NO: 298672 - DNA, 577 bp, Homo sapiens
catgtgataccgtaccagccaccagcgataaatcacacttgtaactgcttgaggtgcatttactcacagatgatatatgctttacaattcatagcaagctttacaactcatctgatttgaagtaggtcacaaagaaatgttagcgtttcaaaactcaatcttttwtgtgtttttttttctgtcaaaaaatcttgttatttatagcactaaaggagacttttgggatgatgtcatgtagtcccttcattttatggattaagaggctgagacctgggaaggttaattgattttcccaaagtctcagagctagttagtggcagagccaacaccagaatccatcgttttcctgtctcaaaggctttctttccactataccaggctgcctctggtctctgactatgcaaaccagacttttgaagtgcattattaaaggattatctgttctaccctaagtggcagggtcaacaataagattattaaatttttatcttgctcagagctctctaaactgggagattctcatctgccagacttaatctgccaaaaaaatatgcagggggaagtagtgagcacacgc

SEQ ID NO: 298673 - DNA, 577 bp, Homo sapiens
catgtgataccgtaccagccaccagcgataaatcacacttgtaactgcttgaggtgcatttactcacagatgatatatgctttacaattcatagcaagctttacaactcatctgatttgaagtaggtcacaaagaaatgttagcgtttcaaaactcaatcttttttgtgtttttttttctgtcaaaaaatcttgttatttatagcactaaaggagacttttgggatgatrtcatgtagtcccttcattttatggattaagaggctgagacctgggaaggttaattgattttcccaaagtctcagagctagttagtggcagagccaacaccagaatccatcgttttcctgtctcaaaggctttctttccactataccaggctgcctctggtctctgactatgcaaaccagacttttgaagtgcattattaaaggattatctgttctaccctaagtggcagggtcaacaataagattattaaatttttatcttgctcagagctctctaaactgggagattctcatctgccagacttaatctgccaaaaaaatatgcagggggaagtagtgagcacacgc

SEQ ID NO: 298674 - DNA, 619 bp, Homo sapiens
agtctttcaaactaactcaatcagacaaaacttaaataattttttaaatgaacaaagacttttgagaaatatggattttgtaaagtgaccaaatgtacaaattatttgcattcctgagacagaaggtgaacaagtaagaaaactggaaaacatgtttgagggaatagttgaagaaatttcttctaatcttgctaataggtagacatccagttacacaaaatccagagaacacctgtaagatgctatacagaggaaamatcaccaatacatagtcaccagactgtccaggtcaatgctaaagaaaaaaaaccttagaagcaagagtaaaaggtcagatcacatacaacaggaaccctatcaggctaacagcagactttgccgcagaaaccttgctagccaggagagattgaggacctatttttagcatttccaaagaaaacaaattcaaaccaagaatttcatattctggcaaactaagctatataagtgaaggagaaatatttattttttcagagaagcaagtgctgaggaaattcgttttgccactagcccagtgttacaagaaatatttaagggagttctaaacatggaaataaaagaatgacacctggcaccacaa

SEQ ID NO: 298675 - DNA, 619 bp, Homo sapiens
agtctttcaaactaactcaatcagacaaaacttaaataattttttaaatgaacaaagacttttgagaaatatggattttgtaaagtgaccaaatgtacaaattatttgcattcctgagacagaaggtgaacaagtaagaaaactggaaaacatgtttgagggaatagttgaagaaatttcttctaatcttgctaataggtagacatccagttacacaaaatccagagaacacctgtaagatgctatacagaggaaaaatcaccaatacatagtcaccagwctgtccaggtcaatgctaaagaaaaaaaaccttagaagcaagagtaaaaggtcagatcacatacaacaggaaccctatcaggctaacagcagactttgccgcagaaaccttgctagccaggagagattgaggacctatttttagcatttccaaagaaaacaaattcaaaccaagaatttcatattctggcaaactaagctatataagtgaaggagaaatatttattttttcagagaagcaagtgctgaggaaattcgttttgccactagcccagtgttacaagaaatatttaagggagttctaaacatggaaataaaagaatgacacctggcaccacaa

SEQ ID NO: 298676 - DNA, 619 bp, Homo sapiens
agtctttcaaactaactcaatcagacaaaacttaaataattttttaaatgaacaaagacttttgagaaatatggattttgtaaagtgaccaaatgtacaaattatttgcattcctgagacagaaggtgaacaagtaagaaaactggaaaacatgtttgagggaatagttgaagaaatttcttctaatcttgctaataggtagacatccagttacacaaaatccagagaacacctgtaagatgctatacagaggaaaaatcaccaatacatagtcaccagactgtccaggtcaatgctaaagaaaaaaaaccttagaagcaagagtaaaaggtcagatcacatacaacaggaaccctatcaggctaacagcagacttygccgcagaaaccttgctagccaggagagattgaggacctatttttagcatttccaaagaaaacaaattcaaaccaagaatttcatattctggcaaactaagctatataagtgaaggagaaatatttattttttcagagaagcaagtgctgaggaaattcgttttgccactagcccagtgttacaagaaatatttaagggagttctaaacatggaaataaaagaatgacacctggcaccacaa

SEQ ID NO: 298677 - DNA, 619 bp, Homo sapiens
agtctttcaaactaactcaatcagacaaaacttaaataattttttaaatgaacaaagacttttgagaaatatggattttgtaaagtgaccaaatgtacaaattatttgcattcctgagacagaaggtgaacaagtaagaaaactggaaaacatgtttgagggaatagttgaagaaatttcttctaatcttgctaataggtagacatccagttacacaaaatccagagaacacctgtaagatgctatacagaggaaaaatcaccaatacatagtcaccagactgtccaggtcaatgctaaagaaaaaaaaccttagaagcaagagtaaaaggtcagatcacatacaacaggaaccctatcaggctaacagcagactttgccgcagaaaccttgctagccaggagagattgaggacctatttttagcatttccaaagaaaacaaattcaaaccaagaatttcatattctggcaaactaagctatataagtgaaggagaaatatttattttttcagagaagcaagtgctgaggaaattcgttttgccactagcccagtgttacaagaaatatttaagggagttctraacatggaaataaaagaatgacacctggcaccacaa

SEQ ID NO: 298678 - DNA, 604 bp, Homo sapiens
caatagaaactacgaagcagactactaacaacttcataatagatccaaaacgtcacataccaatattaaccttgaatgtaaatggtctaaacacctcactcaaaaggcacagaatggcaagttggatataaaagcaggatccatctgtctgctgtcttcaagagatgcatctcacacataatgacacccataggctcaaagtaaagggtggaagaaagatctatcatgcaaatggaaaacaaaaaaaaagatcaagagtcactattcttatgtcagatgaaacagatttttaaccagcaatagtaaaaaaggaaaaagatkacattatataatgataaagggtgcaattcagcaagacgacttaactatcctaaatacatatgcattcaacattggagtactcagatacataaaacaagttcttctcgacttatgaaaagacttagccacataataaaagtgggggatttcaacaacccactgacaacgttagatggatcactgaggcagaaaagtaacaaataaattctgaacttaaatttgacactcaaccgattggatctaatgggcatctacagaatactccacccatcatccaaagaat

SEQ ID NO: 298679 - DNA, 604 bp, Homo sapiens
caatagaaactacgaagcagactactaacaacttcataatagatccaaaacgtcacataccaatattaaccttgaatgtaaatggtctaaacacctcactcaaaaggcacagaatggcaagttggatataaaagcaggatccatctgtctgctgtcttcaagagatgcatctcacacataatgacacccataggctcaaagtaaagggtggaagaaagatctatcatgcaaatggaaaacaaaaaaaaagatcaagagtcactattcttatgtcagatgaaacagatttttaaccagcaatagtaaaaaaggaaaaagatgacattatataatgataaagggtgcaattcagcaagamgacttaactatcctaaatacatatgcattcaacattggagtactcagatacataaaacaagttcttctcgacttatgaaaagacttagccacataataaaagtgggggatttcaacaacccactgacaacgttagatggatcactgaggcagaaaagtaacaaataaattctgaacttaaatttgacactcaaccgattggatctaatgggcatctacagaatactccacccatcatccaaagaat

SEQ ID NO: 298680 - DNA, 604 bp, Homo sapiens
caatagaaactacgaagcagactactaacaacttcataatagatccaaaacgtcacataccaatattaaccttgaatgtaaatggtctaaacacctcactcaaaaggcacagaatggcaagttggatataaaagcaggatccatctgtctgctgtcttcaagagatgcatctcacacataatgacacccataggctcaaagtaaagggtggaagaaagatctatcatgcaaatggaaaacaaaaaaaaagatcaagagtcactattcttatgtcagatgaaacagatttttaaccagcaatagtaaaaaaggaaaaagatgacattatataatgataaagggtgcaattcagcaagacgacttaactatcctaaatacatatgcattcaacattggagtactcagatacataaaacaagttcttctcgacttatgaaaagacttagccacataataawagtgggggatttcaacaacccactgacaacgttagatggatcactgaggcagaaaagtaacaaataaattctgaacttaaatttgacactcaaccgattggatctaatgggcatctacagaatactccacccatcatccaaagaat

SEQ ID NO: 298681 - DNA, 558 bp, Homo sapiens
gcaagacgacttaactatcctaaatacatatgcattcaacattggagtactcagatacataaaacaagttcttctcgacttatgaaaagacttagccacataataaaagtgggggatttcaacaacccactgacaacgttagatggatcactgaggcagaaaagtaacaaataaattctgaacttaaatttgacactcaaccrattggatctaatgggcatctacagaatactccacccatcatccaaagaatatacattcttctcatctgtacacagaacatactccaagatcaaccaaatgcttagccataaggcaagtatcaagaaattaaaaaaaaaaaagtgaaatcacaccaagcacactctcagaacacagtaaaataaaaatagcaatgaatatcaagaagatttctcaaaaccacacaattacatggaagttaaacatttatttctcaaatgacttttggataagcaatgaaattaaagcaaaaatcaaaaaaagttatttaaaataaatgaaagcaaagatacaacataccaatacctcccagaagca

SEQ ID NO: 298682 - DNA, 558 bp, Homo sapiens
gcaagacgacttaactatcctaaatacatatgcattcaacattggagtactcagatacataaaacaagttcttctcgacttatgaaaagacttagccacataataaaagtgggggatttcaacaacccactgacaacgttagatggatcactgaggcagaaaagtaacaaataaattctgaacttaaatttgacactcaaccgattggatctaatgggcatctacagaatactccacccatcatccaaagaatatacattmttctcatctgtacacagaacatactccaagatcaaccaaatgcttagccataaggcaagtatcaagaaattaaaaaaaaaaaagtgaaatcacaccaagcacactctcagaacacagtaaaataaaaatagcaatgaatatcaagaagatttctcaaaaccacacaattacatggaagttaaacatttatttctcaaatgacttttggataagcaatgaaattaaagcaaaaatcaaaaaaagttatttaaaataaatgaaagcaaagatacaacataccaatacctcccagaagca

SEQ ID NO: 298683 - DNA, 547 bp, Homo sapiens
acaagaaaagaaataattgaaatcagagcagaagtgaacaaaattaaaaccaaaaaatccatataaattatcaataaaatcaaagrttgatttgttgaaaggacaaacaagatccatagaccactactttgattaacaaattaaaaaaagacagaaaatccaaataagcacaatgagaattaaccaaaaaaatgacattacagccaatcccacagaaatataaaagatccccagagactattgtgaacacctctatgcacacaaactagaaaatccagaggaaatgaatgagttagtgaaaacacaccatctcccaagattgaatcagaaattaaaatcctggacagaccaatattgagttctgaaactgaatcggtaataaaatcctaacaacaaaaaaagccctggatcagatgaattacagcataatcctgcagacatacaaagaagaaccagtaataattctacaaaaacaattccaaaatatcgtggaggagggatttctctctaactcattgtataaagccagaatcaccctgataccaaa

SEQ ID NO: 298684 - DNA, 547 bp, Homo sapiens
acaagaaaagaaataattgaaatcagagcagaagtgaacaaaattaaaaccaaaaaatccatataaattatcaataaaatcaaaggttgatttgttgaaaggacaaacaagatccatagaccactactttgattaacaaattaaaaaaaracagaaaatccaaataagcacaatgagaattaaccaaaaaaatgacattacagccaatcccacagaaatataaaagatccccagagactattgtgaacacctctatgcacacaaactagaaaatccagaggaaatgaatgagttagtgaaaacacaccatctcccaagattgaatcagaaattaaaatcctggacagaccaatattgagttctgaaactgaatcggtaataaaatcctaacaacaaaaaaagccctggatcagatgaattacagcataatcctgcagacatacaaagaagaaccagtaataattctacaaaaacaattccaaaatatcgtggaggagggatttctctctaactcattgtataaagccagaatcaccctgataccaaa

SEQ ID NO: 298685 - DNA, 548 bp, Homo sapiens
tgaaaaaacattccatcccatggattggaagaatcagtattgttaataggtccacagtacccaaagcaatcaacagattcaatgttattcttatcaaactaccaatgtcatttttcacagmgttagaaaaaaactattctaaaattcatgtggagcaacaacaacataaaaaaccctgaatagccaaagcaattttaagaaaaaagaacaaagcaagaggcatcatattacctgactttaaactataaggctgtagtaaccaaaacagcatggtactggtacaaaaacgaacatagagaccaatgggacagaatagagaacccacaaataaagccatatccctgcagccatctgatcttcaacaaagttgacaaaaatcagcaatgagaaaagaattctctgttcaataaatggtactgggataactgggtagccatattcagaagaattaaactttgctcctacctttcaccatatacagcaactaactcaagatcaattaaaggtttaaatgtaagaacacaaactacaggaatcctggaataaaa

SEQ ID NO: 298686 - DNA, 528 bp, Homo sapiens
aacacctcaataggcagtaaaaatatttatatttttcaaataatggaatatttgatgtaggggttctccatatacacaaattttctgttcactaactgactgccatttaacttcaagggatggcaaccaacttctagaactagctagcctattttgtaaaaagatgcattgcatttgtctagtttttttatttgtgattattctctccttttttgaaatgatttacatcatggcatttatattaacaaattaaggatattgtgagcagcctttcagctaagtagctaaagcaacaatgtcaccagttatcaatatttggaattcatttttcaaccagaaaatatttaataagcagataagtgatcagtattgtataacccatgagaaaactaaaaggcaaatcacttatgaatgctgtcctaaaaaatgyacagtcctacaggagctacatacgtatcatatgtacataaatcagtaagactctaacagtgttttaaatgtgtgtttttttaaaatatgactagtgag

SEQ ID NO: 298687 - DNA, 458 bp, Homo sapiens
ggaaacacaaataagtcattttcattctcattcaaaactcttgtatagctaaaaatattttatttggtttggctctgtgtccccacccacatctcaccttcaattgtaataayccccacatgtcaagggccagaccaggtggagataattaaatcatgaggttggttttccccatactgttcttgtgatagtgagtgagtttgcacgagatctgatggttttattaagggcttccctttttgctcgactctcgtactctctcctgctgccctgtgaaggggtgccttctgcaagtttcccgaggcctccccagccatgtggaactgtgagtcaattaaatctcttttctttataaattactgagtctcagatatttcttcatagcagagtgagaatggactaatataatattattgtccaatttgattactatctttgtcaattcagcctaacaaaca

SEQ ID NO: 298688 - DNA, 435 bp, Homo sapiens
gagaagtataaaatgttctaaaaaactaactattacacaagtccgtatatgaaagttgcctaagcagatgtatagtcttagcatactatgctatgaaaatagtttatatgctttcataaaattatacaaagtccatatgtaaacttactggaatttyttacagtataagtttccaactgtgtataaaatcttaactccttttattgtgacaagcctaccaaaaataaatgttcaataaactcttcagaatgggaaaagggaatctagatttcaaaggaatctagagcactaattcttcatagaaatatacaagtttgtcctcttttcccactgtgtagccagaggctctttctagcaaatgacgtcctagaaaaccccacttattctggtactccttcctgtttttctataattaaactcacctttgctgtgttc

SEQ ID NO: 298689 - DNA, 539 bp, Homo sapiens
ctgcttctatggaacatagccaggataattgggatcagtatttcattcatctttacgtcaaagtaccaaagagtggaggcatgctgcaagtaccgtaaaaatgaatggttacatggatggatctgaaaaatacatacatttggtaggatgcaagtatacatgataatttaaaatcagacctttgttaatgtttattgaacatttcctgtgctctaggcatcttgttaaacttgttacttgaataatatcattcaagccctgaaagaccccatgaggtagattaaatattatytatattttactaatgaagaaactagggattagagcgtttagttcttttgactgagaccacccagaaagaatgatctgtacatttctatttcaggttttttttggtgctggtagaaatctgatcattagaactttattggttaaaatgtaattgatctttaaaaagacttaaaaatgcctagagtcaaatgtataacactaaaaaactaacaaaggagctggatgcattattcgagttattaagaaga

SEQ ID NO: 298690 - DNA, 367 bp, Homo sapiens
tgtcaaggggagccaggaaatttcatggaaatgtgaagccaagaagaaaaggaaatggatttgatattagctcacattctctgttccatgggctttgccagtattttttcctttcttgggccctctcctctctccacccaaatgttaatgttagtgctttcttctcatcatgccagtgtaaaactctggttcacatctctccscacatttccaacttacatataaaattggatattttaaagtcacatttaaaatgtaataatccattacccttcccacctcacaatactatgtccacaccccagatcattaaaggcaatttcctttatccacctgatcagacaaaaatcaatcaatatttgggagc

SEQ ID NO: 298691 - DNA, 367 bp, Homo sapiens
tgtcaaggggagccaggaaatttcatggaaatgtgaagccaagaagaaaaggaaatggatttgatattagctcacattctctgttccatgggctttgccagtattttttcctttcttgggccctctcctctctccacccaaatgttaatgttagtgctttcttctcatcatgccagtgtaaaactctggttcacatctctccgcacatttccaacttacatataaaattggatattttaaagtcacatttaaaatgkaataatccattacccttcccacctcacaatactatgtccacaccccagatcattaaaggcaatttcctttatccacctgatcagacaaaaatcaatcaatatttgggagc

SEQ ID NO: 298692 - DNA, 554 bp, Homo sapiens
ttttaatggatcctggaagtgagacaaggcaaatgtttattttgctccatcttgcatataattctagaatctctaccccttcccaatactgtttaaacatttgtttaaattttggaaagtgttgagggattatggaaaaataaaataaaatagattgaacataaaataaggaatttgttacatactctgttataactagaacttttaggaacttttctcaaamattttctgctgctgatacctagatatctagcgtcattatatataataaagatgaagttaatttgtatgcacagagtacaagtgaaattatttgagggttattttttctattttctatattgactaaattgtttccaaatccctatgttctttttcatgtttcagttttctgttataattttcccaaccacagaagttcttggaagacatattaaaggtaggaaatgtggatagtgaaattaattctatatccttggaaatagcactatgccaacattatttgttctctgaatttcagatgacttgaaccattttcaggaggctcaaatagc

SEQ ID NO: 298693 - DNA, 583 bp, Homo sapiens
tatttgttcttacagtgagtgacccatggtgtataataggatcacaaaaagagtcattatttgataccctaggatggcctttctggcttttatttcacatattcaagtgttaagatccacctattrtgctttaaaatacagcctgctttggagagcactcctataagcagagtttgggggaggtatacctttgcctgaagaaacagacattgtattcattaggatatagaattgccaccagaaacggagatccaaaataaacttcacttaaccaaggtagaagtttgttttatattcatatataaaagttgagctagcgtgacagttctgctccagggaatcatcagaggcacagattccttctataattttgctgtgccatttctaaggagctgcatctatctgcagaactcaacatagcttactgtgatttataaggtgagggagcagagctactttccctttagggcacattgtggaatgttcacatgcctctttccttaaaccctattgctctgaatttagtcatatagccacactttggtacggtgatgctaagaaatgtagtctttatgttaggtgg

SEQ ID NO: 298694 - DNA, 583 bp, Homo sapiens
tatttgttcttacagtgagtgacccatggtgtataataggatcacaaaaagagtcattatttgataccctaggatggcctttctggcttttatttcacatattcaagtgttaagatccacctattgtgctttaaaatacagcctgctttggagagcactcctataagcagagtttgggggaggtatacctttgcctgaagaaacagacattgtattcattaggatatagaattgccaccagaaacggagatccaaaataaacttcacttaaccaaggtagaagtttgttttatattcatatataaaagttgagctagcgtgacagttctgctccagggaatcatcagaggcacagawtccttctataattttgctgtgccatttctaaggagctgcatctatctgcagaactcaacatagcttactgtgatttataaggtgagggagcagagctactttccctttagggcacattgtggaatgttcacatgcctctttccttaaaccctattgctctgaatttagtcatatagccacactttggtacggtgatgctaagaaatgtagtctttatgttaggtgg

SEQ ID NO: 298695 - DNA, 619 bp, Homo sapiens
acactttggtacggtgatgctaagaaatgtagtctttatgttaggtggccatatgatcagctaaactttctaatagtataaaaaagaagagagggcatatacaaattgggagataaacagtagtttctctcatagacctgataaacatattatrtttgcttttagttgcggaagaaacttgctaaaatattctgccacttattttgccattaatatatagagatagtgacaaacttaagatgaaatgcaacatagaacatgaagtcaattggaaatacatattatttattcctaagtgcatcttagacatctgtaagttggatttgtaattgatgtctgatgttagatcacaaagaaatgaaggtatgttatctaagaaattttttttgccagtggtcctatctccaacactccttccttgaatggacattaaaatacctatgcataaaccttcaccatattaatagaaattaaaaatgcaaaaatcatgcagaagcacatggagtattttgttcacgggttgaaattttgtcagctgtgtatgaatagaatgactttgacctataaaataaaagattttgttaaagctactagactctctttcctctgtttcagtgaa

SEQ ID NO: 298696 - DNA, 619 bp, Homo sapiens
acactttggtacggtgatgctaagaaatgtagtctttatgttaggtggccatatgatcagctaaactttctaatagtataaaaaagaagagagggcatatacaaattgggagataaacagtagtttctctcatagacctgataaacatattatgtttgcttttagttgcggaagaaacttgctaaaatattctgccacttattttgccattaatatatagagatagtgacaaacttaagatgaaatgcaacatagaacatgaagtcaattggaaatacatattatttattcctaagtgcatcttagacatctgtaagttggatttgtaattgatgtctgatgttagatcacaaagaartgaaggtatgttatctaagaaattttttttgccagtggtcctatctccaacactccttccttgaatggacattaaaatacctatgcataaaccttcaccatattaatagaaattaaaaatgcaaaaatcatgcagaagcacatggagtattttgttcacgggttgaaattttgtcagctgtgtatgaatagaatgactttgacctataaaataaaagattttgttaaagctactagactctctttcctctgtttcagtgaa

SEQ ID NO: 298697 - DNA, 559 bp, Homo sapiens
ctctacatcatgaaatactcataaaaattgtactatttttttcattttctgaaagcaactagtcaagccatatggccagtaagtggtagaaccaagattgaacccctattgtctcgcaccaatctgaatgtcccatgagttgttatatcatcagggtaacacagactattaccacagaacaaagtagcaaactatgtagagtgaatttatttccaaaatcttacaaatgattcattttgatctgagttatggaaactgagatggatatgggtttaggtggtggggaaaagggctaacatagaccattctaattacctgaaagagtaatttctccaaattccataatgtcttcattaaaaaatcattcacttggatgtgtttttgacatgatgaagscttgtgcattagcacctgatatttatttgttgaataaaagtaatattcaaaatgggctacatcatttactagatccccatttttttattgtagtccacctggtgtgggaaggaatagctagattcttagaattgatttaaaggaattttaatttttttaaaat

SEQ ID NO: 298698 - DNA, 519 bp, Homo sapiens
ctcatatcatttggctgtactctgcacaaatgcatctgaagacatttatctgactctaaagctgagatcttcacgaaagcaggttagctctcctagattcaaataactgggtttatatcctctaacctaaggrtgacttttgagtattaaaccagacctgtgggttcaaagagaagtggccttaaaatagtttagatttactgtgaatggcaaaaggttgagcagtacggagagagaaatgactagacaacacttcctgctgtaaaaaagactaccttaaacttgctgattgagaagaaataatacagtaccgtgcaaataaaccatgttgatggatgccttctgctagaatggagctcactgtatttactctctttctgtttgatgtcagcatcttagcactcagcatgaactctactacagctaactgtcgaaataagttatttctagtcgataatgaatgcttctctaacatgttattattgaaaataacaggttccaaatgtgtgaccgaacggc

SEQ ID NO: 298699 - DNA, 574 bp, Homo sapiens
cttaactcaactgttgacaaacacagtagagctaacgtatagctcctgcagcttcttcctgcacaattatctaaaagaccttgatatcaatcttctctattgtgttatttgtcaaacaaagagtagttaagggatctgaaaaattctagtgctccctacaaatagcaaaacagctaaaaactgtctaaggctgctattcaggtttggagcacctgtgtcctctcaaatcacagaaagagttcaccaaaaggtaacaaatgatggcaacgaagagtaatggtgcyggaagaaatggtgcagagctctgagaaaagctcatttggcaggaagttttgtgtctgtacatcgtgcacccattacaataaagcaattttgtcaccctctacctttttctctccgttttattaaatatcaaaataaggctgaaatatatcatgtggaattttgtgagaatcatactacattgcatctaggacagcattaactggagaggttcattaaaagtactaacatcactttaggaggcagaggcgggcagatcacctgaggttaggagttcgagaccaccctcgcc

SEQ ID NO: 298700 - DNA, 551 bp, Homo sapiens
acaaaaagctcatctccttgataatcaaaccaatgaacacctaacacaaatatctttctgattcctttttattctagtgtcaggaagtcttcaataaccaggcagaagtctcagctgccatttaattgaaattgtgttgtattcttggctactacaaactagcagatcccagagttatagaggtttgaataggagcagaatcacaaaaactgtgcctttcaggtttttgatgatgktaccaatatttacattttattaggaatgcagtcttaattttgctttaccattttgacccatggagatgctccagaagtttccccttggatagtttatatcattgcataagtcaaagagccaatgtataaactctctcagttgctgtttttatttcttcaacccatacattagagattgggatgtaaccacagaaagtatttatagatcaatgggaccactctaagggagactagtgccaaattccatttatcatctgatctccagaaacgtgtcaaccacagtgaaattcagtaccaggaattagtgttatttca

SEQ ID NO: 298701 - DNA, 536 bp, Homo sapiens
gtgtgaatcccagcttcacaggagcctagcaattcaagcttcctgttttctgccttaagaaaacaagattcacaaatttattcaattgaatatattcaaaggtaataagtagccaaacaaatgaatgtccactacattaggtacctgagagttgaaaatatgaatctagatccgctagtgcattagattcaagtgaattcaattaaggtgaaatatttgtaacacaaacattttaaagtgaaacaataagtaagttttattcaaatgataattaaaatgtctctttgctaattctctcacactggcaaattattcagagttggtagattgtcagttttctccattttgaattattcaatgaagaaatattataccaactcgctgaaagtaatttgctaataaagaaccaattaagtctttaaagttgctattttctttcaaatgttcaaaatccttttataacgaggtttatttttagataaagaaattaaattatataattttargaaactcttgggctcttctatttttttcat

SEQ ID NO: 298702 - DNA, 618 bp, Homo sapiens
aatcacacatattgatcattcacaaagtcaaattcattattttttaagtatacagtgtagattgcacagttcacagactttgggctaaatatatgcaaccatgtaaccaccacctcaaaatatagaatatctttattatttcaacaagattatttttaactcttcatagtcaatcccattacccaccccttggtccttggcaaccaatgacataatttatttccttacagttttgccttttccaaaatgtcatataaatggaattacaaattcagacactgaattcagatcccctgacagggaattgctccaaacttttaaaaaggaaataataccaatcttgcataaarttgcctagaattatatgaaaatatattataaggcataacaagaaatattaggttggtacaaaaatgattgtggtttttgccattaaaggtagaaaaaaagtataataacttttgcatcaccctaatatactaaaacagaataatgcatcatcactaagtaggttcattcatagactaaaagtttagtctatcattcaaaatatcgaccaatgtatttaccaaagacaagaaaagaaccattgtgtgatgattttgatgacagcaggaa

SEQ ID NO: 298703 - DNA, 450 bp, Homo sapiens
accatcacccaaataaagtacaatgtacatattaagtaatttttcattgtccatccccctcccacccacccaccattccaagtctccaatgtctttcattccacactctatgcccatgtgtacagattatttagctcccacttataactgagratatgcaggacttgattttctgtttctgagttgtttcacttgagataatggcctccggttccatccatgttgctgcaaatgcatgatttcattcttctttacggtgaaaagtattccattgtgtatatatgccacatttttcttatcggatcatctgttaatggacacaggttgattccatatctttgctactgtgaacggtgctgcgatacacatacaagtgcaggtatcttttttataccattgtgtcaatttcttctcctttgggtagttagatacaagtgaaaggggaaatga

SEQ ID NO: 298704 - DNA, 450 bp, Homo sapiens
accatcacccaaataaagtacaatgtacatattaagtaatttttcattgtccatccccctcccacccacccaccattccaagtctccaatgtctttcattccacactctatgcccatgtgtacagattatttagctcccacttataactgaggatatgcaggacttgattttctgtttctgagttgtttcacttgagataatggcctccggttccatccatgttgctgcaaatgcatgatttcattcttctttayggtgaaaagtattccattgtgtatatatgccacatttttcttatcggatcatctgttaatggacacaggttgattccatatctttgctactgtgaacggtgctgcgatacacatacaagtgcaggtatcttttttataccattgtgtcaatttcttctcctttgggtagttagatacaagtgaaaggggaaatga

SEQ ID NO: 298705 - DNA, 450 bp, Homo sapiens
accatcacccaaataaagtacaatgtacatattaagtaatttttcattgtccatccccctcccacccacccaccattccaagtctccaatgtctttcattccacactctatgcccatgtgtacagattatttagctcccacttataactgaggatatgcaggacttgattttctgtttctgagttgtttcacttgagataatggcctccggttccatccatgttgctgcaaatgcatgatttcattcttctttacggkgaaaagtattccattgtgtatatatgccacatttttcttatcggatcatctgttaatggacacaggttgattccatatctttgctactgtgaacggtgctgcgatacacatacaagtgcaggtatcttttttataccattgtgtcaatttcttctcctttgggtagttagatacaagtgaaaggggaaatga

SEQ ID NO: 298706 - DNA, 591 bp, Homo sapiens
tcaatattagaaatgttctgggatgtctcttccccactcagtacttactgagattgcagaccttgaagctaatacattgccaagagaaaatctgatatgaaagaaaattgctaattatttactttatcttcatatacccaatatatggtagataaccactaacttttggttgaataatggatacatgcctacataaatatcaaattgaaggtgacccaggatatgtaaattccttagaaacaatcagaagcatggtaatagcacttgtttaagaaattaggcctggttttagatactgtctcataaggacagaaattatggtttaagccatgagagtagagaagtttgctgaaatattagttcaaggggagaatagaaaactgaagattacttattaaaatcccattggttaaagatattatttgtgacactttggattgcacaygacagaaaatccaacctaaactggtttaagcagtttttacgtatgtgaaaagctccaaaccagtgttgtcctgaggcatggaagagtctgtcagatttcttccctctgcgttacgcagcttcagcccttaggctccacatgctgac

SEQ ID NO: 298707 - DNA, 572 bp, Homo sapiens
tgaaattaggctatattgtaataccaggtattcctttcaaaagtaccaggtccaccaaaagacaggaggcacgcaccagaatgagaaccatcacaagtgaaacagcactgtttattgttgtataaagtacatcaacatgtttctctgaactttcacatccttgatctagccagttttttggtagaaaattagtcttcattgcaaatattttcagtctgataatgacaggaagattatttttacaaatagaaaaaaatatgcaaaaatagtgtctggtattttttaacttaaaaaataaaagtaaaaattgagcaagccacattttgttttttgatacttttaaaaaattgataaaaatattaatctgatcattaagatacaacattaaagaaatggactaggacagttttattcaacagagacacagggggarctataaagaataatgttttacaggaactggaaatataactggatagggaaccaggcacagactgttactataaattttattccaattattatcagatacttatgtttaagagtttagaattgtgttataatcctcattg

SEQ ID NO: 298708 - DNA, 573 bp, Homo sapiens
ctaccaggaaacagaatgatggaatgactattgagttaaaagattagacaaatgcaaataaattatacttattttatgctcctatcatcttagaggatgacttaatagtgaaaggaaaagtatcacattgtaataatgaaatcagagagggaattcaagccccagaggtgattcccataagtttatgttaatgcacaccttgtgggggaccaaacatcaactggaaaagtttcctgagaactgttccagctcttttctcatttaaaatgttccaactttacttgacccattagtcatcatattacttacatttatgatgtattatgaaatctattaccaaaaacccaatgaattcaatatggcttgttatactcaaatcayaacatttatgaaagaaaacttctttgttaagtgtttcttcctgtggaattttatttgcaaaagataaaaaattttttagacaagcaagacttacaagaaaacattcagtgcatacacgggtggctatgtacagacacagaaatgatgtttttattcaccatcttagtaaatgcaaaacacagaactaacaaa

SEQ ID NO: 298709 - DNA, 586 bp, Homo sapiens
gttctaattatagggtaattgcaccaatttctaaagtaaatrtactgaactaaactcatcaaaataagtttccctccctcttagtaataaccataagggataactatattccactactccaacaattttgtatcttttttggtgcctatgtcatcctttgtttgttttactatttcaatgatggcatatactcatccttgatgacacacatgatttttagaaacagccaaaagtggttttgagataaatttagtgaaaatggtattactaatctgcttatgaaaaaggagagatcagcatgaatggaaatgaaagggaaactattccagaagaaaacaagacttaggctaacctaatggcagctgagaattagagtgggcaaagaaaaagggtgtaagaattgcagactaagaaaacagcaaggtttaaaacatagagaagccagtttatagagattctcactgccaatggtgagacaacttgagaattattaaaaataatgagttcaaaataatatcaaacaacatcaactaactggccaccattggaatatgctagagaatgaactcatttttgaaaaggggta

SEQ ID NO: 298710 - DNA, 591 bp, Homo sapiens
gtgtggcaggcctgggtgtagggtgccctctagagctttgatggctgtggcaatcatggacttagggacaatgccagacaacatgaccaaaaagttctagacaggcttactgttgaagggcattctcagacaaagccagactgcaaagactggaataagaacctacttcttcaatatccagacattgatgcatgaccacaagaataaaaaaaaacaaaactagaaacatgacatcaccaaacaaaatagagtgctagtgaccgacccctgaaaaatagagatatatgaactgcttgacaagtaattcaaaataattgctttaaggaaactcaataagcctcaggaaaacagataaacaattcaacaacataagaaaaacaataaatgaccagaatgagaaatttaagagattgaaagaataatttgaaaaacccccagaaatcccacagctgaaaaatacaatgagctaaatgaaagataaaaaagagaatatcaacagcagaattratcaagcagaagaaacaatctatgaactcaaaggcagattatttgaaaatatacaggcaaaaaatacacagtaaaggaacgaag

SEQ ID NO: 298711 - DNA, 527 bp, Homo sapiens
attggtgtaaataatagttcattaaaattgatggttacagagaactcttgatgacataggaaaatgtatcagttaggacgctttcagtttgaagttacaaaatatgcttgttaatcttcatagcaagttaatgaggcagatactattctattttatgtttattgtttcacataacgaggaggaagaaggctggttcagtattggctaagcaacccagtgttgtatttgcttctctgtcatcctcttagatttgcctgcctggtctcaggtggcattawagctgtatacatcctctgataacagcttctgtgacacaaaagaagggcttctcttctcaaactgtctcccttattatcaaggagtaatatctttcctagagccttttaccagtcttaccttctcatattattagccaaaccagagttccatgtttaccctgatcgatggcaaaaggagaatggaattaacaggattggcttgtaccaatcatgatacagccactgggggccaagggaggtgtctacctt

SEQ ID NO: 298712 - DNA, 568 bp, Homo sapiens
gggttcttaggaagcaataaacggagaatacattttcatttttgccacttatcccagtcatttatagttacttcatttggcaggctttttctcattagtagtctttttatttcagcactttgaatatgtcatctcactgtcttctggtctctatggcttttgatgagaaatcagctgttaatcttagaatatcccttatatgtgatgagttacttctcttttgttgctttcaatattctttgtcttttgacagtttgtgtctaagtgtggatatctttgagtttatttaaggtagagttcattgagcttcttagatgtagataaatgtttgtcatcaaatttgggaagtgtttgcccattattcttcaaatattctttcttcccgtttctctcctctcctgggacttcccctatgcatatattggtacacttgatggtgtgtcacagatctctgaagctctgtccatttttcttcattttttaaaattttctgttcttcagactcaataatctcaaaacracctaacttcaagctcactgattcattcttcttcctgcttaaatttgt

SEQ ID NO: 298713 - DNA, 597 bp, Homo sapiens
ctggtcctcttcatgtcatcctcagagacttagggtttggaactagcatatctgcagacactctgttgtaggtaaagaactatgtttcatctctgatccagcattctcatgttttctatccatgagacttgcaaataaggtcaaactctaacttttcacaattcttgacaatgtctgtactttattgaaagtgattttatatgtaacacatatattacatacatatagaaatgtatgtttaaaaatgtgttttaattagcctatcaagtatacttaatatatttatcaaatattcattaaatgtttccatgataagtgtaaactagggatacaacgatcagcgaggcagacagacatgattcgtgacttcatagaacttacaaacgtaataaatagtcaagtacctgggattactagaagtgatttgaagtgtgttttaaaaatatamgcattttctttaccaatgtactcattccatacttttctggtagatttgaatatgtctttacagtccaaattaaattaaatgaattaatttaactatcagtggaagagatcttcttctcatataataagtctgtaatttcatactgtaga

SEQ ID NO: 298714 - DNA, 506 bp, Homo sapiens
atactcctaaaatgcatagtgcctgggacataattagctctcaaaaatttttgatatctgtatctatctaaaactgagtaattactatgtttcaagcactttgctaagcatgtgaaacaggtacatttaactatcaaatctaatctatctatgtatactatcttatgtatatatatatcatgtttcctatccattcatccatctagtctatcctcttcatatacaggtaagaaaactgaagtatagaagattagatcaatcacctaagatcatacagttaattaataggaaaggtagaaataaaatattggggctttggcttccagtcaactattctttaattgataactayctttttgtcagactgaaggtaattcttaatgcatatttatatttgccttttgatctctaaaatgggcagcctgaaaagcatacacctctgggaaaaaatgaactattcattttttgcacggaatgtcaagattactaacagatcctatatacat

SEQ ID NO: 298715 - DNA, 534 bp, Homo sapiens
acaataaaccaactggccatagtagaaagcacaggagaagttagaaattaaagcaactgtaaaagtctaggaaatccatccaaggaatccaaaatgactatttcccaacaaaatattaatataacgggtttttaaagtatgcctgaatttacagggttgataaaacagaataactgaaattaggaacatccagaaaaatacaggttgcatggttaatgaaaattgaatgcaggatagggctggtggcccttttcccagtttttgctaaactctctacttcgcatatgcctgtagtcattaacattgatagaggtaagtatgcctttgtttatcatttaaatcatagaaaatatmacatgagtcagtgcagccagctcaaaatgaaactctgaaagcagctgtagtagcagaaaggtgtgtcagaatcccagagaaacggctcaagttcaaaagtcaccctttagtcccttatgctctaatggctagaaaatgaggggcatgactcctagtcttcctgtcctgtcctcagtttaa

SEQ ID NO: 298716 - DNA, 468 bp, Homo sapiens
tatcttaaacattacagtatcctacacagaagtgtgctatgacctactttttcagtatgatacattcaaataaactttaacttctgtattttagtctagttgatgtttgaaaagatacaatcaggtaaataagttgcaagatggcagaagtaaatgttttcagttggtttctttgttaggtcctagcacacattaatgggtaacaagatattgcactaaggagttagttaaattccctcagaactgttcaatcccttcacatttgaccagatggcacagccatttcttcaaaaacaaacaaaaaagccccaaacaaacaagaagaaaaatractttttgaggctgccttgggctgcatagtcaagacatgaggcaatttcaaatctggactccattaccttaaacaaaacaaataccaatttttaaatatttataaacacaactaatacgattatgctaaaaacaact

SEQ ID NO: 298717 - DNA, 561 bp, Homo sapiens
gtgtgacagacataataagtagtgaagtagagagaggtgccttgagaggggtagcaaaggctagaccatgaaatgccttgaagactagtaagaagactgcattttattaactttaatggaaatgtttgatgcttttaaaggagagcatgtcctctgactctcyctctctaatttttctgtctttcttcctttacttatttgttccttccatttatttacttaccaacaaatattgagtgtgaacttgttgccaggctctgtgctatgtatagaaatacatagtacaccagtcaacgttttctgtccttggaattctgttatagttggtttaggaggtctttcagaagaggagtattattgataccctattgttatatcattagtattctactcaaattgatgatcaagtatttgaagacaataaattttggattaaaatcactcttgtaaacaccaagcatccccttttctgtggacaactaattttgttggtctgtagagaggaagagtctaaatatgttaggccttatatatgaccgagttttgctctgatttttgatg

SEQ ID NO: 298718 - DNA, 561 bp, Homo sapiens
gtgtgacagacataataagtagtgaagtagagagaggtgccttgagaggggtagcaaaggctagaccatgaaatgccttgaagactagtaagaagactgcattttattaactttaatggaaatgtttgatgcttttaaaggagagcatgtcctctgactctccctctctaatttttctstctttcttcctttacttatttgttccttccatttatttacttaccaacaaatattgagtgtgaacttgttgccaggctctgtgctatgtatagaaatacatagtacaccagtcaacgttttctgtccttggaattctgttatagttggtttaggaggtctttcagaagaggagtattattgataccctattgttatatcattagtattctactcaaattgatgatcaagtatttgaagacaataaattttggattaaaatcactcttgtaaacaccaagcatccccttttctgtggacaactaattttgttggtctgtagagaggaagagtctaaatatgttaggccttatatatgaccgagttttgctctgatttttgatg

SEQ ID NO: 298719 - DNA, 587 bp, Homo sapiens
gctgaataaaatataaatggaaagcaattattagtgaatatgaagtgggcaaaaataaagctgagacttaatttttgcaactaacctaccaaagtcacaagcttccctatgtgacctyccattctatctcccaattaactcatttttgatttgagatcacttttcttgtttgtttattcaagtattatcaattagcatatgcaagatgttcattacatattcatactaaagcctctctatttgaatagttttctcactgcattggatctttctaggtcaccttctccacttctttacatctgctaatttaaaaagtttccactaagctaccaaatatctggctatttgtttatagcagctgacaggctttttcatgttagcaagacaggcagtattttcttctaacagtgttggggctcagaaaaacaataccccaaaatgaaggactcagaagtggcctctgatgcaaacgtttttctctgaccttctcctgtccttctgtctcagtcccattctcccatgaagttagccgtaaaaagtagatttcctctttcccaaggtgggttgtagaaaccggaacccctttt

SEQ ID NO: 298720 - DNA, 546 bp, Homo sapiens
atgtaaaaaacgggggtgcaagcgaaatagatttaaaagtgaattacaattgaaaaagaagtataatttgaaaagattaacgttctaatgtcttttaatcattcaagtgcttagaagtacagctgttccttactatccacaggggactggctccagaacccctgaggataccaaaagctgcagattctcaagtccctgatrtaaaatggtatggcatttgcataaactactcacatcctcccatatactttacattatatctagattgcttataaaacctaatacaatataaatgctatgtaaatagttatgttttattgctttttatttgtattattttttattgatgtgttgtaattcattttaaatattttcaatccgtattcaattgaacccccagatgtggaaattgtggttacagagcgctactacaatactttctctaaagtgggtgagcaatagtaattcagagatgaatgttattgatgtagagtaattcagagtatgtaaggcaagaaggttgtcaaaaaaataggcttctcattt

SEQ ID NO: 298721 - DNA, 546 bp, Homo sapiens
atgtaaaaaacgggggtgcaagcgaaatagatttaaaagtgaattacaattgaaaaagaagtataatttgaaaagattaacgttctaatgtcttttaatcattcaagtgcttagaagtacagctgttccttactatccacaggggactggctccagaacccctgaggataccaaaagctgcagattctcaagtccctgatgtaaaatggtatggcatttgcataaactactcacatcctcccatatactttacattatatctagattrcttataaaacctaatacaatataaatgctatgtaaatagttatgttttattgctttttatttgtattattttttattgatgtgttgtaattcattttaaatattttcaatccgtattcaattgaacccccagatgtggaaattgtggttacagagcgctactacaatactttctctaaagtgggtgagcaatagtaattcagagatgaatgttattgatgtagagtaattcagagtatgtaaggcaagaaggttgtcaaaaaaataggcttctcattt

SEQ ID NO: 298722 - DNA, 546 bp, Homo sapiens
atgtaaaaaacgggggtgcaagcgaaatagatttaaaagtgaattacaattgaaaaagaagtataatttgaaaagattaacgttctaatgtcttttaatcattcaagtgcttagaagtacagctgttccttactatccacaggggactggctccagaacccctgaggataccaaaagctgcagattctcaagtccctgatgtaaaatggtatggcatttgcataaactactcacatcctcccatatactttacattatatctagattgcttataawacctaatacaatataaatgctatgtaaatagttatgttttattgctttttatttgtattattttttattgatgtgttgtaattcattttaaatattttcaatccgtattcaattgaacccccagatgtggaaattgtggttacagagcgctactacaatactttctctaaagtgggtgagcaatagtaattcagagatgaatgttattgatgtagagtaattcagagtatgtaaggcaagaaggttgtcaaaaaaataggcttctcattt

SEQ ID NO: 298723 - DNA, 534 bp, Homo sapiens
gttgtcaaaaaaataggcttctcattttaaaaggtgtctgaatgttaatgttgaacttgtatacctctgaattaatcataattccttcaagtccaagagatggcacttgaagaattaaattccaaaatattctccaaaatattttatttttctcaagaaaatawaaatctaaagggatgaaatgatggatataggtactgttaagtccaagtgtttaatgttttcagaaagcctactctgccttttttgagctcacttttaaatttatttattctacagtgttgtgggaatgggagttgaccttgttctccagcaacctttaaggtcattgttggcagttttggcttatgtcaccctcacagtagctactggtacatgaagctgcataatattttcaggtaaaaatcactagtcccattgttcaggtagtctgtagaaaaggcaggaagtggaatactggaagatgttgattcaaggttgtcttaaagtcacattgtggagaattttcagtgcatgttacagaatgtgtaattt

SEQ ID NO: 298724 - DNA, 534 bp, Homo sapiens
gttgtcaaaaaaataggcttctcattttaaaaggtgtctgaatgttaatgttgaacttgtatacctctgaattaatcataattccttcaagtccaagagatggcacttgaagaattaaattccaaaatattctccaaaatattttatttttctcaagaaaataaaaatctaaagggatgaaatgatggatataggtactgttaagtccaagtgtttaatgttttcagaaagcctactctgccttytttgagctcacttttaaatttatttattctacagtgttgtgggaatgggagttgaccttgttctccagcaacctttaaggtcattgttggcagttttggcttatgtcaccctcacagtagctactggtacatgaagctgcataatattttcaggtaaaaatcactagtcccattgttcaggtagtctgtagaaaaggcaggaagtggaatactggaagatgttgattcaaggttgtcttaaagtcacattgtggagaattttcagtgcatgttacagaatgtgtaattt

SEQ ID NO: 298725 - DNA, 598 bp, Homo sapiens
tagtggcataatctcggctcagtgcaacctttgtctcccaggttcaagcgattctcctgcctcagcctcccgtagcagctgggattacaggcacgcccacgcctggctaacttttgtgtttttaataaagaccgggtttcaccctgttggccagtctggtcttgaactcctgacctcaggtgatccactcgattcagccccctaaagtgctgggattacaggcgtgagccaccgcacccggcctcaaagtgtcttttaactaggctattagaactggtattaccactgttttttctcttgaattctacatagtacagataccaacagatctttattccctgcaatgcatgcataggagcctactcaacaataatgccaatgatcttgcttctctttattgttcccaaaactcaatggtacagagataattccattttgccaatattttttccttttaaaaacatgttgtcttattccgcctcttattattttatgaagaagaaatcataaagcagtcaaataaccaagtcactctattctgtaagaatgtgcaaatacatttgaatcasttaatatgactcaggcttggtgagatgca

SEQ ID NO: 298726 - DNA, 590 bp, Homo sapiens
ccatttctctatttatgtgctgtttacaaagatgtgtccacttcatcatarttaattgatattacatttattaggatctgtctactttcattctctgcgtgttgtacttccataaaaagtttctaaacgtgctattatcaaggtatcatatacctgaagcctgaatcatgggcttgctaaggagatggtatgcctggtaaatttctctgttttatagtaaggactcagaaatgctctaaggttactagagccctgataagttatttgtcttgataagaaagcagaaaattgactggtgtatccgtcaatattgagtaagtcccaagagaatgacaaatagagatgtttcaaaagaactgataagatcctcactctgatctggaggtttcttttgccactgggcacctcgttaaaaacctcaagttcggggaatcacataccatggattgcggttgtcatcatatccttaggtctgctggaatatttgggttacatcatcatcaccatgtacaacttctcacaaggatgatttgaatgtattgcaatggaatagtaatactagccatagaatgttcatttagatataaagt

SEQ ID NO: 298727 - DNA, 607 bp, Homo sapiens
ccagcagggagcacatgtatatatttttgaattgtaatgcaataagaagtaaaatggaaggatttaataatattcttcaaattgtttcatgggcacattgccaaaatgcttaagcaaatggctttttgtatccttttctagtgagtcaatattagtaattttcataaaagcatcttacacagtgaagagagtcatgaaagcatttttcccatgaacagaatgagcttatgtggaatattgtttcttcatgtcaaacacagccrgagtgtttcaccagtaattctggatctggcacacaaaatagcttcactattccctatatctattgaattagagtaagattggttaacacatacctttaaaagatgcacccaaattcagagtccatacatcaccaaaggagatggacaggatggtattagtcatgttctgaaatatgccgctgagaacaaatcaaagttgccttcctatttcaatgatttgccatgaacaataatcctcttctaacaagccaggtcactgtttcgttcccttggtcccattgcagatgactgtagaacacaccattctctgtgatgggattaggcatctgttacaaacaggtggg

SEQ ID NO: 298728 - DNA, 588 bp, Homo sapiens
agatatgcacttttctctcaccttcaaaatttagggtcatgtattaccactgataaaatacagcattgtgactatcaatggattattgcaattcctttcacactatcctttttcatttttactgaatatttaccattatttagagtcatgtaaagataaaatttcagtgtgggaaggtaaagagcatgaatattaaacaacatgttctgttgctgccarattccaaattcccagtagcaacccactctaaggtaaagtagactagtgacaattgtgttaccatatgacaatctgtcacttaatgggaaatagaaggtgttattttgaatctaaaatttcataaacatttcatatgttgaccttagaaaaacacataaagtttatcttttccttgacactgtaacaacaaatctacatttaattggatatatttagacttgtgaattttgcttcattaaaaaaataggaaaagaaaatagttgtgacatatttgattgcagagaagtatgtatattttattaactgttaacactttacactttagacttcactaagatacaagttccaaatgaatatattgaattcatt

SEQ ID NO: 298729 - DNA, 588 bp, Homo sapiens
agatatgcacttttctctcaccttcaaaatttagggtcatgtattaccactgataaaatacagcattgtgactatcaatggattattgcaattcctttcacactatcctttttcatttttactgaatatttaccattatttagagtcatgtaaagataaaatttcagtgtgggaaggtaaagagcatgaatattaaacaacatgttctgttgctgccaaattccaaattcccagtagcaacccactctaaggtaaagtagactagtgacaattgtgttaccatatgacaatctgtcacttaatgggaaatagaaggtgttattttgaatctaaaatttcataaacatttcatatrttgaccttagaaaaacacataaagtttatcttttccttgacactgtaacaacaaatctacatttaattggatatatttagacttgtgaattttgcttcattaaaaaaataggaaaagaaaatagttgtgacatatttgattgcagagaagtatgtatattttattaactgttaacactttacactttagacttcactaagatacaagttccaaatgaatatattgaattcatt

SEQ ID NO: 298730 - DNA, 589 bp, Homo sapiens
aagtctatagtccattcatgttaaatacaattgctttaatatgcaatcaatctccataaccctttttgtcttacagaactgaaattctatacacattaaataataacacttcattcctggctcctcccagccttagtcaaccaccattctactttaatctctaggtactgactactctaggtagctcataaaaatgaaatcatatagtatttgtcttttggtcactcatttatttcattttagcataatgtcctcaaggtttatccactttgtttatgtcagaatgtctttctttttaaggctgaatattattgcattgtatgtatatactacattttgtttatcctttcatccattcataaayacttggattatttccacattttaactagcgtgaataatgctactatgaaactgggtgtacaaatacttcttcaaggcattaatttttattcttttaggtgtatacctagagatggaattgctagatcacatgacaattctatcttgaatttttaaccaactgccctgctgtttctcatagaggctgtaccattttacattaccaccaatggtgcacaagggttcc

SEQ ID NO: 298731 - DNA, 589 bp, Homo sapiens
aagtctatagtccattcatgttaaatacaattgctttaatatgcaatcaatctccataaccctttttgtcttacagaactgaaattctatacacattaaataataacacttcattcctggctcctcccagccttagtcaaccaccattctactttaatctctaggtactgactactctaggtagctcataaaaatgaaatcatatagtatttgtcttttggtcactcatttatttcattttagcataatgtcctcaaggtttatccactttgtttatgtcagaatgtctttctttttaaggctgaatattattgcattgtatgtatatactacattttgtttatcctttcatccattcataaacacttggattatttccacattttaactagcgtgaataatgctactatgaaactgggtgtacaaatacttcttcaaggcattaatttttattcttttaggtgtatacctagagatggaattgctagatcayatgacaattctatcttgaatttttaaccaactgccctgctgtttctcatagaggctgtaccattttacattaccaccaatggtgcacaagggttcc

SEQ ID NO: 298732 - DNA, 568 bp, Homo sapiens
actctctattcattctacctgattccccactttgctgcatcctcaaccactggaatcaatttgaccctggcaatctaagaagaaaatgtctcaatttttttttttgttttttttttttgtgtttttttggcttttgagacggagtatcagtctgtcgccaggctggaatgcagtggtgctatctcctctcactgcaacctctgcctcccaggttcaagcaattcttctgccttagcctyccgagtgttgggactacaggcatgcaccaccgtgcccagctaatttttgcatttttagtagagacagagtttcaccatgttggccaggctggtctcgactacttgttctcatgatctgccctccttgtcctcccaaagtgctgggatcacaggcatgagccaccacacccggccacatctgacttttttactgtaatactctatggccccaatatcatctggacagccaggaacaatgggccatcaatagtagtcttcattacaacaccatattgcaactagacctattttgcaaaaggcagggtaaatggtcagaaatctcatatgta

SEQ ID NO: 298733 - DNA, 568 bp, Homo sapiens
actctctattcattctacctgattccccactttgctgcatcctcaaccactggaatcaatttgaccctggcaatctaagaagaaaatgtctcaatttttttttttgttttttttttttgtgtttttttggcttttgagacggagtatcagtctgtcgccaggctggaatgcagtggtgctatctcctctcactgcaacctctgcctcccaggttcaagcaattcttctgccttagccttccgagtgytgggactacaggcatgcaccaccgtgcccagctaatttttgcatttttagtagagacagagtttcaccatgttggccaggctggtctcgactacttgttctcatgatctgccctccttgtcctcccaaagtgctgggatcacaggcatgagccaccacacccggccacatctgacttttttactgtaatactctatggccccaatatcatctggacagccaggaacaatgggccatcaatagtagtcttcattacaacaccatattgcaactagacctattttgcaaaaggcagggtaaatggtcagaaatctcatatgta

SEQ ID NO: 298734 - DNA, 568 bp, Homo sapiens
actctctattcattctacctgattccccactttgctgcatcctcaaccactggaatcaatttgaccctggcaatctaagaagaaaatgtctcaatttttttttttgttttttttttttgtgtttttttggcttttgagacggagtatcagtctgtcgccaggctggaatgcagtggtgctatctcctctcactgcaacctctgcctcccaggttcaagcaattcttctgccttagccttccgagtgttgggactacaggcatgcaccaccgtgcccagctaatttttgcatttttagtagagacagagtttcaccatgttggccaggctggtctcgactwcttgttctcatgatctgccctccttgtcctcccaaagtgctgggatcacaggcatgagccaccacacccggccacatctgacttttttactgtaatactctatggccccaatatcatctggacagccaggaacaatgggccatcaatagtagtcttcattacaacaccatattgcaactagacctattttgcaaaaggcagggtaaatggtcagaaatctcatatgta

SEQ ID NO: 298735 - DNA, 517 bp, Homo sapiens
tatggccccaatatcatctggacagccaggaacaatgggccatcaatagtagtcttcattacaacaccatattgcaactagacctattttgcaaaaggcagggtaaatggtcagaaatctcatatgtacaggtcttcatggccctatatcaaaacccaaaaatctgcaaaactccaagaagctgccccaaaagaaagtcctgaggcagaaccagatattgttgatgacccccttttamaagggcatctgtctctcaggggaaactgcaaccaaccccaggtaaccccctgccaagtgctcctgaggttacagcccaagatcaagaaccagtctgagtgtgagccaagtcccctcacactcagaggggaactccctattagacttcccctccagccctgcttccccttagagaagtagcaggagccaagagccccatttgtgtggaagcccccttttccataaccaacatacaataatgtaaggaaaagccaggaagctattctgaaaatcccagaag

SEQ ID NO: 298736 - DNA, 517 bp, Homo sapiens
tatggccccaatatcatctggacagccaggaacaatgggccatcaatagtagtcttcattacaacaccatattgcaactagacctattttgcaaaaggcagggtaaatggtcagaaatctcatatgtacaggtcttcatggccctatatcaaaacccaaaaatctgcaaaactccaagaagctgccccaaaagaaagtcctgaggcagaaccagatattgttgatgacccccttttacaagggcatctgtctctcaggggaaactgcaaccaaccccaggtaaccccctgccaagtgctcctgaggttacagcccaagatcaagaaccagtctgagtgtgagcmaagtcccctcacactcagaggggaactccctattagacttcccctccagccctgcttccccttagagaagtagcaggagccaagagccccatttgtgtggaagcccccttttccataaccaacatacaataatgtaaggaaaagccaggaagctattctgaaaatcccagaag

SEQ ID NO: 298737 - DNA, 517 bp, Homo sapiens
tatggccccaatatcatctggacagccaggaacaatgggccatcaatagtagtcttcattacaacaccatattgcaactagacctattttgcaaaaggcagggtaaatggtcagaaatctcatatgtacaggtcttcatggccctatatcaaaacccaaaaatctgcaaaactccaagaagctgccccaaaagaaagtcctgaggcagaaccagatattgttgatgacccccttttacaagggcatctgtctctcaggggaaactgcaaccaaccccaggtaaccccctgccaagtgctcctgaggttacagcccaagatcaagaaccagtctgagtgtgagccaagtcccctcacactcagaggggaactccctattagacttcccctccagccctgcttccccttagagaagtagcaggagccaagagccccatttgtgtggaagcccccttttccataaccracatacaataatgtaaggaaaagccaggaagctattctgaaaatcccagaag

SEQ ID NO: 298738 - DNA, 588 bp, Homo sapiens
accatgtcaacaagcaggccaacccactaacatggtatactgggaggcctagaagggctaaaatggtagtctcagttaaaatatacagcctaagacttcagctattttcccaactgaaaacaatacccaattaagctggaagmaagaaagggtttagcacccatagttaagaaattacttgtccgtggacttctgaaaccctgcatttctccctgcaatacccccattttacccattttaaaggcttcagggggatacccgaaagtacaggatctcggaaaaattaatgaggctgttatttctgtccacccattggtggtggatccatatactctcccgactcaggtgccaggggttgcagaatggttctcagtcctagacctaaaagatgctttcttctccattgctctggccccagagtctcagtacatttttccctttgaatgggaaaatcctaataccagagtaaaacaataatacacttcgacagtgctccttcaggggtttcaagatagcctactttttttcatttttatttttattgtgcacaagccttagagagggatctgagggaatccacaattggat

SEQ ID NO: 298739 - DNA, 588 bp, Homo sapiens
accatgtcaacaagcaggccaacccactaacatggtatactgggaggcctagaagggctaaaatggtagtctcagttaaaatatacagcctaagacttcagctattttcccaactgaaaacaatacccaattaagctggaagaaagaaagggtttagcacccatagttaagaaattacttgtccgtggacttctgaaaccctgcatttctccctgcaatacccccattttacccattttaaaggcttcagggggatacccgaaagtacaggatctcggaaaaattaatgaggctgttatttctgtccacccattggtggtggatccatatactctcccractcaggtgccaggggttgcagaatggttctcagtcctagacctaaaagatgctttcttctccattgctctggccccagagtctcagtacatttttccctttgaatgggaaaatcctaataccagagtaaaacaataatacacttcgacagtgctccttcaggggtttcaagatagcctactttttttcatttttatttttattgtgcacaagccttagagagggatctgagggaatccacaattggat

SEQ ID NO: 298740 - DNA, 588 bp, Homo sapiens
accatgtcaacaagcaggccaacccactaacatggtatactgggaggcctagaagggctaaaatggtagtctcagttaaaatatacagcctaagacttcagctattttcccaactgaaaacaatacccaattaagctggaagaaagaaagggtttagcacccatagttaagaaattacttgtccgtggacttctgaaaccctgcatttctccctgcaatacccccattttacccattttaaaggcttcagggggatacccgaaagtacaggatctcggaaaaattaatgaggctgttatttctgtccacccattggtggtggatccatatactctcccgactcaggtgccaggggttgcagaatggttctcagtcctagacctaaaagatgctttcttctccattgctctggccccagagtctcartacatttttccctttgaatgggaaaatcctaataccagagtaaaacaataatacacttcgacagtgctccttcaggggtttcaagatagcctactttttttcatttttatttttattgtgcacaagccttagagagggatctgagggaatccacaattggat

SEQ ID NO: 298741 - DNA, 608 bp, Homo sapiens
tccccagtggaacctgaaaacaaaatataggaagaatagttaataaatgagcaagaaggaaaaagaaaaggattctcgtagtacatgggatcaaaagtatatcttcctcaaacaaacaacccaatggagaattataaaaacccttcatgactctttccacatggggaaagatgccaccctggccatgataaacaggcttttcactggggcctaacttagcttcggtggttaagcaggtctgtcaagactgctcactgggacattkaacaacccagggaacaaaacactgcctgtatagaacagtccagagaaggggaacttacccaggggaagactggcaattgaactttacccttatgccagcttgtagaggatacaagtttttgttagtactaatagatacttctactggctgggttgaagcttaccatatcagaacagagaaggccaatgaagttgtgaagcttctcttaaaagaaataatcccccgggtttcagttactccagagcctccaaagcgacagcccatcatttatctcccaaattactcaagggtttgctaagaccctcagaatcaaatactatttacattcagcatggagacgtca

SEQ ID NO: 298742 - DNA, 643 bp, Homo sapiens
ggggaacttacccaggggaagactggcaattgaactttacccttatgccagcttgtagaggatacaagtttttgttagtactaatagatacttctactggctgggttgaagcttaccatatcagaacagagaaggccaatgaagttgtgaagcttctcttaaaagaaataatcccccgggtttcagttactccagagcctccaaagcgacagcccatcatttatctcccaaattactcaagggtttgctaagaccctcagaatcaaatactatttacattcagcatggagacgtcaatcctccaagaaagcagaaagagctaattgaactccagaataagcattagctaagctgttcaggaaacgtcagaaatttggggcagcttactgcccrtagccctcataagaatccataatcccccaagagaaaaaattaatacaggcccatattaaatgttatatgagagggcatttttaactaatgatctaattactgatccagaagcagcaagcttagtaaaatacctagttaaccttggacaatttcagcaggtgttacgaaagtttcgaattcaaaggctccctgcatcagaaactaaccagcaacccaaaatcaagtcaggagataaggtacttgttaaaac

SEQ ID NO: 298743 - DNA, 577 bp, Homo sapiens
aaaataggcaatagctttattttcttggcatttggtactgccctaccttaatagctgtcaaggacattggcctgtcagaaatggaaataattaaccattcttttagtttgttaaacttaacctgatggctttgcatgactaccaaaagctggggatataccaggcctgtaatgttaggggactggcctagtgtcccagcctacttccagggacaaactcattggtctatgggatggagatatgtagcccaatggtcagtaaaaaataattttgttggatcaagtcccaggttctctaagttgtttattttagccaccaaccatagtcaaaaactacaaaaggaaaaatgctctactacctcagcttgtatccagagcaattctctttctgcctttgcggtaactatgccagttccattactttcattggagaactccaagasagtcaatgtaactggatatttgttgctgggttacatttcctagttaatacctctgcaggaattcaattactaaacagaaatcttgagcaggaagacaattttctactttatcaggtccctggaccaacacagccc

SEQ ID NO: 298744 - DNA, 584 bp, Homo sapiens
aattaaaccccagaaaactttgtaatcaaggctcctgagccacttgctcagcctgctcccaccctgtggagtgtactctcacttcagtaaatcactgcttttgctgtatcattactttgttgctttgtttgtgcattttgttcaattctttattcaatatgccaagaacctgtaaaactcatactcaagacctcccttctgataacaacaccacagtcaaactattgaaaattaatggcagagagagtattgaaactagcaagaggaaaataatcacatacaagtactccttgataaaattaacagtgaacttctcatcagaaaccataacagcctgaaggcagatggatcacrtatttaaatactaaaagaaaaagatctgtcatcaaaaattctttatccagtgaaactattctccaaaaatgaaaaataaattaagatgttttgagaaaaagaaaaaaactgaaagaattgcttctggactggccagagaagaaatactaaagggagtaatttaatcaaaatgaaagaaaaacggacatcaattagaattctcaaaaaaaaataagcaacactagtaaaga

SEQ ID NO: 298745 - DNA, 584 bp, Homo sapiens
aattaaaccccagaaaactttgtaatcaaggctcctgagccacttgctcagcctgctcccaccctgtggagtgtactctcacttcagtaaatcactgcttttgctgtatcattactttgttgctttgtttgtgcattttgttcaattctttattcaatatgccaagaacctgtaaaactcatactcaagacctcccttctgataacaacaccacagtcaaactattgaaaattaatggcagagagagtattgaaactagcaagaggaaaataatcacatacaagtactccttgataaaattaacagtgaacttctcatcagaaaccataacagcctgaaggcagatggatcacgtatttaaatactaaaagaaaaagatctgtcatcaaaaattctttatccagtgaaactattctscaaaaatgaaaaataaattaagatgttttgagaaaaagaaaaaaactgaaagaattgcttctggactggccagagaagaaatactaaagggagtaatttaatcaaaatgaaagaaaaacggacatcaattagaattctcaaaaaaaaataagcaacactagtaaaga

SEQ ID NO: 298746 - DNA, 515 bp, Homo sapiens
tttcatgattaaaatgtcaatctatctgggagatataaaaaatataaacaaatatgcacctaacaagacagttctaaaatatttgatgccaaaataaatataaatgaagagagaagttgagaattgaataataattgaagattccaaacctaactttcaatgataaaaataacataaagatataatatcgtaagaaaayaggagcttttaacaacattataaaccaactatagctaagaattacctgttgaacacccaataacagcagaatatacattattctcaagtacccctagaacattcaccaagatacatcatatgttaggccatagaaagaaggccttgaaaaatttaaaaggatggatattgtaaaaggtacattttctccaccacaataaaaataaattagaaatcaataacagaaatttgagaaatttgaaatatgtggaaattaaatagcacatgcctaagtaaccaaacttcttcttgtaaaaaagaaattacaaggaaaatta

SEQ ID NO: 298747 - DNA, 622 bp, Homo sapiens
gtattcttttctccctcaaaaatgactaaatatttttccttttgtctactttgtatggttttgaaaattacatctatcaataagaaaaataagaatcaaatagaaaaatagaaatgcaatgtagtggctaagagtttagatgccagaactagggtcgtgggttcaaatatataactttaaacaatttacttaccccagtttcccagtaactaaaattgagattataatagcatctatcttacagagttgtgagagaattgaaataatttttttaacgtttatagctcttagcaagtagcatttaccccatgaaaagttattaaagctaaatatttaaaaccatagcttaattattagcgattgatgaaatttaagttaaaataccagaaawgtgtttttttcatgacattgacaaataaataataaaaattgttttagccagtactgttgataccaaggtttgtagtatcataaaagggtatgttattttcaaaggacacttttacagtgattattaaaattaaaatttaaattattttaccccagtaacaatatttttaaatatgtgtaacttaattttattcattcattaacaaattaggaactattatgtgccagattc

SEQ ID NO: 298748 - DNA, 480 bp, Homo sapiens
aacctgacacaagaatttggtaaagtagaattgggggaaggtgatgttagtaatgaggagtaataagagtaaagaaagtctgaaataggaggaaaagccaatagagcatcggttattgaggttactcatataggcaaaagaagcttggctatacagatacttccaaaacatcaaacaaacaatagaagctgggccatatacccactgtctccatttcccgttgtttgggaagcatgcacggggcatatgggacaggcttaagacagaagtgttttaacacggggattaagtgaaagtactagcagagcgtgaaggcattagccactgtgtctgaggttcattttcttccccagcttagcagaragccagcttagtagatagctgctgcagcctaggattgctcagtgaagaacagaactgaagattactctgttatttaccccattgcggccattactaacctgataagagcaagcagaa

SEQ ID NO: 298749 - DNA, 540 bp, Homo sapiens
gcccagaagtggtcatctcttgtaccttaatacctaataggcttctagctgggacgggtctacaaatatgtagttctcttgaacttcaaaaggctctatgtggtgcacacatttacaaaattactcaaatccataagcagattcctttcagggaacacctcagcccttgccttttagatggaattaaaagagctttcaccttggtatgcacctggtgattaaacccagtaccagtgcttagtttatatctgaaccattcagtctcagcaactaccctgggttaaaaatgggatctagtgctatttctaatatccaaattactacgtatctccctgggacatttaggctgaaatttcccttaggtttcctaaatcaaaagtaaaatcatacaccgaaatgagaaatgatagaaatgcctgaaagagtaatgcccatgtgcatgtatgggtcacaacaaggyatgatcaatcatccagagctttttgttttagctttccacagagtcttctctctctccatgaagaaaactaaaatattatg

SEQ ID NO: 298750 - DNA, 581 bp, Homo sapiens
tatatatcctttatttctcatgaggtacatgtttttctatttttgaacaaattaaacttattgtaagaatacacttgcctactatttctaacatttgtctcatttctggttttcctgctgccctgcatccccaattctttttttctttcttctttataaaatagcattgtgttttatgctgctataacataataccagagccyggtaatttatggtaaacagaaatttatttgacttacagctctggaagctgggaagtctgaggtcaaagagctgtatctggtaagggccttcttgccatgttcacaacatggtgggaagcatcatgtgggcaagtgaacacatgaacacaaaggaaaaggggactgagtgctccattttattaaaaaaaaaactcacttctgagataattaacctactcctacactaatggcataaatccattcactccacccacagggcctaatcacttttcactaggttccagcttccagcactgttgcattgtaaactaagtttccaacacaggcttttgggggcacctattcaaaccaggtggcaagtattatacatgttttctc

SEQ ID NO: 298751 - DNA, 483 bp, Homo sapiens
cagcttaatggagtaaatctcactaaggttcatagcatgctcatagagtttttagggattgtatcagcaaaagtactgccagactttataaaaaaaaaaaagagatagtacacaatgtaaaaagcttgggacacccattttttttatggaagtaagataaaaaatgttgcttagctacaaatataagctttttcatatggaaaatgtagagtgatttagcagaaataatcagtatcytagaatatggagccaagtgccatggacaattatctttagggagaaaaaaatgaattctttcaaggaactagttactgtgtctgactagatttaataatcgctatgaaccagcgaccactacatgccttctactgatctgtactcaaactgccttttggaaatgaacagttttttgtagtgcattctctgcagcaccattgaatattgggtttatggagaacataaaactcaactgtttggttaaga

SEQ ID NO: 298752 - DNA, 590 bp, Homo sapiens
tccccataatgccctgcatggggccaaggcctatatatattattgtttttgtttgttttgttttgatttttttcttatgctctgctctgtgatctaaaatattgttgaaaatgtcaaaaaggcctgcaaatacttctatgggtaacagtgataagaaaaaggaagtgtttctgtttatagatagcacagcaagtcaagttgttggcaaaactggacactggtgtaagtgtgaaaacacttacagaagaagtggtgttggaatgaccacaatgcatgacctgaagaaacagaagggtaaactgttgaagttctattgtgaaagtgataaacagaagttaataaaatatagaaaaactctgcataaagctaaaaatgaagatcttgactgtgtattgaaagaatggatccatcagtgtcacatccattagatgtcacttaatgttrtgttgataatgaaacaagcaaggatctattatgataaactgaaaattgaataaaactgaaaattcaacaggctaggtgcagaatttaataaaagacaggacattaaatgtataaaggatttatgatgatacagaatctgctgattg

SEQ ID NO: 298753 - DNA, 572 bp, Homo sapiens
ttatgccattgccaatggttgaaacacagtgactaaagacacagttgtgcatgaatgatacaacctctggcctgctctcctctgcaactatgttgagtgatgatgatgaataaggtggtgactttgaagaattctgtacatcaagtgacaaaaaaaaatctagctttcttacatatacaacaaatatacctcagagtccattaggaagctggaagtggatgttaaagaaatttttaacattgataatgaaggtccagtttttcattcattgacccgtggtggaagagccaaaatgcttccaaattaaggcaattgtgataatagcaatgatgatgatgacgttaacaaggcagaaaaaatgcctaaagatggcgaggtaaaaatatgtgatgggcttattgaaggactgcagcagcatgcattcataacaaaacaagtaatcatattatatcagtttatataatcaaagagaaatgtcaaagacaaaaaccattgttaatgaagcagatgasttgaggaaacattttttaaaactatccagcaaaatgcctccttatccctggagaacccac

SEQ ID NO: 298754 - DNA, 605 bp, Homo sapiens
caacttacttaaattctttccaattcagtatttagtgctcaggaagaaacaaaaatatccctgtctcctttacctctacctccaaaatttcaagatacaaataaacaaaacagttacttaaaatagggtttcaaaaactgtattaaggcataaaaatattttcattcactttgtttggaaataaatatttttgtggagcattttttttctccttgagagtcaaatacaaatccactttgagaggttgaaactaatacttttgaagctaacattgtttgaagcaattattattattatttttcwtgccgtttgggaacagcaaagaagaccatgaaaatcttcaaattatctcaataccaaagaatatgtgatcctaaaggtcaagatcacatagtatatggtgctccatttttcaacaagactacattgggtatttagaatcgaaaaattatacacttttaaatgcatgccactatacatttttacattttcctttaaagaccgatgaaacagtatttaaattcatctggcaaaaattacatagacttaccttaaactttaataaacttcaagatttttaatcctcaggatggtttaaaatatca

SEQ ID NO: 298755 - DNA, 639 bp, Homo sapiens
gaaacttccaaaatgtctgcactgttttgcatttgcaccagcagtaaataattcttgttgctgtgcatcctccctcagcactttgaattgtcagtgtgctagatttgggtcatcctaataagtatgtagtggtagctctttgttttatttgcaattccccagtgacatatgatgtggtttatcttttcatatgcatattaagcatccgtataccttctctgctaaagtgtctgtttagatcttttgcccactttttaaaagttgtttgtgttcttacagagtttttaaaactttttatatgttttgaataccagatctttattagatatgttttttgcagcattatttttcactccctggtttgtcttttcattagcttaacagggtttttcagagggccaaaaatcttttaattttactgctattcaacataacaattttctcatccataagtggtgcyttttgtgttgtatctaaaaagtcattgtcaatccaaggtattccagatttcctcctgtgttgttttctagacattttatagttttgcatttaagtcaattatctattttgagttaattttggggaaatgtgtgatttttctctctaatattttttgcatgtggatgtccagtttttcca

SEQ ID NO: 298756 - DNA, 565 bp, Homo sapiens
aattctactgttttgttcatcttcaatattttctgggctattctggtttttgcctttcaatataaactttagagtaatttttaaatatctacaaagtaactttctgggattttgattggtattgcattgatttgatctattgtattgaatcaagctgggaagaaatggcatcttgtcaatatcaagtctttctatccatgaacatttgtttagrtatctatgcatttgtttagatattctttgatttctttcatcacggcttggcagttttttaatgtagatcttgtacatatattgataaaattatacctaagcatttttctctttttggtgttaatataagtggtgttatgttttaatttcaaattccaattgctcattgctggtatatagaaaagaaacagacttttgtgtattaaccttgaatcctgcaactttgctatatttacttatttttaaaggaaattttgtagtttatattttatttgcatgtaattctttggaggtttctacataaataatcaggccacttgtagacaaagacaggtttttttaaaaaaccttc

SEQ ID NO: 298757 - DNA, 563 bp, Homo sapiens
tacaacacacgaaattaaattgattagagcacattagtagaatgaaggataaaattatttgatcatctcaatacaggcagaaaaagaattgsaaaatattaacaccctttaacaataaaaacccactctgaacaaactaggaataatagaaaattatatcaacatattagaggccatatatgaatatcccacagctagtatcatactcaatggtgaaaaactgaaagcttttactctaagattgggatggaggcaaggatgcccactctcatcattatattcaacatagtaccgaaagttctagctggagcaattaggcaagaacaaaaagacaactaaattggaaaaaatgaagtaaaattattggtttccagatgacatgatattacatttagaaaaccctagagagttcacacatacacacacacacacacacacacacacacacacacacgccattagaactaataggtctagttacagaatataaaatcaacacacagaattcagctgtgcttctatatatcaagtcactatccaaaaagaaaattaagagaataatc

SEQ ID NO: 298758 - DNA, 318 bp, Homo sapiens
tatcagttttaatgggccaaatagaaagttagagcaccgagttatcaggaaaatcttaccaaccagaagaattcactttcagatgatttcaatgttaaatgctatccatgcttgtgattttaatattctcacttttcttcagtgagtcttcactattttaagagggaatattaacrgctacattgtatgtctgtgcacatgtgaggactaaatatatgcaagcataattttgaatacatcttaaatataaagcctctaaaatgttgactaaacattaatgtgcccaaattctgaattaattaatatacatatagccat

SEQ ID NO: 298759 - DNA, 318 bp, Homo sapiens
tatcagttttaatgggccaaatagaaagttagagcaccgagttatcaggaaaatcttaccaaccagaagaattcactttcagatgatttcaatgttaaatgctatccatgcttgtgattttaatattctcacttttcttcagtgagtcttcactattttaagagggaatattaacagctacattgtatgtctgtgcacatgtgaggactaaatatatgcaagcataattttgaatacatcttaaatataaagcctctaaaatrttgactaaacattaatgtgcccaaattctgaattaattaatatacatatagccat

SEQ ID NO: 298760 - DNA, 578 bp, Homo sapiens
tgtagaattaaatgcataaatacttgtcatctattgcttgtaaacacaacacaaagtttgacacagagtctccctggagtaagatcaaggtgtcagctggggcttgtgtgacttgctggtagcactggggagaatccatttccttctatttttcagcttctagaggacatccacattccttggcttgtggtaccttctacatcttcaaatccagcaatggagagttgggtctttttcacatcacaactatagctgacccttttctactacccctacccctttttcttccattttaagaaatcatgtcttagatggggccactcagacaatccaggatcatcttcttcattttaaagtgacctgattatcagtttgaaaatattttaattttattaaagatttttgtttttcatgtagtgttatttgtcttattttaatttatgctacaataatattatacatcctctcaaaagttcccattaaatactgtgatatgagacattcagttattatttgrtgaaaaactaaattgacaaattcaatgaataatatgggtaaaacttagatcagcaaaaaag

SEQ ID NO: 298761 - DNA, 307 bp, Homo sapiens
ccactcaggaaatatgaattaaaacaaatatcttcttaagctatatttttaaaaattacatttttgtttctattatttatttkatattttttcaacaatgccatgcattttaatagtactttaaagttgtctcagattttctagttttttagaaatttaagaaggtattttatattatttatctaacctatccaataattgaaattttagcaaacctaatatgtaaatatgtttctcccttatgcaggtgtaaaactttgttgacttatttattttaaattttggagtgtgcacctctatttaagtg

SEQ ID NO: 298762 - DNA, 618 bp, Homo sapiens
ccatgtcctccctaggtacataattctccaggaaccctaacatgtttagctgtgcagaagctctctgaaccctattctttgggtgtttatggagacttccctacataggcatgattgattaaacccttccattcctgagttacttcacttagataatggtctccaattcaggttgctgcaaatgccatcattttgttcctttttatggctgagtagtattccatggtgtatatataccacaatttctttatccactcaattgataggyatttgggctgattccatatttttgtaattgtgaattgcactgctataaacatgtgcatgcaagtatctttttcatataatgacttattttcctctggatagatacctaggagtgggattgctggatcaaatgatagatctacttttagttctttaaggaatctccacattgttttccatagtggtcctattagtttacattcccttttcaccacctccacaccaacatctcttatgttttggtgttttgattatgaccattcttccaggagtaaggtggtatcgcattgtggtttttgatttgcatttccctgataattagtgatgttcagcatttttcatatgtttgtt

SEQ ID NO: 298763 - DNA, 629 bp, Homo sapiens
tcagcagttcttgtagtgttggcttggtagtggtgaattatctcagcatttttctgaaaaagactgtacctttcctgtgtttagggagcttaattttactggatacaaaaatcttggctgatcatttttttgtttaaggaggctaaagataggaccccaatttattctagcttgtagggctcctactgagaaatctgctgttaatctgatagtttctttttttaacagattaactgatgtttttgcctmacatttcttaagattcttacctttgtcttgactttacataacctgatgactatgtgcctagatgatgatctttttgcaattaatttctcggttgtactttgagcttcttgtatttagatgtttagttctctagcaaggccagggaagtttcctcaattattccctcaaatttgttttccaaactttcagatttctcttcttccttgggaacaccaattattcttaattttgtttgtttaacataatcccagacttcttgaagatgttcattaaattttttttttcattgtctgtgttggattgggttaattcaaaagccttgtctttgagctctggagttctttcttctacttgtttgattctattgctgagacattcca

SEQ ID NO: 298764 - DNA, 654 bp, Homo sapiens
caaacaacttcctctattttatggtatygatgtgcacattttatgtctccttttagtaaaaaatattctcaaagagctcacatctctgtcttccaaatgccgcttatatatttggcattcagaatgcgttgtttcttagaggaattaaataactaaaatgctaaagggtttgaaaaagagatacatgaaaaagatacattgcttatgtctagtaaagatgttaatttaatgtgtatttttgtatcaaagctggaaaaatgtgaaccccaaactgccaccaataattgcccagcctcttaggttcaaaagccaatttgcaagaaggaagtaaagatgcagaggtcttttatattcctttttgttttctagaataattattttagcctgtacattttccatagaacattttgcctatgttcagctgggtttctgtcacttgcaatgaaagactcctataatacatactctcttttgaaagaagttctccagttattgttaaagtatatgttagaaatggtgaattagatagaatgatggtagtcaagaattttgaaattggaatatgcagagcagatatcagtgttacgtaatacctggtgccgtaagaaagtttattatcacctcagtgtgaatatattgcataaatagcatttt

SEQ ID NO: 298765 - DNA, 654 bp, Homo sapiens
caaacaacttcctctattttatggtatcgatgtgcacattttatgtctccttttagtaaaaaatattctcaaagagctcacatctctgtcttccaaatgccgcttatatatttggcattcagaatgcgttgtttcttagaggaattaaataactaaaatgctaaagggtttgaaaaagagatacatgaaaaagatacattgcttatgtctagtaaagatgttaatttaatgtgtatttttgtatcaaagctggaaaaatgtgawccccaaactgccaccaataattgcccagcctcttaggttcaaaagccaatttgcaagaaggaagtaaagatgcagaggtcttttatattcctttttgttttctagaataattattttagcctgtacattttccatagaacattttgcctatgttcagctgggtttctgtcacttgcaatgaaagactcctataatacatactctcttttgaaagaagttctccagttattgttaaagtatatgttagaaatggtgaattagatagaatgatggtagtcaagaattttgaaattggaatatgcagagcagatatcagtgttacgtaatacctggtgccgtaagaaagtttattatcacctcagtgtgaatatattgcataaatagcatttt

SEQ ID NO: 298766 - DNA, 612 bp, Homo sapiens
gaactctctgaccccttgcgcttcccagttgaggcaatgcctygccctgcttcggctcaggcacggtgcgcacacccactgacctgcgcccactgtctggcactccctagtgagatgaacccggtacctcacatggaaatgcggaaatcacccgtcttcttcgttgctcaggctgggagctgtagactggagctgttcctattcggccatcttggctcctccccataaaattaattaattttttaagataatttatattagactaagagttaaaatctggctattactatctataagtaagtcatgtgctttctactaacattaactcattcatataattttggtactctgttgtgagttgctaatgaggataagtttcctctaacatgctttaagattatctaataattatgaattatgccttgttaaaataagcatttattattttatgtaatgtcactcaatatattttctatttttatagctctcattatgtttaattattaaatttgtattttaaaataaaatgggattctaacaaatgtaattgcaactgtaatatggttaatatgttgcagtattatgctttctaatttacttatatttttatgt

SEQ ID NO: 298767 - DNA, 612 bp, Homo sapiens
gaactctctgaccccttgcgcttcccagttgaggcaatgccttgccctgcttcggctcaggcacggtgcgcacacccactgacctgcgcccactgtctggcactccctagtgagatgaacccggtacctcacatggaaatgcggaaatcacccgtcttcttcgttgctcaggctgggagctgtagactggagctgttcctattcggccatcttggctcctccccataaaattaattaattttttaagataatttatattagastaagagttaaaatctggctattactatctataagtaagtcatgtgctttctactaacattaactcattcatataattttggtactctgttgtgagttgctaatgaggataagtttcctctaacatgctttaagattatctaataattatgaattatgccttgttaaaataagcatttattattttatgtaatgtcactcaatatattttctatttttatagctctcattatgtttaattattaaatttgtattttaaaataaaatgggattctaacaaatgtaattgcaactgtaatatggttaatatgttgcagtattatgctttctaatttacttatatttttatgt

SEQ ID NO: 298768 - DNA, 669 bp, Homo sapiens
ggtatttgaaatgatgctaaacaacctaatcatcagggaaatgcacattaaaacttcaaggacttataatctcacactgagtatgttggccattaacaaataatgataataatattaattataataatgatactcagggtcagtaagtatgtggagaaacwgaaacctgtacactgctggtagaaatgtaaaatggtgccactgttatggaaaacagtatgaaagtttctcaaaagaaaaaaaaaagaactactctattctccaacagtcctacttctgagtatttactcaaaagaattaaaatcagtatctcaaagtgataggtgtccatttatattcattgtggcattattcacagaagctaagatgtggaatatatatacaataaaatattattcactttttaaaaagaagaaaattttgtcataggagacaacatggatgaaccttgaggacattatggcaagtagaataagaccatcaaagaagaaaatatactgtatgattccatttatgtggcatttacaataatcagactcagaaatgggaagcagaatggtggtttccaggggataaggaaaatgaggaacagggatttgctgttcagtagttgtaaagttacagtaacataagataaatatgttctacagttctactttacagcattgt

SEQ ID NO: 298769 - DNA, 419 bp, Homo sapiens
cttctgtaaaaatcagacaacataaaaaagtactgaacaaaaatgttttaacagtgaaatagaagaaacaccacctgaacagaaaacgctcctctttgagagataaataatactatgtcaaaaattatacatattgttatcataaatatttagtagtcaatattccaattttctacaacgtacatatatgatatagtsaaacatacaaaatgagaagggatccagctaaaaaagaatgtaattaaataattaacaaattcttagttaaattcctggttatttcatttctaatcgagatattttactgtaggttgtgtttatcataattataaccattgcctgtgagaattatttaatcgattaattaaatgtaattcttcttgaataatggcttgtgtcttggaaataatggcatgcac

SEQ ID NO: 298770 - DNA, 538 bp, Homo sapiens
  misc_feature (1)...(538): n = A,T,C or G
tccctcccctcactcccccacaccctctaacaggccctggtgtgtgctgttcccctccctgtgtcaatgtgttctcattgttcaattyccacttaggtgagaacatatggtgtttggtttcctgttctagttttagtttgctaatgatgttggcttccagcttcatccatgtctctgcaaaggacatgatcccattactttttatggctgcatagattccatggtgtatatataccacattttctttatccaatctatcatttatgagcatttgggttggttacatgacttggctgttgtaaatagtgctgcataaatatacacgtgcatgtgtctttatagtagaataatttatattcctttgggtattgtattagtccatttttaagctgctgatnaaaacataccananattcnncaatttacaaaaaaaagactttaatggacttgtagtttcatgtggctgtggaggcctcacaatcatggcanaaggtgaaaggcatgtgtcacatggcagtagacaagagaagagagcttg

SEQ ID NO: 298771 - DNA, 538 bp, Homo sapiens
  misc_feature (1)...(538): n = A,T,C or G
tccctcccctcactcccccacaccctctaacaggccctggtgtgtgctgttcccctccctgtgtcaatgtgttctcattgttcaatttccacttaggtgagaacatatggtgtttggtttcctgttctagttttmgtttgctaatgatgttggcttccagcttcatccatgtctctgcaaaggacatgatcccattactttttatggctgcatagattccatggtgtatatataccacattttctttatccaatctatcatttatgagcatttgggttggttacatgacttggctgttgtaaatagtgctgcataaatatacacgtgcatgtgtctttatagtagaataatttatattcctttgggtattgtattagtccatttttaagctgctgatnaaaacataccananattcnncaatttacaaaaaaaagactttaatggacttgtagtttcatgtggctgtggaggcctcacaatcatggcanaaggtgaaaggcatgtgtcacatggcagtagacaagagaagagagcttg

SEQ ID NO: 298772 - DNA, 538 bp, Homo sapiens
  misc_feature (1)...(538): n = A,T,C or G
tccctcccctcactcccccacaccctctaacaggccctggtgtgtgctgttcccctccctgtgtcaatgtgttctcattgttcaatttccacttaggtgagaacatatggtgtttggtttcctgttctagttttartttgctaatgatgttggcttccagcttcatccatgtctctgcaaaggacatgatcccattactttttatggctgcatagattccatggtgtatatataccacattttctttatccaatctatcatttatgagcatttgggttggttacatgacttggctgttgtaaatagtgctgcataaatatacacgtgcatgtgtctttatagtagaataatttatattcctttgggtattgtattagtccatttttaagctgctgatnaaaacataccananattcnncaatttacaaaaaaaagactttaatggacttgtagtttcatgtggctgtggaggcctcacaatcatggcanaaggtgaaaggcatgtgtcacatggcagtagacaagagaagagagcttg

SEQ ID NO: 298773 - DNA, 606 bp, Homo sapiens
ttcccattgtcttgggcagctccacctctgtgactttgaaggatatagcccctcctggctgatttcacaagcyggcatggagtgtctgtggcttttccaggtgcacggtgcaagctgttggtggatctgccgtattctgggagctggaaaatggtggccctcttctcacagctccactagtcagtgtcccagtagggactctgcatgggggcttcaaccccacatttccctttaacactccctaacaaaggttcttcatgagggcctcacccctgcagccaatttctgcctgggcatccagccattaccatacatcatctgaaaatctaggcagaggttcccaaatctcaatttttgacttctgtgcactctcaggttcaacaccacatggaagctgccaaggcttggggcttgcatcctgtgaagccatggcccaagctctacattggcccctttcagccatggctggagtggctgggatgcagggcaccaagtccccaatctgcacacagcacagggaccctgggcccagccaaggatactattttttcctccaaggcctccaggtctgtaatgggaggggctgctgtgaagattttcgacatg

SEQ ID NO: 298774 - DNA, 606 bp, Homo sapiens
ttcccattgtcttgggcagctccacctctgtgactttgaaggatatagcccctcctggctgatttcacaagctggcatggagtgtctgtggcttttccaggtgcacggtgcaagctgttggtggatctgccgtattctgggagctggaaaatggtggccctcttctcacagctccactagtcagtgtcccagtagggactctgcatgggggcttcaaccccacatttccctttaacactccctaacaaaggttcttcatgagggcctcacccctgcagccaatttctgcctgggcatccagccattaccatacatcatctgaaaatctaggcagaggttcccaaatctcaattttkgacttctgtgcactctcaggttcaacaccacatggaagctgccaaggcttggggcttgcatcctgtgaagccatggcccaagctctacattggcccctttcagccatggctggagtggctgggatgcagggcaccaagtccccaatctgcacacagcacagggaccctgggcccagccaaggatactattttttcctccaaggcctccaggtctgtaatgggaggggctgctgtgaagattttcgacatg

SEQ ID NO: 298775 - DNA, 576 bp, Homo sapiens
ccttgccttctgccatgatcatgaggcttcccaagccatgtggatatgtgagttctccattatacctttttcctttgtaaattgcccagtctcaggtgtctttatcagcaacaggaaaacagactaatatatctctctcctggaaatagcaattggtgcttaatagctttactttcatgctaaatgttccaacattatcagttttccacattggagaaagaatggttctttcaaaatacaaattttgtcatgccatcttcagactaaaaactaattatttctcttctagttttcttggaatgaaaaccaacaacctctacggctcttggtgatgtgtttccaggctttaccccaagyccttttttaagattttgttgttaacttttcttcctgaatcagcgttttccctggtctcacagcaaatggtgggtttcctgccctatgctccctctgttccatgtaatttttcttcagagtattaccagggtttgaaataacatgtatatcttttaatattacttatgcttatttgtgtcactagtctaataagattcacaagggaaaagactatgcttt

SEQ ID NO: 298776 - DNA, 620 bp, Homo sapiens
tatttgttatcttccacctgtgttggcagaggccttaaaaatcttccttgcaaagtgccaaggaaagctgtttgctatcgtgtgctgctggttgtcgtacaccacaggagcagaacactggagaaaccagatgtgacgcaggagccagagggatgctgcttaacttcctggtcatggggtcaggtgctgaggaagcagctggcagctgagtgctcacagctgtggactgcagggcaaggaattggagaacctgcaagcrttgaaggatctgaagagattctgctatcaaattgcctgcgaagagggcagagagtgctggcttcttagtgctgctggcctctgactcccacaagaacaggcactaagaggctgcaagtacccctaggaggagtctgttgtttcatgtgaggtgacctggactgagaaggtaaactccctctgcctattatgcttctccaacccttcttctgacaaagcttcatgcaggctggcacagaaaaataatctttacagagtcaagtaccattttcacaaagcacagtaaatttggagctgaaaggcaaaaaatcaacaacagccacaataaagcagaaataaacaatatgaaaatgaaaacttat

SEQ ID NO: 298777 - DNA, 620 bp, Homo sapiens
tatttgttatcttccacctgtgttggcagaggccttaaaaatcttccttgcaaagtgccaaggaaagctgtttgctatcgtgtgctgctggttgtcgtacaccacaggagcagaacactggagaaaccagatgtgacgcaggagccagagggatgctgcttaacttcctggtcatggggtcaggtgctgaggaagcagctggcagctgagtgctcacagctgtggactgcagggcaaggaattggagaacctgcaagcattgaaggatctgaagagattctgctatcaaattgcctgcgaagagggcagagagtgctggcttcttagtgctgctggcctctgactcccacaagaacaggcactaagaggctgcaagtacccctaggaggagtctgttgtttcatgtgaggtgacctggactgagaaggtaaactccctctgcctattatgcttctccaacccttcttctgacaaagcttcatgcaggctggcacagaaaaataatctttacagagtcaagtaccattttcacaragcacagtaaatttggagctgaaaggcaaaaaatcaacaacagccacaataaagcagaaataaacaatatgaaaatgaaaacttat

SEQ ID NO: 298778 - DNA, 565 bp, Homo sapiens
tttgtgttttttatttatgtccattacagtgcatcaccacaaacgatgttcttatgtatatggacaagatcacttttcctaggaatgtaagtcagttcctcttggctactttagtgctggtgcaataattcatgtcacgaaaaaatgcctgccttcccaccatgagagctctaaacacattgctgctgaccaagagatgtatttkgcaaaaggaggtataacaatgactcatgacaagggatcaagtttttctagtctagtcatcaccatccagaagcaatagtcttattaaaacaatagagtgtactattacatacttcaatatggcactagcttagataaatctccctgatgtgtgggagtgatatccttgaagaaccactatttacacttctccagtatccaatatatgatgttctattaacatggaatccaaggatagtatgtgtggtgtttctaacagtaacatataaaccaatcatttagtgaagccattggggaatttttgttttaaaaccataaatccttaggctttgctgagtcagatgtctgggattctgttcct

SEQ ID NO: 298779 - DNA, 624 bp, Homo sapiens
cagaaatagagaagtgtaacagggtcacattattttccatagaaggacagtacatacatcacagtgatttgattgaatacagctcactacattccaaagaagattgtttcaacatttagcgaagagggtaatgatttcaaaaaagtcttatctctggagctacttgatcttttcatatcattcacaaggaaaagcagaagttgcagctgcatgctatatgattcaggccacatagccatattcctctcaaggctcaaaataatataaagttccaacagcttttagcttaaattatttaattctatagaagtgaagtttcacagaacatttataacaataaatggtattttatttttaattaaagaaggaaatttattcttaatttggcaggcaacgtttttagcataaaaatgttagrtaaatgactgaagattaaactcaaggtaagttgaagcaaatctttagaaaatgtaaagcagaaatcaatgaaatagaaaaataggaaatagaagagataatgaattacactaaagatttgttctttggaaatcattaaaatagtcttcatctatggtttagtaattacactattattataaagccagaaggcaaatgaacaaaaaa

SEQ ID NO: 298780 - DNA, 604 bp, Homo sapiens
tagtttcttttgctgtgcagaagctctttagcttaattagatcccatttgtcaattttggcttttgttgccattgcctttggtgttttagacatgaagtccttgcccatgcctatgtcccgaatggtattacctaggttttcttccagagcttttatggttttaggtctaacatttaagtctttaatccattttttgttccttttctcttttattttttaccttcttttagaaggatggaatactcatttttatcatcactctgtatataaacgtataaacattataatctctatgtctrttcttttactcactattcatttgtggtatccaataggctgttcaaagaaggaccaggggcatttaagatgattcgttctgtcagcctggcctctggagtggagcatgtaagttagaccacccagttcaacttcaatgagtatattttatgtaaggcagattttgtttattataaactactaagattttgctttttgttgttactgcaatataatttaatatattttgtctaatgcacaaattttattatcatacaaaagtgaagacctaggaagtgtgttctgtatagaaattgttataacagg

SEQ ID NO: 298781 - DNA, 607 bp, Homo sapiens
tatgataattctacttttagtttttaaggaacctccatactgtttttaaaatggttgtactaatttacaatcccacccacagtgtataagtattttacttttccacattctcatcaacatttatcttttttttttttcagtaatggtcattttaacaggagtgaggagatggattgttgttttaatttgcatttctctgatgattatttatgttgctcattttttttcatatatctgatggctatttctatgtcttttaagaaacatctactcaggtcctttgcccatttttaataggattatttgatttttgttgttgtgttagtattttgaagtccttgtatgttttggatattagttccttatccaatttataatttgaaaatataatctcccagtctatgggttgtctctttactctgttaattgtttcttttgttgagcaaaacctctttagtttaatgcaatctcatttgtctatwtttgcctttgttgcctgtgttttggggtcaagtatatgaaattgttgcccaatgtcgatacaactcaaagtggtctgcacattcactgaagttcctatcaaaatttcaatgtcatttttcacaga

SEQ ID NO: 298782 - DNA, 634 bp, Homo sapiens
tgctcattgtttttgatgaatattttgcttttccaatgtattagtacttcccaattaaatgttgtaattatgcattttaatcagtttcaatttgtgagaagtggtacattaacctcatctacagccctttcttttaagggtgctgctgataataaagcctagcccattcttgacaagttatyttgactctaactttgtttttcctttgttaatgcaaaattagggaaaatcttgcctactctgaaagaatttcagagactctgcacaaaccagacagcctgtcttgggccatgctaccaaaagtgttcacagtggctgatgtcattttttggtggttttatctcacaattgtactggttcccatgaggaaatgaataaatgccttatatggaatatatagataaaaaataggaccttgaattacattatatttaattttaccaatatttttaaaatattcatttcaatttcagtcatttttctttttatgtactacagatatgtttaaaacaataattttaaaaatatcattagagttcacaattttatattttctttaaaataccccaggcatcattgtccttagagacttctgtaatttaaaatagtcaaatttattaaataaccatctata

SEQ ID NO: 298783 - DNA, 464 bp, Homo sapiens
tctaaaaaatcaacgaggaggctctttgccccaacttattcaatgaaagcagaatcagcctgataaaaaaatctggcaaaaacacaacaaaaataagacaacttctaaccaacatccccgatgaaaatataagcaaaactcctcaacaaaatattgcttgcaaaatgaattcagcagcacatcaaaaagttaattcaccatgatcaaataggctttattcctgggatgcaaagttgtttcaaaatatgcaaatcaataaatgtgatttattacrtaaacagaattattaacaaaagctatatgatcatctcaatagatgcagaaaaaccttttgctaaaatccaacattctttcttgataaaagccctcaacagactaggcatcaaaggaacatacttcaaaatgatgagccatctatgacaaacccacagctaacatcatactgaaccagaaaaagctggaac

SEQ ID NO: 298784 - DNA, 540 bp, Homo sapiens
tgcttcagggctgacttgttttgaagccagtgggcagcagagaaaagcacctggtaagtggtgcagcaggagaaaaygcctcttttgagacacacttttcttatcctcgtcattcctgtacaaacctgctttatttgcagatggtcgaggtcctgaagccaaataataagcaaatgcaattaggggaaatgtataaaatgttcataggtaagactgactttccttcactcctctggctgcaggaattgtaattatttgtagcaggaagtaataagggcaaggaaatttattctggctctatcctataaaatgggtgaaagtggtaatttgtaatcctcagcgggtttgcttcatctgcctgctgaagaaatattgtgcttgtgtggtcttttcagacatgaggatgaacttaaatccctcttctctctgtcaacaatatctattttaggaaagccattctactcttggaaaacaaatgtagaatttttaggataaaaatagattgaataaaccttattcttatatgcaggcattctgaga

SEQ ID NO: 298785 - DNA, 584 bp, Homo sapiens
tgtgtattgcacataaagtactcccttctttcaatagaatctacaaaacgaacattaactttagaaaataaaggtcaatgttatatttatttttttaaatttagattttgatcaactaagctccaagtccataagttgtcctaggttgtttacttagaatcctctgggggaaatttttttttaattgattaatcactggcctccaacttacatttttcatgatgttctttggaaaataaaaaataaagttaatctgatgaagtagacctcatcatcttaccatactttccactttttcctcattttcttctttcattttatatggaaaaataagagacaaggagctttgttttagacatgttttcaacactttcatttagcaaggagggatatggtataatgacattgtggacaacctcctcctgaagctctctatrttgtccatatatgcaaacacacaatcacagactgacatcggcatctctctctcccactgccaatattcttctgatttcaattcttgcctctaaaattcagaatctctttcaagtgttagatatttaatcagattatcctgagataat

SEQ ID NO: 298786 - DNA, 573 bp, Homo sapiens
tagattgcactgcattcctttcaatgatatcrtatttttgcagatctgagtttctggtgtttgtaataaaaagttaaggactgtacaaaaaccagtgtggaataggaaatgaatttggcagttctcaaacaggttccaaggtttagtgttattcctaacaatatccaacgggtacacgcatctcattagaaagtaattatggttattttagaataaaattaaatattaattttttttctttaaatttgtatgttttaggtttccaaatggctactaagttgataggacaaaaatacttatgaaatgtttggggtaaggccacttaataaacaaaattgttatgtatttcttttggcctaggagacccatacaaaactaccgagacagccagggtgacataaactaagaaaggctgggaacctctgttttactacttttttttttttttttttttgagatggagtctcattctgtcacccgggctggagtgcagtggcgcatctgtgttcactgcaagctccgcttcctgggttcacgcctttctcctgcctcagccttccaagtagctgggac

SEQ ID NO: 298787 - DNA, 560 bp, Homo sapiens
cttaaccaaggcggtgaaagacttctacaaggaaaactacaaaacactgctgaaagaaatgatacacaacacaaacaaatggaaacacaccctatgctcatggatgggcagaatcaatattgtgaaaatgaccatactgccaaaagcaatctacaaattcaataaaatttccatcaaaataccaccatcattcttcacagaattagaaaaaacaatcctaaaattcatgtggaacaaaaaaagagcctgcatagtcaaagcaaggctaagcaaaaagaacaaatctggaggcattacaacacccaacttcaaactatactataaggccatattcaccaaaatagcatggtactggcataaaaataggcatatagacaaatggaacagaatagagaacccagaaataaagccaaatacttacaatcatctgatctttgacaaagcaaacaaaamcaaagtgtggaaaggccaccctatttaacaaatggtattaggataattggcaagtcacaggtagaagaatgaagctggatcctcatctcaccctatgcaaaaatcaa

SEQ ID NO: 298788 - DNA, 479 bp, Homo sapiens
aactgggagttacaattccacatgagatttgggcagggaaacaaatccaaaccgtatcagtgacacatactgaaatattttaaaagaggagtttagatgaaaattcatagagctttagaaatacaatgaaggggaaaattttaacagggaaaaaatacatcacaagcaaaattgttcatgttctttcttcttttatgaaaaataratttctttttattttattttattttattttatttatttatttttgagatggagtcttgctctgtcgcccaggctggagtgcagtggcggcatcttggctcactgcaagctccgccccctgggttcaggccattctcctgcctcggcttcctgagcagctgggggctacaggctgtccctatttcttagcctaatttatacattaaataaaatattttccctgaactggtattattacatttttttcttgtttatttatttttaagaaaataaat

SEQ ID NO: 298789 - DNA, 617 bp, Homo sapiens
atctcactatttttggatgggctttttggggttaacaaacatttttttttcaatatacagccctcyctttgatggagttgtcacgtttacaaattaatttaaattatattaaccatagcatacctagacttctgacactaatattttaatggtcatataaaggaattacattgattcttctaaattttgtgatttggcaaactacaatggacaaagacattgtctaagcctaatttgaggaacttacttaaagcagttggtcataaacaattatcaggttatatagcagagagagctaactacccagcaaatatttgtgctgcccttccacatggttattggttatcgaaggtagttattgaaggcatcttcctgaccagagactacattttcttttcagccctctgacatgtgagtggagtcatatgactgagtggggttgtaccttagcctacatattccacacatgatacctattacataaatgaaagaatttctaagtaaagtacaagtctcttaacagtaacataaccactcctgaagatggggtataaatgtggattcagggcctgccatagatgctcttctagcacactgtacttatccaaccacaatgc

SEQ ID NO: 298790 - DNA, 287 bp, Homo sapiens
tctacttttagttctttaaggaatctccacattgttgtccataatggttgtactagtttacattcccactaacagtgtaaaagtgttcccttttcacaacatccccacccacaactattamtttttgattttttgattatggccattcttgcaggagtaaggtggtatcccattatggttttgatttgcatttccccaatcattaatggtgttaagcatttcttcatatgttgtcggtcatttgtatatcttctattgtgaattgtctattcatgtcattagcccac

SEQ ID NO: 298791 - DNA, 603 bp, Homo sapiens
gataagcattgtttctgtagattaaagattaactaaaagtattccttatgggaaataaagggatgggccaaagtaaagggatgggctctggctagatatctgcagcaggagcatgtccttaaggcacagatccttcatgctattgtttgtggtttaagaacaactttaagtggttttccaggtgttccttgccttcattccaataaactcacaactttccagtgtgggcgtcatggccatcacaaacatgtcacagtgctgcagagattttgtttatggccagttttggggccactttatggctagattttaggggcctgttcccaacaaattagcaattcatcaaaaatggttgtcattcaatccattacacatagtttattggcaaggaaattgttagactttgctaaacaatttgctgaaaaaaaatttacctgagccattctctactttatgagttggttacccatatcagtaaagaaattaygttaatttggaattatttttcacattgtacccatattgagtccagtgtaaaagttgctacgtgatggttttcccttcccaggactattttttaccaccttctggtaattgctacca

SEQ ID NO: 298792 - DNA, 533 bp, Homo sapiens
gttattctagtggagacggccaataatattctgccctttcccacccccttgtcataaaatgggtccatttgtcagcacagagcaatcctgatatgcaatgttatgactcagctggattagtcaccagccttccttgggattctctggcagctacaggctggsataaggctgtccttctggaccatgatctctgacatgcggagaggcccatgaagacacagcctacaaacaaagaaaataagagtgataacaagagtaacatttcagctctcatttcgagttgctgagatccaggtcgttgtcctcaaccctgtaagtttccttttttgctgtgagccagcctattgtgcctcttttttaaaaataccattttctgcttaggctagtatattttggatttctgacagtagcaattaaatattttcctgaagggatttattaaggaagcagcagaggaagcattttctcaggtttacgttctgcagtctgccaacacactgtgccttttaatttcagctctatagaaagagtcc

SEQ ID NO: 298793 - DNA, 554 bp, Homo sapiens
tcctaattgtaaagcttgagtgatatcttcagcaattaacagtacctctacattcactctttgaccatgtagcaaagcctgttttcagaggaaaagccatactgaagccactatcaattctcctgacaatcataagagcaaacaaaaagccacaactacatgacttgggaaattgcatataatcatgtcattataaatacttaaaagatgcaccyattgcaatttatattataccctccattaattatccaatttaacacacacagaagatacatgggtatgtgaaaatggcaccaaattgttataagtgaaattcagtaccattgagtggtgactccaattgctaatgtagtctcattactgttgtaaattaacatattacctggtaattgacaggcagttactactttatagaatgcatacttctccttttgaataaatattaaataacaaaataacaaaagtttgcttttacctgccagaggctgtagtatgttcttgcacacatacacacacatacaaatatagatatagatatagatatatacacaaac

SEQ ID NO: 298794 - DNA, 610 bp, Homo sapiens
taacagtatctatcaaactacacataacaacatgcccataaatgtgtacrtgctctccaaagctgtctgtagccatctacccctaggaaaaacatcacacatccccaggggtatgaaaattggagtaaaaggatcactgctccatattacatgattgaattggaaatgcttattcttacaatactccaaaaacaaaatgccaacttcaactaatagaaaacttcattccctcacttctgtttctcaaaattcaaaccaaccaaatactatcattaaatgaatagcttcatgcataaacatctagccctcatcctaacttacccttattgttgcaatcatttcagtctgtactcaggttattatgctttctatcctttgtctacatgagcttctcattcaatttctcctatgtgttaccaaaagtctcctcactgcctcactgcccttttccagttctccttccttattctgcaccaactgcagggatgtgttcctggggtcaacatggctctgggactttcaagctgtatgactttagataagccactcaaactttctaagttttagtttgatcatatttaaaacagcaatggtaaagcttagcttataa

SEQ ID NO: 298795 - DNA, 610 bp, Homo sapiens
taacagtatctatcaaactacacataacaacatgcccataaatgtgtacgtgctctccaaagctgtctgtagccatctacccctaggaaaaacatcacacatccccaggggtatgaaaattggagtaaaaggatcactgctccatattacatgattgaattggaaatgcttattcttacaatactccaaaaacaaaatgccaacttcaactaatagaaaacttcattccctcacttctgtttctcaaaattcaaaccaaccaaatactatcattaaatgaatagcttcatgcataaacatctagccctcatcctaacttacccttattgttgcaatcatttcagtctgtactcaggttattatgctttctatcctttgtctacaygagcttctcattcaatttctcctatgtgttaccaaaagtctcctcactgcctcactgcccttttccagttctccttccttattctgcaccaactgcagggatgtgttcctggggtcaacatggctctgggactttcaagctgtatgactttagataagccactcaaactttctaagttttagtttgatcatatttaaaacagcaatggtaaagcttagcttataa

SEQ ID NO: 298796 - DNA, 482 bp, Homo sapiens
aattagtgatcttgaagacagggtatttgaaaatagacagtcagaggagasaaaaggagaaagaatgaagcatgcatacaggatctagaaaacagcctttaaaggtcaaatctaactgaatggcctaaggagaagatagagagagagatggggtagaaagtttattcaattggataataacagagaacatcccaatcttagagaaagatatcaatattcaagtataagaaggttatagaacaccaaacagatttaatccacataagactacctcaagacattcaataatcaaactctcaaaggtcaaggataaagaaaaaatcctaaaagcagcaagggaaaagaaaaaaataacatacaatgcagctccaataagtctgccagcaggctcatcagtggaaaccttacaggccagaagagagtggcatgacatatttaaagtgctgaaggaaaagaaaaaaacttttattctagaatagtat

SEQ ID NO: 298797 - DNA, 290 bp, Homo sapiens
attgacagtaacgttgaggttttaagcataggaagagaaggctaggacagatggagggttctgtagaggaagctacatatgacctgtgcttagaagacgcaatatgtcgatactgaggaaaagggcctttcaggaaaaggaaacagcatgtttacgaatcttgagacaggaaatttgtgaaakgtatgcagtttggtaactgtggcaaagttacagaaccgaactggggtccactcacctggtgcagtaaaaccagatgtctactctaaggttttgcagcagtagaaaga

SEQ ID NO: 298798 - DNA, 290 bp, Homo sapiens
attgacagtaacgttgaggttttaagcataggaagagaaggctaggacagatggagggttctgtagaggaagctacatatgacctgtgcttagaagacgcaatatgtcgatactgaggaaaagggcctttcaggaaaaggaaacagcatgtttacgaatcttgagacaggaaatttgtgaaaggtatgcagtttggtaactgtggcaaagttacagaaccgaactggggtccactcrcctggtgcagtaaaaccagatgtctactctaaggttttgcagcagtagaaaga

SEQ ID NO: 298799 - DNA, 512 bp, Homo sapiens
atgttgagaaatactcctataaagctctgtatacatttagccactttaaattcagtattagcaagtatttattataactctaacagatgtatgtgaataaatattcctgatgaaagaaaaactttagccagattaaatttaaaggagtttaattgagcaatgaacaattcacgaacaattcagcccccaaaatcacagcagattcacagagacttcagygcagccacagggtggaagaaagtttatagacaaaaaaaaaggaaatgatgtacagaaattggaagtgaggtacagaacgactggtttggttacaggttagtgtttgccttatttgaacacagtttgaacactcagcagtgtatgaatggttgatgtatggtgactgtgattggccaagattcagctattgctacaggcacttgttttaatcttgtctacctcttaagctgggttgcattttgtccacaaggactcaaatatagaagtatggagtccttctcaggccatatttc

SEQ ID NO: 298800 - DNA, 591 bp, Homo sapiens
agactgtgcagatgtgattaggtaaagtatcttgaaaattaattctggattatccacatgggcccaatgtaatcacaaagatcctaataagggagaagggaagaggcaagagagtcagagaaggctacacgccaagtaagcaggccttggagggatgcagccatgagcaaggaacgagaggccttttgaagaaaactaatgtaatatttgcattaaaaaattatgccaaagattttagttcaaattggcagaaggcgcaactgtatcagctttctgtttccctctaaatcttattgcaataaataagattttaacaaaatgttacaaatctataacagcaaggagcacagtgtgcatggcagggatggatcattaacatgcaaacatgattaaaatatttctgacaggttgaaaaaccaagacataaatatcaagagaaatatcagaataaaagaatctgcaatccagtrcaaaaagataggaaggcaaggggagtgctgagagaatatttttcaaaaacccacaaaagtagacaagttttgagagtagaagtgagaagtgggacagaaagcaggttgattatttaaaggg

SEQ ID NO: 298801 - DNA, 634 bp, Homo sapiens
ttgcttggtgtattgacgtttgtaatcctttaattgtacagcatgcagaaaaagaaagtatagtggtttaaaagtagactacaagaaattattatgaattgctgctaaaatttaataaatacatacttatatagtttagcatatctattatttaaaaggtgtacaacctccctgaaggagatattacgagaataaattactaacactttctgtctttttaacttctttactttatattcagatcaactaaacttcaaacagcaaacaagatttatggaagtcttactttttagacagaacagcaacttaatatytggatatcaagaaagggaacctccatcaaaaaaaaataccaacaattttcaatggattttcttttatcaataaggcagcagcatcaaaatatggctacagagggttagatgtgacctattaaagtgattagagtgtcacttaattctagtttttcttttatgactgaaacaaatagttttaactttctggttctctttgtccttatttgcaaaacaagaaaatatttactaatgcttctgttgttttaagttattgtactgagggtgtaaacaaattaagttcaggagaaatcgtttcagagtgaagtagaagcacatac

SEQ ID NO: 298802 - DNA, 607 bp, Homo sapiens
agagtgccttgaaaacacatgaagaccttgccctgaatgagtgggcaaagataccgttaaggggatagttttctagataatcagccatggtgggaacttctgcatttagacatgttttcaattagaattcattcagcctttgctgtgttccatcgtagatgcttgtcaaattttacctcatttttttttcacagacatcccagagctaatatttctccaatttacagatgaggatactgaatcagagaggttaattgatttatctgaggtcatgccattagcaaaaatttaaagccttagcacactctttaaatccattatcccatttcctgctatagtacagatttatctcaaagtggtactgagtagcatttgaattgaatgaaattattgcttgtatgacaagttgggagacccttaaaaaatycagataaattatgatgaatattttatccaaggaagtaaccatgaaaatataaaaaatgaatgtttggatataaaatttagtgaatggcttttaatctttactgtgaaaccagaatgttgaagccccataaagttaattgaagcaatacttgagaaattgattactacctatatgcaaaaa

SEQ ID NO: 298803 - DNA, 605 bp, Homo sapiens
ccacacctggctaatttttgtattttcagtagagatgtgtttttgccatattggccaggctggtcttgaactcttggcctcaaatgatccacccacctcagcctcccaaagtgctgggattagargtgtgcatcaccggcatgcaccaccatgcccagccaacctactttgtcaaatgactccactatacatccagttgcagcagcaatgatctatcctctgtaaacgtgggaaagtgcctcctgcaattaacctgttcacccaggccttcgaccagctgtcattctgctgcttaagctggcccacaagtacagaccagaaacaaagtgctggaagaagcagagactgttggcctgggctgagaagaaagttgctggcaaagaggatgtccccactaagagatcacttgtcctttgagcaggggttaactgtcaccaccttggtagagaccaagaagtttcagcttgtgatgattgcacatgacacagatcccatcgagccagttgttttcctctctgccttgtgttgtaaaatgggggtccattaccaaactatcacagggaaggcaagactgtgacatctaatgcacaggaagacctgcacca

SEQ ID NO: 298804 - DNA, 541 bp, Homo sapiens
atttactatgataaatcgtttacaaatacactatttctcaatgcttaattttaatttctaaacacaaaatatcatactgattaaatacttctttagttcatttggtggtaatagatacatagagtgaaattattcacattaggaattagcaagattctttaaacctctccaatttagtgatgaaatctcaaagccaaaactttcttgttgcaaatattaaaagttagttcttctgtcattagatgtcacaattttagcatttacacaacatctgcctcaaattaaaaactcaaatatattttctttaaagtacatgactgaaccttgaagaaactaaagaaaatcacaagatacaatgtattsttattcattacatctacaataaagaactcaactttttggtgaagtctctcatacatttattccaggtttggctattcagatttttgccttacattttccaaattatatttaaaagttccagataaaaatgcattttaagacttcccaataaagcattatacatctcatttgaaaatat

SEQ ID NO: 298805 - DNA, 419 bp, Homo sapiens
tagcaaccaaaatcaagtctttacttttggaagtttcaatctcaagataaygaaactgtctttgctcaaattttttctgtaaaaaaattcataattgcccttctttacattttgaggtccacggaaatttgtattaacaaaagacacaatcgtccaggcatggtggctcatgtctataatcccaacactttgagaggccaaggcgggaggatcacttgagtccagatgtttgagaccaccatgggcaacatagcaagaccccatttcaacagaaaattaaaaatttttaaaaatgtagcagagtatggtgatgcatggctgagtcctagctactctggaggctgagatggtagaatcacttgagcttggatgtttgaagctttagtaagttgtgatagcaccactgcactctagcctgg

SEQ ID NO: 298806 - DNA, 632 bp, Homo sapiens
gctgggaaaatcagagggtaaatgttctggaattccttttctcagattatgtatcagataagggcaggttttacctagtgatgttctttcaaacaattttgaaaaatcaagaaatgatttgaaaattattagaaggatttgattaataatttgcactacaatatatacttttggtaatcgaatttatgatatatgaagtccggtttttaaagastgctgtaaaatacggaaggcgagaatcacatgtggctatttaaatattaatttaaatgaattaaggttaaataaaattaaaattcagtcctcagtcacactagctacatttcaagtgttcaatagccacatgtggttcgtggctactatattgttctgtgaagaaacatctccatcattgtaaacagctctttcagcacagatttaaggattaaaatggaatatattattatttgtatgtaataaattatatattaatttatattattatcctgattgtgaatattttaatatatatttggcatataattagcaaatcattgctaggcaagggtgccacttcattgtgaagaaattgatttttaaaaaaaaaactaagcattttcagaagttcttttgttaggccatataaatgtatc

SEQ ID NO: 298807 - DNA, 632 bp, Homo sapiens
gctgggaaaatcagagggtaaatgttctggaattccttttctcagattatgtatcagataagggcaggttttacctagtgatgttctttcaaacaattttgaaaaatcaagaaatgatttgaaaattattagaaggatttgattaataatttgcactacaatatatacttttggtaatcgaatttatgatatatgaagtccggtttttaaagagtgctgtaaaatacrgaaggcgagaatcacatgtggctatttaaatattaatttaaatgaattaaggttaaataaaattaaaattcagtcctcagtcacactagctacatttcaagtgttcaatagccacatgtggttcgtggctactatattgttctgtgaagaaacatctccatcattgtaaacagctctttcagcacagatttaaggattaaaatggaatatattattatttgtatgtaataaattatatattaatttatattattatcctgattgtgaatattttaatatatatttggcatataattagcaaatcattgctaggcaagggtgccacttcattgtgaagaaattgatttttaaaaaaaaaactaagcattttcagaagttcttttgttaggccatataaatgtatc

SEQ ID NO: 298808 - DNA, 589 bp, Homo sapiens
catgacttcatgtgtcaatcaattcatgagtgttcaccaattggagctaagctacacacaatgcccagccacgggttcatcttaggaactgtataataggaccaagcatagtagttattcaacagtcaaaagctaacatcaatatcaacatttctaggcatcgttgaagaagtaaaactaccagttaatttagaggaacactttgtagatgtaattaagaaatcctcagtagggatgtagctatgaagaatgccccttacccctacaaacacaaaaaagtgycatttaggataaattcagttttaaatatctaccagacccagcaactatgaaaccatctggtaaagtaaacaaatatgccatttttcttacttttcttctgattcctagctcctactctaaagaaataggaaagtgtttatataaatttcagaaaaggtgaggagcatagaaagaaacaggcaactgttttctttcctagacaccacggggctgcgcatagccttttctacatgagaggagaaggaatagctataactctaagtaaagctagaaacattacaggaaactgaatattctaagaaggcag

SEQ ID NO: 298809 - DNA, 589 bp, Homo sapiens
catgacttcatgtgtcaatcaattcatgagtgttcaccaattggagctaagctacacacaatgcccagccacgggttcatcttaggaactgtataataggaccaagcatagtagttattcaacagtcaaaagctaacatcaatatcaacatttctaggcatcgttgaagaagtaaaactaccagttaatttagaggaacactttgtagatgtaattaagaaatcctcagtagggatgtagctatgaagaatgccccttacccctacaaacacaaaaaagtgtmatttaggataaattcagttttaaatatctaccagacccagcaactatgaaaccatctggtaaagtaaacaaatatgccatttttcttacttttcttctgattcctagctcctactctaaagaaataggaaagtgtttatataaatttcagaaaaggtgaggagcatagaaagaaacaggcaactgttttctttcctagacaccacggggctgcgcatagccttttctacatgagaggagaaggaatagctataactctaagtaaagctagaaacattacaggaaactgaatattctaagaaggcag

SEQ ID NO: 298810 - DNA, 449 bp, Homo sapiens
tatgctcatggacagtaagaatcgatattgttaaaayggccataattctcaaagcaatttatagatttgatgctgtttctattaaactaccaatgacattcttcacagaactaaagaaaaaagacagtttaaaattcatatagaaccaaaaattgtccaaattgccaaggcaatcgtaagcaaaaagaataaagctggaaacataatgctgcccaactttaaattatactgcagggctacagtaacgaaaacagcatgatactggtaaacaaacaaacaaacaaaaaactagacacatcgatcagtaaaacagaatagagaactcaaaaataaggccacatacctacaactatctgatcttcaacaaacctgacaaaaacaagccatggggaaaggactccttagtcaataaatggtgctgggagaactggctagccatatgcataaga

SEQ ID NO: 298811 - DNA, 592 bp, Homo sapiens
cagttctggaggcttggaagtctaagagcagggtgctggcatttggcatttctgcatcatgccatggcagaaggtggaagaacaagagagtgagagagaacaagagtaagcaagagggggccaaactcacttttataacaaacccactcaccagacaactaacccactcctgaaataatattaattgattccagaaggcagaaccctcatgactcagtcacttgttaagacccacctcccaacactgttgcactagggactaagtttctcgcacatgaactttgggggacacattcaaaccatagcaaatgcaaaagcagcaattctccacactttaaaactgatcattaatattttaataggcataaacaatataatttttgcataattaaatcttcttaaatgttattttctaaattttctggcagataagatttctgttttatttgtatattttactattcaattaacaatctgtctgggataaaatgtrtaagctgcgtttggacaatttgcagtgttttgccaatttgcatagatactaaccatttcatttaaatattcaaataaatgcaaccaatacaggagcacc

SEQ ID NO: 298812 - DNA, 581 bp, Homo sapiens
attattttgaaatcttaattcgtacattgtctttccctttaggtttacgtttgtctgtttgcttgcttttttattttattttaaattgacaattcacaattacatgcttttatggggtacaaaataatgttataatttattaatacaatgtgaagtaatcaattaacatatccataacctcaaatacttaactttttatgtggtaaaaccatttgaaatttattctcttagccattttgaaatttatagtacactattattaattgtatctatgacactgtgcaatagatctcaaaaaaatattgctttttttctgagttcttctaccttttgaccatcatctgtcattcctctcatctcccagcctttgtaatcacactgctctctgtttctgtgagttttggttggttttgattccacatattatgtgagaaccrgtgataattgtctctctgtgcctggcttatttcattaaatataatattctccatttcatctatgttgtcacaaatgacagataatttcattcttttttaatgctgaatggtatttcattgtaggtatatgccacattttcttta

SEQ ID NO: 298813 - DNA, 578 bp, Homo sapiens
tgaggtgatatattttagattattagcttatgaatttttaatatttatctgaatttagcttgtttatacctaatattacataagtatgccttctattgcatattttacaccaataagatcactgttctgtcacatacaaaaaaaaaaaacttttccacaaagtattaaatcatttattttctcctttttcaaaaattatcttcttaatttctactttgatgtttattactttaatttcatctgctttcaagtgtactctaccattttttaaacataataagtttgaatactacttattcactttttaaattattttactttgtgttttagagacagggtctccttatgttatccaggttggccttgaacttctgggstcaaggaatccttttttctcagcctcctacagagctggactataagcatatgccaccatgcctgactcactactcatttactattgattcttatttttgcaatatatttattaatagttacaaattgtttaagactttttccttacatactagaaattttgctatataggggtttttttttagtttgaaattgtaattcca

SEQ ID NO: 298814 - DNA, 547 bp, Homo sapiens
ttcacttatatgtaatttcatacttccagttccacaatttggaaagcttaaagctattcttataacatctgcttcatttacactccatattttgtctactgagaaattctgctaactgtagttttaaaatatatctagaatacaaccaattcacatcacctccactgctaccatcctggcccaagcagcatcacctctagctttgatttggggaataaacaccaaacagtattctctgcagctatccttgctctccttaagacaaagaagacatacagaaaaatctaataaattggagcagggtctatagcttctttaccccaaatcctctattgatttgattcayagtaatagtcaaagtctttgcaaagttctgcaagcccaacatgatttagacattcttcctctcttaatttttatcttcctacaccctgaccttcttcctcttcctgttccttgaccatgccagcgcatatcccctgtcagaaattttattctatctgttctctctgctgagatgttcttctctcatataactcattggtta

SEQ ID NO: 298815 - DNA, 592 bp, Homo sapiens
tctccacggagagccagcaaggcatttagaaggtggtaatttgagccttaattagtattgattcaaatggatactcatgacaactgtgttcctctagaaatgacatacaatgaattctactgaattcttacctaccttcattcaatcctaaacattggtgatagtagagtttggaccctacatagaagcgtgtccacaattatctgttaagaacaatatttggcatgcaccatttcagctactttgtctttctatactggctcaataataacgtcattgaaaagaatcctaaattatatattttgcataaaaaaattgcagtgaacacttgcacatatggactatataaaccagaacattcaaggattttagagaatgaaggaataaccccaatttatctgaacatgatactataaaaaacacatttctctcataaaagtggaaaattactgtcataaaagtcaataacactcaggagagagatcaaatgttagaaytgcaggaaccttcgagaccttaatcacttcacttttcaatgaggaaataaatatcaaaagctattgtgacctatacatgatcaaacagctaattc

SEQ ID NO: 298816 - DNA, 547 bp, Homo sapiens
aaatttacagataagatgctcagaaagccaggtgtggcatctgcagtagtccagtcccrcagagtgagggaggtgaaagacccccacagcttcaccatggttgcctggatcccttcctggcaccatgtcctggcagcctgccaaaggactgagcatttgtttacctatgaatatgttaacaacccactagattcttggttttgggagcctggagaaggctaagtgaaacctgaattctgtcacagtctagggaataatacatgttaaaatgaattctgggcttccatcctgcagcattttagccatgtggctggtccaggattcgattcttagagtcttttcaagcatatgatattaggagggatgaaggcaaacaagcgttgtataaatcacataaaaagactaagatttccatttctgagcttgtttttgggtgatgagaaagtttggtttgtcagacaccctacaaattacattatgtataaatgacaatgtaaatctattcatttcttttctgatttccacttatcccctttagtaagaatat

SEQ ID NO: 298817 - DNA, 581 bp, Homo sapiens
tgtccacattgacattttgtgttggtgggtatgcagacaagtgtgtatgagtacttttgtatatcctgggcaataaaatttcaagattttgctattttaaattgctgaattgaaaaaatagctatttctgggtcatataccatatttgcttggatatcatgaaccctttgttagcagacagattttcagtgtatggccagatttaaaggactctttttgggtattggtgaatttacactgaggatttcatgttccactgcaggcaccttcttctctgacctctctctgacttaaagctttgtccccagtctctcgctgggtctcttcctcttactagcacaaatgccagactctgccctaaaactttccttcaaaactccacatattcttatgtcctcatagtctcccaagctaattgcaagtttcctcaaaaaaaatttctgtccttaaagacataatgtatgactgaaaacccttcagaccccctattctcgaygtaggaaaggcactttatatcatgtaagtcctagtaaggctgaagctacaaaagaagcctataaactttccaaattcattcttgc

SEQ ID NO: 298818 - DNA, 527 bp, Homo sapiens
aagtgccattgagattttgatagggattgttttgaatgcatagatcactttgggtagtatgggcatcttaacaatattaagtcttccaattaattaacatggkatatctttccatttatttacatcttctttgatttctttcagcaatgttttgtagtttttagtgttcaaatcttttaccctcttggttaagtgtattcctactattttattctctttgatgttaatgtaaacggtcctttcagatcgttcattgctagtctataaaaatgcagctgttttcttggtgtggtgattttgtaacctgcaagtttgcacgattcatttattacttaacagtttacttgtgcaatctttagaattttctacctgtaagtttacgtcatctgtgaacagagataattttacttcttcctttccaatttgaatgcctttcatttctttttcttgcctagttgttctagcttgcctaattgctgtaggacttccagtcctgtgttaaatagaagtggtgagagtgactgagt

SEQ ID NO: 298819 - DNA, 591 bp, Homo sapiens
ggtgagactagactgtcatatgtgggtgacctggacaggataaatcataccatctgggccaggcagactggctcatgtctgtaatcctggcactttgggaggccaaggtgggaggattgcttgagcccaagggtttgagacaagcctgggcagcatagtgagacccatctctaagaaaaaattttaaaaaattagctgagaatgggggtatatgcctgtagtcccagctactcaggaggctgaggtgggaagactgcttgagcctgggaggtggaagctgcagtgagccgtggttgtgctactacactccggcctgggtgacacagtgagagaaccaccacccccctcaaaaaaatrtatctcatctggacactgtctctctgcatttgttgactctgctttcttctaagttgtctgcattttcaggcagattctctccataccatgatgaagatggacctagcagtaccagccttacatccattcatgtaaccgcctcttaagaaagaaaccttttcccaatgagtctccagcaagataccttgagctcctctctctggcatggcttggttcatgtacccattgctgact

SEQ ID NO: 298820 - DNA, 595 bp, Homo sapiens
gtttattctagccatctccctttctttattgataacttctttctctaacagaaakaaacttggttttcattatctataatatgtttacttataatgttcaacactagcacacaaagtagtttcagaattgctaacttagcacgcttgtgagaaacaaatttaccaactagagtacagtatttatgtacattctttttgtctttagccttatagtgtccagtcaagatactgttttccaaagtgacttagttcagatcctttcttcctcaccttcttcaatgtagttatgtcattcatttgtaattcagttaagttcatttgtcacagtgcttactggacagccaatgaggtcatgcatttggagtgcctaatgcactacctggcatggagaagggccttaagaaatatgagctgaacctgaatttgtggcactgattagtgctgtccatcaacctcattactttggctccatgaaatgtcaaaagagctttgaccaggtttcaagtgtctgtgactcagaactaaggtaactggcccacaagaatcaagtcagaagtgctgccctcattagcatcatgttctagacagctgagcc

SEQ ID NO: 298821 - DNA, 490 bp, Homo sapiens
tccttgatcatgccccttgaatctttatcttctctttgcacaagttggaggtatttgttgagctaaagatcacagkgctggtttggtcacctcttagatgttacagggacctatcaagcagcaattccctaggagcttcttatccaatcattattggctttggggctttaactgaatatttcaagatagcaaaagtgtcattcaacatctgttatgtacacagattaccacccactacttataataaaccatttctctccctttcattcataaaatcatgtcaaatgcaagtcaaagagaatgaaattattatacagaaatctgaatctgctctaatttatgttttaaaatatattattcacaaacttggatgcttgaagcatgactaataacaagtttcttttgacacacctcaaaagcgatgctttgctacatatatggagcccttcctttgctcagggaattataatcatatgccagtgtgactaac

SEQ ID NO: 298822 - DNA, 505 bp, Homo sapiens
attcttagacactagtttaacacttaagtaatgtaaaatcactgcttttgtaattayatattgggaaaatctctccattgccagacacagtatctgccatgtaagtgttcagtgaaaacgatcataagactcatgatgcatgccttctgagtattaatgtcagtcactaaggcagtctagggctgcagtaaaggaatggggataggtagcgggtggtagtgggtgagattctcttcagggatctttgtttttgttttatttagaactaaataggcaaataatatttctcatttatttatatttaattgaagatagctctttgttaaagaatatgatgtttaatgtttgtttgttttgtgtaggttcttatttgaaaaccagacaccagcccatgtttactataggtggaagctttattctattctgcaggcaagtagaatcaattactttgttaattttgactctgagtaattagacctttataataactctaaatgtttgttag

SEQ ID NO: 298823 - DNA, 505 bp, Homo sapiens
attcttagacactagtttaacacttaagtaatgtaaaatcactgcttttgtaattacatattgggaaaatctctccattgccagacacagtatctgccatgtaagtgttcagtgaaaacgatcataagactcatgatgcatgccttctgagtattaatgtcagtcactraggcagtctagggctgcagtaaaggaatggggataggtagcgggtggtagtgggtgagattctcttcagggatctttgtttttgttttatttagaactaaataggcaaataatatttctcatttatttatatttaattgaagatagctctttgttaaagaatatgatgtttaatgtttgtttgttttgtgtaggttcttatttgaaaaccagacaccagcccatgtttactataggtggaagctttattctattctgcaggcaagtagaatcaattactttgttaattttgactctgagtaattagacctttataataactctaaatgtttgttag

SEQ ID NO: 298824 - DNA, 488 bp, Homo sapiens
aacccacagacatggagggctgactgtayttcttattcttgcaggatgttaacaaaacaatcctcttttctgaactccttacccttaaatactttatttcaggaatatcagttatatcattatacttacaattttctataatatgaagcattagcaactttggctgaagagttgtacaaaacatcagaaaccaaatataatctggcaatctataatatcaaaagataacacaaaataggttaatataaggctaatgtttagctataatttaattatggctactaattagaagagttatatgaagctcagtatcaccacaactatgactctggcagagatgaaatttgttaacccatttacatttcaacttgtttgttaacttgtatgttaatgaacctaaatttccaagcagaaataacataagactgcatgggaaaaatctcatcagtcaagtgctttgtgcaaaaaggaaaccaattctaatccca

SEQ ID NO: 298825 - DNA, 584 bp, Homo sapiens
gcaggtcagggatggagcttgggaatctgcatttctaacaagttcccagggtgtgctgatgaagctgctctgggcccactctttgagaaccactgagttagcagtaaccaagtccagcttagagtaatccagttcccttgcctcctcccgcatatctcctgttactgctcacatcacatttttagcagaagaaaaagcaaaagatgattcttttactcttcttggtgccagagcaccagggtcaacaggagcagcccaggagtcatgcttacagcctcaggggaaggttttaaaaacatattattaatacataacaaatgctggcagcatttaactttttttgaccatccagcattgtcttctgtttattttttactttatttttttgtgtgtgttgctggcagtgagtggatgaaacctggtttctgtcgtgtttcacaatgattgasaatgttttggggcaactgttggcatagcaagcccagggaaggccactgttcggctggctctctgggagcaggcagaattgatgaaataatcacatgtacagcctccttctacatccctctttctcacctagattg

SEQ ID NO: 298826 - DNA, 476 bp, Homo sapiens
gaccaccatgttcacagaaatgaagtctctccccacttccagttcacaaactcttcatcccatcacactgtttattgccttcattgcacttaccactacctgcatttattttgtttgtttatctcttattatctgcctcccactagaggaatgtgcctgacttatttactttctggcacatagtatccactcaataaatgtttcttaaataaargaacaaatctttaaagtctggaaagaagcaccttatgactacttaaacaagtttagttggactagtatcccttctctatggggagtaaagacaataaaagtataaaattcccgggagaagtccaggatgaacttcaaatcttctaccttacttggaattcagcttggtcacgacttgaaatcaggagacagtgccaggcctggaagtggtttctacaatgtccatttatgggtgacacatttggggaaaggatggatttaag

SEQ ID NO: 298827 - DNA, 610 bp, Homo sapiens
gtggccctcagtgggcacagtccaccaacacagctggacgtgttggccagagtaagctgccgttcactggaaatattctagagaaggctgaccgtgtgctggtcaggatggaaaggtgggggtgcctgccatgtgttgagtgagtacagcctaccaggatggcaccttagttcctccaacatgttcttaaatggatcaggctggtggttctcaacatgtgggccctggaaagtatatccagatcacctaggaacttgttagaaatgcagactctcaggcaccccaaactaactgaatcagaaactctgggaatggarcccagcaattggttttaacaaacccttcacatgctcaccaaagtttgaaagacactagtttagcttatgctataggtagctccttgctacctgtaagtcagaagcagcacagaattggaatgcaggcaaccggtcatttattcatctactgaggtattcgtacaactcttccaacatggtgaacatcttgtgctcatttgtctgattttcacctaagaatgtgaagtgttcagtatctagccagcttctcagctatggttggcatccgtgtaatttccagtgataatctgact

SEQ ID NO: 298828 - DNA, 508 bp, Homo sapiens
atggtgactttgtctgggagagaggtggaaaaggagaggggaagaggaaggggaagagagagaagaggacaatgatttggcctggatattgactaacataaagagtagggggaactctagaatgagattgttgaactggagttgagagagtgggtggagtggaagtaaargtgaattattttactaagaataaaaagaaatatcagcaacagcaaattaagctcagtttcaaccatagaccctggttgaattatttcccttcctgacggcaaaacacttacagagactgcctgaaaatctgaaatgaaaagtatagctttgccattcaacagtcatttgctaaagtctgttatgtggggcatgagtctcctgccatacccagtggagaaattctgactgccttcccctccaagaggtgacccactcagattaatacctgggatacggtacagacagagctttcactagttttccacatttttactaactcagagttttatgttcctct

SEQ ID NO: 298829 - DNA, 308 bp, Homo sapiens
agaatgcattttcctagcagtgaatactcatcctctccatcaggtgccaatttggcagcttacactatgctatatcaacttcattcatcttattttatttagttgttcaacatatattgttgagtacctgttatgtatctgacattccrctcagtgtagaagatataaacatgagaaaggcagtctctgccataaagagattacagtgtggtgggaaaggcagccgtgtaaacatgtaatttccacagaatgggacaagaagtatgatcaaggtttgaagtcattgctgcagcattagatgtggagac

SEQ ID NO: 298830 - DNA, 551 bp, Homo sapiens
atcacaatgattcacacctgtaggagctgagggcatcggaatcacatatcttcttatttcacatcaacaggcaccaaaacgcacccactcccacatctattccactgccaactaggtcaaattctccgccactaaaatygcactccttctacgtcataaaccaacacattcaaccttagctacagcctcaatgtttctgttgggatgaatggcaatctcagtcaggaggagtgatggcctaagtctttgcaggcacacgcaggtgtgagcacacagataccagacagcaggtagccacgctgcaaaatggagggacagtattcctttctgataaaggaggacagtgtgagagcaggtgctataaggatggctctctactccatgataatttgcccacctgaaaaagtgtccaaagatctggactcaaagaacataccccaagacatatgaaatggcaaaacatggtgtaaaagtaggtaataaaatggtcttcgcttgctgtggggattagttctaggtacagtgcagttcatctagggagagtgaccatt

SEQ ID NO: 298831 - DNA, 551 bp, Homo sapiens
atcacaatgattcacacctgtaggagctgagggcatcggaatcacatatcttcttatttcacatcaacaggcaccaaaacgcacccactcccacatctattccactgccaactaggtcaaattctccgccactaaaatcgcactccttctacgtcataaaccaacacattcaaccttagctacagcctcaatgtttctgttgggatgaatggcaatctcagtcaggaggagtgatggcctaagtctttgcaggcacacgcaggtgtgagcacacagataccagacagcaggtagccacgctgcaaaatggagggacagtattcctttctgataaaggaggacagtgtgagagcargtgctataaggatggctctctactccatgataatttgcccacctgaaaaagtgtccaaagatctggactcaaagaacataccccaagacatatgaaatggcaaaacatggtgtaaaagtaggtaataaaatggtcttcgcttgctgtggggattagttctaggtacagtgcagttcatctagggagagtgaccatt

SEQ ID NO: 298832 - DNA, 563 bp, Homo sapiens
catcttgtggaagctgggatgctttcctcgcagactgagccagaaccccagctgcctcctagtgaaggagggagttttcacttccagcatttgcttcatagtggagaaactaattgtagttctattttcaaaagaaacctactccagacacatacatgtacagtatacgttagtgggctcatatgagaaaatcattactttagatgcccttgtttgtgtatgagataaaacaatgttcttttccctccttcgattgcagtgggctcaggggtacatgttttaagaaacccaaaggaagaccataatgaagttataagctgtcagaactaagtgcttgctctaggagcatacttcaaaggccaaatgtgcatatttttcctttgaaaagcwtaatagataatattactgctattcaacacaggaaatcaattaaacccttatgaaaagaaaatcattttttagatgatcagtagttaatatggaatctattttcctcaaacagaacaggtcagcattttcagataaatgaggcatgttttttgtaggctctttcaaccgcaatg

SEQ ID NO: 298833 - DNA, 604 bp, Homo sapiens
agtagttaatatggaatctattttcctcaaacagaacaggtcagcattttcagataaatgaggcatgttttttgtaggctctttcaaccgcaatgcttattaaatttatgtactttgcactaactcgaatgaataattgtttattttttgaggttacttaatataagctacagtagagtcaggtcttgccaaaattttctcactgctttacgccacctaatttgaaattaggactatatgaaatcattcattgaaaaatgcgattccttccaacctcagcagaaacaagaaaaaaaatacaattcttaaagaaggaagtaaaaaagtaccttratacaatattttatctgtctggaattaagcatcacttcctagataatctgagggaaattctgctgacattgatgacaatataatgagctctatttttaataaaaccgtgatcctcagcatagggaaatttgttccaagatatgagtagctaaaatgttaaataccaaagttagaggcttttggccttgactgaacaggaaaccaagaattcaaactgtgctggaagaggcaaaaacaaagacccattatgtttgcgctgaacctggctgta

SEQ ID NO: 298834 - DNA, 616 bp, Homo sapiens
ttaaattttggcttttcaccctcaattatttttggagattatactggaaatgacttaatgacacactagatagtaaacttcatgtggattggggttacaggcctttttttttttttgctggcattccttccataccagcaccatggcctagacagagtgggcactcaataaacatttatagaatagatacttgctgacttaaatatagacatagataattatactagtacatagcttatttttagaacatatctttcattcataaattaaagatgacctctggaagctttaaagaagtaactttgttggaaagcatgggttttaaaagtattaatggacagttgatactacatgtaataagtacacaagtcctatgtcatcatccaaagtgatgtctcagttcttagagttttggaggcactgaactgaggaaagatgaaaaaatgatgtttttgctcctgcttggcattggcagaacatatttatgtcttactgacattaatgtctattggccaaattacatgtcagttcatttaatccctgggcaccaaaccctgcaatgctttcctgtcacactcwgggtaaaaaccaagttccccattccccctgattgcat

SEQ ID NO: 298835 - DNA, 576 bp, Homo sapiens
tacaacaatctataccatatatactttycattttcctttttatattatttattttatgcctctattatgttattgcatttcatctccacagcaattttgtaaaacgtacattatctctgagtgttacctcaaatttttctacctttctttctttcccccacctttatttgtattcactgtattgtattgtattgtattgtattcatttattctttttgaatagataccaaatcctatacatgatccagaatctaaaatgtatggaaaggtctgcaataaacctcatcccttaaccatccaggtcccctcctcataggcagtgttgttagtttctttgtgtccatccacagatactctttggatacccttttatattcttctttctctttgtatatatggatgtcacataccgtgtacactgctatgcactttgcttttctcacttaaccatatttcttaaagattatttcatattattctataaatgttctcttattctttttttacatttatacagcattccagttggtgatttattcccagatggtttatttaactagttcctgttgatggaca

SEQ ID NO: 298836 - DNA, 598 bp, Homo sapiens
gatgtggtggcccgcacttgtggtctcagctgctctcaaggctgaggtgggagtatcactagagcccaggaggttgaggcaacagtgagtagtgatcgcaccactgcactctagtctgggtgacagagtaagactctctctcaaaacaacaacaacaacaacaacaacaaacaaaaacaaacaaacaaacaaaaaaaccaaccaaaaaccctctcaaagccccccagaaaaccaaataaaatttccctatataccatgtttgttaagtgcctgcaggattttgtcttagttctgaaaaacattgccaacaatttgtaatgcactcacatgttcccctcacttaaaggatactgatactaccttacccttatktgggggtacatcttttccctggcaaggaatttttgctcattgactcacacttttctcaaaaccatagcatgtaagtcaagacaagaggacagaactaattcatttctggtaggattaggtcacaattacactagtttcttttttgacatcatatttcacctagctgtagtcacttttgttgtgaccatataaatcatttcagatccttagcactaagcaatttcct

SEQ ID NO: 298837 - DNA, 629 bp, Homo sapiens
taattaatatctcttatcatctaccacagggttatggttataactgaataattagaataaattgtgcctgtcagaaagagtggtccctgctccacaacaaaatgagaagaaaaagggcaatgatatatatgcacataattccttagctttaatctcaaaatcctaaagcttgtgaagacagaaagttttttcataacttagttggtggcagaagctgacctgatttcatatgagtgtttcatagtctttattgatccaacttagtgtaaatatttgtatgcttcactgcagaaatattcatgtgtttgcaatggggcattcccccagatgtcactggggtagagttctacccattgcggtagagcacaatactatcttcccgaacccccccacycctcaaaaacccaagcaaacaaaactgaattatttctggcaaggattttggataaggaactatgggcctgtatgtatgtatctttttgaatctaccaaccatattttctcagaaaggcctatcctttatttttcttgctttgggggtaggaaaatattatttctttatgttgtgatagcataaatattggtttgttctgttttcagataactttatttagcaaaatagaaagatt

SEQ ID NO: 298838 - DNA, 511 bp, Homo sapiens
tgcattggctctcagttcttggtgtacagttgaatcaattgaggaccttaaaacgctacatgaaagactgggctatgccctttgagattctgattctacagttcagtttcacctccccataaccctctacatttcaaatatgccccctccaggtaattctgatatactccagaggctgaataactactggattttcacacaccacaggctttactcatttcccagaaactgaaatgtccagggactgcaagagaagaaagaagtgtgggaaatctccctgcagtcttctacttttttttttttttaataacctcctttccatgctcttgtagacagccttctgagttaarccattatcatacttggagactcaaggacaagtttaaacatctattgtgtatggctatgctaagtagtattgtttttagcagttgctaaatcatttccccaaaatattgccagttagtgtataataattggtattcacattgtacaattggttgacgtatga

SEQ ID NO: 298839 - DNA, 511 bp, Homo sapiens
ggaaatcctgtgtactaactcctttttcttcatttgcagcttcactacatatttcccttagttcttagcaatttaccctccacacttcaaccaggcttcacctgcctttgagttaaccagtcaagcagaggaggcagcacaaaaggaggcacgctaggaaagaacgaaatacaaggagaagtgtaataaacttggcatggggacacaggagtaatctgcctagagtgccagggatggmttcacagaagaggtgaccagtgagctggaagagtatgtaggacatcatcagtggaggcctaagatatgaaatggctgagcagaaatgtcttaggaagggtgctatcaactaactgtacttgcaaaaatacacataaagaaagataattgataagctttaaagcaactggtcagagccttttaacttccactctaatgattgttctcactttctgttttagtaattgaaccgctaaattttagttgggctcatggcccctgagaaaaaaactat

SEQ ID NO: 298840 - DNA, 574 bp, Homo sapiens
gtgccaaaatcttgtggtagtgttaccataaatcmttacctttattatgttgtataaataaaccttcaatgaatacgtataatttttgtaatatcctctaaaatgttaatagatgtctacttctaaaaaaggcgtcaaaggcatgggaagctccatggccaacacagagatataagtcaaagtcccttcctcagtatctactgacttctttaggggtggggtatgagtcattgctactgcaaggctgtgggtactagcatatcaggtaccctggtgctatagactgaatgtctgtatcccttcaaaatccatatgttgcaacctaatccccagtgtgatggtattgaaggcggggcctttgggaggtgatgaggtcatgagagtggggccctaatgaatgggatttgtgcccttgtaaaagacatcccaaagatctcccttgtcctgtccatcatgaagggacacaatgagaagacagctgtctatgaatcaggaagcaggccctcaccagacagtgaatctgctggtaacttgatcgtgaacgtcccagcctccagaactgtaagacataaac

SEQ ID NO: 298841 - DNA, 526 bp, Homo sapiens
aaaataataataatctcatcaaaaactgggcaaaggacataaatagacaattctcaaaacaagatgtacaaataaaaaaatatgaaaaatgctcaacatcactaatgatcaaggaaatgcaaatcataaccaaaatgtgatgccaccttactcttgcaagratgaccatgattaaaagatataatagaagttgacatgaatgtggtgaaaagggaacacttttacactgctggtgggaatgtaacctagtacaaccaatatggaaaacagtatggagattccttgaagaactaaaagtagaactaccatttgatccagaatcccactactgagtatctaaaaggaaaataagtcattatatgagaaagatactttcatatgcatgttgatagcagcacaatttgtaactggaaaaatatggaaccagcctaaatccccatcaaccaacaagtggatgaagaaaatacacacacacacacacacacacacacacacacacacattatttattatgtcaatagatggg

SEQ ID NO: 298842 - DNA, 524 bp, Homo sapiens
taagttggttgccaacttgatattttcctttaaatccagaagaaatttagtgcaacacaaagcttcagcaataccaatcatttttctctctttctgttgcttcctaataatttctatcaatcttaagatgcttccttcaatgattgtccttagagttattcctcaaaaaatgttttttaaaatatagtaaaatttacctaacataaaatgtatcattttaaccattctttttgatgcatgtatttatttatttttactgggtgaaatatacataaaatatatgactttagatgtacagttcagtggcattaagtgtgttcacatggttgtacaaccattatcactatacattttgagaacttttacgtctttctaaactgaagctctgtaccttttaaacaataactcccaattcctcyctcctccttgggttatttctttgatctaaggtattgtcatcagaaactgtcaccaaaaatgcacatatgtttcctgggtatggagaaaggctagcacattaacac

SEQ ID NO: 298843 - DNA, 662 bp, Homo sapiens
caatgtattttgtcattttttctgctaaattaaaaaaaaaaaaaactaagtaatcccagggtctatttcaatagattttttttcctcttgactatgcatcccagttttctgggttttaaatatgtgtcttataattttaatgaacacagtagatgatactttacagagataatatgttctgttatgctcctctgtagaattatttttgttatagaaggttgattatcttgaacttgtggtattcttatcttacttttataagaatgtcttgttttgttcgcagaaaaatctctcagttctggatcatagcatttacttctgaggtatggctgtttttgagtttcagtggaagactctgacgtttcaaataccaaggctctttacgttgttgggacccaatttgttctcctctacggtgagtagcagctaaaataccttctaaactttttcaagtttttggctgttgatttccactgaacttcatataatgtcatccacacatgcacaatacagacatcagctgagaattaaartttgttttaggttggtgaaaaactaattgtggtttttgccattaaaagtaataacaaaaaactgcatttaattttgcaccaacccaatatgtagatttttggggctccccactctgtgccattctcttt

SEQ ID NO: 298844 - DNA, 620 bp, Homo sapiens
agtcatgaataagaaaaatctggagagagtgaaactaaaatgttcataattcttcattctatatgaaagggaactggaagttattctttctgattagatatgtccatatgcataagtataaatttaagaattattgtagaggccaggcgtggtggctcacgcctgtaatcccagcactttgggaggccgaggcgggcagatcacgaggtcaagagatcgaaaccatcctggccaaaatggtgaaacctgtctctactaaaaaatacaaaaattagctgggcgtggtggcacgtgcctgtagtcccagctactcgggaggctgaggcaggagaatcgcttgagcccgggaggcggaggttgcagtgagctgagatcacgccattgcactccagcctgggtgacagagccagactccatctccaaaaaaaaaaaaaaaaaaaaaagaattattgtagagtatattaattagctaacaatttaataggcagctacaaccttccaaatttacttaccttttaagatsaaaaaacaaaagaaatcataagccatacaataaaaattagaattaaacaataacaatagataaatataaaattcagacccaaatagtaaggtgagag

SEQ ID NO: 298845 - DNA, 548 bp, Homo sapiens
taattttttagcagatggcaagatggccaaatagtaacagctcccatctgcagctcccagtgagatcaacacagaaagtgggtgatttctgcatttccagctgaggtacgcagctcttctcattgggactggttagacagtggatgcagccyatggaggttgagccaaagcagggtggggcgtcggttcacccaggaaggacaagggaattccctcccctagctaagggaagccatgaaggactgtgctatgtggaagagtgcatttcagccaggatactacaattttcccacggtctttgcaactcacagaccaggagattcccttgggtgcctacaaaaccaagggcctgggttttaagcacaaaactgggcgaccgtttgggcagacactgagctagctgcaggagtttttttttttttttttgtatactccagtggcacctggaacaccagtgagacataactgatcactccccttaaaagggggctgaagccagggagcaaagtggtctagctcagtggatcccaccaacatggagcccagca

SEQ ID NO: 298846 - DNA, 548 bp, Homo sapiens
taattttttagcagatggcaagatggccaaatagtaacagctcccatctgcagctcccagtgagatcaacacagaaagtgggtgatttctgcatttccagctgaggtacgcagctcttctcattgggactggttagacagtggatgcagcctatggaggttgagccaaagcagggtggggcgtcggttcacccaggaaggacaagggaattccctcccctagctaagggaagccatgaaggactgtgctatgtggaagagtgcatttcagccaggatactacaattttcccacrgtctttgcaactcacagaccaggagattcccttgggtgcctacaaaaccaagggcctgggttttaagcacaaaactgggcgaccgtttgggcagacactgagctagctgcaggagtttttttttttttttttgtatactccagtggcacctggaacaccagtgagacataactgatcactccccttaaaagggggctgaagccagggagcaaagtggtctagctcagtggatcccaccaacatggagcccagca

SEQ ID NO: 298847 - DNA, 548 bp, Homo sapiens
taattttttagcagatggcaagatggccaaatagtaacagctcccatctgcagctcccagtgagatcaacacagaaagtgggtgatttctgcatttccagctgaggtacgcagctcttctcattgggactggttagacagtggatgcagcctatggaggttgagccaaagcagggtggggcgtcggttcacccaggaaggacaagggaattccctcccctagctaagggaagccatgaaggactgtgctatgtggaagagtgcatttcagccaggatactacaattttcccacggtctttgcaactcacagaccaggagattcccttgggtgcctacaaaaccaagggcctgggttttaagcacraaactgggcgaccgtttgggcagacactgagctagctgcaggagtttttttttttttttttgtatactccagtggcacctggaacaccagtgagacataactgatcactccccttaaaagggggctgaagccagggagcaaagtggtctagctcagtggatcccaccaacatggagcccagca

SEQ ID NO: 298848 - DNA, 634 bp, Homo sapiens
cccttgccctttaggataatgtaggatattgtccatattttccagcatggcgatcaagatccctgctctccgatgagctaattttggtttgcctctctggccccacctgctgctactctgtatttgtcccacgcactctgtgcccatgaaacatgggcctgttcaaactctccagaaggtgctgattccctcaggcctcaggtccctactgagaagctttccatttgtgaggtcttcacagattcttagcccataacgagtaagcgaaaaatttatagaatattaaaatatatgtctatattacaatggaatataagattttattagaaaaattkatatcatctatcaatggtctaaaattatagagtactaacattattaatatataataaacacatttgaactagtaactaaaacatgtatatatatttaaatctaattgtctcaataaccctttttgtagatgggaaaccaaggcttctaaactgaagttacatatccaaggtcccactgtttcataagggtagaatggggatttgaatctcaccaatctctctagagcccatgatatttaccaccacccaatttacctctgcagcgctgtgtgttatatgaacacctattaactctgtgt

SEQ ID NO: 298849 - DNA, 434 bp, Homo sapiens
tgccaggtttctggatttgactgtttggatggaggtgtcaataatcaagagaagccacagaggaggaagagtaaatcacaaccactttccaaaaccaggaaggagggcaaaacagtggaagaaaaaagtaatgcttctcctgcttttaatacacacctcttcatttaggaatgacagtaacttaactagaattaatttacacataaaagataatgtgttagatttgattaccaaatcttaataaagataggtatagggccaagtatgggggctcacctataatcccagtactttgggaggctgaggtaggaggatcacttgagcctaggagtttgaaacyagcctaggcaacatagtgagacctcatctctacaaagtttttcccagcatggtaatacatgcctgtggtgccagctacttaggtggctgaggtg

SEQ ID NO: 298850 - DNA, 511 bp, Homo sapiens
ttctgcacagcaaaggaaactatcaacaaagtaaagagacaacctacagaatgggagacaatattttcaaactgtccatctgacaagggattaataaccagaatgtataagaattatctataaaaatattatctgatttaaaaatagacaaaatatatgaatagatatttctcaaaaaaagacatacaaatggyaaacagttatattaaaatgtgcttaacgtcactgatcatcagaaaatgtaaatcaaaactccaataatatcaccttaccctagttaaaattagttttatccaaaagacaagtaataacaaatgtggtgaggttgtgcagaaaaagcaacctttgtacactgttagtaggaatgtacattagcacgaccactatggagagcagtttgaaagtttcccaaaacataaaattagagctaccgtatgatccagcaatcctctgctaggtatatacctaaaagaaatgaaatcagtacatcaaagacatatctgcactactg

SEQ ID NO: 298851 - DNA, 592 bp, Homo sapiens
agagagcttcagggtgttgcttagggctcatcaatggatgaatagagaagagcagcaaacacactatcttctatcgtctacttccacaaaccgttctctttgccttttgttttatccatacctttgtgagggaaggagcattagcaggaacatttatcattaatctgaaggtaaacaartttttgttttttttttttggtagattgacatgagaagaacaaaacacaagtacaaatatagaagggttgccaaacaaggctacttcctttcagcacagggatcagttaaaatgccctagtgataatcatgttccaaatactttgcttaagtgctctgttgtctccttataactggggacttggttttcatcaattgttccatctccatgcacttcctttctcacttactgtgatattaatacttgacatttccttggagacaaaactttatatttctagtcatttggcttagttcctcagaaaatttaagctacaacattaagagattctctgactcatttgcctgccatcagttagaattacaactgactacagcttgttatcaaagcaatattgaaatcgtatttgtttag

SEQ ID NO: 298852 - DNA, 565 bp, Homo sapiens
atgttatgggctaggtattagagacttacattgctttggaggtaggacaaatcaaatttaaaataygaaattcagctttataaaagaaagatcgattcattataactcaatgaagtgtgaaaaaaatttcaaatggttcctttggcatcaagtttcatctttaaagaactgagctatgtaaatgtccttccaaaaattattaaaaataacgtttcctactggagataaggatataaagtgattatgcaccacttactttcattttttaggtgcttcctagtgaagtagagcattcttaatttacatttactataggctggcaacagagaaggcactcaatatatgtttattgagaaaaaagaatgaatgaaatgaaaaaactcataaattctggattaactaggcattcacctctggcattatattccactcagcagcctgcatacattcccatttcctgtgagtgatagtataaagaaaagctatcatggactgaagttctgttgcattttagttttgcttgtttgcaagtcaggattcataattcccagatatgaagaagtta

SEQ ID NO: 298853 - DNA, 341 bp, Homo sapiens
ctaaagttcttaattctgtaactttgaagttcagtgtttcaaatttacttcaatgaaagacttctatatctaattttaatttgctkgccatactgtaaggtttgttattttaggaagtgaactcactgctcatctcaaggaactctagattcttaaagatctttattaaaactaaatgatgaaggttagcttgttagtacttactcctttagagttgaatttcaagggaaacatgtttcctttcagctataaagattaattcttttatgtgcagcaggcaaacttttgtctatatgatgagcagcaaaaggagtagtgtttgttaggaataaaaaggttgg

SEQ ID NO: 298854 - DNA, 563 bp, Homo sapiens
ctgttccctaagtagagctgtccacagattacttgattgttttaagaggtagctgaactttcttagtctgcagccagaaattgactatttcttctttaacttcaatttttattttagattcatggggtacatgtacaggtttgtttcaagggtatattgcatgatacaaaggtttgggcttctattaatcccattacccagatggtgaacacagtacccaataggaagttttatgggtcttgtctccctccctccctccctccctccttctggagtctctagtgtctcctgtttctgggtttaggtcagttgaacccaagatatagctcccatttgtaagtgagaacatgtgataatttggttttgtttctgtgttaagtcacttaggactatggcctccagctacatctatgttgctgtaaaggacacagtttcattcctttttatggctgygtagtgttccatggtgtatatgtaccacattttctttatccaatccaccactgatgggctcctaggtttattccatgtatttgctgttgtgaatagggctgcaattaaca

SEQ ID NO: 298855 - DNA, 583 bp, Homo sapiens
ttgtcatgtcttcagttctaccttcatcttcacttgcagctcctgagcttctggagaattttacaatgtaagtcaagctgcttctttgttttttgcctaccactgacttaaggttcagctttcttaggctgcttagttgtcacttgtcatctgttttccaagtaacaatatttttattgctactgttttttcttgttttcttattctttgagggtttatctaactgcccttgttgtccttgcagtggaattttaggagggaacagagctaaatgcttgcactaaaggtgccaggtttaaactaaagttcctctctgctcttttatatactacagaatcacagttcctacatgttgaagggatccctaagagggcaggtagtaaactctwcagagagcaaaaatgtttaatttgcagataaggtggttaaaacgccagaagctgagtgtcttgccccaagacatacaaagtcacacagatagagaacatgatattctatgtaccttaaataattatctctcaaaggttaatagtttgtttgtttttctaatttaggataatttcagctatagctagatcctttt

SEQ ID NO: 298856 - DNA, 599 bp, Homo sapiens
gaatctattatactgcactttacattagcaagattaaaaaatccaaatctttggccaaagtttttcaaaaaagcatctctcctcttccctctggtaagggaaagtgtcactgaaaattcaggaacattaacattttagcaaaaacctgaagaaggtgaagtacccgctttgcagcaaatatgcaagaacagcaagtgctaaggccctaatgcaggatcttcggtgttcaaggagatcacaaagtgaccggtatggttagagctaagagcaaggaggagaagggtgagagatgaggtttgagagcaagcagggggatcagaacaggtagggatttgtagatgattttgattagttttactctgagaagggaagctatgggatgtcactagagggtttgaggagaggagtgacatgatttgacttacattttaaaaggattgctctggctgttgtattgagaacasaatcagagatggtcaagtgggggtgagtcagggggaacaaaggcaaaagcagaggaaccaatttttgctaacgcaaaaatgtaagtactcagaatgatcatgacttggtggtgagaggtggtcacattttggaca

SEQ ID NO: 298857 - DNA, 586 bp, Homo sapiens
cagtatcacattgttttgattaaaataactatataacaagttttgaaatcaagacatgtgagytctccagctttgttctctttcaagattgttttggctactaggggtgctttgcatttccatatgaattttaggatcactttgccattttctccaaaaaagacatctgggatttagatagggattacagtgaatatgtagatcaatttggtagtactgccatattaacaatacaagatttatgaaaaataaatttatattatcttttatatttgcctacacagctacctttatcagaactctttttctttgtgtggatttgaactgatgtctagtgtcctttcatttcagcctgaaggactttctttattatgtcttatagggaaggtttactagtattgaatactctcagtttctatttatctgtaattgtctgaatttctctttcctttttgaaggatagttttattggatatataatagaattctagactgactggcttttcatcactttgaatatgtcatcctactgccttcttaactctctggtttttgatgagaagtcagctgtcaatcttactgagga

SEQ ID NO: 298858 - DNA, 586 bp, Homo sapiens
cagtatcacattgttttgattaaaataactatataacaagttttgaaatcaagacatgtgagctctccagctttgttctctttcaagattgttttggctactaggggtgctttgcatttccatatgaattttaggatcactttgccattttctccaaaaaagacatctgggatttagatagggattacagtgaatatgtagatcaatttggtagtactgccatattaacaatacaagatttatgaaaaataaatttatattatcttttatatttgcctacacagctacctttatcagaactctttttctttgtgtggatttgaactgatgtctagtgtcctttcatttcagcctgaaggactttctttattatgtcttatagggaaggtttactagtattgaatactctcagtttctatttatctgtaattgtctgaatttctctttcctttttgaaggatagttttattggatatataatagaattctagacygactggcttttcatcactttgaatatgtcatcctactgccttcttaactctctggtttttgatgagaagtcagctgtcaatcttactgagga

SEQ ID NO: 298859 - DNA, 566 bp, Homo sapiens
gctgttccaaacaaaaacatcaattaacattttagaaaggtacacctttaggcacaaacagttggctatttctctacaaggtagaattatataagtggaactgctatgtataactatatgcacattttaaatttagataaataattccaaattgccttaagattttaacaatttataartctgttgcaatttctgaaggcctaccatctttgtggagactggatatgacatgatattttatatatgtgaacgtgtatgtggttaatcagatagaggaggacttcactatgttagcttaaagtttcctgataactagagaggctgagtatcttttaacatatttttacagcccactttaaggtcctttgtgaactctctgctcattttactttccaaaactgattcaggaaagttttttctaaattctggaaattaatcctttctgtgtatgtctactttttcttttatgtcttttatttttagggtcctgcttaggaagcatttcttaccctaagataatatagtggaatataatttaggtattataaatctaggtttttcgtttg

SEQ ID NO: 298860 - DNA, 566 bp, Homo sapiens
gctgttccaaacaaaaacatcaattaacattttagaaaggtacacctttaggcacaaacagttggctatttctctacaaggtagaattatataagtggaactgctatgtataactatatgcacattttaaatttagataaataattccaaattgccttaagattttaacaatttataagtctgttgcaatttctgaaggcctaccatctttgtggagactggatatgacatgatattttatatatgtgaacgtgtatgtggttaatcagatagaggaggacttcactatgttagcttaaagtttcctgataactagagaggctgagtatcttttaacatatttttacagcccrctttaaggtcctttgtgaactctctgctcattttactttccaaaactgattcaggaaagttttttctaaattctggaaattaatcctttctgtgtatgtctactttttcttttatgtcttttatttttagggtcctgcttaggaagcatttcttaccctaagataatatagtggaatataatttaggtattataaatctaggtttttcgtttg

SEQ ID NO: 298861 - DNA, 634 bp, Homo sapiens
tttttatatttaaaataatctgatgttatagatatctgtgcgtatgtatatgcatatttacatccataacacaaatgtatatatacaagtataaattttaaagatgcctatggaaattattttaaaaaatctaaawttctttcctaatggtccattttatgttaatacctaaatctagtcatccctcagtatccatgggagattggtttcaggaccgctgtggataccaaaatccaaggatgctatagtctcttatataaaatggtagtactatttttaaataacctacgcatatcctcctttatactttaagtcatctctgaattatttataatacctaatacaatgtaaatgctacgtaaatggtggttataccatattgtctagggagttataagaaaaatgtctgtacatgttcagtagagactcattttttttctgaatatttttgacctgtagttggctgaatccagagatgtgaaacccatggatacagggggctgactgtacttctgttgttacaaattccagattctctttaaaaataacatatgtcttgtgtgtgtacctgtgtttaaagctttttgatttgtgaataaattcataaatatctcttgacaaaggtttccggggg

SEQ ID NO: 298862 - DNA, 634 bp, Homo sapiens
tttttatatttaaaataatctgatgttatagatatctgtgcgtatgtatatgcatatttacatccataacacaaatgtatatatacaagtataaattttaaagatgcctatggaaattattttaaaaaatctaaatttctttcctaatggtccattttatgttaatacctaaatctagtcatcyctcagtatccatgggagattggtttcaggaccgctgtggataccaaaatccaaggatgctatagtctcttatataaaatggtagtactatttttaaataacctacgcatatcctcctttatactttaagtcatctctgaattatttataatacctaatacaatgtaaatgctacgtaaatggtggttataccatattgtctagggagttataagaaaaatgtctgtacatgttcagtagagactcattttttttctgaatatttttgacctgtagttggctgaatccagagatgtgaaacccatggatacagggggctgactgtacttctgttgttacaaattccagattctctttaaaaataacatatgtcttgtgtgtgtacctgtgtttaaagctttttgatttgtgaataaattcataaatatctcttgacaaaggtttccggggg

SEQ ID NO: 298863 - DNA, 568 bp, Homo sapiens
tacaaactgaaaaaagtcctcagtgtcaaaggccaagaatagcaaatatttagaaataggcataaattcttgtttctaaaaagctataaaaaggcatataaaaacaaataatcatggattaagtataaaataaaatgagctaacaaaaaagaaaaccttctttcttttaaaaaaggaaaaagtttttctcatagttaattgtacttgactgaaaacaaagccaatgtgcaatgaaagtgccttgccagacacctggcatagagaaaacattcaataaatgtaatgctctctgaaaaaaatatttgttgagagcctactacatgcaggaaaaaacacataattactgcctgcagcatcttcacctttatttaaaggcccttactattttgactttcctaagtacaaatggcaagaaacaaaatgtgattgccaatggaccagaaaacaagtggtcagtgggaggctggggtacaaaacataaatagaaacaacaaaattttactctcttcagttttggagaaagccaaaaataaaacacartcatatcccccacaaaaagtggtttaag

SEQ ID NO: 298864 - DNA, 591 bp, Homo sapiens
gaactgtaattgtagttctactactgcatgtctccatattgtagtagcagtagacatgtttaaaggtgtttttttatatctgtgtatttgtgtgtgtgtgtgtgacttattcacttcagttgtctgaattgttaatgtagatgacggtatgattgattaatggtgattatcaatttgtcaagtagagcaatgacgttctctgctttctcagaagctgaaggttctcactttctaccmaagtgtcattcctaaatgcttgctacatacggttggaaaagtaagcattttgttgaacattgcaagtaaaatgttcaatcttttaggagcggtttgatgctccaggaagaaagactggttaactagtttctacttataaaaatgactgaatactgtcaaatgagtcatttgtgtgcccaaaaatactttactctgttacataacactatataaattgagtgaaatattgctaattcatatcactgacaccatgaaaaaatgagaagcctaagaagtttggagtttcttaaaaaggctttacgtctgtatatttgaaaaaaaaaaagcatctgaaagaatccagtataaacccag

SEQ ID NO: 298865 - DNA, 614 bp, Homo sapiens
gaatgatgctggccatgcaattcaacctgtgcttacaaacataattattcactcggtcactcagtcactcccttgttcatcgagtattgaatactcattcagtgagtattcaactgaccatgcagttggtcaaacactgcatgtggttctggtgataaaatgatgagcaaattcttcccccaccttcaaggcattcatagaccagtaaggaggagagatatgtcaccaattaaatatgacagaaatagtttagaaataaaacagcaagsctgggtgtggcggctcacgcctgtaatctcagcactttgggaggccgaaatgggtggaactgcttgagccagaaatttaacaccagcctgggcaacagggcaaaatcctgtctctacaaagaaaaaaatatatacaaaaattaactagacatggtggggcatgcctgtagtcctagctacgcaggtggctgggtcaggaggatcacttgagcccaggaggttgaggctgcaatgagccataactgcaccactgcactccagcctgagcaatagagcaagaccctgtgggaagggaaggcaaggggaggggagcggagggaaaagacaaacaggtaggcaagaagg

SEQ ID NO: 298866 - DNA, 614 bp, Homo sapiens
gaatgatgctggccatgcaattcaacctgtgcttacaaacataattattcactcggtcactcagtcactcccttgttcatcgagtattgaatactcattcagtgagtattcaactgaccatgcagttggtcaaacactgcatgtggttctggtgataaaatgatgagcaaattcttcccccaccttcaaggcattcatagaccagtaaggaggagagatatgtcaccaattaaatatgacagaaatagtttagaaataaaacagcaagcctgggtgtggcggctcacgcctgtaatctcagcactttgggaggccgaaatgggtggaactgcttgagccagaaatttaasaccagcctgggcaacagggcaaaatcctgtctctacaaagaaaaaaatatatacaaaaattaactagacatggtggggcatgcctgtagtcctagctacgcaggtggctgggtcaggaggatcacttgagcccaggaggttgaggctgcaatgagccataactgcaccactgcactccagcctgagcaatagagcaagaccctgtgggaagggaaggcaaggggaggggagcggagggaaaagacaaacaggtaggcaagaagg

SEQ ID NO: 298867 - DNA, 614 bp, Homo sapiens
gaatgatgctggccatgcaattcaacctgtgcttacaaacataattattcactcggtcactcagtcactcccttgttcatcgagtattgaatactcattcagtgagtattcaactgaccatgcagttggtcaaacactgcatgtggttctggtgataaaatgatgagcaaattcttcccccaccttcaaggcattcatagaccagtaaggaggagagatatgtcaccaattaaatatgacagaaatagtttagaaataaaacagcaagcctgggtgtggcggctcacgcctgtaatctcagcactttgggaggccgaaatgggtggaactgcttgagccagaaatttaacaccagcctgggcaacagggcaaaatcctgtctctacaaaraaaaaaatatatacaaaaattaactagacatggtggggcatgcctgtagtcctagctacgcaggtggctgggtcaggaggatcacttgagcccaggaggttgaggctgcaatgagccataactgcaccactgcactccagcctgagcaatagagcaagaccctgtgggaagggaaggcaaggggaggggagcggagggaaaagacaaacaggtaggcaagaagg

SEQ ID NO: 298868 - DNA, 614 bp, Homo sapiens
gaatgatgctggccatgcaattcaacctgtgcttacaaacataattattcactcggtcactcagtcactcccttgttcatcgagtattgaatactcattcagtgagtattcaactgaccatgcagttggtcaaacactgcatgtggttctggtgataaaatgatgagcaaattcttcccccaccttcaaggcattcatagaccagtaaggaggagagatatgtcaccaattaaatatgacagaaatagtttagaaataaaacagcaagcctgggtgtggcggctcacgcctgtaatctcagcactttgggaggccgaaatgggtggaactgcttgagccagaaatttaacaccagcctgggcaacagggcaaaatcctgtctctacaaagaaaaaaatatatacaaaaattaactagacatggtggggcatgcctgtagtcctagctacgcaggtggctgggkcaggaggatcacttgagcccaggaggttgaggctgcaatgagccataactgcaccactgcactccagcctgagcaatagagcaagaccctgtgggaagggaaggcaaggggaggggagcggagggaaaagacaaacaggtaggcaagaagg

SEQ ID NO: 298869 - DNA, 565 bp, Homo sapiens
ggacttttgcggggtgattaggtcatgaggtcagaatcttcccgcatgggattataaaagccctgagaaaaaggtccttataaaaaaatcctgagagagacccctcacccttctgccacaataacattagagtaagaaaacagttatctgtggggaagcgagcgctcaccaggcactgartctgttgattctgttgataccttaatcttggaatacacagattccagaacagtgagaaatattcttctgttgtttataagccactcagtctatggtattttgttacagctcatataagactaagacaggctcatattcacaaccttagttcatgggacttgtagtgagcttagtataatgattacatatttgtttgcatgaggcttttgacacacttctgtgtattttgtgattgtgcttttctaagccagaagacgttgttagtattcactttgggctccttattaccattgggttttgctaagcaccagataataaccaaaagattataaaccttacttaaaaatcaagccttttattgtatattttctagcacatatattta

SEQ ID NO: 298870 - DNA, 565 bp, Homo sapiens
ggacttttgcggggtgattaggtcatgaggtcagaatcttcccgcatgggattataaaagccctgagaaaaaggtccttataaaaaaatcctgagagagacccctcacccttctgccacaataacattagagtaagaaaacagttatctgtggggaagcgagcgctcaccaggcactgaatctgttgattctgttgataccttaatcttggaatacacagattccagaacagtgagaaatattcttctgttgtttataagccactcagtctatggtattttgttacagctcatataagactaagacaggctcatattcacaaccttagttcatgggacttgtagtgagctyagtataatgattacatatttgtttgcatgaggcttttgacacacttctgtgtattttgtgattgtgcttttctaagccagaagacgttgttagtattcactttgggctccttattaccattgggttttgctaagcaccagataataaccaaaagattataaaccttacttaaaaatcaagccttttattgtatattttctagcacatatattta

SEQ ID NO: 298871 - DNA, 582 bp, Homo sapiens
atatttaaacttcaaatgctgagcatcgtatgtacaagcatgatgcagtgcaacctgaacctggaaaaaaaaacactccagcacctttgattgtcctgttgattgcagagtggtgaacccatgtacactgacttttcaatcaaccactttttgcctcagtcggctcagaaagagaacttcagctaaataaatatttctgacaattgacctgcagtgcmacaagacgctcacaaaagaaaaaggaaaagatacatctaaactgcctgtcagcttttctttttctgatagaaagtagagcttcagatactctgagaaagattccaatttgtacaatttgtacatactggtggtagcagaaaataaagccaaactataagggagttcaaagtgtcactcattttacaattaaaaatcaaggacatcaggaaggaatgaaaataactcacttgtatagaggcagtgaaaacaacattcacgtcacagatatagccatttccatctccaccctcctcattactcaggctgaaaaatggaagagtgaggctgtcttacccaggctgaactcttccctgcagccagaga

SEQ ID NO: 298872 - DNA, 594 bp, Homo sapiens
  misc_feature (1)...(594): n = A,T,C or G
ggatacaagttatacttttagcataaaatgctttttaagaatagcaaactaacgcaggaacagaaaaccaaacatcgcatgttctcactcataagtgggagttgaacaatgagaatacgtggacacagcgaggggaacatcacacaccggggcctgttggagggtggaggaaaaggagagggagagcattaggacaaataactaatgcatgaggggcttaaaaccttgatgacgggttgataggtgcagcaaatcaccatggcacatgtatacctatgtaacaaacctgcacgttcagcacatgtatcccagaacttaaagtaaaacaaacaaacaaataaataaatgaaacatcaataacattaaaaaaagaatagtgagaaaaatctcctgtttgattagttatgatgttgaatcatggagcaagattctaaggtgggctccgacagaaatactctgttaaggaaaggggatggattgtttacctgtattactgattacgtattaaagngaattcttgtgaagggacttggtacctgtatcattgactatatatttatgggacrtctttgcatccaaagggaaatgaaaggt

SEQ ID NO: 298873 - DNA, 483 bp, Homo sapiens
tttgttacgacataaaggctgatggtggtactaaawacaggcatatctcattttattgtgtttctttttattatgctttatagatgctgcatttttaacaaattgaaggtttgtaacaactctgcatctagcaagtctattggtgccattttttcaatagcatgtgctcacttcatgtctctatgtcacattttgttaattctcacaatatttcaaactttttccttattattatatttgttatgatgatgtgtgatctgtgatctttgatgttactcttgtaattgtttgggggcaccataaaccatgcccatataagatggcaaacttaatcaataaatgcgtgtgttctgactgctgcattatccagtctttcccccatctctcttcctctccttgagcctgtttattccctgagacacaacaagattgaaattaggctaattaataaccctacaatagatgcttagtgttcaagtgaaa

SEQ ID NO: 298874 - DNA, 615 bp, Homo sapiens
tgacagcctgtgagacatgcagaatcttgggtatcaccctagacctctggattcagatggccttttaacaggatcttcaggtgattcttttgcacactaaagtttgagcagcacttgcttgtacagaattagcttttargattaggtcctaaaagaaatcacgttgcttccaaataaaacttcagatcaagtaagaatcaatggccctagcaaaattgttacttcagctactattatgttcctccttaggtttggtaagggaatctgcttaaacttctgggaattttgaatgataccgctacaccagtggtgtcgtctaatctgcttaaacttctgtcagtatccccttgggttttgtgctgttataaaggtgatgctaatgtggttacttttcttcttctgtgaattagctgtgaataatgaaattaaacatttaatataaaaggaagaagacagtcaatcaacattgctgcaatactacatcccttccatgttctgtgcagagcatttttaattcattaatttattcatttgacctattttattaatcatgtagcttatgccaggcactgcacttggctctgggaacacagtggaagaatatattcctcagca

SEQ ID NO: 298875 - DNA, 615 bp, Homo sapiens
tgacagcctgtgagacatgcagaatcttgggtatcaccctagacctctggattcagatggccttttaacaggatcttcaggtgattcttttgcacactaaagtttgagcagcacttgcttgtacagaattagcttttaagattaggtcctaaaagaaatcacgttgcttccaaataaaacttcagatcaagtaagaatcaatggccctagcaaaatwgttacttcagctactattatgttcctccttaggtttggtaagggaatctgcttaaacttctgggaattttgaatgataccgctacaccagtggtgtcgtctaatctgcttaaacttctgtcagtatccccttgggttttgtgctgttataaaggtgatgctaatgtggttacttttcttcttctgtgaattagctgtgaataatgaaattaaacatttaatataaaaggaagaagacagtcaatcaacattgctgcaatactacatcccttccatgttctgtgcagagcatttttaattcattaatttattcatttgacctattttattaatcatgtagcttatgccaggcactgcacttggctctgggaacacagtggaagaatatattcctcagca

SEQ ID NO: 298876 - DNA, 601 bp, Homo sapiens
ttgaggaaagggtaggggagagtgaggaggactttgtcttacatcttgtatactagctcagctagagcaggataggacatcagtcagagtcatgaagtctcctttccagaacctagctcccagacaacatctctagacaaaccctgggctaaaagggaacatggtgccttgaagagaaggacccagtactggcaggattcataatctgctaactgaagagcccttggtctgtgaataaccagtgatacccaggtactacgttatggaccttggatgaggctctgagacttcctggtttcaggtgagactcagcacaatcccagctatggtggctatggggcaactccttccatgtaagaaaatcagagagaaaagtaagggggtcttttcttacaccttaggtacagttgggccacagagttgtagatcaccaagccagcacttggggtccctgaytccagaacttggctcttgaatggcatgtctggaccttccctgggccagagcggagcccactgccctgaaaggtgagtcccaggccaggaagcactcaccacaagctgacttaagagcacttgggccttaagggaacatcgatggt

SEQ ID NO: 298877 - DNA, 661 bp, Homo sapiens
ttggcataatatgctagggcttttacagtaataactcttgaattacatggggaaattgcactaaatgaattctagtgtctctttcaactgtaaaatttcatgataccatccttttttgccatcttaaataatgaaaaaaaactgatgtatcaatacatgaagcttctttctcagaccttcattctttggccattatttttatattagtaatgcctgtcataccttctctttaggtaaccttcaagacttacatcaggtttgccttctaactacgtgtcaggtccmgatgggtgattctttctcttctctgttcccatagcaaggtgtacacacactgatgctgtagcactcttcatgtgtttttttgacaagttagcttttttctcttcatataacatttgtatactcatagtttatcaatcgcccaataaatttatgttgactggaattttagaaatattgacacctggtacaaaatttaatcggaatctctcatttaagaattccattctacctgactatgtcaatatttttcactgttctagttgattttaaggccattttaaattagtggccattcatgaggcaccatgaacttcaacaacagcaactacaaacagcacacgcagtgagttaatgagaagaaccaccatcaacataa

SEQ ID NO: 298878 - DNA, 661 bp, Homo sapiens
ttggcataatatgctagggcttttacagtaataactcttgaattacatggggaaattgcactaaatgaattctagtgtctctttcaactgtaaaatttcatgataccatccttttttgccatcttaaataatgaaaaaaaactgatgtatcaatacatgaagcttctttctcagaccttcattctttggccattatttttatattagtaatgcctgtcataccttctctttaggtaaccttcaagacttacatcaggtttgccttctaactacgtgtcaggtccagatgggtgattctttctcttctctgttcccatagcaaggtgtacacacactgatgctgtagcactcttcatgtgtttttttgacaagttagcttttttctcttcatataacatttgtatactcatagtttatcaatcgcccaataaatttatgttgactggaattttagaaatattgacacctggtacaaaatttaatcggaatctctcatttaagaattccattctacctgactatgtcaatatttttcactgttctagttgattttaaggccattttaaattagtggccattcatgaggcaccatgaacttcaacaacagcaactrcaaacagcacacgcagtgagttaatgagaagaaccaccatcaacataa

SEQ ID NO: 298879 - DNA, 595 bp, Homo sapiens
tcaacaccaaaaataaaactgagaaatcttcaattatttggaaattgaaaaacataattataaattactaacagaccaagaaaaaataacagaaatttttaaatatcaaactaaatatgaacacaataattaaataaaaatcatatcaaattttatgggatgcagttaaaacactgcttagaggaaactttatagctgtaaacactactcttaatggaaaaaaatctaaaatcaattatccaagtttgccttttaaaaaggtagaaaaaaagagaaaatcaaagccaaagtaagccaaagaaaataataaagatcaaagygcaaatcaataaaatagaaaacagacagcaatgaaaaattgatacaattaaaatttagtttcctaaattttctttaaaaaggaaaattagtaaaagttcacctaaaatgaccaagaaaaagaataacatcaattaccaaaattaggaacaaagtagagtttttcactatagaacacagagctatcaaaatatttataagacaatgttacaaaaaactttataccaaatagattacatgaaatagacaaatttctagaaggacgccaattacccaa

SEQ ID NO: 298880 - DNA, 564 bp, Homo sapiens
cttctattacagaggaaataaaaatacaaatctctctggcctctggaaggaagacgcaataaatttagaaaaatttcaaaaargataagaccagggtaaggttgtggatttcttgaaactcagtgccctaatgtcctgagcatggtttcagaggagcaatagatacatcataatagaaacttcaagctgacagaaacttaagaacaacaaacccatataccttgaaggagaatccaagagcatctaagtggggctctgctccctgagtcaagactgacatgttgcaagaatgatagagcattatttgtagagtgaggtgtctatatggatggtcccaaaatactgctcctgtctttccctactgcttgctcatagcatggtaaggatccagaaatccccgtgcaactatatgagggatgcagatgtccaggctgagggctgaaacatcccaaaatcaggagggaggggaagcacctgagtcataagagagccaggagcacctgaggaagctgacgtaaggagccaagcaccagtggtcatggtcttggtgaacctcaagccatg

SEQ ID NO: 298881 - DNA, 626 bp, Homo sapiens
agtgtagacagtgtggaaaattgcaatggatgagaaacaagaatatataataacaattacacatgaagatacgaacaggcacctcacctgaaaggaatcacaaaaggcaaataaacacaggaagtgaagatcagcataaatatatgcacactaaaggcaagtcaggtaatgaacaagatttcaaatcaacaaagttgaaaaagactcacaatatcaagtgctgggaaagaaataggaagatatttttaattctcacaggtagtattgatgataatgtaaatggatttaaccatgtgagagaacaattcagcaatatcaaatataattgaatgtgtacacacttagyttatattctcctgattataatttagagaactctaacacatattaccaggaaacatacaaaaggatgtaaattccagcattgtgggcaacgttaatattttagaacaacttgaaagtaaagcatatgggagatgatagtattttgcttctaataacagggaagtttaaatattcagaagggctttatgctgaaataaagaagatcacagattataacaaacatatgaggggaaagactatcaagaatgagttaacggagaaggaacaggtgattcaaatat

SEQ ID NO: 298882 - DNA, 536 bp, Homo sapiens
aactattaatcatcaatcattctcttgaaaggattgagctttaaagtgcagataatgttacctttgaaggtgtcagtgatcaattaatttattatatcaattaatttaatagaatttaacctaatccttaattgtccttccctgcccattgtttcactctgttaaaaatatccatcacatcattgtttgagtacatatctatatgyatatttatgcctacctatatgtaaatcttcttttctccacaaaatgataatctttgtggagacctgcctcctctagaaagcatgttcacactcaggacttttttggaaactaattttcagagcaaaagaagcattaatgcttcttaactgctgaccttcttatgaaacactaactactagtgagctaagaattcaaaaaaaggacaatgtcaggccagagaaatataacacattgcttttgtttttaaacatcgaaaagaatatatatattttactgcatggaaagataattatcttagtctgttttggctgctataacaaaataccata

SEQ ID NO: 298883 - DNA, 610 bp, Homo sapiens
taaatgcatttaaattgtaattttaaggcagtttgtgagycaacccaaaggtcttcatgtgctctttcaaagtgtatcatctgcttcaaattaaactataatttggcaatcctctctggtaaacgtacaaaaagctagttagaagaatataacctgaaaagtttagtgcattttggcaacaaagaaaaattatctgtgggtttacattctcaacttacttgattctttttgacagatttagtacatgggttatataagtgaaaataatgaaaaactaaatgcatataaagaaacttctgacccaatatgtagaatataatagtattatagtttataatattttttgtaagaaattacatattttttaggaaatgagaaatacaaaataatctaaaatggcactgttcttttttggcaatgatgaaatgtctaagtgaattctgaaaatttgctttaggaacttcaaaactttgtgttatctatgatgtgtttcattattaatgccctgatgtagctggcaatgtttagtctaactgggtttaaatagcttattgtatgaaactttcatttggggttatttttccaggctcaggaatatcttgagtaattg

SEQ ID NO: 298884 - DNA, 610 bp, Homo sapiens
taaatgcatttaaattgtaattttaaggcagtttgtgagccaacccaaaggtcttcatgtgctctttcaaagtgtatcatctgcttcaaattaaactataatttggcaatcctctctggtaaacgtacaaaaagctagttagaagaatataacctgaaaagtttagtgcattttggcaacaaagaaaaattatctgtgggtttacattctcaacttacttgattctttttgacagatttagtacatgggttatataagtgaaaataatgaaaaactaaatgcatataaagaaacttctgacccaatatgtagaatataatagtattatagtttataatattttttgtaagaaattacatattttttaggaaatgagaaatacaaaataatctaaaatggcactgttcttttttggcaatgatgaaatgtctaagtgaattctgaaaatttgctttaggaacttcaaaactttgtgttatctatgatgtgtttcattattaatgccctgawgtagctggcaatgtttagtctaactgggtttaaatagcttattgtatgaaactttcatttggggttatttttccaggctcaggaatatcttgagtaattg

SEQ ID NO: 298885 - DNA, 470 bp, Homo sapiens
tctctggcaaagtactagacagcttctgggaacagctgataaggagtaaggggaatgaataaaacccaaatttttctactttgctttatwgatcactgcatcttacaagggtggcagaactcattggttatttagggtagcctctctggtattcaacagaagatgacgactaatgtccatattttaccttttgttatttatttattatactttaagacctgggatacatgtgcagaacggacagtttcgttacataggtatacacgtgccatggtagtttgctgcacccatcaacccgtcatctacattaggtatttctcctaatgctatccctcctctcaccctccaccccccaacaggccccagtgtgtgatgttcccctccctctgtccatgtgttctcattgttcaattctcacttatgagtgagaacatgcagtgtttaattttctgtccttctgttagtctgct

SEQ ID NO: 298886 - DNA, 470 bp, Homo sapiens
tctctggcaaagtactagacagcttctgggaacagctgataaggagtaaggggaatgaataaaacccaaatttttctactttgctttattgatcactgcatcttacaagggtggcagaactcattggttatttagggtagcctctctggtattcaacagaagatgacgactaatgtccatattttaccttttgttatttatttattatactttaagacctgggatacatgtgcagaacggacagtttcgttacataggtatacacgtgccatggtagtttgctgcacccatcaacccgtcatctacattaggtatttctcctaatgctatccctcctctcaccctccaccccccaacaggccccagtgtgtgatgttcccctccctctgtccatgtgttctcattgttcaattctcacttatgagtgagaacatgcagtgtttrattttctgtccttctgttagtctgct

SEQ ID NO: 298887 - DNA, 555 bp, Homo sapiens
gtattgtgctcattacctgggttacaggatccataccccaacttcagcatcgatatacccatgtaaaagacctgcacatgtaccccccgtacctaaaagttgaaatttaaaaataattacaaagaacaataactaaaatgccttaaaacgtgtgaattatgatgggaggactaagtcccaaagcagtttatctgtgtaccccaagactgcaaataaatttatagaacrgtgttgcctggtagaattttctataatgatagaaatgttttatgatctgtactgtccaatactgtagccactggccacatgtgattattgagcacttgctatgtggctagtggaatcaaggaactaaatttcatattttattttaattaatgtaaatgtaactataaatgtattaacatgacagttctactaatcccttttctgaaattttaaattataactacttctaaattatgacaaaattttacactaaagaaaattcttatatattttatactatatactatatatcatgatattttaaatatcatatacaaactataagaa

SEQ ID NO: 298888 - DNA, 569 bp, Homo sapiens
ggctagtggaatcaaggaactaaatttcatattttattttaattaatgtaaatgtaactataaatgtattaacatgacagttctactaatcccttttctgaaattttaaattataactacttctaaattatgacaaaattttacactaaagaaaattcttatatattttatactatatactatatatcatgatattttaaatatcatatacaaactataagaagctaaggaagcaaatgcctggttytatatatatatatatatatatatatatatatatatatatatgtacatttctaaaattatattcaatactatggtttagaattttaagtattttcctcattggcactgaattttaattaaaaaaataatttttatttaagctaaaacatgataaaatatggctgtgccagtgttaaaatagtcttaacttgaagtattatttatttactgagagttcattttttgaaatagatttatggagatacaatttacatatctcaaaattcacttatttaacacataatgtttttcagtatatttacaaagttgtacaaccattataa

SEQ ID NO: 298889 - DNA, 589 bp, Homo sapiens
aaagtttttaatttttttaagcaatgtttttctctctctcgggatccttatacaatctaccctcatttgcaggtgctatctgttctgccaggggtgttcagaaagatctcttggagcatcaacgttctgttgtccttagggaaggattcatcctttccttttctaatggtttactcttttagagggaaacaaagacaggtctgcttctgtcctagagtcttatgatgttttaagtggacacttcctttagcttttgcctactgcttccttctgcactcttgcttctcttactcctggcattcagatatatgcacataaaggagtgatgaaggaaaaatgcattatatggaaattatgatctactcagaatttctcctcttttctgtggaataagaccatactactgagtccatctccagaaagcatttccatctagaagccactttgaactctcatgtaaattagcttccaacaagtcaaactccccrgtttgtcagacgtgttcagatattttggaacaccaaatctatgtagagttcaactgaagttgggaaatgcaatccatttctctctgcagcaccataaggcg

SEQ ID NO: 298890 - DNA, 281 bp, Homo sapiens
aagactactggttgttagcaaccatattaaagttcataagcaatgtgtatagcatggtttgttattggaaagcacattgccatattgtgcacattttaggaaattgataagttcacaggtaaaagacaataacttcttcccrtttaaaaagtaggaaatagctttccaattagcaaattgcctaaaatgtgggcaaaacatctgatttttaaaaacagattacagatattaggtaacagatgtctgtattcagttctgacatttcaattgctcaaagtggt

SEQ ID NO: 298891 - DNA, 579 bp, Homo sapiens
gattgattttcttctggctgtaacattctactagtcttcagtgctcagcgttaaatgaaatgatgttttgatgttgaaaatactagtttacattatttatttatgcaccctctttatttccaaaaaggcctggagcaacatacaataaaaacttgaatataataaggccaagaatcactctgtaataaaagtcgagccactcaaactttgtgcatcagttttattggtggaaagggaatctgaaaaaaacataatacacagctgtcaagtggattatatggaatgatgtatataaaattwcctgcgttgttcgtggtctgtagttcccatctctatcctcccaggtaaaaaacggaagacagggaaatattgtaacaaaactctgagcgaagaacatggcagtcattaaacacaaaaataggcccaacttggtgctggcccggtagcaaaatcgaaaaagagacagatatttttctgaccataagtcacctatagatctcaccagtagagtctttatacataacattgcataacttgaggcatatctttaataacaattctatcaaaatatattttcta

SEQ ID NO: 298892 - DNA, 579 bp, Homo sapiens
gattgattttcttctggctgtaacattctactagtcttcagtgctcagcgttaaatgaaatgatgttttgatgttgaaaatactagtttacattatttatttatgcaccctctttatttccaaaaaggcctggagcaacatacaataaaaacttgaatataataaggccaagaatcactctgtaataaaagtcgagccactcaaactttgtgcatcagttttattggtggaaagggaatctgaaaaaaacataatacacagctgtcaagtggattatatggaatgatgtatataaaatttcctgcgttgttcgtggtctgtagttcccatctctatcctcccaggtaaaaaayggaagacagggaaatattgtaacaaaactctgagcgaagaacatggcagtcattaaacacaaaaataggcccaacttggtgctggcccggtagcaaaatcgaaaaagagacagatatttttctgaccataagtcacctatagatctcaccagtagagtctttatacataacattgcataacttgaggcatatctttaataacaattctatcaaaatatattttcta

SEQ ID NO: 298893 - DNA, 579 bp, Homo sapiens
gattgattttcttctggctgtaacattctactagtcttcagtgctcagcgttaaatgaaatgatgttttgatgttgaaaatactagtttacattatttatttatgcaccctctttatttccaaaaaggcctggagcaacatacaataaaaacttgaatataataaggccaagaatcactctgtaataaaagtcgagccactcaaactttgtgcatcagttttattggtggaaagggaatctgaaaaaaacataatacacagctgtcaagtggattatatggaatgatgtatataaaatttcctgcgttgttcgtggtctgtagttcccatctctatcctcccaggtaaaaaacggaagacagggaaatattgtaacaaaactctgagcgaagaacatggcagtcattaarcacaaaaataggcccaacttggtgctggcccggtagcaaaatcgaaaaagagacagatatttttctgaccataagtcacctatagatctcaccagtagagtctttatacataacattgcataacttgaggcatatctttaataacaattctatcaaaatatattttcta

SEQ ID NO: 298894 - DNA, 556 bp, Homo sapiens
cttcaatccttgccccactctctccctcccgttcagtagtttctagtttctattgttgccatctttatatctccgagtacccaatgctgaatttgatttgctagtatttttttgagagttttggtgtctatgttaataagagatactggtctgtagttgtctttttttgttacgtattcacttattttaagggcagtaggrtatcttcaaattaactgtagaataaaaacaacataagggagaggcagagcttccagaatgacagaataaggagctcagtggagactgtccctagcaaaacaatttaactggtaaagattatatttttaaaaaatgatttgaatctggaaattgtcttaagggaatacatcaaatggagaaacatttatttatgaaattcactaaatcttgttaaaaataatgagtttgtgccacttacatcatgattcactctcctatagccctccccacccagctctattacagatctttccctcagacactctactccaggcaggtagaatccagaagtaggtggattacttcagccactaaa

SEQ ID NO: 298895 - DNA, 551 bp, Homo sapiens
acagaaaaatacatctccctcccccaaccaaaaaaaatgactggaggggcttagtacatatgaattggcaaaacaaaaaaatttaggaaacttgaagatagatcaatagagattatgtcatctaaagaacagagagaaagaaatatgaaaaaagaagatgattggagtctcaaagaaataatggatgccatataaacaaaccaacatatgtataatgtgtgggacaggagagagaaaggaaaaaaatttcaaagaaataaagactggaatttttcaaaatttgattraaaaaaaaaaaaacactaacctacacattcaaaaagcttaataaattcctagtagagaaaatgcagagattcacatctagatactccatatttataatgttgaaagtcaaagttaaagcaaatgtcttgaaagcagtaagataaaaatgactcactgcataaaagaggaatctcaataagaatataatacaattcggatttgtgtccccacccatagctcatgctgaattggaggaaggtcctgatgggaggtaactggattaa

SEQ ID NO: 298896 - DNA, 491 bp, Homo sapiens
tagaaaataaaaacccattttctggggagaaattcaagccagctgcagtaatttgcataagtaaagaggaaccaaatgttaatgaccaagacaatggggaaaacgtctccaggacatttcagagaccttcacagcaactcctcccatcacaggcccagaggcctaggagggaaaaatggatttgtgggctaggcctggggctcagctgctctgtgcagtctcaggtcatggagccctgtgttccagccccagccatgcctaaaaggagccaaggtacaacttgggctgtggcttcatgaggtgcacgctccaagatttggtggctttcacctgatgttggtcctgtgggtacacagaaggcaagagttgaggtttgggaacctctgcctagatttcaaaggatgtatgcaaatgcttggatgttcaggcagaagtcwactgcaggggtggagccttcacagagagcctctactagggcagtacagagggca

SEQ ID NO: 298897 - DNA, 484 bp, Homo sapiens
tatcatagtatatttagcatttatataacatatactcaaatactctatattatgatccattcatgtctaagtaaacacaaaaacagcatttatctaccattcattgttctcagtttctacaccatttcacatttccstggcttgatttcttatttctcctttacttgttcacttagaatctcttctagaccattgtgttttcctgaaaaatatactctatgaattattataaaatattaatagaataatttgaccttccagatgaattacagttttgcaaagtaagagagtctcaggttgaaatcctttacactgcgttgtcgtgaagaactataccactgtatccctgactcctatattgcagattcaaactaggaaaatagtctaaatctcttctcttatttgtgaccttttctttctggctggaaggttataagaatttctttttgttcttaaaattccagaattttccaagtatactcat

SEQ ID NO: 298898 - DNA, 461 bp, Homo sapiens
tcttcacaggaaggaagaatggaaagatgagggatggaaggacggaaggaaggaaggargtctggtttattaaaaatgaagccacagttcagaaacgtttacagttctgtagtactgcctcagacttttcgcagcattctttgtgccaccactctagataactttaataaaccagtcagggaaaatgcctttggcagttgtataaaaaatatttttgtctattttgtggagatgatttttgccaaattgagttggtttgtaaatacatagcttagtactaccaaggcatgtcttccttctgggacagtcatgacacaaaatattcctttctaggataggcctggtgttacaactcatcttttataacacaaacacaaactccttgattagactctctcttatatccaacaacatctctcctcatccccattagccaaaaagcaatagaaaatgctgatgat

SEQ ID NO: 298899 - DNA, 552 bp, Homo sapiens
tccttttggccatggatatagaactcacatttgcagctatttcttcagctccagtgttccttcatgcagattacaactaaatctgagataaaatgaatcttaaygtttccccaatgttcaaccttcttacagatgttaagataccatcagagagggctacactatttaaaatttagagagaagggaaaatttataaaaatgcacacatccatacacacatttataccttatatttgacaagaaaagaatttccataactttatcccaagctgccgtcactgtgaaattatccatcatctatgaggtcatgaaaaaaggcagggattgtcaaattttctcatctcaagttatttcttcagatatcagctttgtaacacagagcttctccataactgtaaattaagatgtgtcagtagcatccaaaacaaatgtgaaatatttgcttttgagatatctctttgcatttcaaggagagagcatagaagtgctctttctctctatatctcactgctccaataagacatagaagaatcccttgtagaaaaaaactag

SEQ ID NO: 298900 - DNA, 439 bp, Homo sapiens
tagaaatatgcaaataaccaatactgactcaagaagaaatagaacatatggatagacatatargtaaaaagattgaattagaaatcaaaacactttccacccaaaaaatgtcaggaccagctgacatcactgaacaattctactaaatgtttgaagaaggtttcatactaactcttcacaatcttttccaaaattaaaagggaagggaacacttccaacggattctatgagataccatagaattctctagaattcatagaatcgtagaatttattctatgataccaagtttgtcatggtaatatataaaaaatacattatcttgatttaaaaatcacaaggaaagaaaactgtagatcgatattctttataagtatcgataaaaaatgctatcaacaaaatgctatcaaaccaaaccttgcaacatatcaaaaccgtgt

SEQ ID NO: 298901 - DNA, 439 bp, Homo sapiens
tagaaatatgcaaataaccaatactgactcaagaagaaatagaacatatggatagacatataggtaaaaagattgaattagaaatcaaaacactttccacccaaaaaatgtcaggaccagctgacatcactgaacaattctactaaatgtttgaagaaggyttcatactaactcttcacaatcttttccaaaattaaaagggaagggaacacttccaacggattctatgagataccatagaattctctagaattcatagaatcgtagaatttattctatgataccaagtttgtcatggtaatatataaaaaatacattatcttgatttaaaaatcacaaggaaagaaaactgtagatcgatattctttataagtatcgataaaaaatgctatcaacaaaatgctatcaaaccaaaccttgcaacatatcaaaaccgtgt

SEQ ID NO: 298902 - DNA, 553 bp, Homo sapiens
tatctttgggcaggaagaagagtatagtccttgagaaggggcacaaatagacttctgggatgctgatagyattctgctagtattctgcttcttatctggtgtcttagcttgggctcttctcgaaagtagaccctgaaatagggatttggatgcatgtaatttgagagttgatcacataaagtacaagtgaggacatggagaaggtaagacagggaagaagggaaagcaagcaaagaaagttgcactaatgagccgatgccactgcagacagtatgggcttattcttgctgctgttaactctctgagaaccatttggaacaggtttgtcctgctcatgtttcactggaggatgaggatggaggatgaggatgaggaggatgagcagtctgtgccacctaggaccagactcccaacctgtgtttgagggttgccccatgggaattaaccacccacgtcctctttctatcaacagtttttcattgtgacagagaaagtgcaagaccccatctttcccacatgcagttgaatccaggtgggctgcagggctatgatg

SEQ ID NO: 298903 - DNA, 553 bp, Homo sapiens
tatctttgggcaggaagaagagtatagtccttgagaaggggcacaaatagacttctgggatgctgatagcattctgctagtattctgcttcttrtctggtgtcttagcttgggctcttctcgaaagtagaccctgaaatagggatttggatgcatgtaatttgagagttgatcacataaagtacaagtgaggacatggagaaggtaagacagggaagaagggaaagcaagcaaagaaagttgcactaatgagccgatgccactgcagacagtatgggcttattcttgctgctgttaactctctgagaaccatttggaacaggtttgtcctgctcatgtttcactggaggatgaggatggaggatgaggatgaggaggatgagcagtctgtgccacctaggaccagactcccaacctgtgtttgagggttgccccatgggaattaaccacccacgtcctctttctatcaacagtttttcattgtgacagagaaagtgcaagaccccatctttcccacatgcagttgaatccaggtgggctgcagggctatgatg

SEQ ID NO: 298904 - DNA, 556 bp, Homo sapiens
cctcaagtgattcatccaccttggcctcccaaagtgctgggattataggcatgaaccaccacacctagcaaaaaaaaaaggtattcatattggaagaagtaaaattatcttaattatttctaattttggataataattttgtatatcgaaaatccttagatgtagaaagaataatccattttttaaaattgaaataaataagtttggcaaggtttcaggattcaagaacaayatacaaaaatgaattgtatatctatataatagcaattaacattttgaaatacgaagttagaaaaacaattacatttacaatagtatcaaaaagaatacaaaagtaaagcttcaaataaaattaacaaaataagtttaatgcttttatgtggaaaaccacaaaacatttctgaaagacctaaataaattgaaagtcatctaatattaaagattcagaagattcaatattgttaaggtggcaatactacccaaattgatctataaattcaccacaatccctgtaaacatccaagttggattattgtttagaaattgataagctgat

SEQ ID NO: 298905 - DNA, 491 bp, Homo sapiens
gcaccccctacaaaccaggaaaacagccctcacaagccccttgatcttggacttcccagcctccagaaytgtaaaaaaaataaatgattggttttttaagccaccaagtctatggtatttgttataacagccctggctgactaagacacacagaataggagaaaatgtttgcaaatcatatctgatacgcaacttgggtccagaataaagaactctgacaactgaatagtaaaataacaaattttaaaatgggcagagaatgtgcatagacatgtctccaaagaagatatgcaaatagccaataggcacatgaaaagatgctcaacatcattggctatcagttaaataaaaataaaagccatgataataccatttcacacccactaggatagatatagtaaaaaagacataactgctggcaagcatgtgaaaaaactgaaaccctcatatactgatggtgggactgtaaaatggtgccaatgctttgataa

SEQ ID NO: 298906 - DNA, 553 bp, Homo sapiens
tatctttgggcaggaagaagagtatagtccttgagaaggggcacaaatagacttctgggatgctgatagcattctgctagtattctgcttcttatctggtgtcttagcttgggctcttctcgaaagtagaccctgaaatagggatttggatgcatgtaatttgagagttgatcacataaagtacaagtgaggacatggagaaggtaagacagggaagaagggaaagcaagcaaagaaagttgcactaatgagccgatgccactgcagacagtatgggcttattcttgctgctgttaactctctgagaaccatttggaacaggtttgtcctgctcatgtttcactggaggatgaggatggaggatgaggatgaggaggatgagcagtctgtgccacctaggaccagactcccaacctgtgtttgagggttgccccatgggaattaaycacccacgtcctctttctatcaacagtttttcattgtgacagagaaagtgcaagaccccatctttcccacatgcagttgaatccaggtgggctgcagggctatgatg

SEQ ID NO: 298907 - DNA, 610 bp, Homo sapiens
tttattccactgcgcctagactctccatagaagagaatattagctgttcacaattattctttcccctgtggcctccctctgggtagaaaagacttctcaattctattgactttgaacttgcccatgtgatttcatttggctaacgaactgtaagtggatgtggcttgaacagaggtcttaaatgtgcttgcatgtattgctttggcctctagaggtacggaattttatgagttcagaatgaaactgtcatgtttccagaatgaggagacctgtggaaaaaatctggactcattcacagcctaaaacgagtccgtctaaccccaaccgaccctagtcaagcccaacagggtcacagctgactctcagatgygaaagcaggaaataaatgtttattattataaaccactgagattaaagggtggctttttacatagtataatcagaatgataataagtaatatattcccagatcctcaaataatttcaatgagaagaaatgaaacattaggaaatattgagagtctaaagaaaagtttgctcctacattatacttcctggaatctctcaggtcaatttcatcccacagatgagatctcagaaatgtgatgag

SEQ ID NO: 298908 - DNA, 393 bp, Homo sapiens
cagctgccttgcaaccataagaaaaaagccaaggggattgcagagcaccaacatccctgaattgctgaattaaacaaccttaaaacttcccacatgcaaccttcttcttaatagaaaaataaatcctcatttcttaagtcacttgtatctgggtattcagtaacttgttaccaaaagaatcacaactcaacttgtggattagagagtgggtgatgaggaactggaaacagaggttagactgctcttggatgagaaggagccattgacratgggagaagtagctggatctggagtttggggaggagtctgtaggatttttggtttgtttgggtttggtttggtttttaagagagaaaagatttgagcatatttaaatgatcattggcaggatcg

SEQ ID NO: 298909 - DNA, 610 bp, Homo sapiens
cagtagaaaaatcgctagaagtgacacgtgaactagagatatgttttttctcaccatttaagagcttgcttcatatttctcaatctcatgtatgctttaatctccacaattcaagtaaaagaaaggaactttaacatttacactgcaatggcccctatcactcactcattaattaataacagtaagtaagaaaccaaggttctaccatttccgctctgatttttaaaaaaacagtcttaaatatgacatgttcctttggcttagaggaaattcagtaccacattgtcttgatgtcgttttagaatccagtctatcytgtcatgtttttctttttttaaaagtaaattttaggctatatgttgacaaatccagcagatttcggtaatgctcccaagaaagtgaagtttctttctactaaaacatgcatctgattcttggtaacaggtgtaccatgcccaacttgcacaagtttgtctaatttgacaacctaaaccctttgaaatttgtctggaatttcctaagaaagttgagaaataagtatctatttcaatatttgtgaaagtacctaaatgggtcctgttaattttcatgagattacatcgttaaccta

SEQ ID NO: 298910 - DNA, 573 bp, Homo sapiens
aggtacaacacctgactggcatttaattttaaatcttgtgtttccactttaaaatatacagccatttgcctcccctggaaagactgctgacacaagtgttctattatagaccccaactggcttcaaaccactctgtcatttccgtaaactggttgtatagtattatattatatttacttagtactataggctgctggsttacttaaaagatatatgtaatatgtgtgtatcttacttgttagaccaagtcatactataattaatcaggcagaagtataaattttgaaagatttattactacaactaacagcagtcaagttattaacatccttaaattcagaaactctaggctatattgtctgccatggtatttattatcaaatcctgcagacctctgattaatagaattaatcaaataactttcaaaagttaatattttaatataatcttgaaaataattttagagttgtttctagcctaatattaagactcaataattactgaaagtacacaagaaaactagtgtaaaatttaaacctttcaatacaaacatccctatccagtcatttatat

SEQ ID NO: 298911 - DNA, 587 bp, Homo sapiens
tataggtccaattttattcttctgcatgtggcaatcccattactccagcactatttcttaaaaggagtgtccttcccccactgtatatttttggcaattttgccaaaggtcagttggctgcagatacgtgtgcaatgaccttttaataaattttctttcttacatatttctttttattcatttattcrttgattataaatatttatgaagtatttacatgtgcaagataaaccacgtgccgggtaccctagcaaattaagacaaacaaaccaatctgtgaaccacttctcaaacagggcagatgaaaatgcataaataaaaattactgagaagcaaatggtgatgcttgcaacaaagttattacagatgaagtgccagagaagttcaaaagaaaaagtactacttccatcttgaaggtaaaggaaggaggtttcatggcagaggagacatttgaactgaaatctacgttttttggctcaagagtattggggttaaaaagataaagagaaaaaagtatttggaaaaggaatgctcaaaaagaagaaaccagagtgaagtaaaagcaagtagggggaatgtttatgcac

SEQ ID NO: 298912 - DNA, 575 bp, Homo sapiens
tcttataaacaggaaattttgacacagagctacatacacagatagaacgccatgtgaacacgaaggcagagaatgggttggtttatctacaagccaaggaatgccaaaggttgcctgcaaaccaccagaagctgaaagaaaggcaaggaatagattgttcctcatagccctcagaaggaccaatcctactgatgtcttgatctcaaacttctagactccagaactgtgaaacaaaaaaattttgttgctaaatccacctaatttgttgtactttgttacagcagccctaaaaaacyaatctacctgtagatatatcacagaatttagaaacttaatgctgacccgaggcaacagtagtacttcaaagtacaatgtcttcctttaataaatttgctgtaaggatgcaggcgtttattgttgttgttgttttctggagatcaactaattcttttatttgatccatttcctagaaagataattagaatttttgtttgctcattccagagcatgcaagcagttacaggctaaagattccttagtgcagattccacctttcttttaaattgtgtgacttt

SEQ ID NO: 298913 - DNA, 592 bp, Homo sapiens
cactaaaatttgaccaacttcattaattgtctaaaacaataaccttatcttttgacccactaattccatttttaggaatttataattagaaatgtcctaaggtagaaagagatatatgaggttattctttgcagcacattataattatgaaaaatggaagcaatgtaaattactatcgataacaatatgtatatatttaaaatgattctagtgcacrtatttgacaaaatagtactgccatttaaaaaacatacatttacagaatatttaatgatgtgagaaaatgcttgcaaataaattcatgtaacatatatttgattaaaaatatttcaattacttaaaaatatacatgtaagtaagaagatggaattaaattaaatcatcttgataacactggtttcctctgatgagattagaaatatatttttattttctcctttatatgtgtttattttcaaatgttatataatgatcacgtattattttgaaattcaaaatatgtgttataaaaataaagaaggcaacaaatttttgaatccatttttgaaaggtttccacataaatttgtttaaatgaaaatgtgctagtgctt

SEQ ID NO: 298914 - DNA, 592 bp, Homo sapiens
cactaaaatttgaccaacttcattaattgtctaaaacaataaccttatcttttgacccactaattccatttttaggaatttataattagaaatgtcctaaggtagaaagagatatatgaggttattctttgcagcacattataattatgaaaaatggaagcaatgtaaattactatcgataacaatatgtatatatttaaaatgattctagtgcacatatttgacaaaatagtactgccattwaaaaaacatacatttacagaatatttaatgatgtgagaaaatgcttgcaaataaattcatgtaacatatatttgattaaaaatatttcaattacttaaaaatatacatgtaagtaagaagatggaattaaattaaatcatcttgataacactggtttcctctgatgagattagaaatatatttttattttctcctttatatgtgtttattttcaaatgttatataatgatcacgtattattttgaaattcaaaatatgtgttataaaaataaagaaggcaacaaatttttgaatccatttttgaaaggtttccacataaatttgtttaaatgaaaatgtgctagtgctt

SEQ ID NO: 298915 - DNA, 626 bp, Homo sapiens
aggacaaggtggagatcctgcctctcctatataaagcaattcagcatgaccagagttacaaataakcctcaagaaagatgtgaggaattaaaaagtgagtgactgaaggaagctaagaaaacacagactgaattttgaagagaagaactagaaagaggacttactgccaaaataaagtctcagcagaatataaaacaccttttcttgaatttgtttggtactgtcaagttctcaattcctgccagatttttttaagaaaacaaattaatgacaattattttaaatgtaaacagttatcaaaatagtacataataaccactgcatgcaaaataagttgaaacagaaataaatgatggtagagacagcaatagaagattgttgcactgatatgaaagcaaggtaacaaggctgaaggttaaagtcacctgggaggcagaggtgtgtgaattggagactggctatggtaagacaaaaatccaggggagaaggtggtggagtcagggagaaggtgactttctaatgaaatgaagaattcaaggaaatgcacgcaaaaagagagagagccttaagtccaggaattaaactttaagggacattcaaaataaattagcaagaggaacaaaagc

SEQ ID NO: 298916 - DNA, 672 bp, Homo sapiens
tcttccagtttcaagtgtgtgttttgggtattttatttttaatttttttccttctccctctaaatcttctcggaaattctgcatattgaagcaggtggctcctggtacgaaatctctggatacatttggcttgccaagttttgctcttcgctgtcccctcccgyttacagaagcatctgtggtgcttttcattttggatttacatgcaggaaacgtatatatgtttatataccgaccgcataatatataaatacatatacgcgtgcccaagggcctggttttcgtctctcctccccacgaaacggaatgttttggagccgatggataacaagaacactattaacattcttttgagcctgttttttaaaagggggagggagcgtgaagaattgtttaacatttggccatcgtttggctgcacactaagcaccacgaagtatttatggttgcagatcaggtgcaaacgggggcttagagagaaaggtaagggagcttcctgcgtccgccgagctccggcgtttaccttaatcccgggattgccgagaacttcctattccctgcctctccttcgccttccccaccttccacccacccttctctgctctctctcttctgtaaactcaaccccttttcaatcccattggggtgggggtggggggtctgggaggtata

SEQ ID NO: 298917 - DNA, 672 bp, Homo sapiens
tcttccagtttcaagtgtgtgttttgggtattttatttttaatttttttccttctccctctaaatcttctcggaaattctgcatattgaagcaggtggctcctggtacgaaatctctggatacatttggcttgccaagttttgctcttcgctgtcccctcccgtttacagaagcatctgtggtgcttttcattttggatttacatgcaggaaacgtatatatgtttatataccgaccgcataatatataaatacatatacgcgtgcccaagggcctggttttcgtctctcctccccacgaarcggaatgttttggagccgatggataacaagaacactattaacattcttttgagcctgttttttaaaagggggagggagcgtgaagaattgtttaacatttggccatcgtttggctgcacactaagcaccacgaagtatttatggttgcagatcaggtgcaaacgggggcttagagagaaaggtaagggagcttcctgcgtccgccgagctccggcgtttaccttaatcccgggattgccgagaacttcctattccctgcctctccttcgccttccccaccttccacccacccttctctgctctctctcttctgtaaactcaaccccttttcaatcccattggggtgggggtggggggtctgggaggtata

SEQ ID NO: 298918 - DNA, 539 bp, Homo sapiens
tgtggaatgataaaaaatagaaggacaaccagcaagctttatgaagtcttttctccacagcgtttgctccaaatccctagamtgataatttccatgtaaggttctgagcgttttttgtgccatgaactcctctgacagtctagtgaagcctataatttcacctcaaaatatcggtgaacattagaagcataactaggctgggtgcagtggctcaatcctgtaatcccagcattttgggaggccgaggcaggcggatcccttgaggccaggagttcgagaccagcctagccaacatggtgaaacctcgtctctactaaaaactaaaagctaaaaaaataaaataaaaaagccaggagtggtggcgcatgcctgtaatcccagctactcaggaggctgaggcaggagagtcgcttgaacccgggaggcagaggttgcagtgagccaagatcacgccactgtactgcagcctgggcagcagagtgagactccatctcaaaaataaaaataaaaataaagttagaaactagaaaaagaggcaa

SEQ ID NO: 298919 - DNA, 466 bp, Homo sapiens
ctgcagtagcctagtacttgaataacttcacagaaaagaacacatacatcacaaccarttgccaaccccaacccccaccccatctcaagatctgcatctacttggactgctatgaacaaccaatgcatgtaaattgtgttaacttataatatttgaggctgcttagaaaatctctttagcttactaacaataataaagcctaaatacaataatatattcaataatacaacagtacatgactgaactcagaacctcagaaaataatttataattcgactacaccatgctgctggtaataactttcaaaaagtaaaatctctaacacaaatttattattgacatgaacttttctctataattacatttatccccaatatgaatgtatatttctagctttcttttcaactcaaagaaatactaattaaatagttgcttcctattaaatgctgaagctttagaaatcaat

SEQ ID NO: 298920 - DNA, 466 bp, Homo sapiens
ctgcagtagcctagtacttgaataacttcacagaaaagaacacatacatcacaaccaattgccaaccccaacccccaccccatctcaagatctgcatctacttggactgctatgaacaaccaatgcrtgtaaattgtgttaacttataatatttgaggctgcttagaaaatctctttagcttactaacaataataaagcctaaatacaataatatattcaataatacaacagtacatgactgaactcagaacctcagaaaataatttataattcgactacaccatgctgctggtaataactttcaaaaagtaaaatctctaacacaaatttattattgacatgaacttttctctataattacatttatccccaatatgaatgtatatttctagctttcttttcaactcaaagaaatactaattaaatagttgcttcctattaaatgctgaagctttagaaatcaat

SEQ ID NO: 298921 - DNA, 466 bp, Homo sapiens
ctgcagtagcctagtacttgaataacttcacagaaaagaacacatacatcacaaccaattgccaaccccaacccccaccccatctcaagatctgcatctacttggactgctatgaacaaccaatgcatgtaaattgtgttaacttataatatttgaggctgyttagaaaatctctttagcttactaacaataataaagcctaaatacaataatatattcaataatacaacagtacatgactgaactcagaacctcagaaaataatttataattcgactacaccatgctgctggtaataactttcaaaaagtaaaatctctaacacaaatttattattgacatgaacttttctctataattacatttatccccaatatgaatgtatatttctagctttcttttcaactcaaagaaatactaattaaatagttgcttcctattaaatgctgaagctttagaaatcaat

SEQ ID NO: 298922 - DNA, 466 bp, Homo sapiens
ctgcagtagcctagtacttgaataacttcacagaaaagaacacatacatcacaaccaattgccaaccccaacccccaccccatctcaagatctgcatctacttggactgctatgaacaaccaatgcatgtaaattgtgttaacttataatatttgaggctgcttagaaaatctctttagcttactaacaataataaagcctaaatayaataatatattcaataatacaacagtacatgactgaactcagaacctcagaaaataatttataattcgactacaccatgctgctggtaataactttcaaaaagtaaaatctctaacacaaatttattattgacatgaacttttctctataattacatttatccccaatatgaatgtatatttctagctttcttttcaactcaaagaaatactaattaaatagttgcttcctattaaatgctgaagctttagaaatcaat

SEQ ID NO: 298923 - DNA, 504 bp, Homo sapiens
atctaatattttgtggtaggcagcttgtaaaatgatttccaatgatctcttccttccaatgactttctggtacttacgtctttgcataacctcttccccttgaagaagaagcttayatgggctacacctagtaaattgcttctaatgaatagagtgcagctaaagtgatggggaccttatttctgagcttagcttacaaaaactgtgacttgctcattctctctcttgctctcttttctaaatcctcactttagaggaagcatgttgctatgttgggagtagtcctacagagaagtccagtggtaaaggactcatgtcttaggctaacagacagtgaggacctgacacctactcacagacccgggagcgagcccagaagggccctccctgccagtggagccttgagatgaatacagccacagctgccaactgactacagcctcgtgaaggatcctgagtaagaggatcaaagtaaaccacatcaagattcttgacccctggaac

SEQ ID NO: 298924 - DNA, 484 bp, Homo sapiens
tttagatgctcattattttaagataattctataataaaataatttaatgttttatatattgcatattgctaaaaaatgaggatttgatttatgtawtgaattttggctttatgccttttgaaataaaactcacttatttttagcaagcaatgaagatggtgactttgacgttgtcattaccaactaaactatagttcagtctcttcagtgttcttgttttctttcaaaagctgtttatttttataccaaatgttgtgcaacagggcaagaccaggcagactggtaatttgcctgcaagaaacagctttattcttcattatggcagaaggaggaaatttcttaagacggaaatagattataaaatgaatgaatgatacccaatcttaaatattaagtataggtttccctatatcaacaaatcatatgacttactgaaatttagacatgtctgtaacctatactattgtctctgaataaaaaagaa

SEQ ID NO: 298925 - DNA, 487 bp, Homo sapiens
tttagatgctcattattttaagataattctataataaaataatttaatgttttatatattgcatattgctaaaaaatgaggatttgatttatgtattgaattttggctttatgccttttgaaataaaactcacttatttttagcaagcaatgaagatggtgactttgacgttgtcattaccaactaaactatagttcagtctcttcagtgttcttgttktctttcaaaagctgtttatttttataccaaatgttgtgcaacagggcaagaccaggcagactggtaatttgcctgcaagaaacagctttattcttcattatggcagaaggaggaaatttcttaagacggaaatagattataaaatgaatgaatgatacccaatcttaaatattaagtataggtttccctatatcaacaaatcatatgacttactgaaatttagacatgtctgtaacctatactattgtctctgaataaaaaagaaact

SEQ ID NO: 298926 - DNA, 523 bp, Homo sapiens
cttcacccaactctgaacacctcttcacaaaagcagaagagaaataaaataattttattattgaataaccttcatctagaaagaaattctaccctttcatatagtcacacagagacaacccattgacatacaatttctcaggataaacaatagctagtcctcaagtaagagaaattgaaagcagcatttatcacactaaattcatcctagattcacctggcaattggtttggccatctgtgtttgctaattggctttatccaaactaaaaataaacttgtattgttattacaggaggtactttcagaacttgaagttaggatcttaccttcccacagamcctttaagactggggtgctctattccttaatgattatatttcaaatagatagctccaggatcttgagaaagacatttctgtgtcttaaagctggaaagcagcttatttagcatttaaaaagatttacatacattttaaaaatacagagaaagaacttacaggtgccctaaaggaaatggtctaa

SEQ ID NO: 298927 - DNA, 572 bp, Homo sapiens
catgtaaatcatagattcagcttgtcaagaattttataagaaaattctgctgggattataattgtgattactttgaatatgtagactaattttgggagaattaacatttttaaatatggagtcttctgatctatggtcatgatgtatttccccaataaaatttagttctctatattttccatcaaaataattttgyggttttccatttataggtctttcacttactttattaaatacatttctaaatatttaagtggtttagttctattaagattaaaaaatatttttattttgaagtcattatcaccccatgggaaattatggaaagagtgcaaagtgtccagcatcttccaatgatgacagttttatagctccagtaatattgaaaccaaaaaaaaaatgtgtacagacaatagactgtattcaattttcatcattttaaccctatattttgtatatataggcatgtatagttctattcagctttattccaggtgtcggtttatgtgatcaccacaaaaatcaagatacagaactgttccattaccacaaaaaggaactctttcatgtca

SEQ ID NO: 298928 - DNA, 589 bp, Homo sapiens
ttactttattaaatacatttctaaatatttaagtggtttagttctattaagattaaaaaatatttttattttgaagtcattatcaccccatgggaaattatggaaagagtgcaaagtgtccagcatcttccaatgatgacagttttatagctccagtaatattgaaaccaaaaaaaaaatgtgtacagacaatagactgtattcaattttcatcattttaaccctatattttgtatatataggcatgtatagttctattcagctttattccaggtgtcggtttatgtgatcaccacaaaaatcaagatacagaactgttccattaccacaaaaargaactctttcatgtcatccttggttccatggctaccactaatctgttttctgtctctatagttttgttcttacaagaatgttatatagataaaatcacacaatatcatgtttttaaattatattgaaataatcttaggaattggtgggagtgaaaagaggtaaagatgaaaaaagtttaagttgataattgtcaaagctgagtgagggattattaagagttcattacactatacactttactttggaatatgtc

SEQ ID NO: 298929 - DNA, 600 bp, Homo sapiens
taaccatgctgcagttaccaattacctctcaaatttgtgacttaacaatatggaagtttctcattcatagtacatttccaatctcagttgctagagctatcttctcaatgtagatagttaggaacctaggcaaatgaaagcttactcttaacacgtgctttcataatcacaagagctgaataaatagaatatgatgaatcatgcaatcactctgtggcagattaaagatagttgaaatctttttcttattactttaattaaaagatggagtttagctccctttctttgaattygggttggctttagtaacttacctgataaatagaatattgcaaaactgaacatgtatgacttccaagtcaagattagaagatgccctaaaacttgatgtcttagaaccatccctcaggaacctctgatacaccatgtaagaattccagctattatgatactgctatgcttcaaaggtcatctataggagctttgagtaacagccttgccatgtattacatctgagcccttcaaccatctctgccaagtagccagatatgtaaatgaagccatgttacaccctccaaccatacctattgccagctaaaa

SEQ ID NO: 298930 - DNA, 506 bp, Homo sapiens
ataacagcagcacctgacaaacctgttgctgcacacatctgtactcttcaatcaataaaacctgatgcaaaaaacagaaaagggggagatgtaggacattggtcagkgtggtgggaaacgttataagaaaaagttatagggaaaggtgcaaaccttactggaaggccaggaggtttggcaaaagcttcgggagagaattatggctgaaggcagccaaattctcttatctggaggctaaaagcaaagggcagataacaagggaatgtaaaggaatttgtctagataaatttgtttactcctgtctccagaaaccaacttttgatcattcctgtgagctctttatttggggggtcgacaatgtttattacccacaaattgtgtttgcttcaagcctttgtaattaaatctgtactaaataaatgtgagcagggctgggttatgggggtggcactcttgctggcagttcgaagacattgtgggcccctagccacgctgtcgggcaaaat

SEQ ID NO: 298931 - DNA, 506 bp, Homo sapiens
ataacagcagcacctgacaaacctgttgctgcacacatctgtactcttcaatcaataaaacctgatgcaaaaaacagaaaagggggagatgtaggacattggtcagggtggtgggaaacgttataagaaaaagttatagggaaaggtgcaaaccttactggaaggccaggaggtttggcaaaagcttcgggagagaattatggctgaaggcagccaaattctcttatctggaggctaaaagcaaagggcagataacaagggaatgtaaaggaatttgtctagataaatttgtttactcctgtctccagaaaccaacttttgatcattcctgtgagctctttatttggggggtcgacaatgtttattacccacaaattgtgtttgcttcaagcctttgtaattaaatctgtactaaataaatgtgagcagggctgggttatgggggtggcactcttgctggcagttcgaagacattgtgrgcccctagccacgctgtcgggcaaaat

SEQ ID NO: 298932 - DNA, 542 bp, Homo sapiens
tgtatcccactcaatatagactatccaataatttctaaatattactatatatttattgtccattttgtaccttaaatgcaaactccattttcctacctccaacattacaattatttgattattctagatgcacttccattaaatgctttccaattctctctctctctttgaaactacataatacaaacctgtataatttttatgtatgtattgattaatttaaaatggtagcttttgatatgtcctactgcatctacttttttattttaattacacaggatcaatacaaacagtaggttaaatgatcaataatagagataaatatgtcttttatttctacctaaaattttatttcttacaaaccttgctttctggttttaagtacatatacctgggtacatataacaactagtatttttgtttcrttttaagtatttatatactttacacataattcatgtacattgtcttctaaatctcaatacattattttctaagctgtaacttaaaagttatgtatgtactagacacttatataacat

SEQ ID NO: 298933 - DNA, 419 bp, Homo sapiens
gagaatttaagaattgaggcaattttgtggtttgaggcttgaattatctggataattgcttcaattttccacctcactacacatgggaacacacactgaacacacacatcctcacacattggaaaacattagtttttcttttttattgatgggggaaaaataaactaaaaggtaaaatcttaatattattaaaaggtaaaatcttaayattattaacattatgaatacactttaatctgcatgttttattgataagttttaggtagatgttctaaacctattcaaattcagaattttgaattcaaggcaatatttgctcttaaaaaacaaatggttttaagccctgcaatcttcatttctgaattgaaatggaaatggagcactgcattgtgcagggaggtgaaggaatgctcatagtt

SEQ ID NO: 298934 - DNA, 593 bp, Homo sapiens
tcataatgatcagctggactagtaatcaatagctgctggggtgttgaattgaaatgccattgtaattgactaggtaacctgagtaacacaggctgcatagcaaaggagaagtatattagtacattagtcatcatcctgttagaaacacaaaaatcatactggtacttcarcagagagaattcaataaaataattaaacaggtggtaaagaaataaaaaagtagaaaaggaacactgagttaacacaaagatagtaacctcaggaggtaactccaacctcaatggcttggggaacaaagtgtaaccacccaatgggttcaccttgcctgctgcctagacagagccaatttatcaagacccgggaattgcaatagagaaagagtaattcatgcagagccagctgtaaggaagactggagttttattattaaccaaatcagtctccttgagcattcaggatcagagtttgtaaggacaacttggtgggggaagggaagccagtgagctgggggtgctgattggtcaggtcagagatgaaatcataaggagtcaaagctgtcttattgtgctgagttcctgggttggggccataaaa

SEQ ID NO: 298935 - DNA, 593 bp, Homo sapiens
tcataatgatcagctggactagtaatcaatagctgctggggtgttgaattgaaatgccattgtaattgactaggtaacctgagtaacacaggctgcatagcaaaggagaagtatattagtacattagtcatcatcctgttagaaacacaaaaatcatactggtacttcaacagagagaattcaataaaataattaaacaggtggtaaagaaataaaaaagtagaaaaggaacactgagttaacacaaagatagtaacctcaggaggtaactccaacctcaatggcttggggaacaaagtgtaaccacccaatgggttcaccttgcctgctgcctagacagagccaatttatcaagacccgggaattgcaatagagaaagagtaattcatgcagagccrgctgtaaggaagactggagttttattattaaccaaatcagtctccttgagcattcaggatcagagtttgtaaggacaacttggtgggggaagggaagccagtgagctgggggtgctgattggtcaggtcagagatgaaatcataaggagtcaaagctgtcttattgtgctgagttcctgggttggggccataaaa

SEQ ID NO: 298936 - DNA, 574 bp, Homo sapiens
gttaaattaaactaaataaaaatgcaattcctcaattacactagccaagatttcacatgctcaataaccacatgtgcctagtggttaagatattggacagcacaggcatagaacattttcatcactgcagaaagttttattggaatacattgctttacagtaatgatcctaagggaaatttatatcactgttcggttccagyggatcatgaatccaaagagtaggtactatcatttaaatgaaaataacaattcagttggcctgaagttacccttaaagaaaatgttatttttaaatcactgctgtccatttcaaaggtacctcaatattggccaatctttccctacatatgttctacattcagaatctagtatttgtattaataatatatttataattatatataactctattttatatactgtattaagagtaaattttactgcaattataactattggaaactgtggagtctatgatgtgcatatgataaattaattttgtttttgcatttgtttcttcaagatcaccagttaagcttatttagtatatatttagctatttctcataaaca

SEQ ID NO: 298937 - DNA, 574 bp, Homo sapiens
gttaaattaaactaaataaaaatgcaattcctcaattacactagccaagatttcacatgctcaataaccacatgtgcctagtggttaagatattggacagcacaggcatagaacattttcatcactgcagaaagttttattggaatacattgctttacagtaatgatcctaagggaaatttatatcactgttcggttccagtggatcatgaatccaaagagtaggtactatcatttaaatgaaaataacaattcagttggcctgaagttacccttaaagaaaatgttatttttaaatcactgctgtccatttcaaaggtacctcaatattggccaatcyttccctacatatgttctacattcagaatctagtatttgtattaataatatatttataattatatataactctattttatatactgtattaagagtaaattttactgcaattataactattggaaactgtggagtctatgatgtgcatatgataaattaattttgtttttgcatttgtttcttcaagatcaccagttaagcttatttagtatatatttagctatttctcataaaca

SEQ ID NO: 298938 - DNA, 553 bp, Homo sapiens
tggaatgttgtactggaaagagatgatttagggtatctggcaaaagcagcaaagcatttgagaagttacctggatgtttctgaaagtgtatgctcatatgcatgaagaaagagatggtctaaaattggaacttatatataaaagtgaagcacagcataaaagtttgaaaaatttgtagcctgacaatgcagtagaaaagaaaaagtcattttccagaaagaaattcaagccagctgcagaaatttgcctatgtaacaaggarccaaatgttaatcaccaagacaatggaaaaaaatatctccagggcattacagagatcttcacagcaacccctcccatcacagtcccagaggtctagcaggaaaaaaatggttttatgggccaggcccagataactgctgctctgtgcaaattcagaacagggtatcctgtatcccagcctctccagctccagtcacgggtaaaagaggccaaggtacagctcaggccattgtttcagagggtaaaagccccaagcctttgcagcttcactgtgattttgggcctgctggtg

SEQ ID NO: 298939 - DNA, 608 bp, Homo sapiens
tgaaaataccatttgtatttctttagtatgggtaggtcctagtattcaggataaatgaatggcatttttcatagctgtatatgtaagtcaattaagtgccaagtcatatatattcaaaatatgctgatgctgatgcagaaaaggaagaagtagaggagcaggaggaggaggaggagcaggaagtagaggaggaagaatatggagagaagaagaaaactctttttctctgtaagacactgatgaccctaattcttttcagctatgaagagaaaaaagtatctagtaatgagaacatagttttgaggaatgctattattttcctattatttgaacacagtgatgctccacttacacttgaaaagaggaagatatgtgcagatgaaccttcactttatgccagatactttcagctgtttctcccaacaatcacgggaaattacaggctatcagtgttaatttgcaacttatggggccccttcaacaggggctcccttcccctcayggcaactccttaagattggcctatagtcattattgacttgagactgcttttgtactattccccttgcagaacaggacagagaaaagtttgcgttcacaataccagc

SEQ ID NO: 298940 - DNA, 607 bp, Homo sapiens
ctccaacatctattatttcatactctatgtcatattttaatttctcttaggaaatatgtcttcaaagtttatgacttattttttggagtacaaattatacaatttctgttcataggagttttgtaacttcattaaatcatctycaaaacaatttttctctcttattttctgaaaaacttctgcattaaaataactaaatatatatatcagactgtgaagttgttttacttcaaactgtttctaggtggtataggatgtatattatgctcagaaaaggttcttcctttcataaaagaaaatgtagtgcttcattgggattacgcatatctgctatttcttatatcagtctctgggatagaaagaaaaatatcgaaaatggaaaacaataaagtacctttatagttttgtttcatttccttcactgacgctaatgtcacacaaaatgtccaagaatattgtgtgtcaaaattatttctattatacacaaaaaaattcatggctattgatattaaaactgcatcaatggtaaaagcacatcataaacacatgacttgatgttacagcttcaaaaaatttttttgaattagtcaccaacataaaagccttc

SEQ ID NO: 298941 - DNA, 607 bp, Homo sapiens
ctccaacatctattatttcatactctatgtcatattttaatttctcttaggaaatatgtcttcaaagtttatgacttattttttggagtacaaattatacaatttctgttcataggagttttgtaacttcattaaatcatctccaaaacaatttttctctcttattttctgaaaaacttctgcattaaaataactaamtatatatatcagactgtgaagttgttttacttcaaactgtttctaggtggtataggatgtatattatgctcagaaaaggttcttcctttcataaaagaaaatgtagtgcttcattgggattacgcatatctgctatttcttatatcagtctctgggatagaaagaaaaatatcgaaaatggaaaacaataaagtacctttatagttttgtttcatttccttcactgacgctaatgtcacacaaaatgtccaagaatattgtgtgtcaaaattatttctattatacacaaaaaaattcatggctattgatattaaaactgcatcaatggtaaaagcacatcataaacacatgacttgatgttacagcttcaaaaaatttttttgaattagtcaccaacataaaagccttc

SEQ ID NO: 298942 - DNA, 607 bp, Homo sapiens
ctccaacatctattatttcatactctatgtcatattttaatttctcttaggaaatatgtcttcaaagtttatgacttattttttggagtacaaattatacaatttctgttcataggagttttgtaacttcattaaatcatctccaaaacaatttttctctcttattttctgaaaaacttctgcattaaaataactaaatatatatrtcagactgtgaagttgttttacttcaaactgtttctaggtggtataggatgtatattatgctcagaaaaggttcttcctttcataaaagaaaatgtagtgcttcattgggattacgcatatctgctatttcttatatcagtctctgggatagaaagaaaaatatcgaaaatggaaaacaataaagtacctttatagttttgtttcatttccttcactgacgctaatgtcacacaaaatgtccaagaatattgtgtgtcaaaattatttctattatacacaaaaaaattcatggctattgatattaaaactgcatcaatggtaaaagcacatcataaacacatgacttgatgttacagcttcaaaaaatttttttgaattagtcaccaacataaaagccttc

SEQ ID NO: 298943 - DNA, 531 bp, Homo sapiens
accgtcatattactgatatatataaactgatgtaatttataaagttgtacatattttaatcttttccttatgtgtcaacacatttatatagcaatagttatttttatacttttattgttaacttctataatgaaataatattgatttattattattatattctttatttgtcaatatagctacctttaccaatgagctttataggttgaaatatttttatgttgctatttggtgtcttttcatttcaactttaagtatcctttaagaatttcttatacagtgatatagtttggatatgtgtccccaataaatcccacgttgaattgtaattcccattgttggaggttgcaccttgtgggaggtgactggatcatgggggttgatctctcatgtgttggttctgtcttcatgatagtgagttctcacaaaatctggttgtttaaagtgagttgcaccttctcccctcaccktgctccttctttggccatgttatatgctggctcccattttaccttctgctatgaataaaag

SEQ ID NO: 298944 - DNA, 565 bp, Homo sapiens
gttaaaatgaaaatacaacatgccaacactttgggatgcagaaaatgtcataaaatgagggaagtttataagtctttargttgttctatatattagatcaaatcatctgcaaacatggacaattttacttcttttcattttgcatgccttttatttatttgtcttgcctaattgttccatccataacttgcagtactgtgttgaataagagtggtgagggtggccatccttattttgttctagggttcttagagaagaagtttcagcttttccccattaagtgtgatattagctatgggtttgtcatgtatggcctttattgaagggacattgaattttatcaactgctttcactgtatctactgtgatgatcacaaagattttgttcttcattctgttgatatgatgtatcatgtttattgatttgcatgtgttaagccctgcttgcattcctgggataaattctagttgatcatggtatactatttttcttacatgctattggatttggattgctagtggttttttgaggaattttgtgtctatgttcaataggatattggcc

SEQ ID NO: 298945 - DNA, 565 bp, Homo sapiens
gttaaaatgaaaatacaacatgccaacactttgggatgcagaaaatgtcataaaatgagggaagtttataagtctttaggttgttctatatattagatcaaatcatctgcaaacatggacaatttkacttcttttcattttgcatgccttttatttatttgtcttgcctaattgttccatccataacttgcagtactgtgttgaataagagtggtgagggtggccatccttattttgttctagggttcttagagaagaagtttcagcttttccccattaagtgtgatattagctatgggtttgtcatgtatggcctttattgaagggacattgaattttatcaactgctttcactgtatctactgtgatgatcacaaagattttgttcttcattctgttgatatgatgtatcatgtttattgatttgcatgtgttaagccctgcttgcattcctgggataaattctagttgatcatggtatactatttttcttacatgctattggatttggattgctagtggttttttgaggaattttgtgtctatgttcaataggatattggcc

SEQ ID NO: 298946 - DNA, 592 bp, Homo sapiens
tatttaagttaattactcagaaaaggtcttatctttgctttttttaattgacacattgtaactgtacatatatatatataaggtaaaatggtatgttttaattcatatatcttttgtgtatggatgaaatcagggtatttttcatgttttaacctcatgaatttactatttcttggtagtaagaatattcaaaagcttctcttctaccaattttgtaatacacagtattatcttactgttaatcatcgtcatcctayggtgcactaaaacactagaacttatttctcctatctaaaatgtcactctgtacctgttgaccaacatctccccatcctttcctccttcactgcctcacaagtctccggtaactactgttcaactctttgcttccatatcaactctttttttttttttggattccacatatgagtgaagtcatgcatttggggtcttctgtgggttttggaatattttctatatttctgtgaagaatgtcattggtattttgacagggattttattaaatctgtagattgctttcgttagtatgaccattttaataataatcattatttcaattcatgaacacagg

SEQ ID NO: 298947 - DNA, 583 bp, Homo sapiens
ctactgggtttcatacattgattttgtatcctgtaaatttactgaagttatttatcagttcgaggagcagttgggcaaagactatggggttttctaggtatagaattatgttaatagttaagagagatattttcccttcttcttttcctatttagatgcctttttattctctcacctctgattgttctggctaggacatccagtactatgttgaatagcagtggtgagagtaggcattcttgtccttccagttctcaagggaaatggtctcagctttttcttgttcagtatgatattggctgtggatttgtcatcgatggttcttatgattttggacgtatgttccttagatactyagtctgttgggggtttctgttataaatggatgttggattttatggtgctttttctgcatctattgagatgatcatgtgctttttgttttttattctgtttatgtgataaatcacatgtatttatttgagtatgttaaaacccaacttttatattccaggaataaatcttacttgtttaagagtaaattaactttgtgatatgttattagattcagcttgctagtatc

SEQ ID NO: 298948 - DNA, 524 bp, Homo sapiens
taaggtcagaaagtcagaataaaggatgaaaactaagctcataaaattaatgtatgggagccatttttattaytatatatgatctgattcaatgaatatcctgagttatggtcagttgtgacctcttcttgtagtgggagaagttaggaaggcctatagtaagatgatgggcagattttttttttctctggtttagtggggagggcccagagatgttttaaaaatgtggcctattttcttttgggaggtggcttaactacagtaaacatatctttgaatggcaaagaatagatcaggtgacttgtagcagctgcttatgctggtacttaggttttctttgttcttggcctggtgagtaccatgtcaaggagcaacagactctaagtttcactaattactgaatggttgttttcattgtactatctgttttaattatcactggcttatcccacagtggatctcaggtgtttcagctcaattttataatatccagttttgattccctaatattagacactgtgtgg

SEQ ID NO: 298949 - DNA, 589 bp, Homo sapiens
cgcaacttcaacagttacatttagacatttttagtaactcagaagcaaattgttggtaactagagaatcaagtatttttggcaacagatatataaaatagcagcaattattatatggctgggaaagtacatatgattatcttacaagctaagacttatctataagcaggctgataacacagtcttacttaggtactgtttttggtctttggatgaagcagtctattagtaatacactgtaaaccagaagytgccaaagttgctcccatctgtcctttttgagcatttcatatgtggccatatgaatgagcccagagaccaacagctccaatcctacaggccttgtaaaaagcactagttgtgagatgcagccagagaactcatcgatgatctcaatacctaaaacactgcaccatcaaacagacatgctggattggcaatggctggctcagtgatgtccaagaccacagtcatggcagtgaaaggacttgaggtgttttggcaccaaaggtggtgaatggttcctccacggtatgcttgcttccaggtgctatgataaaaaccttggcttttttatgacttcctaaaat

SEQ ID NO: 298950 - DNA, 510 bp, Homo sapiens
acaagactaagctgaaatatctagctgaaaacaactaatctatatcaaacctgtagcaactttgaatacatgatggagtagtgggtatgtgaactatacttattcctatgcaaatttgagtcagcctatgagaytataattagcccaggtgatgcacctggaaatctataatttttgtcctcatgtctggtattccagaaaacctggtgtaactatactccacctttcctggcaggaaattttaaatgcaaattttctagaagttctcttgcaaaacaacaaaataaaataataagaactccttatgattttttttaaacaatgaggtaatgtaatggaattctgaaatatattctgtaactgccattgtgttctgtgagatatccctacagaaacagatttggagtcactccagttcatgctgtcagtttggactaagacaggcagtacgaatgggcagacaatttttttgataatgaaatctagaaatttgtttggaaaaccctgaac

SEQ ID NO: 298951 - DNA, 619 bp, Homo sapiens
gactgctggggaaggctgaactccagggcaagactgccttcccactcaataccctttccagctcccatccctctgagagccacttctaccactcaataaaatctccacactcaccatccttcaagtctgtgtggcctcattcctcttgggcaccagacaaaaatttgggatgcactgggtgcgggaacccagaaaaggctgtcacattggcccttcgcccttgctggcagtgggcagctgcctcatacaatgaggcaaaaggctcactgggctggtaacataccctgtggggctccggggctcacaggcaccccctyccagatggcagtgctaaaagagcatggtaacgtgctaggatgctgccaagcggcctacacagagcctcctcccaccagagaggagccatcagccggttccagcatttgttagctttgtctcctgcacctactcacctgcatgctccccatcccatgaggggttcagagctgcaggctgagtaaatgagccgccccttcacaagtcccactcctgaaggggccaagggaactatcccattttgtgtatatatatatgtgtgttatacacacttatatataagtgaaataaatgataacaatga

SEQ ID NO: 298952 - DNA, 196 bp, Homo sapiens
aacaaaacttccttttctcttccaaataccagtatatggtgcaatacaaaagtggttggaaaaatagatttgtccactgttaacaagtcctgtgacaatttagacattgaggaccargcgttccttgcatttgatttataccctcctcaggatgttatatctatggagacaaattggccagaagagacattaaatg

SEQ ID NO: 298953 - DNA, 573 bp, Homo sapiens
atccttaaatctattctgcaaagatgccaggaagacaaataagctacttataaaagcaggaagcttttttggaggaaaggcactataaaagcaaaatatattaaagaactattttcaaccattctaaattctgtgcctaacttccagcttaaattggtagcttaaaaaacagaggtcaacacagaaatcagtaaaaggatcaaggcagaacacagaatacacaaacagcaaatgcaagagataaaccaggaggcagattaggttatcagacataacataaagatctctccttgaaaatgacatctctcttctaacctaatgttaygaagactaactgagcagaatgaagagttgttaaacagccacaaatttaagtaaatctgcaaagtaaaatctagtcttggttaatcataatgaagaaaaagaataaacaaattgattataaattggctgccaaagtttgcaagggttttggaattcaattactgacatatttaacataaacaagagggaagccaaaaggcaaaaacaccacctggagattagcagcaagaaggccatgaaaacagcaaa

SEQ ID NO: 298954 - DNA, 470 bp, Homo sapiens
caaacctctggcagaggaggtggaagagcagccagagaggcaggaggaaaaccaggagcttggccaggtgcagtggctcacgcctgtaatcccagcactttgggaggccgaggcaggtggatcacctgaggtcaggagtttgagaccagcctggacaacatggtgaaaccccatatttactaaaaattagctgggcgtggtggcaggcgcctgtaatcccagctacttgggaggttgagacaagagaatcgcttgaacccaggaggtggagrttaaagtgagccgagttcacaccatgcactccagcctgggcgacagagtgagactctgtctcaaaaaaaaaaaaaaaaagaaaaaactaggagtttggggaggtgggggtcacagagtccagggacaaaagcactctaagcaggaggcagtagtcaacagcactcaaaatgggtgacaaaagatgtgtctagtggcac

SEQ ID NO: 298955 - DNA, 499 bp, Homo sapiens
aactctttacacggtaaacttcatatttgtgcttttcttttctggaaaaaaataatttttttattagttaactgcttgaaatatgtgcattttattgtttgtaaattgtacatccactttaaaaaaaaaaaaaaggaagcagcagtctttaggcagagaagagtatgggcaagtgggaaaaaagaaagggcttctccacccatcaatcccactgctgtrttaggcaattttccctgtgccaaactgtatggcagttatgaactgacatttcaaaatcaactacagagaggcgggaggcattttctaagaatatcctagtctgtgctaaccatttaggtccaagccacattcccttacattttgaaagcttttcatcaccatttccttcttttctcatctaaggtcatcccaggaaagggtttttcagagtcagcagccctccatccccagcactgcatacacattgcataacattggccgtataaattttacacccata

SEQ ID NO: 298956 - DNA, 555 bp, Homo sapiens
gccacgaaaagcaccataaaacaaaggtaaggtttattaatgcagatttaagtttgtgtattccctattgattgagtctctagtgatttagtcatctttctttacctggtgcagagagggagatatctttacgaatggagattttctttatagatgtgcatttcacttacaagtttctcacaataatccttatgctaatgaggcacattttggggtggcatgtcctgagccttgtaaaggtggaaaaagtataataccttttctcacccatcataagggtcacatctgacacgccaacaaggacaggttaacaagagaaaagcataataaatttatttcatccaagttttatatgacagggaaggcttcagaatgaagatcccwagacatagggaaaactgtctgtttttatgcttaggtttgataaagaatggacagttgcgtagaagtgtacatggggtgtattctaatggtaatagactgaggggggaagcccagcaaggcctttcggttcagattcttattggcctgtctgtatagcattccttcctccca

SEQ ID NO: 298957 - DNA, 507 bp, Homo sapiens
ggggtaataagctttatgaaacatagccagctttatgtgactttttttttttttttcttttttgagatggagtctcaatctgtcgcccaggctggagtgcagtggcgcagtcttggctcactgcaacctccctctcccaggttcaagtgattctcctgcgtcagcctcccaagtagctgsgattacaggtgcacacctatgtggcctttttgaatcagtattggttagtgaaattctaaggcatcctttcccactctcaccctccatcccccaaatttatcatttttaaaagaaaacacaagacattagagccaacattgccaatgttgtattataatcctaaatatgatccataaattagaggataaagcgttgtgaaaattttgcatgggaagtagtattactgtagaaaatataggactgttgttttattttatgttgaatttgttctaaatggttctattcaagtatttaatatgtgataagtcttttattttctagtttaag

SEQ ID NO: 298958 - DNA, 593 bp, Homo sapiens
agaaagcttactgggatttcctcatcgaaagtagagattgcagctaatcctagtaccttttgttagtaattacttaaggcacagtgcaaagttgaaggactgttttggtacaaactcaagccagctacatgtatgcttgccttggtatccttgctagagcacatgcrggtataataccgtattatacacaacaaggccaccctgttgtatctgtgttacaattaaacatcagtcccagaaagtgaaccctagtcatttattataggtgcccacctctgacttggaacaaaatgccactccattcatgttcatttttgtcctggagaggatttatttcctaaaagattctgaaagccaacaaatcaatgtagttcttcatagagaacttaagagtaaggctcaaaatggcctcaaaatgggcttcttggatgacttccaacagtgactggcctcaacactgcagatgtctgagcactaccataacctaacgaagtgaggaaggaggaggcaaattggtatttttaaacaagaatttaagtggctctttctttcaagtctaaaaaaacctttggctttaaagattataaactgat

SEQ ID NO: 298959 - DNA, 579 bp, Homo sapiens
tgatattttccatacatatctgtgtttgatagaagtataactatataatttctttaactggccaacacttaaaatattaatatttaagaatgtccataacacatgagttaaaggatgtttagtaagtcgttatgcattataagctttgtagtaacctttgaataaaggtaaagatggcttatggttccctactgaagtaatcagagatattttgatttttaaacgtaattgcttaaaactaggtaatattttcaacatgatttaaaatcaaagyaaccaaaagtaatgcttgttattatctatagttttggaactgcttaagagtatcttactttcataattattttctgtgtctatcaagaatatttctataactattcaagtttagcatttttaagtaattaacaaaatacacttgataccacaaaccaacagggtaaaagggtataggaacaattttaatattacagcgaaatacctcagagatactacagctttggttccagactactgcaataaagcaagttacaaaatttttttggttttccagtgcatataagttatgttccactacaccat

SEQ ID NO: 298960 - DNA, 546 bp, Homo sapiens
taattcaaatttaggtgagggctgtaggtttcctcctccataacttcactatgagatgatatgttacaatgaaaacgagtctcagaccaaatttgctgcacatacgaagatttcatagcaatgtttattgaaaaaaagtcataaaacctgttctgcaaactgtatcattttagtcactctaacagaaacttgcatacaaacatcaatagagacaaatgtatgtttcagtatcaaatacagctaagcttttaacagagtcaggtgacaaaaatcctccatcaggcagycaaataatttacttataagctggggctttattcagaagtgttaggacattagttgcctagatactaagctattcattcaaaggtgggaaaatctgtacattatttctaaccaatgcatgcatctgagcatcattcatttcaccagtgaaaatcacttttaacatctaaagcctttggtgttgaccagagataaaatatcgtacttgaaagcctggtgtagcagcctctggattgcaggtttgggtcaatgctaactaac

SEQ ID NO: 298961 - DNA, 524 bp, Homo sapiens
ctaacatgtacatgctccatttattctatgttgtgtatttttctaagcatttacatgtgttaattctaatcttctgttatgggatgcaacatgtccattaaaaaatatagacactccacaattttccttgcagctataaatgccattgttcctgtcctggccaatgacatgtaatcagaagtcattagactaagaatccagaaaaggcacagactcagctagtggacagtgtctgtaagtacagcagccctcataaggacctaaggaaggaaccccatactaagggtgatggggtctaaagataagcaatctggtactgtctacatgagaaaaaataactcctgtataaaccacagcaatcatgtttttgttacawgcaaaagaactctaaattcataactggtttagctgataataggaacattttcatccatcctttcatttcataaatatgtattgaacacttgctatgagccaggtactgttctaggtagttgggatatatcaccacacaaaacagataa

SEQ ID NO: 298962 - DNA, 565 bp, Homo sapiens
ggaaccccatactaagggtgatggggtctaaagataagcaatctggtactgtctacatgagaaaaaataactcctgtataaaccacagcaatcatgtttttgttacatgcaaaagaactctaaattcataactggtttagctgataataggaacattttcatccatcctttcatttcataaatatgtattgaacacttgctatgagccaggtactgttctaggtagttgggatatatcaccacacaaaacagataaatatctgctctcaagaagcttatattgtagagatggtgggtcaacaataaagaaactaattatttagtttattagaagatgatgtgttatgagaaagagaygacagagcaggataagggagatcaatagtgccagagagaggataaagttgccattttaaatcaggcggtcatgtagccccattgaagagatgatattgaatacagacttgaaagaggtaaaggataattgcagatgaatgacacaaccaatgtgtatgtcttaagtggccaagtggctgatatatttgaagaagaacaaggaggccta

SEQ ID NO: 298963 - DNA, 552 bp, Homo sapiens
tctgtgtatctagggggattctccttgctgtatgttattaatgactcctgaaaacagataatgaaattgactttaaatattgttcatgtggatgctcacatctagaaggggtgtgtggtgtgtcgtgtgtgtgtgtgtgtgtctgtgtgtgtgtgtgtttaaactagaatctaatttccatctcctatgggcttttaaaggctgtctccatagcgatgaccaatgagaggagaggatttagcaggtttctttctcagtatatgtggcacagtcatctctttttatgtccttctatttgttccctatatgccattactggctgcctctatggcaacagccaatgagctcttgcacatacatcactgcaccctctgtatatgctcctctgtgtgtgccctcatgcactcagtggtatcataaagcatctgaggagttgtacgtgcccagtgagttggtttkgtgcccctggaacctcctcttccttccatgccctcaggatagcatggatcataatcaccttaaaacttgtacctgcttgaattgtccctccct

SEQ ID NO: 298964 - DNA, 552 bp, Homo sapiens
tctgtgtatctagggggattctccttgctgtatgttattaatgactcctgaaaacagataatgaaattgactttaaatattgttcatgtggatgctcacatctagaaggggtgtgtggtgtgtcgtgtgtgtgtgtgtgtgtctgtgtgtgtgtgtgtttaaactagaatctaatttccatctcctatgggcttttaaaggctgtctccatagcgatgaccaatgagaggagaggatttagcaggtttctttctcagtatatgtggcacagtcatctctttttatgtccttctatttgttccctatatgccattactggctgcctctatggcaacagccaatgagctcttgcacatacatcactgcaccctctgtatatgctcctctgtgtgtgccctcatgcactcagtggtatcataaagcatctgaggagttgtacgtgcccagtgagttggttttgtgcccctggaacctcctcttccttccatgccctcaggatagcatggatcataatcaccttaaaamttgtacctgcttgaattgtccctccct

SEQ ID NO: 298965 - DNA, 595 bp, Homo sapiens
gctgattacataattttggcaaacctgtcattatccataaatatttcatgaaatacagaaatgcatgcagcatttttcataaagcttcataaagacacttttttctctgatgggggaaaaaaaacccctgtgtttcttatataattctcaggtcaggcaaacactacttctggagcatacaattatacctacagtttcagataccatggttaatcttcttggctttatattttgggaacaatgtagcaggaactgtgtttaagctaaatgcttatctgatgatagacttcctctcttacattatggagggaaataaaatgatgtgatgatataagcgcaatgtagcgctctgcagagttcaatatcctgcagtttctttgygctcttcctgcttgatatgcaagttacttctaagtgtcctgaaaaaccactcatcatggagaacttaaaagtaacactgggcactgtgagagtattgtgctgagaagacagtgacagagcctaatgtgagtcatgttttttcatacttaacacctcttcacagaatcatctcaattttatggatgacaagtgtgaagaagacagaagtcaggag

SEQ ID NO: 298966 - DNA, 573 bp, Homo sapiens
tttgcattctcacagcttagctcctacttataagtgagaacatacattatttggtttttcattcctgagggttacttcatgtagaataatggcctccagctccatccaagttggtgcaacatacattatctcatttctttttatgactgagtgcatayataccacattcgatggtgtatatataccacattttctttatccactcattgattgatgggcaggtatgttggctccatatttttgcaattatgaattttgctgctataaacatgcatgtgcaagtgtctttttcatattatggccattcttgcagaagtaagggggtatctcattgcaattttaatttgcatttacctgataattagtgatgttgagcatgttttcatatatttgttgactgtttatatatcttttttgagaattatttattcatgttctttgcccacgttttgatgggattatttatttcttttcttgctgatttgtttgagttccttatagattctggatattagtcctctctcagattcatgctttgtgaatattttctcctagtctgtgggttatgtgttt

SEQ ID NO: 298967 - DNA, 539 bp, Homo sapiens
aattaattcattattttactttgtacttgatcattttgtctttgtatgttgaaaactcaaataagtgcttaggaattagtatttactttttaaaaaagtattcattcaacaaatatttactgagtgctatttgccaagcattgtagtgggcactggtgacacagcaataaacaaggctgatgaagtctctgccctcaaaaagtttaccttttctgtttcatttttaatggacctggatttgcaggtctggcccttcaaagctggttcacagatggttaatggtgtcctaaacagtgtgcttgagatgtagggagtagttgtcacaggagtgagacatgcgaggttttttttcctatgacccatgaatcataaccaggccaaataccaactgtaaaaagttactacattcaagcctacattcctggaaattatatgtaattgttctcctttgccatcttaaasaaaagataaattttagagcatgctttacaaaattatgagggcctacgtacaaatgaataacagagttagttaaggaa

SEQ ID NO: 298968 - DNA, 548 bp, Homo sapiens
cacccttttactcacacactattgctaatttttactagtatttgatagccagtaattttaacaattttgtgtcacaaaaaaagaaaagagatgtcatcctaaatattttaaatctcaaataaattcaaacagatcacccttacagcaatttaraaaaattgtcaattttttctaaacaatttatcatgacagtgtaaaataaattaacatcagcctaaatgtgaataattctaatcgttgggttaattaggtagttgtcttagttggagttcctccagaagctgactctgagacaatgaatgagtgaagataagttatttgggagggtctcagtaaatggacaggggggtggggaacatgataacagaagggaaggcagctaatatattaagatagcaatcacaggcgccaactgaagcttaatcctgtagaggaaactcttgacaaatagtgtaggcacatgccttagaattggctaagtaagggccaaagaagttagtgtatttatatgctgaaacctgccaatcactgcttaaggtcttccccta

SEQ ID NO: 298969 - DNA, 592 bp, Homo sapiens
aaatgcttattttcaaattcctaaaagaacacagtgaatattcagataacattttttaaagtacttgaaagtgaacatttttcccttattctgttgcttaataattaaactacttctttgtgatatttctacattagatattataggaaataagaaatataaatctgctcaagaaatgatttatagctgaccacctcatattttgtattattggtttcattatttaatccctgtaatacacatgcaatctgtatgtaagtaaaaagtgtatatgatttacttagtaccaaagtgctatagtaatatagggtgtattttgaagactttatttttaggttcatactgattcctctcttataaaaggtggaaacaattaacaattagatttaacattataaagtattgtagggtgtgcagaataaagcagatgtgcacatttatatagattacttatgagcaatacatatctttatgtataatacctattttaaaaytaattaagttattctgagttagttttttttttttaacttttctggctaccttcatcagacttgagaaaaatgctatgaacgagaagcattttgagatg

SEQ ID NO: 298970 - DNA, 568 bp, Homo sapiens
ggaaggactcatttggaaggatgctaactccagtttatctttgttcagttctaacctactgaatttctgaatatctacttcctccagttttccaaggtctactttttcagtccatgtatctttcagcagggtataggtggaaatgatcattcattcacataaaaatattaatccaattgatatttattgatcatctagcattatttgatgctaggtatgaaatggtaaataaaagtcatgccctcaaggagcttacagcctagtggggtagacagataattaaacaactggaatataatgtgttgagtttaccaaaatctgatagacagggcacccaaatccatcccttagaagtcagttgaatcttctaggagaatgtgacatttcgagtgagrcctaagatctttaaggagagtaggaacttgccaagtgaaggtcagagtgagtgttgggtcactggggaggaagaatgtgccccaggctgaaggaagagttggaggagaatgttcttgaagcaagagaaagcaaagagccatgcattgactatgaaaattagatcacattaact

SEQ ID NO: 298971 - DNA, 567 bp, Homo sapiens
atcaagaaggtgaaaacccataggataagagaaaatatttgtawatcacataggattaaaaaacttgtaatcaaaatacataaataacacttaaaactcagtaataaaaagacaattcaattaaaaattgcacaaaggatttaaatagacatttctccaaagaagttataaatgtggcctataaggacagaaaaagatgttaaatatcattagtcattagggaaatgtgaatcaaaacaacgagataccatttcacattcactaaaatggcgacaataaaaaaagatagataaaaatgttggtaaggacatgaagaaactggaatgcccattatgttttttgaaatgtaaaatggtacagctgcttttaaaaatactttagaagttcctcaaaatgttaaatataaatttacccaacaattccaataatgagtatatacctgagagaagtgaaaacatatgtccacaaaaaaacttgtacataatattcatatcagcattactcataaaagtaaaggtggaaacaactcgaatgcccatcaactgatgggtgaacaaaatgtggtat

SEQ ID NO: 298972 - DNA, 459 bp, Homo sapiens
tcattctgttgctctatagataatttttaaaaatcattcttttgttacgtggatagtagagtagtagatggttgcagtggtgaggattggaaaagataagtgatcatgacaatggatgaaactcagaaatttaatgatgtgtgatcatatagatactttttttgtttttttcaagaaagcgtctcactgttacctaattggaatgcaatggcatgattgtagtgcattgcagcctcgaccacctgggctcaagtgatcctcctggtggaggctcccgagtagctaggrctatagtatagcatgcaataccatatctgactttttttcttttttttttttttggtagagacatagtctcactatgttgccaacactgtatagatactttttaataaaataatgtcctatattatattttaacaaaataatatcttttaggtatctgttgcgtgaatggta

SEQ ID NO: 298973 - DNA, 383 bp, Homo sapiens
tgaggcaacagaatcgcttgaacccgggaggcagaggttgcagtgggccgatattgtgccattgcactccagtctgagcaacagagcgagactccgtctcaaaaaaaaaaaaaaaaaaacacaaaaaaacaaaatagggaagagaagtctttataaatcttcctgtgtagagttcactttgtwttaataaaatttcaatccatgattgatttttatgtattggtaacatttaaaattcatatgtaattttaattcaagatattaactcagattcataattaaagttgaaatatttgtggcgtgaggtgattcatgcttgtaatcccaacactttgggagtctgaggtgggaggactacttgagttgagaagttcaagactgca

SEQ ID NO: 298974 - DNA, 590 bp, Homo sapiens
aaaaaaattttaagtaataatgtccaaaaacatcccaaatttatttaaaaacaataatttatatatccaggaagttcaatgaacwccatgtaggatagatgcaaagatatccacaaagaggagtatcttgataaagatgctaaaagacaaggaaaaaatcttgagagagcagcaagagataactgactcatcaacttacaagggaacctgcccataagatttatagctaacttctcagcaaaaaaatggaggcaagaagccagtgggacaacatattcaaagcacttaaaccaaaaaaactgttaaccaacaattctatgtccagcaaagctattattcaaaacggaaggttccttgaagtaaaggcattctgaggtaaaaactcagagaatttgctgttggcagacccactttacaagaaacactaaaggaagttcttcaggctgaaagcaagttactccacatgatgattttaatccacatgaaaaatcttaagagcaccagtaaaaataattatgtagtaataacactataaatgcatattttctccttttctcttttgtgttgtgtatatatcatgtgtatctata

SEQ ID NO: 298975 - DNA, 590 bp, Homo sapiens
aaaaaaattttaagtaataatgtccaaaaacatcccaaatttatttaaaaacaataatttatatatccaggaagttcaatgaactccatgtaggatagatgcaaagatatycacaaagaggagtatcttgataaagatgctaaaagacaaggaaaaaatcttgagagagcagcaagagataactgactcatcaacttacaagggaacctgcccataagatttatagctaacttctcagcaaaaaaatggaggcaagaagccagtgggacaacatattcaaagcacttaaaccaaaaaaactgttaaccaacaattctatgtccagcaaagctattattcaaaacggaaggttccttgaagtaaaggcattctgaggtaaaaactcagagaatttgctgttggcagacccactttacaagaaacactaaaggaagttcttcaggctgaaagcaagttactccacatgatgattttaatccacatgaaaaatcttaagagcaccagtaaaaataattatgtagtaataacactataaatgcatattttctccttttctcttttgtgttgtgtatatatcatgtgtatctata

SEQ ID NO: 298976 - DNA, 567 bp, Homo sapiens
ggtgagtgattcttcccccgcctaagtttaagaataagacaaggaggtctacactcaccaccgatcttcaacattgtgctagggccaggtgcagtggctcatgcttgtaatcccagcactttgagaggctgaaatgggagaggatcacttgagcccatgagtttgagaacagcctgggcaacatacrgagactccatctctacaagaaaaaaattttttttaattagctgaatgtggtggcatgctcttgtagtcccagttatttgggggctgaggtgggaggatcttttgagccagagaggtcaaggctgcagtgcgttgtgatcataaccactgcacccctacctgggcaacagagggagaccctgtctctacttagaaaaaaagatttcaagaaaagtgaaaaacaacaacaacaaaaatgcaatgaaagaatttgtaaatgatagtagttctaggaagtataaagaactaaaccatcaactgctgaatgggtaaacaaaatgtagtatacaatggaatattattaagccataaaatactgatacatgctactacatagatgaa

SEQ ID NO: 298977 - DNA, 513 bp, Homo sapiens
acattttttgtgaacgctcaggttaaaagcaaataatctctttggagcgggacattgaaaagtccagttctatgtaatattgaaattctaaaatctcctccaatgtactactggtcaggcccaccactggaccagtctcagaagcccaaggggagaagccrgcaacctcactgtttccttttgctccctcctccccagctctgcagttctgaatgggggccctatgagtgagtgcaggtgggagaatggggaagaagggggcaggcaagatcctcctggaatgaggagcactgatgctctcagaatacaaggaatgtccaaagctcaccctttccttcatgaggggttggataggaaccctaaccttgcattctcttgcaagagcaatgcttcctatagcctgttgcactccctcattctctgtcatcttgcaatctacccctctctttgggtcccctcatcctctcacctctccagcaggtccccttggacagctagactccatgcagacct

SEQ ID NO: 298978 - DNA, 513 bp, Homo sapiens
acattttttgtgaacgctcaggttaaaagcaaataatctctttggagcgggacattgaaaagtccagttctatgtaatattgaaattctaaaatctcctccaatgtactactggtcaggcccaccactggaccagtctcagaagcccaaggggagaagccggcaacctcactgtttccttttgytccctcctccccagctctgcagttctgaatgggggccctatgagtgagtgcaggtgggagaatggggaagaagggggcaggcaagatcctcctggaatgaggagcactgatgctctcagaatacaaggaatgtccaaagctcaccctttccttcatgaggggttggataggaaccctaaccttgcattctcttgcaagagcaatgcttcctatagcctgttgcactccctcattctctgtcatcttgcaatctacccctctctttgggtcccctcatcctctcacctctccagcaggtccccttggacagctagactccatgcagacct

SEQ ID NO: 298979 - DNA, 528 bp, Homo sapiens
tcctatagcacatgctggaatacagtttgaatacaagatgctacaggtaataaagtttatcagaatggcttgtcattactttgcatcattatacaattactgcagctttggaaggtaataaatcattgcacaggtgacatattgagaagctcagaaagacagtttttctcacagataaagcamccgctgccactaacgagatgtggcgatttggtggtcaaacttttaaaaagtgtcctgtggtcctgagagtgtcagtaggaaggccatccacatctgaaagcatgccaagccatttccaagactacagaggagcgtgaaactccaacagctccgaaaatgcgtgtcctagttttactccttgattgccaagagggagccttataccaataactgaattccagatagtccaaacttcattggctcagaataatggcccagacagccctttattcactcaactcaactcagagatgtctccaaagaagcctgtttatgtgtgcatgcacgtgtgtgtgcttgtgtttt

SEQ ID NO: 298980 - DNA, 389 bp, Homo sapiens
gatatgagaggtttagaaaaggataactggttccactccactgcggcattgatgtctgtgctagatgagatgctgcagacgctctccaaattaatcaatgggctcctagagtatgaggaaggagtcagcaagaacccctcccagaaagttctagtaaagccttatatttgatgactaacctgtaccactatataagaaagtatttttgcttttgatgaacaagccaagtagctagggcctggaagtgggacattctggkttgggaaactgggctccagagaaaatgttctcaaaatgtggtccccagaccaagagcatcagcatcatttggggacttcttaagaaattcgaattcttggactccactttggatctactaaattagcaag

SEQ ID NO: 298981 - DNA, 594 bp, Homo sapiens
gggttcagcagcctttgcagagaaaccatgcagtgccctgttgttcccacagcctcagaacataggacgacatctggtgtcaactaactccttgcccgcatgagtaaaccaaggccagggaggtcatgtggccagttctgggtcattcactgaaccttgctttcttcatttgtgctttctttgtgttaggctttatcaagagaagagatcataagataaacagtggatagccctcaaccccctgcccgttcactaggcagagaagagccatcacaagttctccatgctcttctacagatgtgtcatgatcaaattatccattgtttggttaaaaatcatttcttctgcacctcacactccaatcaactgtttraaaaaaaaaaaagtcaataggctgacagccttagaagtggataaagatattagaaggaggcctgctgtttgcaacgagcatcagacaaataatgatcaatagtttctatctcctaatgactggatggtgattgcgtagcctccagataagaacttcattgacaaccccagtgctgtgtctaggacaaaagggaagccaatttttgcgaggcctgaacagaa

SEQ ID NO: 298982 - DNA, 632 bp, Homo sapiens
ataatttcaaaaatatcaatgtagagcaaactctcagggctcaaagagggaggaatttctcagcaggaaaggagcagcatgagttgacaatgctttggcaaggagatagctcctgggctcaggaggttagttacaaacaacatgattgagaaaacaagtgaactgatcctatgagagccaggttcctcaccagckagaatggaagtcaaatatggaaagaaggaggctatagaataaaccatataatgttagactatgtttagggatattgatctgcactgtgacttctaatagtcagataaatatgcatgtacatagatgtagatattctagctctgtctgctgcaacggcctagaagccagacaaaacaggagcgattaatgcattcagcaccagatattgattcctgaaaggagtcaggcattcgtggagaaatggctgactggctgactgcagggctggagctggaaacatacaagccctggccatcttgtgctgcaatgacagaagcatggccaaaagacacagaatccatcttgacaagggtcctatagccaagttgggggcaatgtgagcatcaaaataaatgatgatggtaagagttatagcccactaggtaacacaggaaccc

SEQ ID NO: 298983 - DNA, 566 bp, Homo sapiens
gagttagtgtttttccataaaccagagtaagtcttctcaggaaacaggcaccaaggagtaaatgtgtcctgaagcaaaattgcaaaatctctaagtatagcctgkggagaaactaagtgcaacagagagaaactaagtgcaacagatatgcaagaagacaccgggagagcagaaaacctggaacatagtgcctggaatgatgtgcaaaaaagaacaaaagaaatgaaatgggagcattctattaatccaaaactgcaaccaacctgaaactgtccggagttggtcaggctggaagaattatcatagctagaacaacctccatgtagaaaggcatgctgagtgggtatataatcacttaacatgcacggtgtctctctatgtgcacatgtgaatggtgttagaaataaatgtaatcgtgaatgtgtctgttgaaaatagaaacttcattcttgagctctaagaattcttgagcccttccacaattagaaccatcaaattcccagaaagatttgagaaacccccacatggcttcctgttggcaaagagaggaacagtgggctggagca

SEQ ID NO: 298984 - DNA, 594 bp, Homo sapiens
taacacttttgtaaaaaaatcaattgaaaattgatttgttttcaattttttgggtctaattctggattctatattttgttccatgtctatttgtctatcttgatgccagtactaaatgtcttgattactgtaaccttgtaataaatcttgaagcttggtagtatgtcattcaactttgttcctctctaacttattttggtattctatgtcctttaagtttccatatgaattttagatcttcactttaatgctctgccaactgagctatttcagtcaaattttagaataaacttctcaacttaaagcctgctgcaattttcattgggattgtgttgratgtatagaacagtttggagagaattgacatcttagcaatattgagtctttctacccatgaaacagaaacccatgaacctccttcattttttgaggtgctcttcagtttctctcagccatgttttatggttttcagttacacatgtcacatgttttattagacttatctctaagtgtttcatagtttgggttgctattgtaaattatgtcttttttaaaattttaagtcctgagtacttattgctaggaaataaaata

SEQ ID NO: 298985 - DNA, 584 bp, Homo sapiens
gtttaagcaaccccataactttggctttctttarcagaggacctacaatgcattaaaataaagaacctcatcctggtttttctcctctagggtatctcttcatgtgaggagacatcatatgttcagacccacgaaaagtacttgaattagattcctgtgatcgtttttatgggttgaggccatacgtgccttctaagaggccaaactttctcccagcagaaacttgggccctggctgggatcactaaagcgtgttcttgtctttgacctcttccatctttcatgttgggttgttcgtcccacctgcatggaatataaacttctctgtatgctgtgaatacctaatccagagtctagcatctacttttgaaactttcatttagaaagcagaacctttcaacagaaaagagaacccacaaatatcagacacctcaccacccagcacttcacctagactcccaattctaagttgtgcctattttagtactaaagcaacatgtgacttgctgtgatgaaaaattagaacaggagaaataaatatctccattaagattttgtgagtcttaaatattacaacctgtaata

SEQ ID NO: 298986 - DNA, 567 bp, Homo sapiens
aaactttctcccagcagaaacttgggccctggctgggatcactaaagcgtgttcttgtctttgacctcttccatctttcatgttgggttgttcgtccyacctgcatggaatataaacttctctgtatgctgtgaatacctaatccagagtctagcatctacttttgaaactttcatttagaaagcagaacctttcaacagaaaagagaacccacaaatatcagacacctcaccacccagcacttcacctagactcccaattctaagttgtgcctattttagtactaaagcaacatgtgacttgctgtgatgaaaaattagaacaggagaaataaatatctccattaagattttgtgagtcttaaatattacaacctgtaatattacaattgcctttggtgatcactccagtcaactcctgtcatttcataaatgaggacactaacgtgtaagagtttatgccagtcacagtggctcatgcctataatcccagcactttgggaggccaatgcaggaggattgcttgagcccaggagttcaagaccagcctgggcaacatggcaaaacc

SEQ ID NO: 298987 - DNA, 584 bp, Homo sapiens
gtttaagcaaccccataactttggctttctttagcagaggacctacaatgcattaaaataaagaacctcatcctggtttttctcctctagggtatctcttcatgtgaggagacatcatatgttcagacccacgaaaagtacttgaattagattcctgtgatcgtttttatgggttgaggccatacgtgccttctaagaggccaaactttctcccagcagaaacttgggccctggctgggatcactaaagcgtgttcttgtctttgacctcttccatctttcatgttgggttgttcgtcccacctgcatggaatataaacttctctgtatgctgtgaatacctaatccagagtctagcatctacttttgaaactttcatttagaaascagaacctttcaacagaaaagagaacccacaaatatcagacacctcaccacccagcacttcacctagactcccaattctaagttgtgcctattttagtactaaagcaacatgtgacttgctgtgatgaaaaattagaacaggagaaataaatatctccattaagattttgtgagtcttaaatattacaacctgtaata

SEQ ID NO: 298988 - DNA, 584 bp, Homo sapiens
gtttaagcaaccccataactttggctttctttagcagaggacctacaatgcattaaaataaagaacctcatcctggtttttctcctctagggtatctcttcatgtgaggagacatcatatgttcagacccacgaaaagtacttgaattagattcctgtgatcgtttttatgggttgaggccatacgtgccttctaagaggccaaactttctcccagcagaaacttgggccctggctgggatcactaaagcgtgttcttgtctttgacctcttccatctttcatgttgggttgttcgtcccacctgcatggaatataaacttctctgtatgctgtgaatacctaatccagagtctagcatctacttttgaaactttcatttagaaagcagaacctttcaacagaawagagaacccacaaatatcagacacctcaccacccagcacttcacctagactcccaattctaagttgtgcctattttagtactaaagcaacatgtgacttgctgtgatgaaaaattagaacaggagaaataaatatctccattaagattttgtgagtcttaaatattacaacctgtaata

SEQ ID NO: 298989 - DNA, 590 bp, Homo sapiens
agaccaaaaccatctttatcaagttatttaaaaccaataagaaatgaaagctttgaaagcattcagagaatacacattatatacagaagaacaagcataggataatggcagacttctcattgagaaaaaggcaagccagaagacaatgttaaagcatctttaagtactgaaagtaggtcaacctagaattctataaacagtgaaaaaacattcttcaaaaatgaaaacaaagtaaagattttctaagacaagcaaaagctgaaagaattcatcaccaacaaaactttagtacaagaaatgttgaagaaagtcctttaagcagaaggaarattatactaggcataaaaaccaatgcctacacaaaggaataaagaccgtgctaaaatggtaaatttagaagtaaacttttaaaaaacctctttatatctcattaaaaataactgactattaaggcaataacaataacactctattgtgagatttataacatatttagaggtaaaatgtaaaacaataatagcacaaagactaggaaggagagatggaagtggatggtgaaaaattaaagatggatcagcaaatgacagtac

SEQ ID NO: 298990 - DNA, 493 bp, Homo sapiens
cttctcaaattgggatcagtagaaccttacttaaaaccatcatttcattcccttttggactgtgtttcaaacaacccaaccayacaaatgaggaaatattcaggctgaagtttagattgactgactgaccacactggcttggatttttatgtttgaaaccactgatcagaaacaaagctttgtttttggaaagaaaaaaatcaggaattaggttgaagtaacaagtctgtagcagcctgagcatttctagtagcttttttccccaatgattagaaagccattgagcattcagcaaacactggggccgcctctgtgccccacataattctgggtattgataaaaatatgaaattaagcacacatgtccacccgtcatcagctgagtggatgaagaggcatgcatgtgaacagctcactccctggcaaggctgatggggctgagtgtatgagaaagccaatgtccactgtaagcataagactgcagcagtggctg

SEQ ID NO: 298991 - DNA, 493 bp, Homo sapiens
cttctcaaattgggatcagtagaaccttacttaaaaccatcatttcattcccttttggactgtgtttcaaacaacccaaccacacaaatgaggaaatattcaggctgaagtttagattgactgactgaccacactggcttggatttttatgtttgaaaccactgatcagaaacaaagctttgtttttggaaagaaaaaaatcaggaattaggttgaagtaacaagtctgtagcagcctgagcatttctagtagcttttttccccaatgattagaaagccattgagcattcagcaaacactggggcygcctctgtgccccacataattctgggtattgataaaaatatgaaattaagcacacatgtccacccgtcatcagctgagtggatgaagaggcatgcatgtgaacagctcactccctggcaaggctgatggggctgagtgtatgagaaagccaatgtccactgtaagcataagactgcagcagtggctg

SEQ ID NO: 298992 - DNA, 493 bp, Homo sapiens
cttctcaaattgggatcagtagaaccttacttaaaaccatcatttcattcccttttggactgtgtttcaaacaacccaaccacacaaatgaggaaatattcaggctgaagtttagattgactgactgaccacactggcttggatttttatgtttgaaaccactgatcagaaacaaagctttgtttttggaaagaaaaaaatcaggaattaggttgaagtaacaagtctgtagcagcctgagcatttctagtagcttttttccccaatgattagaaagccattgagcattcagcaaacactggggccgcctctgtgcccyacataattctgggtattgataaaaatatgaaattaagcacacatgtccacccgtcatcagctgagtggatgaagaggcatgcatgtgaacagctcactccctggcaaggctgatggggctgagtgtatgagaaagccaatgtccactgtaagcataagactgcagcagtggctg

SEQ ID NO: 298993 - DNA, 623 bp, Homo sapiens
aagacttagtataaaaaaaatctcatttttacttttttgaaatgtactattttggacatatttgattaaatatatatattattacaattaatgtcactgatttctttttacctttttaatgtgcctactagattatttaaaatccatatgtggctcacattatttttctattggacaatggtggtctagaccagaagtcagcaaactttttctttgaagggtcagagttgctatttcagactttgtaggccatatggtctctgctgtaactactcaactctggcaatgtcatataaaagaagcatagttaatacaaaagcaaatgagtatggctatggtacaatgaaactttatttatagatrctgatttttgaacttcatgtaattttcatgtgttaccaaccaccattcttttgatttttttctcccaatgatttaaaaatataaaaactcattttggtttgcagtacatacaaaaacaggtggtgagctggatttggtctgtgggctactgtttgctgaaccatggtctggaccatcatcttgaaggaccccagaaacaatttaacaattttctttggaaagcgtcatgtgaaataaaacctgaagtggaatgaatcatt

SEQ ID NO: 298994 - DNA, 646 bp, Homo sapiens
gaagtggcaccgtggctgcattagcagtgcacttgcttctaggatttctcagtgtaggtattgcttatttygtgctgactctgggagaaagacagccagttaatctagatgcaattgaatttagaaatcactcaaatctaattttactcacttcttcattcccaagatatttttctgcatcctttggttgtgtgtgtttcaaatcatttcccactgtttatttttaatttctactttattttaattatttaataggtggcatctgtgctgtgcctgtcattcattgagaacagtttgttttctgcttatggaatcacaaaaatatttaatctgaagcttcagtggtgcagccgtccttgaggctgcagaccataggatccttccttctctgtctggatgcactggagggccagcattctcggaggtggccagggtcctctgagaagccagcgcccaagtggtacctgagtccagtgaacggcaagtaagaagctttccttccttcagttcctgcttttgaacaaatgtatgctttcttaaatgtccccaggtaacacactgtggatggcctgcacaatgacaggtgttagggatcagtgctcatactgttgatgctttcccaagccagatcacctctacttttggg

SEQ ID NO: 298995 - DNA, 649 bp, Homo sapiens
atgtagaagtaaaaaacatagaagaacaaagtgtaggaagggtaaatggaattttactgtataaatttcttacattattcatgaaataatattacaggctgagtaycacttatttgaaatgtctaggaccagaaatgttttggatttcagatttttttggatttgggaatatttgcatataaataataagatatcttggggatgggacccaagtctaaacacaaaagttcatttacatttcatatacaccttatgtacataccctgaaggtgatttttatgcaatatttttaataaccttgtgcaggaaacaaacttttgactcattttgactgagacctgtcaaatgagagcaggtgtgtaattttctatttgtggcatcaagtcagcactcaaaaaatgttggattttgaagcatttcagatttcagatttttggatcaggggtgctcaacatgtagtccataatttccagaagagttggggttgagccatccataatttttaacgggcaaaaatggcaccatgggagtgggagactgtggtaagttaaagatgaatagtgtcatcactacaacaatcattttaaaaatagtacaaataggtataacaaaaagatcaatagtaaaggtacaatggaatactaaaaat

SEQ ID NO: 298996 - DNA, 649 bp, Homo sapiens
atgtagaagtaaaaaacatagaagaacaaagtgtaggaagggtaaatggaattttactgtataaatttcttacattattcatgaaataatattacaggctgagtaccacttatttgaaatgtctaggaccagaaatgttttggatttcagatttttttggatttgggaatatttgcatataaataataagatatcttggggatgggacccaagtctaaacacaaaagttcatttacatttcatatacaccttatgtacataccctgaaggtgatttttatgcaatatttttaataaycttgtgcaggaaacaaacttttgactcattttgactgagacctgtcaaatgagagcaggtgtgtaattttctatttgtggcatcaagtcagcactcaaaaaatgttggattttgaagcatttcagatttcagatttttggatcaggggtgctcaacatgtagtccataatttccagaagagttggggttgagccatccataatttttaacgggcaaaaatggcaccatgggagtgggagactgtggtaagttaaagatgaatagtgtcatcactacaacaatcattttaaaaatagtacaaataggtataacaaaaagatcaatagtaaaggtacaatggaatactaaaaat

SEQ ID NO: 298997 - DNA, 649 bp, Homo sapiens
atgtagaagtaaaaaacatagaagaacaaagtgtaggaagggtaaatggaattttactgtataaatttcttacattattcatgaaataatattacaggctgagtaccacttatttgaaatgtctaggaccagaaatgttttggatttcagatttttttggatttgggaatatttgcatataaataataagatatcttggggatgggacccaagtctaaacacaaaagttcatttacatttcatatacaccttatgtacataccctgaaggtgatttttatgcaatatttttaataaccttgtgcaggaaacaaacttttgactcattttgactgagacctgtcaaatgagagcaggtgtgtaattttctatttgtggcatcaagtcagcactcaaaaaatgttggattttgaagcatttcagatttcagatttttggatcaggggtgctcaacatgtagtccataatttccagaagagttggggttgagccatccataatttttaacgggcaaaaatggcaccatgggagtgggagackgtggtaagttaaagatgaatagtgtcatcactacaacaatcattttaaaaatagtacaaataggtataacaaaaagatcaatagtaaaggtacaatggaatactaaaaat

SEQ ID NO: 298998 - DNA, 559 bp, Homo sapiens
tgtacaggccagatcagaaccttagactgtcagtaggcaaacctggcccaaagaacattaaattcatgttctttrtcattgccaggcatctttccagtatctgtttggaccaataaattatttctccagtaaaattaagtaaataattctgcctctctggagcttggtgtctccagtgtagaacatattcaatccctgactacaattccagatgtttctttggagattcattcagttattcaaagtgtcctaaacactagagagacaaagctgatagtcaagatctttgctcatattctacagaaacagtgaggagagagggataaaatatatatccatatgtacatatgtatataaacacacttacacatatatgcacacatacacatgcacattgcacacacatgtgcattcacaatgtggatggattggggtatacatcgtaggtaaagccaacaggatttgcacatggtttggatatggagaataaaacaaattgtaaaaaagtaaaggtggtgcttagagctgtggctttgaaacaggtgaatgagggctaagg

SEQ ID NO: 298999 - DNA, 528 bp, Homo sapiens
tccttccacctgatttataccaaagccactgttcaccctgatggtgttcaatatatcactagaatgaacactgtgcatcctggcatttcaccctccaaagccttatagaaaaatggatgctaatgaagagaacttccatgttttcctaagaagactatcaactctgataatatagagtgcttcagcagatmaataaaagcaataaatcaatgcaatttattaaatacaacaagcactttcctagaaaagtgctcagaaatactccagaatagcatgtcaccagcactcagcatgagaacaggtcccagtggccacttacttagtatgaacaaaagttcaacaaatagttcatgaacagatttatagccaggaacagtgacctttccaatcaccccaccccaccccaatcccaaaaggggtctccctaggcagattctcattgttgctcttcagacagagccccacttaccatcctttccacagaaacactcaggttggcccttgagacagagctagccagtgttagag

SEQ ID NO: 299000 - DNA, 555 bp, Homo sapiens
gacaaatacagactgtttttattgcctcttacagggtagaaaaagactgatggtgatttggtacataaccatcctgtgtttattctaaatcttcctatagtttgtagtttttcttgagtgtgacctcccaaaataattaccctttttttccttcctagagcttacaggaggcaccttgtctagacctcatttataatgacaatgagttaaattaaaattatggattataaggcttaaaagtgtttaaawgaactgaatacagaacaaggtcctgctcaaatccatgtgctcaggctcacaacacagaatacttgacgcaataattgtaatgtaaagaccatgaggtttaggataagatgcacccctaagtttgagtcctggttcctctatgtagttactgtgtgaccttgaccagcatatttacatcctctctaatatatatttttaatctaatctatgaagtgaaactagctgaatcacatttgggggattgtttaagattattgagtgaatattaaatagtatataccccaaagcacaaatgttattgttatg

SEQ ID NO: 299001 - DNA, 555 bp, Homo sapiens
gacaaatacagactgtttttattgcctcttacagggtagaaaaagactgatggtgatttggtacataaccatcctgtgtttattctaaatcttcctatagtttgtagtttttcttgagtgtgacctcccaaaataattaccctttttttccttcctagagcttacaggaggcaccttgtctagacctcatttataatgacaatgagttaaattaaaattatggattataaggcttaaaagtgtttaaaagaactgaatacagaacaaggtcctgctcaaatccatgtgctcaggctcacaacacagaatacttgacgcaataattgtaatgtaaagaccatgrggtttaggataagatgcacccctaagtttgagtcctggttcctctatgtagttactgtgtgaccttgaccagcatatttacatcctctctaatatatatttttaatctaatctatgaagtgaaactagctgaatcacatttgggggattgtttaagattattgagtgaatattaaatagtatataccccaaagcacaaatgttattgttatg

SEQ ID NO: 299002 - DNA, 555 bp, Homo sapiens
gacaaatacagactgtttttattgcctcttacagggtagaaaaagactgatggtgatttggtacataaccatcctgtgtttattctaaatcttcctatagtttgtagtttttcttgagtgtgacctcccaaaataattaccctttttttccttcctagagcttacaggaggcaccttgtctagacctcatttataatgacaatgagttaaattaaaattatggattataaggcttaaaagtgtttaaaagaactgaatacagaacaaggtcctgctcaaatccatgtgctcaggctcacaacacagaatacttgacgcaataattgtaatgtaaagaccatgargtttaggataagatgcacccctaagtttgagtcctggttcctctatgtagttactgtgtgaccttgaccagcatatttacatcctctctaatatatatttttaatctaatctatgaagtgaaactagctgaatcacatttgggggattgtttaagattattgagtgaatattaaatagtatataccccaaagcacaaatgttattgttatg

SEQ ID NO: 299003 - DNA, 349 bp, Homo sapiens
tgaacatatcgtgttacttcatttatatggaattctagaaaattcaaactaatctgtaatggcagaaaatagatcagtgtttgcctggggacagagttggggtggcagtgagggtcaggagaaagaggttacaaaggggcatgaagacacttttggggagtgatgatttcacagatgtatacatatttcaaaacttatcaaattctacaccttaagtatatgcaggttattgtgtgtcaattaytcctcaataaagctgtattttttaaaagggaataggatggaagccatactaaacatctacactcaacagtcattaatcttttctgggcaaaggataagactttcc

SEQ ID NO: 299004 - DNA, 349 bp, Homo sapiens
tgaacatatcgtgttacttcatttatatggaattctagaaaattcaaactaatctgtaatggcagaaaatagatcagtgtttgcctggggacagagttggggtggcagtgagggtcaggagaaagaggttacaaaggggcatgaagacacttttggggagtgatgatttcacagatgtatacatatttcaaaacttatcaaattctacaccttaagtatatgcaggttattgtgtgtcaattactcctcaataaagctgtattttttaaaagggaakaggatggaagccatactaaacatctacactcaacagtcattaatcttttctgggcaaaggataagactttcc

SEQ ID NO: 299005 - DNA, 531 bp, Homo sapiens
cgctcaaacactatcatgactttctcttttcctcccctttttttatgctttttatttcctctcttcattcaattttctctcttttttgtctttctctgtgtgctcacttctttttcatctactagaagtggcttcctccatgcagaaggaagcataactgtaggcagcaatggggctaagaagaaagccctataacctacacacatacatgcagggtaattttgcmattacagaccacaatctattccctaaaccatttggactcatctcaagggatcttcccgaggccccactgttgtcagaggagattgattgcaatactgctgattatgctttatatggtttcaaaaaattaaatgtttatggttctgaaaaagctaatgacgttcacctcaactactatatatatatgggtttcaactcacatgcaaaccctgaccaatgtgtgacaaagcttcaaagacaaattctgagttcagtgtgtgactggttgtcaacatctcctgcaggcttggaagagaatgcagcaat

SEQ ID NO: 299006 - DNA, 558 bp, Homo sapiens
aagtccttctcatgctgcaaatctgtctggtttcttcttttgctactagctggagaaaactccctgattttaaaggctcatgtcattagattcgacccacctgcctaatctccccatgttatcataacagtgccatataaccatatgtcatcatgagagtaatakctcatcatatttataggttccaggggtgaaggcaggacatctttcaggggccatttaagaaattctgcctaccacacaaaacagatgcacacaccacacaaacacatgaaataaatccttttttgaatacagaatagttcttttaaataataaaataactttagctaatatttatttgcctgttgttgtgtatagatgagatttctccaagtgccttaaatataccagctcatttatctccatgaggcagatactgttacgaacccattttacagatgaacaaacaggcaggaagatgttcaataacttgcccagaggattagttaaaaagagagacagaattaaacccagaaacccaggtgatctgccttcaaagacaacattcttaacaat

SEQ ID NO: 299007 - DNA, 595 bp, Homo sapiens
aacaaacaggcaggaagatgttcaataacttgcccagaggattagttaaaaagagagacagaattaaacccagaaacccaggtgatctgccttcaaagacaacattcttaacaataagacataatgtgaaaatactttgcacaatgcctggattatagcaaatgttcactaatagtacttttttgtgtatacttttcatttctgttattacctgatgtttaatcatgtaacctcatttttgttttagaaaataaatctrataatttatttaacaatttatgctatttatttataactacttatacatgcttataaaaaagattatgatacttaatatctacctattacttttcagtccattaaacacacttgtatatatttacattatttattcaatactcacaatgactcagcataatccttgacatatagtaagtatttaacaagactttgtgaatcatgaataattatgcctattttatcaaaaactcagtatataactttccatggataataaatgcagaattagaagtttatgtgttctgaattcatttttctgtatttcttttcacaatgctatattagaaaactgaac

SEQ ID NO: 299008 - DNA, 555 bp, Homo sapiens
taaaaagtaattggaagattttaagccgagaagtgacatttgatttctcctgtgaacagtttactttagtgccatgtggagaatgggttgtggagtgaagcagagagagcaattaggaggttgctttcggaaatatcaagtgatcctcacaatctattttaaattgaggtcacgggagcttctgtatttagcccactgaattgtccattatgtatttttttctataaactagatatataaagattagtatattgcaaggcattctaataaggtatactgaggctaatcctaaattgaacattgtttttgtttttgctgttattgttgcaagacctttggcctaattttccttttgttgacagataaatttctttgtggtagaaaacaaatatacaaatgttkaatttttagctcaatcacctttgccagggatcttggacatatctcttagccaccttgggtcacagtctctttacccaagaatgagtgtggtcagtataggtttacctggttctgaaattatatcaatgtttagatcatagaagtaattacagc

SEQ ID NO: 299009 - DNA, 450 bp, Homo sapiens
aaaaatctcaaaaagtccttggaggagctatatctggactaccgtcaagtatagataacccaccttacttagaatatctcttagtctccttatctatataaatgctctgggtaggtattgggggaagctggagtataactttcaaaagaccatacgctgtgaaagaacataaaagggggtttaatattggctctatcacaaaatcagctatggtgctgacaagtagcagcattattagagttataatttcctcatttgwaaattgaaagtatcctgtcatatggtctttgtagagaatgactttcaaaatgatctagcataaattaaacaaaggtatgtctctttttttccttaatctttttctggggataacctacatcaatctagtccaaggataaacaattttttcatgggaatgtacagaaaaaacctaatatgtgggtagtggta

SEQ ID NO: 299010 - DNA, 520 bp, Homo sapiens
gtggtcactgcagccatttcagcactagagggtgtcctaagcccaggtacactgtgtgactcgcagactccaggatactcagccctgatggactttgggaagatacagaaaaattgcctgggttcccaggcaatttgtcttgtattggcctgatataatgggctttggtattctccatggtgctctgttttcctgtggtgggrttggcaccaagttgcaagacaatgccccctgtaattgtccctgtatttcccctaagtaaaaatgagtctctctctactatactgcctgaagttgggggaggggtaatgtaggcactcctgtggctgctgtagctgaagctcagagtgagtcacatcccaagcccacagcctccaagactagcacagcaccagtgctcacccaaggactgcacttgcaacaacctggttgccactgaaatttattcagggtccgaggccactttagttagctgatggtgaagcaggccaagacttagatttctcttgacaaggcagtg

SEQ ID NO: 299011 - DNA, 539 bp, Homo sapiens
agcaaacaggatggggatagaaagtttattcaaagaataataacctaaagaaagataggaatatcccagtacaagaaggtgaaagaacaccaagcagattcaatccaaataaaattactccaaggcatatgataatcatactctcaaagttcaagaacaaagagagsatcctgaaagaagcaagtaacatataaaggagctctgatatggctaacagcagacttctctgcagaaactttacagggcaggagggagtggggtgatatattcaaaatactgaataagatagaaaacctttcaactgagaatactgtccctagaaagctatcctttaaatataaaaaggaaatactttcctagacaaacaaacgttaagggaattcattaccacagacctgtgttacaagaaattttaaaaggactttgtcaacctgaaacaaaagaatgtcaagccataaaaagaggttatgaaaggtataaaagtaagcacatagacatattcagaatactcagtgtaatggtggtgtataaaccactgg

SEQ ID NO: 299012 - DNA, 539 bp, Homo sapiens
agcaaacaggatggggatagaaagtttattcaaagaataataacctaaagaaagataggaatatcccagtacaagaaggtgaaagaacaccaagcagattcaatccaaataaaattactccaaggcatatgataatcatactctcaaagttcaagaacaaagagaggatcctgaaagaagcaagtaacatataaaggagctctgatatggctaacagcagacttctctgcagaaactttacagggcaggagggagtggggtgatatattcaaaatactgaataagatagaaaacctttcaactgagaatactgtccctagaaagctatcctttaaatataaaaaggaaatactttcctagacaaacaaacgttaagggaattcattaccacagacctgtgttacaagaaattttaaaaggactttgtcaacctgaaacaaaagaatgtcaagccataaaaagaggttatgaaaggtataaaagtaagcacatagacatattcagaatactcagtgtaayggtggtgtataaaccactgg

SEQ ID NO: 299013 - DNA, 562 bp, Homo sapiens
tctctcttaatatctagtaccaagcagtgaaccatttttatagtgatggtctaaaaataaactatacagagtagaactcaataaggagttatccttgccatcaaaatattattgactaaggaagaaatggaaaggatggaaaagattaagtaattgattccagcaacaaaaaaaagatcacgatgttcaccctttacactttctcactatggaattagacacatccacattcaaaaagggatgtggtgctcaaaatattaaagggcttcatgactatcactatagtgtgatcattcatcactagctcaatcattctttcactgtctgtttgtaaacataaaagaaaattaccctttcagaraaaaatttgcttttatgagcaactcagggtgaataatacaaatggctatccatctcgggatgactctgggcataaatcagataattatacctggaaatggagaaccagaaaagactagaatgcatgcccactgagtgggtgagctgttaaaaatgccccaggaacatgagaaaaagaggcaagtgaggaaggcagaatgta

SEQ ID NO: 299014 - DNA, 537 bp, Homo sapiens
cttgccaagctgcaggtggtgggagtaaaaagagctgtaacactccctcccattcgccaagctgtgggtgtgaagaggctgctgggtgccactccctcccgcttgccaaactacaggagtgaaaaagttacaacattttggggggctcattcaggatcttcagaaggttgagtaagagaggacctatgactctttagtttcattccaaggttattgtcctcagattattttccaaaaacagataaaacaccaggacyctgtcagccagttaagagtggatagcacagctgatggtctacaagactcagaagacaggcttcctgggaaggactttgtcaataccccttcaccttcagatgttggtaatgttggctttgttcccatttagtttccctttacagatgtctagccattgcatggtatcagaataaggtcccggggcagttgaaggtatctggctaaggctacaccttggcattacccaagagctcctggactagctccaatcccggacagcccattcaggtgctggaccaa

SEQ ID NO: 299015 - DNA, 594 bp, Homo sapiens
ttttctttcccctgtcaaaaaaaaacctgttagcacagggaaagaggctttttccccccagacaccttccctcctttgcatttaatttgttgttgtttttttttccccaccatgtcagatgtcaacataatcctgcgaatacagggagcttttagttgtaaggggttattgtttgtcttctggggaggcattttattaggcctggtccccaattccagggattccctttctttgtttgaggaagatctgttcccatagctttacattagcattactccagcatattttccaagcttcggtttgaagccctaaaaggaaaactagatctgagggacccagaggcagttgacagtggaagactacagcacagtggaggtaagcatgactacccctgctgastaggccttcccacttcatgggtggagctcatcctcatatttatggtatgagccccatgagttcacccatggtgccagtaccaggtactaagatttggaggatgcctcaaattcaaaatgagaaagggagagaccaagggatatgttttatcccctctcacttttcaaatgggtagcaaactattctcagcctgca

SEQ ID NO: 299016 - DNA, 549 bp, Homo sapiens
tccttcaatccaatcaagttgacattcaatattaaccatcacaagtccataggctacctaagcaaggagcttgatttggtggctaaaggatggctggcttgcctacaggcagttgcagtggtagctttactggtgccagaggctaataagttaaccatggggaataacttaaccatggttaccccacataatgtggcaggactgctgtattytaaggatggtatctggctaacagacaactgcctgctcaaatatcaagttctgctatgggagggatctacagtccacttaagaagctgtctctccctaaacccagccacctttctcccagaggaagctgatgagcctgaacatgacggaaaacagatagtactggaagcctatgtgtctggagatgacctcaaagaaaccctcttagaagacccagactgaactctctttatgaacaaagttttttttttgttttttttttttttttttttttttttttttgtagaacaagggatccataaagcagggtatgcagtagtcaccctaaatgacacaact

SEQ ID NO: 299017 - DNA, 549 bp, Homo sapiens
tccttcaatccaatcaagttgacattcaatattaaccatcacaagtccataggctacctaagcaaggagcttgatttggtggctaaaggatggctggcttgcctacaggcagttgcagtggtagctttactggtgccagaggctaataagttaaccatggggaataacttaaccatggttaccccacataatgtggcaggactgctgtattctaaggatggtatctggctaacagacaactgcctgctcaaatatcaagttctgctatgggagggatytacagtccacttaagaagctgtctctccctaaacccagccacctttctcccagaggaagctgatgagcctgaacatgacggaaaacagatagtactggaagcctatgtgtctggagatgacctcaaagaaaccctcttagaagacccagactgaactctctttatgaacaaagttttttttttgttttttttttttttttttttttttttttttgtagaacaagggatccataaagcagggtatgcagtagtcaccctaaatgacacaact

SEQ ID NO: 299018 - DNA, 549 bp, Homo sapiens
tccttcaatccaatcaagttgacattcaatattaaccatcacaagtccataggctacctaagcaaggagcttgatttggtggctaaaggatggctggcttgcctacaggcagttgcagtggtagctttactggtgccagaggctaataagttaaccatggggaataacttaaccatggttaccccacataatgtggcaggactgctgtattctaaggatggtatctggctaacagacaactgcctgctcaaatatcaagttctgctatgggagggatctacagtccacttaagaagctgtctctccctaaacccagccacctttytcccagaggaagctgatgagcctgaacatgacggaaaacagatagtactggaagcctatgtgtctggagatgacctcaaagaaaccctcttagaagacccagactgaactctctttatgaacaaagttttttttttgttttttttttttttttttttttttttttttgtagaacaagggatccataaagcagggtatgcagtagtcaccctaaatgacacaact

SEQ ID NO: 299019 - DNA, 549 bp, Homo sapiens
tccttcaatccaatcaagttgacattcaatattaaccatcacaagtccataggctacctaagcaaggagcttgatttggtggctaaaggatggctggcttgcctacaggcagttgcagtggtagctttactggtgccagaggctaataagttaaccatggggaataacttaaccatggttaccccacataatgtggcaggactgctgtattctaaggatggtatctggctaacagacaactgcctgctcaaatatcaagttctgctatgggagggatctacagtccacttaagaagctgtctctccctaaacccagccacctttctcccagaggaagctgatgagcctgaacatgacggaaaacagatagtactggaagcctatgtgtctggagatgacctcaaagaaaccctyttagaagacccagactgaactctctttatgaacaaagttttttttttgttttttttttttttttttttttttttttttgtagaacaagggatccataaagcagggtatgcagtagtcaccctaaatgacacaact

SEQ ID NO: 299020 - DNA, 582 bp, Homo sapiens
caagcagctaaattggcagcaagaaagccccagatttttgatccacttgaggcccctctggtctgggggatgctccataagagaaataaaacctcaatattctcctgcagaaatayaatgggccacttctcagggatacaccttcagcccttaggatggcctcaattggaggatggcaaacttcatctaccagcttccagccaatggaaagttcttaaaattcttcatcaagcctcccacctaggaaaagataaaacctatcaattggctcaaaggttgttctcaggtaaaaatctgctaaaaaatcatcaaacaggtcgttaatgcttgttacccttgccttaaaaataattccctcaactgatggcttctcttcccttctccaggacccaaagaatgggcatctacctgggaaaagaatggcaaatggatttcaaccatatgccatcagataaggggcatccaatactgcttagtattggtagataccttcactaactgggtagaagcatttgcatgtcagagaaagcctctgaggtgataaaagtactaactcatgagataattcctcactttggattc

SEQ ID NO: 299021 - DNA, 582 bp, Homo sapiens
caagcagctaaattggcagcaagaaagccccagatttttgatccacttgaggcccctctggtctgggggatgctccataagagaaataaaacctcaatattctcctgcagaaatataatgggccacttctcagggatacaccttcagcccttaggatggcctcaattggaggatggcaaacttcatctaccagcttccagccaatggaaagttcttaaaattcttcatyaagcctcccacctaggaaaagataaaacctatcaattggctcaaaggttgttctcaggtaaaaatctgctaaaaaatcatcaaacaggtcgttaatgcttgttacccttgccttaaaaataattccctcaactgatggcttctcttcccttctccaggacccaaagaatgggcatctacctgggaaaagaatggcaaatggatttcaaccatatgccatcagataaggggcatccaatactgcttagtattggtagataccttcactaactgggtagaagcatttgcatgtcagagaaagcctctgaggtgataaaagtactaactcatgagataattcctcactttggattc

SEQ ID NO: 299022 - DNA, 582 bp, Homo sapiens
caagcagctaaattggcagcaagaaagccccagatttttgatccacttgaggcccctctggtctgggggatgctccataagagaaataaaacctcaatattctcctgcagaaatataatgggccacttctcagggatacaccttcagcccttaggatggcctcaattggaggatggcaaacttcatctaccagcttccagccaatggaaagttcttaaaattcttcatcaagcctcccacctaggaaaagataaaacctatcaattggctcaaaggttgttctcaggtaaaaatctgctaaaaartcatcaaacaggtcgttaatgcttgttacccttgccttaaaaataattccctcaactgatggcttctcttcccttctccaggacccaaagaatgggcatctacctgggaaaagaatggcaaatggatttcaaccatatgccatcagataaggggcatccaatactgcttagtattggtagataccttcactaactgggtagaagcatttgcatgtcagagaaagcctctgaggtgataaaagtactaactcatgagataattcctcactttggattc

SEQ ID NO: 299023 - DNA, 582 bp, Homo sapiens
caagcagctaaattggcagcaagaaagccccagatttttgatccacttgaggcccctctggtctgggggatgctccataagagaaataaaacctcaatattctcctgcagaaatataatgggccacttctcagggatacaccttcagcccttaggatggcctcaattggaggatggcaaacttcatctaccagcttccagccaatggaaagttcttaaaattcttcatcaagcctcccacctaggaaaagataaaacctatcaattggctcaaaggttgttctcaggtaaaaatctgctaaaaaatcatcaaacaggtcgttaatgcttgttacccttgccttaaaaataattccctcaactgatggcttstcttcccttctccaggacccaaagaatgggcatctacctgggaaaagaatggcaaatggatttcaaccatatgccatcagataaggggcatccaatactgcttagtattggtagataccttcactaactgggtagaagcatttgcatgtcagagaaagcctctgaggtgataaaagtactaactcatgagataattcctcactttggattc

SEQ ID NO: 299024 - DNA, 628 bp, Homo sapiens
catgatcttggattgaattctgttagtcctccttacctcatatcagtaactgcagtagagaattagaaaagttgttgctcacccatacgttttctctcttatagctcttttcctgggagccatattgcactagaaattgtctctcctaacatgtcttctacctttccctaacatttttttaactgtcatttttaagtctgcttaagtaaaattttaaatattttaaatacacagcaattttcaccaaaagttttcatatatactcactgcatataataaccctgtagattattatgcttattgtacaattaaggcaagctgcctagaacaaatatagtgtaactttcactgcaytccacttgtcaagccaaggccagcttcatggacatgtgatctgtatagttgcacaaaatctggtgcatagaaagaccctatgtttgttgctctgttgctgtcatcttgaaattcttaatagtttttgaacaaggggcctcacatttttattttccactgggccccacatactatatggttgctcctgatcaaagcaagtcacaagccagcccagattctaagaaaaggaaaatagaaggtagattttacctcctgatgggtggaacagcacata

SEQ ID NO: 299025 - DNA, 542 bp, Homo sapiens
gcttcttttataagggcactaaccccttcatgacctaatcatgcccccaaaggccctaccttccaataccatcaatgtggagtgaggatttcaacatatgaatttttgagagacatagcattcagatcacagcagatgtctctccatatcggcatatataaatattctccattccttttagatactatgaagtagtgttttgtttatataaccataaaaattagtttacatgaccataaaaatcagtktcttgtaaataaacactgtgattgtttaaagttgtgtgccattacaatgctaccaggaggctaggcagtttagggtaaaagctgggtccaggccctgtatccatccagatgccctcattctaattctgcctgtgttagtgactagcaggggggctggggcaagataggccacctctgctgcctgattttttccatgtgcaaaattgtgaaagcagtagtgcctagctagctgaattaaaattggatgtttagtgctcaaagcataatctggaacattgcacgtagtcagtaaaa

SEQ ID NO: 299026 - DNA, 339 bp, Homo sapiens
aaaccaataattgtgctattttacttgtttcttkgcttgagttttcctgaaatcagagcctgagataagggctcccaggtattttaattggaaagtaatcccagggaacaggagtgcaggataagaggtggagtggggaaggagaggaaggggtaaaattaggatgcagaatgaacctggcctcctctataggaaacagcccatgctcaatccagccaagagcttctgagtcaccttattaagtgttttgccagactgcccacctctgagcagaaagcaggaagcatttatccattggcttccttctccattggtcaaggggtagccccaccaggcatt

SEQ ID NO: 299027 - DNA, 573 bp, Homo sapiens
atggaaaaaattcggacacaatgacattttaataactcatttatatttgatattagcttacattaaattagtgtaacagccatcattacaagtcaatcagaccctatccagttatgaaaaatctcagtaatcttcataaataatatgtacataggcattatatatgtatgtatatatgtatatagacatttatgtaaaacatatttatatgcatacatgtaggtttgtttgtttgtgtaaaatgtatgcaatataaaccaaatgtcttatcagcctttgacaataaatgcatatgtgaatttcaataggcatcattttgattttatctgccaaccatagctgagagtctcattcccccagagactactgcacagtttttaaacatrttttgcttttcagtatattttcactttttaacctaattcttactgggctcaattgtctacacattggggatataatgccagctgctctcatgctcttaagaaggaccttactactttgtcccaagaacctccatgtgttggtcaggctttttcctcagttctccataggacaggatttttattttga

SEQ ID NO: 299028 - DNA, 599 bp, Homo sapiens
aatagctactaatttctgagtattagcaacaataaartcaacttacatatattatgcctcctcttgtccctctcctctaccaatcaatattcagatagtgggatgctcataattctagttgttgattcattatttaccactattttaagatttgttttttgatcactgtacatcctacataggttttaaagtaagttaccattggaagttttagtaaatacatttgataattctttgaaaagaattataaaaactactgaaagaaatggtagaaaaatctaagtaattgtatatctgttgaaaacattgaattttattatttaccacatgtaagtagtacatttagattcccatctaatagagggaggaaatcagaacacttatttggctctctcacttataaacctggttatttgtgggaagtcagctctagtccaattgtcactgttttaaacttttatattttctttacctttgatattctatagtttcgatgtgatgtgtttaggtgtgggcatttttatgtttatcctgttgcttggaatttatgcttctaggatttgtggttttatcacttttgtctggaaaagtttcagccc

SEQ ID NO: 299029 - DNA, 474 bp, Homo sapiens
aggagattgtttctttggtaaccctcttagtgatagctgcttcttttgctcacaacccaagtactgcagggcctggaagagggttagctgttcttaatgcttattgctggattatttatcctcccttttcacaaacccccacaaggaaaatctctttatttaaagagatctgatggcacaggccatcagaccatccaatccaccgcccttctttgttgatttttcctgatttctcatcactccctattcagcttttagaaatagcatactaccactattactataactatttctgagatttctatatcccattaaagtgcaagaaatccataaaataagagagagagaatgggaaaagtagaatggaggataaataaaagtagaaagtaatttaactgacataatagagaagacayaataacatgtgagctgctggtggtggttgggtatgaattgccaaaaataagcaagata

SEQ ID NO: 299030 - DNA, 576 bp, Homo sapiens
agaggctcagttgggaggatcacttgagcccaggaggtggaggttgcagtgaaccaagattgtgccactccactccaacctgggcaacatagcaagatcctgtcaaaaaaacaaaagaagaaaaaagatatattagagataaaaatgataataacataaatttaaaaatggcatgggcatatttaaagataagttaaggaagccgaacataagaaaaagtgattacgttcttctagtatttctatgtctgttaaggatatataatgatgattgtatacatacaatgctatagcaataaaccacacacacatacacacacagaaagcatatagtcaactgaagagcaaactctggataataattaaaattggaaaattattaacttactatgctactaatcccatttacatatcaaaattttatttttatggaaatttttctttcctttttccaattttagaataatttttctttygttttctccaataactttaatacaagtataatagggtacagtgtacaagtgtacttagcactttgtaaattgcatttttcatagttctatgttgatagtag

SEQ ID NO: 299031 - DNA, 576 bp, Homo sapiens
agaggctcagttgggaggatcacttgagcccaggaggtggaggttgcagtgaaccaagattgtgccactccactccaacctgggcaacatagcaagatcctgtcaaaaaaacaaaagaagaaaaaagatatattagagataaaaatgataataacataaatttaaaaatggcatgggcatatttaaagataagttaaggaagccgaacataagaaaaagtgattacgttcttctagtatttctatgtctgttaaggatatataatgatgattgtatacatacaatgctatagcaataaaccacacacacatacacacacagaaagcatatagtcaactgaagagcaaactctggataataattaaaattggaaaattattaacttactatgctactaatcccatttacatatcaaaattttatttttatggaaatttttctttcctttttccaattttagaataatttttcttttrttttctccaataactttaatacaagtataatagggtacagtgtacaagtgtacttagcactttgtaaattgcatttttcatagttctatgttgatagtag

SEQ ID NO: 299032 - DNA, 556 bp, Homo sapiens
aaatcaaaagagaataaaaggcagaggcagatgaaaattaaatttattccactgagaattcataaatacaaaagagaaaacattgtcatctttcaaaaaactattaatgactgtactattgaacttggtagcaggggatataaatgtggctgaggctggatccaaccctctgaaggatcaggatgccagttgagaagctgctaattaattaaatgctaatctaatgaggagaggtgggtaagataaatctgcaagagatttataaaaaatacatcacatagtttatatttgtacactaaatcctaacatttgaatgccacagacatctttgcgattccagtgaaagctctgaatccctcttcccagaattatatacatgtgtactacacacgcattcgaggtcaggtcctcactggagtccagattaagaacctataccttgatgtatgtttagactcatgcttgcaattacktcccatttcaataaatttggtcaaagtcagctggcaagaataacatatgtgaataaaacagaataacatatgaatgccagaga

SEQ ID NO: 299033 - DNA, 651 bp, Homo sapiens
cagctctcttgagtttaggcactttccaaagaaggctaatacataagagctgtctgctggaagcactcccagcatttgggaaaataaatccttcagtcctgataatctgggtgtcctctatagtccaccccttgcaatacgaggayataattcttcaagtcaattctgggaacagttactgaagaatcccagtaagcctctctttctaggggaaacttaaagaagattaacaggaaaatacatggcccttgctactatagttggtcttgaagtcacaactgacactcattgtgtgtctctcctttactttcattctggattcccttcatcctcaactaacacatccgcttgtctcagtggtttaccttgtggcgtgatccacccccacatgcctaagaaacctgagtccctggtcacacaggcttcttaggccaaggctgttacacttgttcatttgccaagaaaatttggcaagggtatagctgaaaggtgcccaagtgcactgagtaccaaatatattttccctttccccattataacagtatccctttctccttctgataatcattattaattatcctttctaagatgatgactcttcttattttctgttcttcactttccaagaagaacttgaagtaaccggctgtt

SEQ ID NO: 299034 - DNA, 651 bp, Homo sapiens
cagctctcttgagtttaggcactttccaaagaaggctaatacataagagctgtctgctggaagcactcccagcatttgggaaaataaatccttcagtcctgataatctgggtgtcctctatagtccaccccttgcaatacgaggatataattcttcaagtcaattctgggaacagttactgaagaatcccagtaagcctctctttctaggggaaacttaaagaagattaacaggaaaatayatggcccttgctactatagttggtcttgaagtcacaactgacactcattgtgtgtctctcctttactttcattctggattcccttcatcctcaactaacacatccgcttgtctcagtggtttaccttgtggcgtgatccacccccacatgcctaagaaacctgagtccctggtcacacaggcttcttaggccaaggctgttacacttgttcatttgccaagaaaatttggcaagggtatagctgaaaggtgcccaagtgcactgagtaccaaatatattttccctttccccattataacagtatccctttctccttctgataatcattattaattatcctttctaagatgatgactcttcttattttctgttcttcactttccaagaagaacttgaagtaaccggctgtt

SEQ ID NO: 299035 - DNA, 651 bp, Homo sapiens
cagctctcttgagtttaggcactttccaaagaaggctaatacataagagctgtctgctggaagcactcccagcatttgggaaaataaatccttcagtcctgataatctgggtgtcctctatagtccaccccttgcaatacgaggatataattcttcaagtcaattctgggaacagttactgaagaatcccagtaagcctctctttctaggggaaacttaaagaagattaacaggaaaatacatggcccttgctactatagttggtcttgaagtcacaactgacactcattgtgtgtctctcctttactttcattctggattcccttcatcctcaactaacacatccgcttgtctcagtggtttaccttgtggcgtgatccacccccacatgcctaagaaacctgagtcyctggtcacacaggcttcttaggccaaggctgttacacttgttcatttgccaagaaaatttggcaagggtatagctgaaaggtgcccaagtgcactgagtaccaaatatattttccctttccccattataacagtatccctttctccttctgataatcattattaattatcctttctaagatgatgactcttcttattttctgttcttcactttccaagaagaacttgaagtaaccggctgtt

SEQ ID NO: 299036 - DNA, 533 bp, Homo sapiens
gtttaagcacagagggctgtaggacaggacgtcagacaggaagaccacttagaaggcagggtagcaacccatatgcgagataatttgctcctttcctgtaagtctacacaaaatacagcttctggatggagaatgtggcaaaggagcccctaggatttcttgtgtatttggaaatgctgtttttagtatcaaacagaaggcttgcaaacacttgtttgggataccgctttggctcctctaaatgaaaaatcattgtcaaattttaaggcctaagagtcattgtctttaaaayaccaaattgaattttcacatactgaattaaaaattcaaacaaaatttaaatatttgggtaaatttttacaatataaggcagttgaaaagaagtcatcctcagctctcacaagactttgacatctaaagcttgatgttattttaaaacgtacttaaaatgttgtgtgttttaaagctgaatgaaatgtgagataccaccaggcagtccctgatgaaaacaaaaaccactccacctgtgagct

SEQ ID NO: 299037 - DNA, 640 bp, Homo sapiens
aaggctcctaaaccagttaggcattctattgtgttccctcttgcttatgcgtgtagttttctgtcatcctgtcacactattcacatctctaaaatggtgatccatgccaccatyccattcttctcattttgcctgcattttaagactaatctcaaatttccctaagagggaaaacttccaggaacctcccacttagacatccttgtgcctgtgtagaaagaatacaggcaagtactaagaattacttctgaggggaatggtgcagatcaactctaaccaaggcggaggtgcaggtggatgcattcccactgtggttactcagaggcagactacccacttatacttctcaactacacttttgcaggctgagtccactaccaactaaaattgctttctttgattccactagtcagcttgctcaaggacagaatgcccagacagccttctctgccagctgacagcttatcaagtttatccccccaaaatatgtgtaaacaagattcactgtgccctgattgcctgaaatttgcttttcttctttctcttctgttagcaattctgtatttgattttctcactcaaatgacaactgacctcctcaaatgtgactcatttccatgaaaatagctaaatggcatgta

SEQ ID NO: 299038 - DNA, 648 bp, Homo sapiens
ttgtaatggcttcctaatgagtccctctgctaccctctcattagtcctcaatctgttaaactccctgctgccagactgaacattctaaatgcagctcccatcataccaagcttcatatttcacktgacaaggattccttttctttatcagatcacacacaaaaaattatctgatccctacttttccactgcagcaccatctctaacagtccccaattggcctcttatgtttcaaaggttccaaaatacaagcagtttcctgaataatccatgatgtttatgtcacacaaccttgcatctgatgctccttctttcaagaatacctctttggctctattcctttccttcaaactcatctcagacaccatttttcccagaagatcttctttttcctaacacttggggttctagctcagctgatcttcctctaaactctcataatctcatcccatcaaaatacctgcaaaattgcacttagcttttttattgatttatatgcccaactcaccactcttggaactactaaggagcaaagactatgtcttttgtatcattgtcccttaatcttgaacatttccacatgaatgagtgaatgaatgagtgaacaaatgaaagagcataattgaactgcctctcatgggctgcctcc

SEQ ID NO: 299039 - DNA, 653 bp, Homo sapiens
gaaccaggagagagatgcaataaatagatcaaaaaagacagctaatttttttttaaatgaagcaactttttttagaatagaggggactggtgatctggatgaacacaatattggtgttgtcaggacagcaatgtaagccctctggactagaaggtgagtggacagggaactagggaaaagagcactgacaacagttcactctccagggtgcttaactcagggagagataaggtagtagttggagaacttttcctgagaatttgaagtttttgatgctatgataaatggcattttaaaattttactttcagattgtttccagaataaagaaatacagttaatttttctatattgatcttattgatcctgcaaccttactatatacacttattcattttagtagctttttagtagatcctgtaggaatttgtacataggtaatcatgtctccaaataaaaataattttactgcttcccttcttgtggtttttcattgcctcacaagctagagcctccagtaaaatgctgaagaaaagtagtgaaagragacatttttcctttgttctttctcctggaaagaaagcatttagtcttctaccatgaaaaagatattagctactagcacattgaggattaagtaaaataaaacaaaag

SEQ ID NO: 299040 - DNA, 497 bp, Homo sapiens
gtgctgtgggtccttttgagtgaattttggcagagtgtgtcttcaaggaatstgttcatttcagttgtcattaaatttcaacaaatttactggcataaagttgttaatattcctttcaatatctatatcatctgtgataatgctgtgataatgcctcctctttcattcctgatgttgataatttgtgtattgtcttcccctcccccccgcccccggttaatctgggtacgggtttatcagttttaatgaactcaaggaactagatttttatttcattgatttttttctctattgtttttctgtttttatttcattactttccatgcttattttcattattttcttcattctgcttgctttagttttaatctgctcttctttttctgattccttaaggtaggaactgaggtcactgaattaagatctcttttcttttctaatataaacattcagtgctataaatttccctttgagtactgctttagttgcatgctgca

SEQ ID NO: 299041 - DNA, 607 bp, Homo sapiens
tttcagttgtcattaaatttcaacaaatttactggcataaagttgttaatattcctttcaatatctatatcatctgtgataatgctgtgataatgcctcctctttcattcctgatgttgataatttgtgtattgtcttcccctcccccccgcccccggttaatctgggtacgggtttatcagttttaatgaactcaaggaactagatttttatttcattgatttttttctctattgtttttctgtttttatttcattactttccatgcttattttcattattttcttcattctgcttgctttagttttaatctgctcttctttttctgattccttaaggtaggaactgaggtcactgaattaagatctcttttcttttctaatataaacattcagtgctataaatttccctttgartactgctttagttgcatgctgcacattttgaagtgttatgtcttcattttcagggtatataaaatgctttttaatattccttttgattttcttaaactcatagttgatttagaaatatgttatttagtttccaaatatttaggaatttcccagagaggcagctgttatttatttctaattaattctatcgt

SEQ ID NO: 299042 - DNA, 498 bp, Homo sapiens
aaagaattgaatggaataagaggaagaaataagccacttgaagatctaagggcagaacttttcctggcaaagggaacagctagtccaaagtctcyatggtggtaacaaacttgtaagcatccaagcactgaggatagagtgaggaaccattgaaggagtaactaaagcataagaagaaagatccaggatgcaccctaccatggaagcagaaaatagagaagtgaacacagccagctcaatacagttagataaagactaagtattggtgggaggcttctgcatcagaaactagaaatgcaaagatgaacaggctacggtccctggccttaatgaggctctgaattaatcctaatacatataggcatgtaaacaaagattctaattcacagaacaagtgttcttcactgtgaacccacaaagagaaaagcattgcattctgcttgaatgtggcagttaacacctccagaggagatgtaggttttattgcatgagtaggag

SEQ ID NO: 299043 - DNA, 551 bp, Homo sapiens
ctgttctgctctgctcattcaaatgttacattttaggcaatattttcatgaagctatatcatcttcctaaggattaatttaaatgtcagcacaataattcatcaagagtctgtttgcctttgtttgaggattttttatgcattaaagaaagtgccataaatgatatattcatgtacaagtaatgttcttaacatttaaattttttttacattcccaagagtaaaattcttgttgcatcaaaggattgaacagttttataactattgaaatgaaatatcaaattkctttctaacactattcgtgttctcaaacactgtggggtcatttctgctaactataaatgcttattttttaatgtgtgaaatttttgttctatttttagaaacaggtttctccctgtgttgctcaggctggcctcaaactcctgggctcaagtgattgtactgcctcagcctctagagtagctgggactataggcacatgccaccacacctagctccgatgagtgaatttttagagacatatcttctttgtcctttgcgcagcatttg

SEQ ID NO: 299044 - DNA, 575 bp, Homo sapiens
gtgatactgcaaaaaaccagtataccgcactcgtcaaacgttagctcctagagtgaagcactctagagttctgcttcaggatgttccaactccaaactgcaattgctgatgctgatggaaatattgacatttacaatgacctcatctgaaggggaaatcaggttttgcctgaatttttttccaccagttttttagggcttttaattagtcataccttcccataattgttgagggaggaaccatatattcatgggcttcttttgggggaacttattttgagattaatctaagctccactttcatttgatttttgctgatgccatctcatctcctttgctattacaaaagcctgcaaaaatagccctgcacataaattatgcatcaagtctttaaatatcctggtcttttttatttttttgccccaccttcatccaaggagaaagattataatgctcttttgcactgcctgttgtttctgctgtkggggttttaaatttttgtttaattttattttctgaaagaaaaataaaaatcttggttcccctgtttttactcacaagtgactaaggtgtaat

SEQ ID NO: 299045 - DNA, 585 bp, Homo sapiens
atatatcaagtacttacaaaaaacaagttttttaaaagtaacttcaaacattttataagatccatttacctaataccaattgtcattcattgtgttatgctttttaatttttccccacatacacagataaagaaaactcaagagaactatgtttgatgaggctttttccaaaacaacacacaaacacagacacacacacacatacacacacacacacatgcatactatgtgcaaatgaaataccatttttaaatttcaagtaggaagccatgctcaaaatttttaaacgacattcgctagtgccaaatatttagagggaaaacatttcagttgtgcttaaaacgaaacttgtgcaatttgtcaaagtaaacaaatcagtaaaggggtataggcctgagaggttgggtattaaaaaaaaatcctcagggaggcagtagggatatggcagtcaagraggagtcagtcaggttaggagctgactgcctgagctccctgcataaatctgggagccagggcagtaacttcccattagtaaagagctcacatgatcagcccaaggataggacctaggggttgggaccccaa

SEQ ID NO: 299046 - DNA, 548 bp, Homo sapiens
agggacaactcttcctttcagaagactgctgactaataaatatggatgaaatgatggagttaggaaatcataagtgagtgccaaaactagtgggtgaacatttgatgttaagggaaaktgcttgtccttccttagggaatgcacactgaagtattcagaagtaaagaggttacaagtatcctagtcaatttcaaatgtttcagagaccaaatgagagccagagagagggaaaatataagaaatttctgaagcaatgtcaagggtatacatgattttttatactatcttaaaattttttataattttaaattttatcaacttaatagtcataaacaataaaaattccacccattaaaaaaataactccctgtgaaagaagaaaaattacgcgactttgaaatggaaagaacttggtaatgctaaagcagacaaactagaaactaacatttccttattacaaatgtaacataacccattgcagcatagctatgaccaaaaggactattttaaactaaaagtagggagcagatcctgaacttcaaaactct

SEQ ID NO: 299047 - DNA, 548 bp, Homo sapiens
agggacaactcttcctttcagaagactgctgactaataaatatggatgaaatgatggagttaggaaatcataagtgagtgccaaaactagtgggtgaacatttgatgttaagggaaagtgcttgtccttccttagggaatgcacactgaagtattcagaagtaaagaggttacaagtatcctagtcaatttcaaatgtttcagagaccaaatgagagccagagagagggaaaatataagaaatttctgaagcaatgtcaagggtatacatgattttttatactatcttaaaattttttataattttaaattttatcaacttaatagtcataaacaataaaaattccacccattaaaaaaataactccctgtgaaagaagaaaaattacgygactttgaaatggaaagaacttggtaatgctaaagcagacaaactagaaactaacatttccttattacaaatgtaacataacccattgcagcatagctatgaccaaaaggactattttaaactaaaagtagggagcagatcctgaacttcaaaactct

SEQ ID NO: 299048 - DNA, 612 bp, Homo sapiens
accttctacctggggtgtaacttagagacaatattcacaaatgcccttatcaacataatgaggtcaaggcagcaatcaatgtctgctgtgttgtttcttctttcttgaaaatgcaactactttttaaatcaaaatctatcatctaggttaaaaagagacagagagctaaagagtttcatggtgccaaaaaatcagtattcatctttctttaaaaagggtgcaaaagttgggtgaccatataattatggacactttttttagaatgaatgggggttctactaagagttacactgaaacagctatgtgtagacaggaattttcttgggcaaactggtctatatgattagtctatatgaaaggaacagtgaagacagtattttcttctttgcagtttgacaatcttcagaagtttcaaatcaggctttcggttaaaactttgagtgtaacggacctcctgaagcatatccacatkggtacatactgcttttaaaaatttcaaagcctaaaatcaaccacacccaaaaacaattgaagtaaataacttgggaagattaacttaatcttacaggtttttttccccagtcattaccatcatttaaaattttgttttta

SEQ ID NO: 299049 - DNA, 528 bp, Homo sapiens
taaaaagacattcatttgttaaatctagcatccagggtaatatacaaagtacatttagtgagtcagaattttagttatttctttgccctctcatcaatttgcaatagagtatttgataatcctttattaagttatcccattatttatgtaaattactagaataaaaataattgcaaaacacttagaaacatattaactttaagtacttgtttcatgcgatgataattttatttcatagcctaaaatatggatctgttgtaaatgttattaaaaccaggaaaagtatgttttaagctttgctttggatttcttgccacctaccttttctcagaaacttcaaaataagtaggtgaattctcacatttttttgcttataaaatatatagaaatatggaaaaatatgtacatatatacacayatattttaacatatcgaataatgcattatttttccagatagaattttaaaatgtaaatgcctattccatgttttaaaattgtgctggctgggaccagtgggtcacgcctg

SEQ ID NO: 299050 - DNA, 495 bp, Homo sapiens
ttttcacaatttttgtatttccattttaactttagattctgtttttctttctttattttttgagatggagtcttgctctgtcgtccaggttggagtgcagcagtgtgatctaagcgcactgcaacctccacctcctgggttcaagcaattctttcacctcagcctcctgagtagctgggattacagacatgtgccaccatgcccggctaattttttttttgttttttttttaagtagagtcggggtttcaccatgttagccagactggtctcaatctcctggcctcaagtgatacrcacccctcagcctcccaaagggctgggattacaggcgtaagccaccgtgcctggccctgtgttttattcagaaacgtttaggatttatattggggttgtatgctgtggtaagcagatgtctttgctcctggactccgtgatggctcccaagattaccacctcctaatatacatgccttgtataattttctccccttgaa

SEQ ID NO: 299051 - DNA, 568 bp, Homo sapiens
caagttagttacttcctagattcactggaggtacaggcaatggataaatacagccattccaaatggaagacattggccaaaacaaaggggccgcaggccccatgcaagtccaaatccagaagggcagtcaaattcttaaagctccaaaatgatcacctttgactccatgtctcacatctcacactgacgcaagaggtgggtttccatggtccactgggcagctccaccccgtgacttggcagggtatagccctcttcctggctgctttcactggctggcattgagtgtctggcttttcyaggtgtatggtgcaagctgtctaccattctggggtctggaggatggtggccctcttctcacagctccactaggcagtgccccagtagggactctgtgtggggctctgaccccacgtttcccttctgcactgccctagcagtggttctccatgagggtcccacccctgcagcaaactttgcctaggcatccaggcatttccacacatcttctgaaatctaggcagaggttcccaaacctcaattcttgacttctgtgcatctgcaggctc

SEQ ID NO: 299052 - DNA, 567 bp, Homo sapiens
tttacctttaaaatattaaaataaaatacatttacttccagagcattagaaaatacataatgtacaaggaatcagaagaaaaagcctagaatatgatagcaacatttttggtgtacctcttttagttttctccctgtaaaaatattgtcatattggaaatacattttctattctggtttttttctacttagatttttctcatgtaattaattattcttcaaatacatacattttaatcactgtataatattttctgtgcgaacgatttataatttacttaatctctaacctactgatagacatagacrttgtcaggcctctgagcccaagctaagccatcatatcccctgtgacctgcacatatacatccagatggcctgaagcaagcgaagaatcacaaaagaagtgaaaatggccaatttctgcctttactgatgacattatcttgtgaaatttcttctcctggctcagaagctcccccattgagtaccttgtgatccccacccctgtctgccagagaacaaccccctttgatggtaattttctactacctactcaaatcctata

SEQ ID NO: 299053 - DNA, 595 bp, Homo sapiens
tccccctgcctccacctccctaagtgctgggattagaggcatgaaccgctgcaagcagccatgtatgtgtaattaattgattatttagttgcttgtgtattttattctcccaagtatattgtagagtccttgacaccaaccatgcattttgcttctttatataatcctacttggtataatgttgagtatttaagtatttgctgactgatagattaacaactaattactaaatcactgttaaaacaaaagattaagtagttaagttggytgtgagtagacacaatgcctattccaatttccttgtatataattatctgtgctgtggatgctttattaagatactgtttatttagacttgctaacatggtcaccattttttactgtagttatatttgatgtgacagactattcccttcagctcatctccattaattcctagagttggtaataatgtacacatcatcattccaatttatcttgatggagtgtccttgatattttttatttgtccttccagctcaagtctctattctccaagctggaaactgacagttagaacagattaaatgactcctttaactttaagcttctgatt

SEQ ID NO: 299054 - DNA, 540 bp, Homo sapiens
tcaatatttgtttaggaccataacgacagacaatgttgcccrtaagcatttatgtctggcagcttgattttcataggtttattgcttagaaaaactgatatttttcactgagcctgtcagtataaacaaacttcttttagatttaatattttattttattcctctgaagacagttatattgaaattttaatctaagatgctattttaattttggaatagtagagttatattatctagggtttgagaaagaaatttaggttgatttactgttctttctgaaatgtaagtgatgccagttgattctttgaatacacaatataaataaaaaaaattgaatttcattctgggttttttcactgatttataaatctaagtacattctaattaagttctacatttctcagtttcgttatataccaagtgcattcatttatcctccattttaaaatatgggattataaagtaatttgttagaaaagaaggtttaatttgatttttgtacttaaccacaaattttaagtaatgaaaaatttaattttg

SEQ ID NO: 299055 - DNA, 564 bp, Homo sapiens
actgcagccattcatctgcagcttctaaaggcttgaacaatagaacagcacatagtatgcatttgcttacttaaatcttggtttgaatattctccaatatgggagtttcaataatacaaacaaatacatgatataatgcacttacattacaaataagaacattgggctgggtgcagtggctcatgcctgtaatcccagcactttgggaaggccaaggcgggaggatcacctgagctcaagagtttgagwtcagtctggccaacatggtgaaaccttgtctccgctaaaaatacaaaaaattagctgggcattgtggtaggcacctgtaatcctagctactcaggaggctgaggcaagagagtcgctggattccaggagacagaggttgcagtgagctgagattgcagcactctactccagcctgggcaacaagagcaaaactccatctcagaaaaaaaaaaaagaaataaaaacatgggcaacaattcactaatttgccatttcttgtgaattttgccagaattttttttcttttaatcagtaaactggtttcataggaggaac

SEQ ID NO: 299056 - DNA, 609 bp, Homo sapiens
cttctgaaccttctgaattcagagtgtaattctgaactgtggttaatatagccacagttcagaattacactcaataaagttctttctcagggctatctcaattatatatatatatakatatagatatagatatatatagatatatatatatagttatacacatatatatatacatatatagtttatacatggtgtctgtttacccatatatatatatatatatataaagtataaatgctcacatgctcaaagaatgtcctgtattcttccactttataaatgggaattattctatacctttatgagagaagaacagtgaagcaggttgatttgaagagcactaagtccatttatttttaccagttattaacttaggtacgtgtatcttttctctttcccagctttttaaaaatacgctttcaaatattcagggtaaacaagacttctgaagaggttgagatgaaattgttttgcttcacgttcaagaccctggcagctgagcatccacaaagcttccttctcatcacacttttctttgttgatgcaggtggagaaatcagcagcagaaggcacaactgtctccgttttgcaggttttctgcatgtttcc

SEQ ID NO: 299057 - DNA, 572 bp, Homo sapiens
agacacacttggaatcattctcatagaaaataatcttgaaaaaaaagaaaataaacttgaaaagatgttagttgctaaaactattaagaacacatattgagaggaaacaaaagaaaaaaatagaactttacatgacatttgcattagggaatgaagacaaaaataatgtgcttttgatgaaaggaaaaaagattatatatgaaaaaaggaaggagcatcaaaaaaactgtctgsggaaatagaaggagtaaaatacattatccagctccacccagctcactagagctaagcagggtctcagatcctacctaatctaaggagaactgattctagagcagggctctaatccctgtgggaaaccaaattgagctgagaaattatgttatagaaggttcttagaaaagcaaatacagaacagagtggcaataagatatagtgaaatgaattgttgagcaacaatgaggattaaatactgtcctgatatataactatcaccatctaccaagaattgatagcaaacagggatttttattttggagtaaatacgctatattagaaagtcaaagaggcca

SEQ ID NO: 299058 - DNA, 572 bp, Homo sapiens
agacacacttggaatcattctcatagaaaataatcttgaaaaaaaagaaaataaacttgaaaagatgttagttgctaaaactattaagaacacatattgagaggaaacaaaagaaaaaaatagaactttacatgacatttgcattagggaatgaagacaaaaataatgtgcttttgatgaaaggaaaaaagattatatatgaaaaaaggaaggagcatcaaaaaaactgtctgcggaaatagaaggagtaaaatacattatccagctccacccagctcactagagctaagcagggtctcagatcctacctaatctaaggagaactgattctagagcagggctctaatccctgtgggaaaccaaattragctgagaaattatgttatagaaggttcttagaaaagcaaatacagaacagagtggcaataagatatagtgaaatgaattgttgagcaacaatgaggattaaatactgtcctgatatataactatcaccatctaccaagaattgatagcaaacagggatttttattttggagtaaatacgctatattagaaagtcaaagaggcca

SEQ ID NO: 299059 - DNA, 616 bp, Homo sapiens
ttccattcagggcaaatagtaggtaaaataaaacttaaaagaaacattgtatataaccatacaaatggactactcacaaacaaagccaatcttataatcctatagggtaaataaaaggaaatatcagttagctcttttaaatttttctcttagtattgaacatacatttcttcaggctgtccgtaaaacaaccattgccaaagtattaagatagggtcagattactaaaaagatttgtgaactgggagacatttgaatctatgtaaaaaggctcctattcatactatgaataactatacaaaaattagcagaaataaatataayactgcagccatatgatgtgttaaagtaagtcctacatcatgatacatttggtgtcatgataaggaagaatttcaaattaaaacactggcagcatgtcatccagtaacatcaaacacatgacacaggctttcctggaattctgtaattattctgaacttccttctacatttttcattgtgttcacagttcacatgttttattcagatcaattagtgtctactggatagccatacatcacatgacactaaactaggtgttttgggcacaggactaggaatgtggcaaaccattt

SEQ ID NO: 299060 - DNA, 601 bp, Homo sapiens
actaacttcttttccaaagtgtgtcacacacaaacaagtgaggttggatgactgcatagaatgaaagacactggggttatccaatggtgagagaaaattactctctggcctaaacaagcgagagakagaagttaaagaggaaagggcaaatgctgataaaagtaattaggtttatgtttctttggggtcaaggggagaatgttcatgatttttatgctgcgatagttactttgtagtctatggccttctgaaggtaaaaagtgaagatactacaggctaactcaccagaagggaacctaatgtccatagaacgagtgatgatcattcaactgaggtaaccctgaaacataatgttgggatatttcctgtgttagtttactagtattgctgtaataattaccacaaactgggttacttaaagcaagagaaaatttttctctcacagttctggaggccagagtccaaaatcaagatgtaagcaggttgcttctttctggagtctctcaggaagaatctgtcccacaacctctctcctagtttctggtggttactgaaaattcttggcatttcttgccttgtagttgcatcgtgccaatctccc

SEQ ID NO: 299061 - DNA, 601 bp, Homo sapiens
actaacttcttttccaaagtgtgtcacacacaaacaagtgaggttggatgactgcatagaatgaaagacactggggttatccaatggtgagagaaaattactctctggcctaaacaagcgagagagwgaagttaaagaggaaagggcaaatgctgataaaagtaattaggtttatgtttctttggggtcaaggggagaatgttcatgatttttatgctgcgatagttactttgtagtctatggccttctgaaggtaaaaagtgaagatactacaggctaactcaccagaagggaacctaatgtccatagaacgagtgatgatcattcaactgaggtaaccctgaaacataatgttgggatatttcctgtgttagtttactagtattgctgtaataattaccacaaactgggttacttaaagcaagagaaaatttttctctcacagttctggaggccagagtccaaaatcaagatgtaagcaggttgcttctttctggagtctctcaggaagaatctgtcccacaacctctctcctagtttctggtggttactgaaaattcttggcatttcttgccttgtagttgcatcgtgccaatctccc

SEQ ID NO: 299062 - DNA, 550 bp, Homo sapiens
ttgctctaagaactactgcaggaacataccaggaaagccaatagaatccacagaccctttgaaggaggtggatagctcctgcaggacctggagacaactcaaattctgtgagtgcccaaagggtgaaactaagaaagagggattgtctgcccctgaacacacaccctcactggggaaacctgmaggtccagatcatgggagaaggacttgaccttacctggagttgagataatttggaaaggtgagcaaaatacaggagtagaggaagtagcaggaagagccttgtgggctcactttgtccccagggaaaccattcccaactttgtctcacaggggtcctcggggagggcttccagaggaactgggaaaagaccatggggagaaggaaacctccagctgaactctgtaacaattccaacaaaatgagacatttcctggacagaactcaggggagggggtgaatgcagagtgcagacatgggcaggtgggcaggtgcaaaacttgaaagtcctgcttactttctcagccaggaggctggtaacatggggca

SEQ ID NO: 299063 - DNA, 550 bp, Homo sapiens
ttgctctaagaactactgcaggaacataccaggaaagccaatagaatccacagaccctttgaaggaggtggatagctcctgcaggacctggagacaactcaaattctgtgagtgcccaaagggtgaaactaagaaagagggattgtctgcccctgaacacacaccctcactggggaaacctgcaggtccagatcatgggagaaggacttgaccttacctggagttgagataatttggaraggtgagcaaaatacaggagtagaggaagtagcaggaagagccttgtgggctcactttgtccccagggaaaccattcccaactttgtctcacaggggtcctcggggagggcttccagaggaactgggaaaagaccatggggagaaggaaacctccagctgaactctgtaacaattccaacaaaatgagacatttcctggacagaactcaggggagggggtgaatgcagagtgcagacatgggcaggtgggcaggtgcaaaacttgaaagtcctgcttactttctcagccaggaggctggtaacatggggca

SEQ ID NO: 299064 - DNA, 550 bp, Homo sapiens
ttgctctaagaactactgcaggaacataccaggaaagccaatagaatccacagaccctttgaaggaggtggatagctcctgcaggacctggagacaactcaaattctgtgagtgcccaaagggtgaaactaagaaagagggattgtctgcccctgaacacacaccctcactggggaaacctgcaggtccagatcatgggagaaggacttgaccttacctggagttgagataatttggaaaggtgagcaaaatacaggagtagaggaagtagcaggaagagycttgtgggctcactttgtccccagggaaaccattcccaactttgtctcacaggggtcctcggggagggcttccagaggaactgggaaaagaccatggggagaaggaaacctccagctgaactctgtaacaattccaacaaaatgagacatttcctggacagaactcaggggagggggtgaatgcagagtgcagacatgggcaggtgggcaggtgcaaaacttgaaagtcctgcttactttctcagccaggaggctggtaacatggggca

SEQ ID NO: 299065 - DNA, 624 bp, Homo sapiens
ggtcaataaatgtgatacaccagataaacagaattaaaaacaaaaatcatatgatcatctcaatagatgcagaaaaaacatttgacaaaaccaagggtctctttaygattaaaaccctcagtaaaccttcatagaagggacataccttaatgtaataaaagccatctatgacaaacccacagacaatataatactgaatggggaaaagttaaaagcatttcctctgagaactggaacaagaaaaggatggccagtctcaccactttttttttctttttttgagacggagtttcactctgttgtccaggatggagtgcagtagggtgatctcagcttactaccatctctgcatcccaggttcaagtgattctcctgcctcagcctcccgaatacctgggattacaggtgcccaccaccatgcccagctaatttttgtatttttagtagagatggggtttcaccatgttggccaggctggtttcgaactcctgacctcaggtgatccaccacctcagcctcccaaagtgctgcaattacaggcatgagccactgtgcctggcccctcatcacttttattcagcatagtactggaagtcctagccagagcaatcagacaagagaaag

SEQ ID NO: 299066 - DNA, 624 bp, Homo sapiens
ggtcaataaatgtgatacaccagataaacagaattaaaaacaaaaatcatatgatcatctcaatagatgcagaaaaaacatttgacaaaaccaagggtctctttacgattaaaaccctcagtaaaycttcatagaagggacataccttaatgtaataaaagccatctatgacaaacccacagacaatataatactgaatggggaaaagttaaaagcatttcctctgagaactggaacaagaaaaggatggccagtctcaccactttttttttctttttttgagacggagtttcactctgttgtccaggatggagtgcagtagggtgatctcagcttactaccatctctgcatcccaggttcaagtgattctcctgcctcagcctcccgaatacctgggattacaggtgcccaccaccatgcccagctaatttttgtatttttagtagagatggggtttcaccatgttggccaggctggtttcgaactcctgacctcaggtgatccaccacctcagcctcccaaagtgctgcaattacaggcatgagccactgtgcctggcccctcatcacttttattcagcatagtactggaagtcctagccagagcaatcagacaagagaaag

SEQ ID NO: 299067 - DNA, 624 bp, Homo sapiens
ggtcaataaatgtgatacaccagataaacagaattaaaaacaaaaatcatatgatcatctcaatagatgcagaaaaaacatttgacaaaaccaagggtctctttacgattaaaaccctcagtaaaccttcatagaagggacataccttaatgtaataaaagccatctatgacaaacccacagacaatataatactgaatggggaaaagttaaaagcatttcctctgagaactggaacaagaaaaggatggccagtctcaccactttttttttctttttttgagacggagtttcactctgttgtccaggatggagtgcagtagggtgatctcrgcttactaccatctctgcatcccaggttcaagtgattctcctgcctcagcctcccgaatacctgggattacaggtgcccaccaccatgcccagctaatttttgtatttttagtagagatggggtttcaccatgttggccaggctggtttcgaactcctgacctcaggtgatccaccacctcagcctcccaaagtgctgcaattacaggcatgagccactgtgcctggcccctcatcacttttattcagcatagtactggaagtcctagccagagcaatcagacaagagaaag

SEQ ID NO: 299068 - DNA, 624 bp, Homo sapiens
ggtcaataaatgtgatacaccagataaacagaattaaaaacaaaaatcatatgatcatctcaatagatgcagaaaaaacatttgacaaaaccaagggtctctttacgattaaaaccctcagtaaaccttcatagaagggacataccttaatgtaataaaagccatctatgacaaacccacagacaatataatactgaatggggaaaagttaaaagcatttcctctgagaactggaacaagaaaaggatggccagtctcaccactttttttttctttttttgagacggagtttcactctgttgtccaggatggagtgcagtagggtgatctcagcttactrccatctctgcatcccaggttcaagtgattctcctgcctcagcctcccgaatacctgggattacaggtgcccaccaccatgcccagctaatttttgtatttttagtagagatggggtttcaccatgttggccaggctggtttcgaactcctgacctcaggtgatccaccacctcagcctcccaaagtgctgcaattacaggcatgagccactgtgcctggcccctcatcacttttattcagcatagtactggaagtcctagccagagcaatcagacaagagaaag

SEQ ID NO: 299069 - DNA, 491 bp, Homo sapiens
aatagtaataggcctcagatttgctactyagcagtgccagaagaatcccattactggaaggtaaatttgggaagctagcattaaaaggggctgaacaaaaaagtagtccccacgtatttaattcctcattcatggtgttgccattgttctttgcatatatttttaattttgccattagctgtctgcattattattatcatttatacatctctactagactgatttgtctcatttatttctgtttcagtgtgtataatagtgcccagaatgaagcagatcctccataaacatttttttatgtggttggaggaacaaataaataagacgagtcatcaaaggttctgctaatcagaggtcatataatatatttcctggggaacagaaatccaggcagataaaatacaaggacactgtatactggtgtccttttaagaggcacaatcaacatatttagacataaaattgaaatgatgtaaatgttatgcgagagt

SEQ ID NO: 299070 - DNA, 631 bp, Homo sapiens
gttatgttgttctaacataccaacctttattttgcactgaaaacatatataccaaaagcatgatagtgttcaggtgcatggtagaaataaattgactctgaattccaacattttacatattaacaaatatattgataatcaattaagtgataattcctttccgcttcacccgcctcactctatccctttagaagccaataactaaatttaaagcagtgtacatagtacataccttttgtcatttaaatgataaacatkgtctcagggtcatgtttggactgtgcattagagaatgttttaaattataatagtcatatatcaattttcaaagagctattaaagatagcatttaaacactttccaaatgacttttaaaatttaagagtcattttttgtttctgttcttcagaagttatttagccaattcctaccacttataacagtttataacaagggttataaactctagggacaatttttacatattgaaaattcctccttcaatgttgtaaaaatcaaagtccgagtaagttgaggaagaatatggttaaataaataagctttgaccgaacttatggagtttgtgtttaacaacttctgtgccctttcacgtggtaaatgtttatagcca

SEQ ID NO: 299071 - DNA, 631 bp, Homo sapiens
gttatgttgttctaacataccaacctttattttgcactgaaaacatatataccaaaagcatgatagtgttcaggtgcatggtagaaataaattgactctgaattccaacattttacatattaacaaatatattgataatcaattaagtgataattcctttccgcttcacccgcctcactctatccctttagaagccaataactaaatttaaagcagtgtacatagtacataccttttgtcatttaaatgataaacatggtctcagggtcatgtttggactgtgcattagagaatgttttaaattataatagtcatatrtcaattttcaaagagctattaaagatagcatttaaacactttccaaatgacttttaaaatttaagagtcattttttgtttctgttcttcagaagttatttagccaattcctaccacttataacagtttataacaagggttataaactctagggacaatttttacatattgaaaattcctccttcaatgttgtaaaaatcaaagtccgagtaagttgaggaagaatatggttaaataaataagctttgaccgaacttatggagtttgtgtttaacaacttctgtgccctttcacgtggtaaatgtttatagcca

SEQ ID NO: 299072 - DNA, 631 bp, Homo sapiens
gttatgttgttctaacataccaacctttattttgcactgaaaacatatataccaaaagcatgatagtgttcaggtgcatggtagaaataaattgactctgaattccaacattttacatattaacaaatatattgataatcaattaagtgataattcctttccgcttcacccgcctcactctatccctttagaagccaataactaaatttaaagcagtgtacatagtacataccttttgtcatttaaatgataaacatggtctcagggtcatgtttggactgtgcattagagaatgttttaaattataatagtcatatatcaattttcaaagagctattaaagatagcatttaaacactttccaaatgacttttaaaatttaagagtcattttttgtttctgttcttcagaagttatttagccaattcctaccacttataacagtttataacaagggttataaactctagggacaatttttacatattgaaaattcctccttcaatgttgtaaaaatcaaagtccgagtaagttgaggaagaatatggttaaataaataagctttgaccgaayttatggagtttgtgtttaacaacttctgtgccctttcacgtggtaaatgtttatagcca

SEQ ID NO: 299073 - DNA, 588 bp, Homo sapiens
atgatcacctatataacatttaagttggcaaattagccgtcacatgagtctgtgacaaatgacaatggcagggacttctaatttttttttgagacttctaattaaataagcttttgtttaggcattttatgacacaaatggtctagtgactagaatggtagaagagggcatctaagggcatgtgcygagtatacataagagtgtgtggggaatcatctgacactggctccctgaggtattcccagggtgatgagtctgctggcatgcttgaggcaggtaggctctgcctgtgtggtacacgttcatttctctgaatttcaagcaggatagtgtagggcccaagcgaaaacttcccctttgccctctaaaggtttgctgaaaatcactgacaagagacagattaatcaaataaaaggtatacatattcattaagtgtatatggtggccttcagaatgaagaaccaaagacataggggacattgtctatttttatgcttaggtttgaaactgacccaataatcttgtttttttgtttgtttgttttgtttttgctttttggatagccttagaaatgaaactttctggtct

SEQ ID NO: 299074 - DNA, 588 bp, Homo sapiens
atgatcacctatataacatttaagttggcaaattagccgtcacatgagtctgtgacaaatgacaatggcagggacttctaatttttttttgagacttctaattaaataagcttttgtttaggcattttatgacacaaatggtctagtgactagaatggtagaagagggcatctaagggcatgtgccgagtatacataagagtgtgtggggaatcatctgacactggctccctgaggtattcccagggtgatragtctgctggcatgcttgaggcaggtaggctctgcctgtgtggtacacgttcatttctctgaatttcaagcaggatagtgtagggcccaagcgaaaacttcccctttgccctctaaaggtttgctgaaaatcactgacaagagacagattaatcaaataaaaggtatacatattcattaagtgtatatggtggccttcagaatgaagaaccaaagacataggggacattgtctatttttatgcttaggtttgaaactgacccaataatcttgtttttttgtttgtttgttttgtttttgctttttggatagccttagaaatgaaactttctggtct

SEQ ID NO: 299075 - DNA, 588 bp, Homo sapiens
atgatcacctatataacatttaagttggcaaattagccgtcacatgagtctgtgacaaatgacaatggcagggacttctaatttttttttgagacttctaattaaataagcttttgtttaggcattttatgacacaaatggtctagtgactagaatggtagaagagggcatctaagggcatgtgccgagtatacataagagtgtgtggggaatcatctgacactggctccctgaggtattcccagggtgatgagtctgctggcatgcttgaggcaggtaggctctgcctgtgtggtacacgttcatttctctgaatttcaagcaggatagtgtagggcccaagcgaaaacttcccctttgccctctaaaggtttgctgaaaatcactgacaagagacagattaatcaaataaaaggtatacatattcattaagtgtatatggtggccttcagaatgaagaaccaaagacatargggacattgtctatttttatgcttaggtttgaaactgacccaataatcttgtttttttgtttgtttgttttgtttttgctttttggatagccttagaaatgaaactttctggtct

SEQ ID NO: 299076 - DNA, 601 bp, Homo sapiens
actaatgactgcagcaataaatttggtcatasttcacagggtaacattctgcacttacccagttgttggtttgacatagagtaatagaatttacccttttaagttgtaaattacgatgaaaatgctgagcctaacacaaaatgcatttggggatgtttttaagcataggaaatattggtaatacttccactaagcatactattaaaataaataaatagtatttattgcttggttcccagctgcagctggatggaaagcagtgggaaaggagaaataagacatacatatttatcaaatgcacagggctcatgtttacttaatccatttccaaggagttgcttacaccagagaaaagaaaagagggttttgtttttacttctgaggttcatttcagtgaagctgatatagaaaatagtactgttagttacaattgtaataattcaaaaattaattgtcgtaaaatattcctcatgactttttgccaatcattaatttgctaccactttgttatgcttttttggcttaagtttcatcaaggcatctatataatgttttgatctgtaaggtaaagtggagaattagtgtctcagaataaaccaac

SEQ ID NO: 299077 - DNA, 605 bp, Homo sapiens
aattttttcacatttttgagaaatacatttattttaaataatatagtaatgctttatttagtatgttgtgctttgttgataacaaagagaatatcaaaaatatgtattatgttttgcaatgaactacatataagaaccctgtgggaaggaggaaactgaatagcttgtgccctctgataagcctattttaaaacttgttccagtcatctcttttttaaaatgaagtcatttccatgaaattctaaccaggctatatatatttattaggcactagaatgtcaattggtatgccaaacatctggttacctagggtctggcttaactgggcagaacaagtatttttttttctatcaaatccacygattacctacaaaagaatgatttcatcattctggtcaccatgcatcctaaatgaggttttgcattgaagtgttgatacttactcattagtatgaagtcatttgagaatgaaattgcaggtgaagatttgtctgtgtgtagcgttaaatgttgacagatcatctccctgtaatgggaatgcggagtgaagacaatgtgctgccagttgaattggaaatgcagatactgaatcattaatgctttaa

SEQ ID NO: 299078 - DNA, 537 bp, Homo sapiens
tttttctacctgtgttcttctagcctttctgtcatacctaagaggtggaggggaaacattgaaatgtagtcaccaggatgcaagaaagtaaatctggaacattatccagggaaaagagtaaaagatgagaaaggaaaaaaaaaaaacctctgtatttgtgtaggagggacagaaacacttgtgaagtgtgaaacacctcccagacatggttctactaaragaggagacttaattgggagactatagatgactttcctctaccacagcctaccactacaccagtgagcctgtagtgttttttagtggattacaactagaagagctactaaatgtgaatgctctctgagaagtataacaagaagccacaaagccaagaggaaatacaaaaacaaagaaactagagaaatttgaagtttctggtacctataactacagcaaacattaaacacagcccaaatgccagtcagattcaagcaaatcttctcactaaaagcttatttagttcagtatattttatcctatacaacatgtgctact

SEQ ID NO: 299079 - DNA, 444 bp, Homo sapiens
aatgtgaatgctctctgagaagtataacaagaagccacaaagccaagaggaaatacaaaaacaaagaaactagagaaatttgaagtttctggtacctataactacagcaaacattaaacacagcccaaatgccagtcagattcaagcaaatcttctcactaaaagcttatttagttcagtatattttatcctatacaacatgtgctactttcaacaaaacgataaaacaaayaccaaaggcaagaaagaatacagtctgaagagacaaagaaaaacctcagtgagcttaaagatagctcaatagaaacttttcaaatagaaatgtgaaaggaatttaaaaaataaacagagcatccaagaactgtggagaaatatgaaaatgtatagatactcgtaattggaataccagaagagaaaaaagagagaaagaatgaggcagaagaa

SEQ ID NO: 299080 - DNA, 608 bp, Homo sapiens
atgaggaggagatagaactgcagtattgtccaagaaacattcatctgtcaaattctctaacaagattttgcaagyagacctaatattttcaaagtaggcattaggtattatcacaacccactaaaaaaagtgagttggccatatatatacatcaacacctttcatgttcaaatgtttttcttctgagtatgaaaatcaataggtggaaatataagactgcttttacttctaaatgagagtgatttaataaattgggaaaaaaatatcagtgaagttaaaaggtatagtgtagccatagctagttagataatatggagctgaaattattagctagatttatgtggtagagaataaagtactttcagaatatgcggttctttaatgtaacagaaaaaaatgcaataatattatggggaaaaggtcaacctaatttatggaaagagcagaaatacacagatgcattatttaattttagcatacatataactaaagggaaaatgagaacatctcaaaaatcctccattagaacgaacagctattttagttcaaaaagttattcttgtggcttttatgaacacaaaaactgacatttgtgtggcattgagtag

SEQ ID NO: 299081 - DNA, 608 bp, Homo sapiens
atgaggaggagatagaactgcagtattgtccaagaaacattcatctgtcaaattctctaacaagattttgcaagtagacctaatattttcaaagtaggcattaggtattatcacaacccactaaaaaaartgagttggccatatatatacatcaacacctttcatgttcaaatgtttttcttctgagtatgaaaatcaataggtggaaatataagactgcttttacttctaaatgagagtgatttaataaattgggaaaaaaatatcagtgaagttaaaaggtatagtgtagccatagctagttagataatatggagctgaaattattagctagatttatgtggtagagaataaagtactttcagaatatgcggttctttaatgtaacagaaaaaaatgcaataatattatggggaaaaggtcaacctaatttatggaaagagcagaaatacacagatgcattatttaattttagcatacatataactaaagggaaaatgagaacatctcaaaaatcctccattagaacgaacagctattttagttcaaaaagttattcttgtggcttttatgaacacaaaaactgacatttgtgtggcattgagtag

SEQ ID NO: 299082 - DNA, 608 bp, Homo sapiens
atgaggaggagatagaactgcagtattgtccaagaaacattcatctgtcaaattctctaacaagattttgcaagtagacctaatattttcaaagtaggcattaggtattatcacaacccactaaaaaaagtgagttggccatatatatacatcaacacctttcatgttcaaatgtttttcttctgagtatgaaaatcaataggtggaaatataagactgcttttacttctaaatgagagtgatttaataaattgggaaaaaaatatcagtgaagttaaaaggtatagtgtagccatagctagttagataatatggagctgaaattattagctagatttatgtggtagagaataaagtactttcagaatatgcggttctttaatgtaacagaaaaaaatgcaataatattatgggraaaaggtcaacctaatttatggaaagagcagaaatacacagatgcattatttaattttagcatacatataactaaagggaaaatgagaacatctcaaaaatcctccattagaacgaacagctattttagttcaaaaagttattcttgtggcttttatgaacacaaaaactgacatttgtgtggcattgagtag

SEQ ID NO: 299083 - DNA, 329 bp, Homo sapiens
tcaattgtaaaggacccggatacataattttaaaaaatcagtttcagtgtatatraggttctcaccccactttcgctgctcagtcagatttgtttatgcagaatcgacatttaatagtgctaattgcactccagttaaattgccctgattgcagaaagggaagcaattttcgtgctctctgtctgggtttggaagaaattgttttatattcacctctttataaagaagtggagataaggcaccggggcctttgcacaaattgcacttaggggctgactggcagcattcaggcgctataatagagcattatttggccgttttgaataatg

SEQ ID NO: 299084 - DNA, 329 bp, Homo sapiens
tcaattgtaaaggacccggatacataattttaaaaaatcagtttcagtgtatatgaggttctcaccccactttcgctgctcagtcagatttgtttatgcagaatcgacatttaatagtgctaattgcactccagttaaattgccctgattgcagaaagggaagcaattttcgtgctctctgtctgggtttggaaraaattgttttatattcacctctttataaagaagtggagataaggcaccggggcctttgcacaaattgcacttaggggctgactggcagcattcaggcgctataatagagcattatttggccgttttgaataatg

SEQ ID NO: 299085 - DNA, 497 bp, Homo sapiens
gcctattgaattcatgttagtaaaactacagatattctggctgaaaaaaaagacaatgtgtacagttaatggaggtgggggtgaatatgtatattggtaacagataaatgtgtgattaattttaaagaaattccacctctgtcacatgttcttaaaatctactacacccattcataacagggcagtttggggaaagagaccatatacatttcagttggcaatgaggaaagaaggaagtcgccaggatacttacctggccamtacgtaggtagaatggaaacccaatcctttaaaatatgaggaatgtgatctggcaccgtggctcatgcctgtaatcccaacactttgggaggcagaggcaggcagatcacttgaggccaggagttcgagaccagcctggccaacatggagaatccccatctctactaaaaatataaaattagtcaggcatggtggtatgcatctgtaatcccagctacctgggtggctggaggcac

SEQ ID NO: 299086 - DNA, 560 bp, Homo sapiens
aggcaactacatcttgcatagcatgagtttttatgcaatgtcaaattaaaagagcctaaagactttatatttcaaaatatcgatggaccaacttgatgtctaataactaggcttactcaggttaactttataatcagaataacagagcagcaactagatcaatcaattaaaatgtcctaagtctctctgaaacccccttcaagcatgcacgccaaagtctattcaaagaagtcattctgaattcccaaaacccaataaaggtgccctttaaccatcaggttattatgctatgacagaattttagayctgaaaatgtcattttaagtcatcccattcgatcatttttagttctactcattttcataccatcctcacaatttttgccatatctgcatactacttgttcttttttccttaaaattgatttactttttttaaactttaatcagttgagccttatatcagtaaaatcccaggtttcatttgctaattagtttttttcaaatatgcattaaaataaacatataactagtcaaaacattttcacctttgtgacacct

SEQ ID NO: 299087 - DNA, 574 bp, Homo sapiens
ttgctaaacattcttcatgcacagaacagccccccacgacaaaaaattatctagcccaaattgtcagaagtgctgaggttgagaaactcagatctagaggaatgattgaatatgttaagtaaagacataggaaatatgaaaaagatacaaattgaacttttggatataaaaatgacaatgactgagattaaaaatacactggatagaatcaatgacaggttagacattgcagaaaacatgagtgaactttaaaacrtgtcaatataagctatgcaaaataaaactcaaaatataagtctggggtataagaaaaaagaaacagatcatcagtaagctgtgggacaacatcaagtggcctaacatatatgttgttggagtcctgaggaaaaggggtgacagaaaaaatatctcaaaagaaataaaagccatgacatttccaaatttgataaaagctataaaccaacagatccaagaagctcaacaaaccaaagcacaagaaatgtgaagaaaactacactaaagcaaaatcataatcaagtcgcttaaaataaattataaataaaaaatattaaaa

SEQ ID NO: 299088 - DNA, 588 bp, Homo sapiens
cagataaaagctcctagaggcccaaccatagtagagccccctttcatgagttttatttccagagtctccaccaggttctcattgtgaagaccaaagaacaatctccgtgtgcttcccttccatcagtgggaagggaaaagtaaccatttccaaatatacccagagcattttgttttccttaacaaatgctwactctcaagggcaactatgtcaccatagccaagcctacatgggaaaataaagctgagaagcacatgtgaaggttacagcccacaagcacaggctcactgaaagactaagacctaatcacagaataagagaatgcttccttctcccctatatcttactaccacatcaggagcattcctgtataatatcaggggattaaaaatgaaagaactgcaaggctcagacccttaatcctgaaagaggagtcttttgggaaagctaaagataagagcagacaaaaacaaggacactagaggaaattttagcctctgacatctacagtgacagcaaacagtagacacagtcttaaggcctagccagataaacataaaacctcaccttacaggcctgtttacctca

SEQ ID NO: 299089 - DNA, 573 bp, Homo sapiens
  misc_feature (1)...(573): n = A,T,C or G
tgtctgaggctaggttataacagatattgcagcttggagcttgctttattggatctggaattccaagggaaaatagccaccatgttgtgaggacatntaagcatcttcttggagaggtccatgtggcaggactatgcaagatccatcatgaaagcagatattccagtytcagtcaagtcttcaaatgattacagtccgaggcaacaacatgactataccttcatgggagcctctgagcgagaaccaccccagttaagctgcactcagaatcctaacctgcagaaactatgtgaaataatagacgtttattgttgttttgagccattgtgttctgggctaatttgtttcacagtaatagatagctaatacagcatggggtttaaaagagtaattttatttaaataacgttgaacagattgtaaaaaacttgcctgccagactgaaaaccatattttttattctgatggcatgagggagccactgaagggttttgaacagtagaatatttggaaaaataggctattggagagtctcttgcatatagagtatttacaaattaactgaattctatgt

SEQ ID NO: 299090 - DNA, 579 bp, Homo sapiens
  misc_feature (1)...(579): n = A,T,C or G
agctagcctccagggtggccaaccatgatccccagctactgggactcacacttttgtgtagtttcctcccaaactgaatgggaatggcctgcataaccaataagatgtagaaataatgatgtgtgggttatgtctgaggctaggttataacagatattgcagcttggagcttgctttattggatctggaattccaagggaaaatagccaccatgttgtgaggacatntaagcatcttcttggagaggtccatgtggcaggactatgcaagatccatcatgaaagcagatattccagtctcagtcaagtcttcaaatgattacagtccgaggcaacaacatgactataccttcatgggagcctctgagckagaaccaccccagttaagctgcactcagaatcctaacctgcagaaactatgtgaaataatagacgtttattgttgttttgagccattgtgttctgggctaatttgtttcacagtaatagatagctaatacagcatggggtttaaaagagtaattttatttaaataacgttgaacagattgtaaaaaacttgcctgccagactgaaaacca

SEQ ID NO: 299091 - DNA, 607 bp, Homo sapiens
atgtgccttgtgttctatgtccattagactgggccaacctagaccataattctcattctctctaatgaagtctcatccaacaatatggaccacttgagaaacctgctcattgttcctctgtccagttcattccactttaatgccatgtttctttggtctcccatgtgccaggcattgttctaggctaagaatacaccatgtgggctcttaactgactgtaggcaataaacaaagaacaacaaaaaaaattgtataatttcaagtgctgtgcagaacttaaactagggaaaagtaatggagagagactgggtgatgtgtttatgctgagtggtgaggggaactgctgtggggaggtcctggggctgtaatctgaacagcagggagccacccatgccaggctgggacaaacaactggtcaaagaacttcgcawggaataagttgaagtgcttgaagaaggaaaagaacatcagtgtgactggagtactgctgtgcagagggatgtaggagaggacatcctagcatgcacactgcactgagaatctggactcatgcttaagcctcttctctcacatcaactaggcttggatcctgggtaagtcacttctc

SEQ ID NO: 299092 - DNA, 621 bp, Homo sapiens
tttctttgatccaatattttaacagcagctgagcgacacagcaggattccatggatcagccaccaccaaccacacaaaaggctaggaattatttcagatcaggatgctgccagagcacagctccccaaataaaacattttatagtacaatttttgttttcaaaactccctgaccagctccctttcctctgccaagagatgcctggatgtgacgggatcctcttcctacccaaatctggagcactctgtgatggcaccaggtaaaaggtgatgccctgttcaggtttcaggctgacacaccacacctgctgtcaaaactacttcacaccctggtgggaagaagctcctctcaattctcagtagtgcccactgcaattattacatgtgagtaaataataagtcacagaaatactgtgatgactcacacatyaaaaagaaagccctagtctgggcttacaggccaggaagcaatctccaggggagaatctgatcttgctagctaaaaagagcaggtaggaagcataagccctgcaaatacttttctaattaaatgaagtatgtttttccctcccctcttctcttgccctgtcttccttctctcctgtcttgacagatgctctta

SEQ ID NO: 299093 - DNA, 569 bp, Homo sapiens
atacctaaagccctgtcatttatctgggtactatgttggaattgtaagtaaaagcaaaggaaatgaacatttattgtgcaatgactgtgtgcccagcaacatgccagatgggactgtttcactgatggcttcacataggcctcataaaataggtatcggcaatcttatttttttggagtgctaagaaagtttaggttactcagggtcataaagcagagccatgattccaactcaggactttgctaagctcactgtccttctatcaaaccatgyttcttcctacaagataaaaaaaaatgtagagtttcttaaaaattagccttgaaaacccaaacctaccaaatgcccacatcatcagtaaccacacaggctcctcataaatgcttttcattcattgaattatctctgaacatttatttctttaggctttctaaaaagtgaccaaaagaacatcatttatctttgattttgatagcttttttttaactgaggggaaagtgcaactgttaaaaagcctttttatgttgacttaatgacaaagttttgcctcttgtttagcctcccacact

SEQ ID NO: 299094 - DNA, 531 bp, Homo sapiens
tagctagctactgaaatgctagcttcctaggcatyccactttcctgatgcatttctcctcactccacattcctctcagttcattattctgtctcctcctctgactcctcttaaatggacattcctgcctatcctaggctccacactcttttcttcctctaaacactctccctaggcaattacttcaaaactctcaaatcttagttacctctgcattagtgatgcctctaactacggacacctccctgagcttcccacatgcctgctggacaactcctcagaaaagtactgctcaaatctcctactcaatgtgtccaaaataagaggagtaaactagtttcaatacatatttcaactgcttttatatttcggtaatggacttactctttcaataacccaagctgaaactcttgccctctacatcttactaggaaataaacctcagtgtatccttcccttgcaattgtaactcttcctcctgcatccaaacactggttcttcaagctgtcagagcttgtgcagctttggccat

SEQ ID NO: 299095 - DNA, 531 bp, Homo sapiens
tagctagctactgaaatgctagcttcctaggcattccactttcctgatgcatttctcctcactccacattcctctcagttcattattctgtctcctcctctgactcctcttaaatggacattcctgcctatcctaggctccacactcttttcttcctctaaacactctccctaggcaattacttcaaaactctcaaatcttagttacctctgcattagtgatgcctctaactacggacacctccctgagcttcccacatgcctgctggacaactcctcagaaaagtactgctcaaatctcctactcaatgtgtccaaaataagaggagtaaactagtttcaatacatatttcaactgcttttatatttcggtaatggacttactctttcaataacccaagctgaaactcttgcccyctacatcttactaggaaataaacctcagtgtatccttcccttgcaattgtaactcttcctcctgcatccaaacactggttcttcaagctgtcagagcttgtgcagctttggccat

SEQ ID NO: 299096 - DNA, 574 bp, Homo sapiens
tgcctataatcccagcattttgggaggctgaggtgggcagattgcttgagcccatgaatttgagaccagctctggcaatatggtgaaacgctgtctctacaaaaaatatttctaaaaattagctgggcatagcagtgcactcctgtagttaacagctacttgggaggctgaggtgggagtatcacttgagcccagaaggttgagactgaagtgagccatcatcatgccactgaacaccagcctgggtgacagagcaagaccctgtctcataaataaaataaagattcaaaagatggtgaagagttaaggatttgttcaatacctccaaaagagtattctttacaacttgaaataagcatgaggactttgattccaccatccatccattccatgaagtctgaaacctggaagcaattttttttgtaaaaatcttttctgattatagaagtaatgttaattgtagaaaatattgttaagcacagtaaagaaaataacctgtaaccctacatygtagagataatttttacaataatcataactgtaatcattgtgaatcaagctttattttgtgtat

SEQ ID NO: 299097 - DNA, 553 bp, Homo sapiens
actatcttctcaagacatattttgacctgggtgctattattacacaagaggtatcttccttgaattccagaaggcttcatcgaaaggagaggtggatcccaccaagcctctagctgggccttatgcttctgggatgaaggaaaaatgaggtctgcttgctgtagcagtttttccagcacacaatgggcaaataaagacataagccaatgtttaaggttactaaaacatgaaaggaaattgccttatcatgaaccttcaaaccagcagacataaagacctcaacgtgacatcagtatactatcacctaatgatcaggggattcccaggattcccttctcatgttttgctaatgcttaggtgcacccagtgataaacccatactagaatctcaggcggctttctctraagggtgatactcagcaggtttttaaaaagaacctactcacatttaaattcagagcagctctccagggagaaatcaaaccaatgtattttcctagatcaaaacaaaatttcatcttttatattcgacttaggactattggtcctgaag

SEQ ID NO: 299098 - DNA, 563 bp, Homo sapiens
aatatgtcatgaggagtttttaatgggacattgtctttttatagatctgtaatctgtcttacagtatataattttaaaatgctcttctctgtcacttcgaatcatccaatgtgyggtgcatttaagtctgcccaggcctaatctccctttggtatttagtccctcaggaggatctcaagagctgccttttaggttccaaaggagaacataagccttcacaaagcccctccctcaccaggaaagggtggtctgaagattctcctcaatccatgccttacagccactctgctctgcttctcttttgagcctgaagagtgatacagaaatacaccatgtaaatagagatgtttctttataagcctgtagtctttctgggtgttcaatgatgacacagaagaatagcttctaagagaatcaaatggcatttcatataatttatttttaataagtatttatattccttggatcaaaggcaggtagtgtttatactttgttactggaagtgtacaaatgtgtaaaaaatattttcccactagataatgtacattctccatctgtgtagc

SEQ ID NO: 299099 - DNA, 593 bp, Homo sapiens
ccccagtgagatgaacccggtacctcagttggatatgcagaaatcacccatcttctgcgtcactcatgctgggagctgtagactagagctgttcctatttggctatcttggctccaccccctggccattttattttttagggtcacttctaaagctatatggtcattaactttggagaccattttgcatatgtgtgctgatacaaattaaaacccaagtagaccacattgcatgctacctcatkaatgtggacaatggaaggaataccttgcctgtaatataccttcacttctgaactgaaaagttgaagaagaaatttaattttcttttttccataagtcaaaaaaacttaacagctagtgtgcccagttttctggttgacctcagcagatgaacagatagtgttaattcaggttgaagaaatgatctgaatcttggtttgtgtagatatacaacctacatgcagtattatctaaatcagatagcttttacaaatttcacatgtgtacataggctccctccaacccttttccatattcattagttactgaactttctaaactggcattgaaagattacaatgttttgttgca

SEQ ID NO: 299100 - DNA, 599 bp, Homo sapiens
tgcatagcaaaaccataatgaaagtaatttaaaaaatctatttcagggcttcattttatttcctttattagccaaatggyacctaccatgtcattattgtcaaattctactagaacctcatttgttaatagctacttatgtgattcaaagcagttttccaacatcatttctaatgacttcataaatattagccttgtaaacagtaaacatttaataatttctgtaagaagcaggaaaaggtaatgtttaagaacaggaccctggaaccagattgtccagggtccaatctttgttctatcatttgtaagctacatgcccttgaaaaaaattacttaactctctatgagtcagtttcctcatctgtaaaatgaaaacatgaggacaattgcatccctgtgagcgttaaatgcaaaaaccttagagcagtgtctggcatgcattaaacactatgtatgggttatcattataatcattatcatcaaagtatgtaaagaatctttagcagtaagagtctaggtatgtataaatcatgggaacttttcacaccaaaagtggtaaatgagacactaaagtagataagtgagagactcattcttgca

SEQ ID NO: 299101 - DNA, 384 bp, Homo sapiens
ccaaaagtcaggtgacctgatcacataatcaatatatgagggggaggagcaaggaataaaaccatgaatcttgtttacagagagcagcagcatatatgacttgaaagaatattacaagaggaggagcttagtgatttacttcgaaaaaataggggctggaaactgcacacagcctygctgtgttgatatctaaagtgaagctcttcagttgcccatgagattccattactgcaccaactcaaggacaccattctggaagttttgttttctctccaaaatcgcacatttttcatgctctacaggatcattttcattatcatgcaaagatacgatttttctcttcttaaaaagctgaaaaacaaagaaacagcctaacttgcccca

SEQ ID NO: 299102 - DNA, 600 bp, Homo sapiens
ggataaaatgataacaatgtggtcctaaagtgtgcaaacgtgcctctgagaaaagaagtgcagtyttagaatatgcttcccatttctggctgctggacaaggctcttgaaaataagctgaaatgtggcaaatataaatcttgcagaaataggtagagaactgcttcgagctagattcccaagccaggccaatgtctgatattaaagtttccctgcagccatatagaagtattattactttgtattgctttggaaacaaaagctgagacccatgtcctcaaaatacgttttaggttatgttgattggtccagctaatcttctcattttctgatggaaccattgttttaatcattgtgaggcaaaaggctgagaatagagagatgaccaattggcctgtgtaccaataccctagcttgtttccatttttataaaaaccaatagaaaaaacaaatttcaccgtggttatgaatccagtcctctgtagaaaaagttactgtaattataagggtctataggacatgcaaataattacatcagatgtcaacatatcaaaaaagtaaagtactttatttagtggaggttgtgataagttgaaatatt

SEQ ID NO: 299103 - DNA, 592 bp, Homo sapiens
agtgtcctagggtgtaggaagaagaatgtacaaaaacaaaggagaatcttttttccttttaaaaattatcttaaattttactatatagtaaaattcactttttggagtgtacagttctatgagctttcaacacatgcataacttttagtaatgaccgctcttggtccatctggccagagaacayaggcttctcttggagcttcctctttgcagttccatttttgagctgccctagaacctaagccaacacagaacagagttaccaacaagtcaacaacaacaataacaatattggctgggttgcttttaagtcctgagcttcctatccagtccttctgttcttacgcacttttcagagttctctgatagttgttttatgcattttgtccaggctttttagttgtaataagtgggggaatatggggtatggggtatgcttactgcatcttaagtagaatcaaacctcatgatttcctcttaaatgcatggagtgacactcttcaattcaactcacttctactggtgagaacttattaacagggtcacacttaacagcaagggaggctggcaaatgcatcttccagctgcaggt

SEQ ID NO: 299104 - DNA, 600 bp, Homo sapiens
ggataaaatgataacaatgtggtcctaaagtgtgcaaacgtgcctctgagaaaagaagtgcagtcttagaatatgcttcccatttctggctgctggacaaggctcttgaaaataagctgaaatgtggcaaatataaatcttgcagaaataggtagagaactgcttcgagctagattcccaagccaggccaatgtctgatattaaagtttccctgcagccatatagaagtattattactttgtattgctttggaaacaaaagctgagacccrtgtcctcaaaatacgttttaggttatgttgattggtccagctaatcttctcattttctgatggaaccattgttttaatcattgtgaggcaaaaggctgagaatagagagatgaccaattggcctgtgtaccaataccctagcttgtttccatttttataaaaaccaatagaaaaaacaaatttcaccgtggttatgaatccagtcctctgtagaaaaagttactgtaattataagggtctataggacatgcaaataattacatcagatgtcaacatatcaaaaaagtaaagtactttatttagtggaggttgtgataagttgaaatatt

SEQ ID NO: 299105 - DNA, 630 bp, Homo sapiens
attcccatgaggtcataaagctttgtttccttatgagaaatgaccatacaatgagagattaaattttagtgaaagttaaaaatgcagttagctatgagccacagagctactttaggaagttggtgaatcaaaacagaattaagaaagcattcataaagatctggacatttctataaatgaaaccaagagtctacatacagagtcacagaatgatggcccacaagctacacctggtgatttgggggaaaggaggagaaaattgttaaaaagagtctgaatgctgttcaatggaacatggactctccaatatgtgtcagttaccagcactcattgaaactttcactcactaacctattatatgggataaatgagtgcaatgaattaagttkctatatatattcttttgtattccctctatagagacctgctaatttagctcccttattacttaaacaacacataatagccagttgaaataatttaacaaaatgcctgtttttaatgaatctattaactgattcaaaggtatggccctgaaagaatgttatctgaggatcagtgaaccacctagtcagttcaggtttagtcttatctcatgagatgtacccagcgtatgccagacaccctgct

SEQ ID NO: 299106 - DNA, 570 bp, Homo sapiens
tgtaattgaaattattgcattttaaaaagttttgaccaagagaacggagacacatcattttctttcttcatttacttcaataatactttagaactttaagaatgtaaagaatctatgaaattacaacatggaggtcttcagtcgaatagaaggcaccatttgctgttggtgagagtttttaacatgggttagagagttgacagaaattttaaatcctctmgtgaagtctttcgaaatatgacagattcattttttccaattggctagagttactcagttgtaatatctccaaatccgttcccatcctcttcaaattcttctagctcaatttgctgtttggcaaagtttgttaatttctccaaaagtgagttttcagcttaagggaggattagttggagaataattcttcctatttcttatgttttgtggtcagaggaaaagttggctatccttcaaatccattgaaatccatcacaatcaaaagaaacattggcaagtggttgtgtttctcaatacttcttgtacatttttggggggatgtatctcataaaaacaattctttcattgctc

SEQ ID NO: 299107 - DNA, 570 bp, Homo sapiens
tgtaattgaaattattgcattttaaaaagttttgaccaagagaacggagacacatcattttctttcttcatttacttcaataatactttagaactttaagaatgtaaagaatctatgaaattacaacatggaggtcttcagtcgaatagaaggcaccatttgctgttggtgagagtttttaacatgggttagagagttgacagaaattttaaatcctctagtgaagtctttcgaaatatgacagattcattttttccaattggctagagttactcagttgtaatatctccaaatccrttcccatcctcttcaaattcttctagctcaatttgctgtttggcaaagtttgttaatttctccaaaagtgagttttcagcttaagggaggattagttggagaataattcttcctatttcttatgttttgtggtcagaggaaaagttggctatccttcaaatccattgaaatccatcacaatcaaaagaaacattggcaagtggttgtgtttctcaatacttcttgtacatttttggggggatgtatctcataaaaacaattctttcattgctc

SEQ ID NO: 299108 - DNA, 517 bp, Homo sapiens
aatccacatttaccaccatgctctaagtcaatagatagaagactataatcaccatgatctaactggtgtcactgcttcgacccttgcttacccacagctattctcaacacagcattggagtgaatctttaaaatatgcaaattataatatcttggcacaaaacgtatctctctcaaagcaaaggctaatgtcctcctaatcacctaagtgctatgatctgtgatttccctgtcagcatcsgacctcaaactctacttctgccccactggcttctttgccattcagcaaaccatccaggcatgcccccatttgattctatgcagctatggtgcctctccctgtaatgctctttcccctccatctacatggcttactctctcacctctttcaagcttcaaatctttgctcaaatattaccttctcactggagacttatttaactatttaaaattacactctcctccctttttagaacattctctattctctttacatccttattttgtaagtagcagaa

SEQ ID NO: 299109 - DNA, 517 bp, Homo sapiens
aatccacatttaccaccatgctctaagtcaatagatagaagactataatcaccatgatctaactggtgtcactgcttcgacccttgcttacccacagctattctcaacacagcattggagtgaatctttaaaatatgcaaattataatatcttggcacaaaacgtatctctctcaaagcaaaggctaatgtcctcctaatcacctaagtgctatgatctgtgatttccctgtcagcatccgacctcaaactctacttctgccccactggcttctttgccattcagcaaaccatccaggcatgcccccatttgattctatgcagctatggtgcctctccctgtaatgctctttcccctccatctacatggctyactctctcacctctttcaagcttcaaatctttgctcaaatattaccttctcactggagacttatttaactatttaaaattacactctcctccctttttagaacattctctattctctttacatccttattttgtaagtagcagaa

SEQ ID NO: 299110 - DNA, 600 bp, Homo sapiens
gacaaatatatgtccatgtaaccaccaccctgataaaaatatagaacattttcattaatacagcaaatttccctatgctcttttgtagtcagtaccttgcccagaggtattctgtcaccacagattagttttacttgttcttaaacttcatatatatggcatcgtacaacatatacctcatgtctttcattcagcataatgtttttcttttattaaattgacatataattcacataccataacattcgcctttttaaaatagacagttcagtaggttttagtgtgttcaccaagttgtgcaaccttttgtgcctaatttcatttgctgagcacaatgtattcaagtctcatacaygttttagcgtgtttcagtacttcatttcttttactagctgaatgagtacaccgcatttgtttatacactcatcagttggtaggcatttggatttttccacttctgactattatgaataatgttgctacgttatgtgtacaagtttttgagtgaccatattttttttctctcaggtataaacctaaaagagaaattactggggtttagagtaatcctatctttaacattttgagaaattgccaaac

SEQ ID NO: 299111 - DNA, 600 bp, Homo sapiens
gacaaatatatgtccatgtaaccaccaccctgataaaaatatagaacattttcattaatacagcaaatttccctatgctcttttgtagtcagtaccttgcccagaggtattctgtcaccacagattagttttacttgttcttaaacttcatatatatggcatcgtacaacatatacctcatgtctttcattcagcataatgtttttcttttattaaattgacatataattcacataccataacattcgcctttttaaaatagacagttcagtaggttttagtgtgttcaccaagttgtgcaaccttttgtgcctaatttcatttgctgagcacaatgtattcaagtctcatacatgttttagcgtgtttcagtacttcatttcttttactagctgaatgagtacaccgcatttgtttatacactcatcagttggtaggcatttggatttttccacttctgactattatgaataatgttgctaygttatgtgtacaagtttttgagtgaccatattttttttctctcaggtataaacctaaaagagaaattactggggtttagagtaatcctatctttaacattttgagaaattgccaaac

SEQ ID NO: 299112 - DNA, 600 bp, Homo sapiens
gacaaatatatgtccatgtaaccaccaccctgataaaaatatagaacattttcattaatacagcaaatttccctatgctcttttgtagtcagtaccttgcccagaggtattctgtcaccacagattagttttacttgttcttaaacttcatatatatggcatcgtacaacatatacctcatgtctttcattcagcataatgtttttcttttattaaattgacatataattcacataccataacattcgcctttttaaaatagacagttcagtaggttttagtgtgttcaccaagttgtgcaaccttttgtgcctaatttcatttgctgagcacaatgtattcaagtctcatacatgttttagcgtgtttcagtacttcatttcttttactagctgaatgagtacaccgcatttgtttatacactcatcagttggtaggcatttggatttttccacttctgactattatgaataatgttgctacgwtatgtgtacaagtttttgagtgaccatattttttttctctcaggtataaacctaaaagagaaattactggggtttagagtaatcctatctttaacattttgagaaattgccaaac

SEQ ID NO: 299113 - DNA, 529 bp, Homo sapiens
agacacattgcattttctttaatagacgtaataaatattaaggacaaaaatatgtcatttccatcaccaatagtatcaaattcacgttttaaaatgagaaacttcgatgggctggcaagatggccgaatagraacaactccggtctgcagctcccagcaagatcaacagagaaggcaggtgatttctgcattttcatctgaggtacacaggtcatctcactgggactggttagacaatgggtgcggcccatggagggcaagcagaagcagggtggagtgtcacctcaccagggaagtggaagggatccaggaactccctcccctagccaagggtagcctggtggactgtgctgtgaggaacggcacattccagcccagatactgtgctttttccacagtcttcacaacccgtagaactggagattccctcgggtgcctacaccaccagggccctgggtttcaagcccaaaactgggcagctgttggggcagacaccaagctagctgcagttttttaaataccccagtgg

SEQ ID NO: 299114 - DNA, 596 bp, Homo sapiens
ctttgctcttttgcagccttcgctgatgatacccaggcaaacagggtcgggagtgtacctccagcaaactccagcagaccttcagcagagggccctgacagttaggaggaaaactaacaaacagaaaggaataggatcaagatcaacaaaaaggacgtccacacagaaaccccatctgaaggtcaccaacatcaaagatcaaaggtagataaatccatgaagatgcaggaaaaaaaaaaaaaagcagcacaaaaagtttgaaaattccaaaaaccagaacacctcttctcctccaaaggatcacaactcctcaccagcaagggaacaaaactggatggagaatgagtttgataaattgacagaagtaggcttcagaaggtggataataacaaatgcgtccgagctaaaggagcatgttctaacccaatgcaaagaagctaagaaccttgaaaaaaggttagaggaattgctaactagaataaccagtttagagaagaacataaatgacctgatggagctgcaaaacacagcacgagaacttcgtgaagcatacacaagtatcartagccaaattgatcaagcaaaagaaaggatat

SEQ ID NO: 299115 - DNA, 575 bp, Homo sapiens
tcagttgggctaggttgacttggaagacgaatgggaagttggtacccaccttcagcctttgtcttaattggtttatgacttagaggtggcatgtcattgtatatccaaataaattacttatcataagtaagagatcccttcattcccctcacccctccacatgcattgcctcagttatttcatctgcccatctctattgcagtcttagtcaatggaaccccactctgcctaatttcaagccagaaatctgggtatgatccttaattttgctcctctctctttatgtttcctcttctcatatccagtccatcagcataaataatcaacactatcctcaaataatctctcgttctcaccctctccacaaccgtaccttggcccccaccagtatcttttgcatgagttacagctatcacctcttaactggccttgcatgactgctcttgactggatgaccagactgatagtttaraaacatagttgggactgggcatggtggctcacacctgtaatctcagcactttgggaagctgaggcaggaggattgcttgaggccaggagtttgagaccagtct

SEQ ID NO: 299116 - DNA, 476 bp, Homo sapiens
acatttgacaacttatataagatggacaaattctttaaaaaagacaaagtgccaagccttactaaggttaaatatagttaacctgaataaccctattgttatttataaaattatatttacatttaaattctttccacaaagacgactccaggcccagatggcttcactagtgaattctctcagcatttaaagaagaaaaaaaaaatagcaattttgtatgctgttccagaaaacagaagaggtggggaaactttccaatttactttatgaggtgagtataaccacgatatcaaaacagarccaagtcattatgagagaagaacagcactgaccaatataataaaatccaacaatatctaaaataagttatcatgatcaactaaggtttattctaaaaattctaggttggtataacatttgggaacaaattagtaaaattcaccaaattaatgaattaaaattaaaagtgctaattt

SEQ ID NO: 299117 - DNA, 597 bp, Homo sapiens
attgtaatccctaatgttagaggtgtgacctggtgggaggtgattggatcatgggggtggatttctcatggctggtttagcaccatccttttggtgtagtcctcagatcatgagtgagttctcacgatatctggttgtttaaaaatgtgtagtatctcccctctccttctgtcttgcacctgcttccaccatgtgaaacacctcgctcatcctttgccttctgccatgattgggagcttcctgggacctccccagaagcagaagcttctatgcttcatgcaaaacgataagccaattaaacctctttatttttttaaataaattatccagtctcaggtttctctttatagcaatgtgagagcgaactaatacacagggtcagggctctggcagggaaaacacagtgctacgttagggcagtaccacacaagtcctgcttctctgaggagatgggatcagatgactgtgttggaaagaacttcctcccttcttactttaaaaccacagcatgaagacatgagcagttttggaccckgttcttacttattaattggcttcaggaccttaagcaagttgatgatcttgtgtgtttgtatg

SEQ ID NO: 299118 - DNA, 546 bp, Homo sapiens
tagttatcatgccatggttttcagctccatcgggtcatttaaggacttctgtacactggttattctagttagccattcrtctaatcttttttcaaggtttttagcttctttgtgatgggttcaaacatcctcctttagctcagagaagttcgttattaccaattgtctgaagccttcttctctcaactcatcaaagtcattcttcatccagctttgttccatttctggcgaggagctgtgttcctttggaggagaagaggctctctgatttttagaattttcaacttttctgctctggtttctccccatctttgtggtttttatctccctttggtctttggtgatggtgatatacaggtggggttttggtgtggatgtcctttctgtttgttagttttacatctaacagtcaggaccctcagctacaggtctgttggagattgctggaggtccactccagaccctgtttgcctgggtatcaccagcagaggctacagaacagcaaatattgcagaacagcagatgttgctgcctgatccttcctct

SEQ ID NO: 299119 - DNA, 546 bp, Homo sapiens
tagttatcatgccatggttttcagctccatcgggtcatttaaggacttctgtacactggttattctagttagccattcatctaatcttttttcaaggtttttagcttctttgtgatgggttcaaacatcctcctttagctcagagaagttcgttattaccaattgtctgaagccttcttctctcaactcatcaaagtcattcttcatccagctttgttccatttctggcgaggagctgtgttcctttggaggagaagaggctctctgatttttagaattttcaacttttctgctctggtttctccccatctttgtggtttttatctccctttggtctttggtgatggtgatatacagrtggggttttggtgtggatgtcctttctgtttgttagttttacatctaacagtcaggaccctcagctacaggtctgttggagattgctggaggtccactccagaccctgtttgcctgggtatcaccagcagaggctacagaacagcaaatattgcagaacagcagatgttgctgcctgatccttcctct

SEQ ID NO: 299120 - DNA, 549 bp, Homo sapiens
acgtagttatcatgccatggttttcagctccatcgggtcatttaaggacttctgtacactggttattctagttagccattcatctaatcttttttcaaggtttttagcttctttgtgatgggttcaaacatcctcctttagctcagagaagttcgttattaccaattgtctgaagccttcttctctcaactcatcaaagtcattcttcatccagctttgttccatttctggcgaggagctgtgttcctttggaggagaagaggctctctgatttttagaattttcaacttttctgctctggtttctccccatctttgtggtttttatctccctttggtctttggtgatggtgatatacaggtggggttttggtgtggatgtcctttctgtttgttagttttacatctaacagtcaggaccctcarctacaggtctgttggagattgctggaggtccactccagaccctgtttgcctgggtatcaccagcagaggctacagaacagcaaatattgcagaacagcagatgttgctgcctgatccttcctct

SEQ ID NO: 299121 - DNA, 582 bp, Homo sapiens
gaacatgaactctttccaattctacaggccagatggccctaaagatgcccaactcacattcatagtcactgtctgtacctataacctctgtttcataaatgacattgtattagtctattctcatggtgctaataaagacatacccaagactgggtaatttttaaaggaaagaggtttgattgactcacaggtccacatggatggggaggcctcacaatcatggctgaaggtgaaagacgagcaaagtcatgtcctccatggtggcaggcaagaggcctgtgcaggggaactgcccttttataaaaccataagttactgtgagacttattcactatcataacaacagcatggaaaaacctgcccccatgattcaatcacctccatggggattattggagctacaatttaagatgagatttgggttggracagcgaaaccatatcagacatgctgcaacgaagtgaaaaaccagcactcccgacaccccacaaataaacatagcgtcgtggttaaagtatgaattccagagcctgcctggttttggagtgcaagctccatcatttactatctctgtgcccttgg

SEQ ID NO: 299122 - DNA, 544 bp, Homo sapiens
atgatgctcaaaggaaggaagtgctcactggagaattttgggttttgaatttttgaatttgggatgctcaaatggcaagcataatgcaaatatctcaaaattaaaaaaaaagtctcaaatctagaacactctggtctcaagcattttggataagggatactcaatgtrtactaataccctgggcattcagatttcaacacatgaatttgggggacaaaaacattcaaaccatcacagtgtctctcttgtgtaatagggtgaagctccttgaggagacatgtctttgtcaccttttacatcttgtacctaggccagcatatggtagtttttatttgttaaataaaggatgaatacataaagaactaaacatttcagtgtcttgactacaaagtgttaaaaaaaagattggatttttccgaaatatgcttgttcataaacaacggatcactccttccccctctgcgtcagtgtcatcctgagaacactggctcttgctgcgttttatttagcatcataccaaatcaaaggaaatcagatgtgcatg

SEQ ID NO: 299123 - DNA, 635 bp, Homo sapiens
taacttttggtggaacacaattcagactgtaacaggtggttaccaagataaggaactcagaagaaggagttgattggttcagagtagtgctgggagaaagagaatgtgtttgcctttggacacattaaatgtaaattacctgtgggatatctaagaggcattgttagaacatagttgattaaatggaaatggagttcaagagtgggtataggttgtagacctacatgtgagcttcatgataattgacaatgtgcacaggggttagatagaaaatgtagatgagatggtgtgagggacaagaaagaaaaagggagatcctaatgcttaaagcagagcagaaaaatgaraggacaaaaaagtcctgaggaggaaaggctggaaaggcaagaggaacatgatggaaacaatgtcaggtggaactctctcttgaaagtgatcataaggatgctcaagtcaggtttaagcaaatggaaggaatacgttggcttgcataatcaaaaaacccagagatagaattgaggcaaggctaaatatagagataaaatgattgcaacagtctttttcctctcatttcgactttcctccacgttggcttcattggtagactctagtcagtgttaaacagttgccagctt

SEQ ID NO: 299124 - DNA, 633 bp, Homo sapiens
ttgatctagatattggagtttaacacaacacagagttcacagagtttaaaataaatgtaacaacatttattttagtatgtttttttaaaaaatggatgacaatgtaaacattttaccagaaagctgacatctataaagaatcatattgaaattatagactaagataataaaattaagaactcaatatttagatttaaatacagtttaaatacgtaagaagagagaatcattcaactgagatataaatcaatggcaaattttcaaactgagggattgaaggagaaaaagaaaaatcaatggaaaatatataaacaagcatagaagataaataaggtatactgagatattctaatgtatgactgaagctaatacacatgtaattgaagttccaccagaaaaagagaaacaacaagttgtagaagttaacatttaacaagataaaggctagaaatttcccacagttaatcatactaacaaattttccaaacgtaatgatrgcttatgaggttcaagatgcactatgaatctcaagaagaaaaaaatgcaaaggaaatcacagatgatagcacacattaacatttctgaaaaaaatgcattaccttcaaaagagcaataaaataatgatagcagact

SEQ ID NO: 299125 - DNA, 583 bp, Homo sapiens
aggggtacttgctcagctttctccctggaactttctgatccttacatggctgaatctgtcttgatttttagtttgagatcaaaattatccactcagaaatctcttccctggacactcaatgaaatgacagctccccaactcactctccaccccatcaccctgttttattgtattcatagcacttactgctcwctgaaattcctgtttatttatttatctaatctttttactcattagaataaaagttctgtaaaagtagatactttgtcctgtagattagtgctgcattcccaggacctagactgttgactggcctacagcaaatactcaaaaaatgtaggagaatgaattgaatgaaaggagggaaaggagattccaggtatagggaggaatatacaaaatggtgaggaggtgggatcacatggacatgcttaggatacagtaaaacatgtgtaagctcatggagggaaatgcattccaaaagatcgatagaggcaaattttgagggtgtcaaatgcccgtttacgaaatttggacttttttcgttgttaagtatgcagccacatatttcggaatagaagac

SEQ ID NO: 299126 - DNA, 583 bp, Homo sapiens
aggggtacttgctcagctttctccctggaactttctgatccttacatggctgaatctgtcttgatttttagtttgagatcaaaattatccactcagaaatctcttccctggacactcaatgaaatgacagctccccaactcactctccaccccatcaccctgttttattgtattcatagcacttactgctcactgaaattcctgtttatttatttatctaatctttttactcattagaataaaagttctgtaaaagtagatactttgtcctgtagattagtgctgcattcccaggacctagactgttgmctggcctacagcaaatactcaaaaaatgtaggagaatgaattgaatgaaaggagggaaaggagattccaggtatagggaggaatatacaaaatggtgaggaggtgggatcacatggacatgcttaggatacagtaaaacatgtgtaagctcatggagggaaatgcattccaaaagatcgatagaggcaaattttgagggtgtcaaatgcccgtttacgaaatttggacttttttcgttgttaagtatgcagccacatatttcggaatagaagac

SEQ ID NO: 299127 - DNA, 568 bp, Homo sapiens
aggggtacttgctcagctttctccctggaactttctgatccttacatggctgaatctgtcttgatttttagtttgagatcaaaattatccactcagaaatctcttccctggacactcaatgaaatgacagctccccaactcactctccaccccatcaccctgttttattgtattcatagcacttactgctcactgaaattcctgtttatttatttatctaatctttttactcattagaataaaagttctgtaaaagtagatactttgtcctgtagattagtgctgcattcccaggacctagactgttgactggcctacagcaartactcaaaaaatgtaggagaatgaattgaatgaaaggagggaaaggagattccaggtatagggaggaatatacaaaatggtgaggaggtgggatcacatggacatgcttaggatacagtaaaacatgtgtaagctcatggagggaaatgcattccaaaagatcgatagaggcaaattttgagggtgtcaaatgcccgtttacgaaatttggacttttttcgttgttaagtatgcagccacatat

SEQ ID NO: 299128 - DNA, 568 bp, Homo sapiens
aggggtacttgctcagctttctccctggaactttctgatccttacatggctgaatctgtcttgatttttagtttgagatcaaaattatccactcagaaatctcttccctggacactcaatgaaatgacagctccccaactcactctccaccccatcaccctgttttattgtattcatagcacttactgctcactgaaattcctgtttatttatttatctaatctttttactcattagaataaaagttctgtaaaagtagatactttgtcctgtagattagtgctgcattcccaggacctagactgttgactggcctacagcaaatactcaaaaaatgtaggagaatgaattgaatgaaaggagggaaaggagattccaggtatagggaggaatatacaaaatggtgaggaggtgggatcacatggacatgcttaggatacagtaaaacatgtgtaagctcatggagggaaatgcattccaaaagatcgmtagaggcaaattttgagggtgtcaaatgcccgtttacgaaatttggacttttttcgttgttaagtatgcagccacatat

SEQ ID NO: 299129 - DNA, 567 bp, Homo sapiens
aagtctttgtgcttgctgttccctctgccacctgccattttccctttactttgctgactcctattagcccttaggacttattttaaaggtcactgcctctgggaaacctttcctgattgtctaggctmcgttagattctgtttgtcatggtgtattgctttagcataacatgtttcttagaaagagtatctattacatcacagtgtgtatgcccaaggaggtcagacaccacggcagtcctatccaacagagactactcaatgcttagtgcaatgcctgacactccacagaaggcactcattttatatttcttaaatgttaaatgaattcaaggcatgttccttgccagtgagtctccctgagtctctcttagtagatgggtatataactgattagtagatatataataattatgcaaacattatcaagtgttatgcaccatgaatcagttacagaatgctaaatgaataatgaagagctatgtaaagcatagttaaatagttcctataattacttattcactcttccagtaaaagaagttaataaatataatatgtctagattata

SEQ ID NO: 299130 - DNA, 596 bp, Homo sapiens
atttttccagtgtttggattatttcctgggttgtatgtatcagataatgtacgtcatgtgctcagtaaagtacttgacccamatattaccaattgttattgttagaagttgaaacattgggtaaaaagtaagaataactttaaagttcctgatatagattattaatttttttctgaatagttttaatgatttctacttctgcaagagataacatgacagtccctctttcattgttttgtcacccacagtatatattagcacaaaaatagctttgctaattacatagtaaaacataacatgccattgttataatttttatttctttgagttaagtgatgccaaatattaatttgatgtttattgaccttttgcttttcctcttctgtcttcattttctttgaccattgtaacggattctgaaaaccctgctagagaacttgtactttaaccaactggcaatggagagagttactgaagttttaaggtttttgcagttgcataaaaatgataatctcagtaacgtcattcattgctctttgattgttagctctatagtaacactattcacatatggttttgagaagtatgatcctaat

SEQ ID NO: 299131 - DNA, 596 bp, Homo sapiens
atttttccagtgtttggattatttcctgggttgtatgtatcagataatgtacgtcatgtgctcagtaaagtacttgacccacatattaccaattgttattgttagaagttgaaacattgggtaaaaagtaagaataactttaaagttcctgatatagattattaatttttttctgaatagttttaatgatttctacttctgcaagagataacatgacagtccctctttcattgttttgtcacccacagtatatattagcacaaaaatagctttgctaattacatagtaaaacataacatgccattgttrtaatttttatttctttgagttaagtgatgccaaatattaatttgatgtttattgaccttttgcttttcctcttctgtcttcattttctttgaccattgtaacggattctgaaaaccctgctagagaacttgtactttaaccaactggcaatggagagagttactgaagttttaaggtttttgcagttgcataaaaatgataatctcagtaacgtcattcattgctctttgattgttagctctatagtaacactattcacatatggttttgagaagtatgatcctaat

SEQ ID NO: 299132 - DNA, 581 bp, Homo sapiens
gacagaccatcaaggcagaaaaccagctctacaaagaagacctggtaccaatcttaggaaaatgtttccaaaaaattgacaacacattctatgaaaccaacatcagtcagataccaaaatcaagcaaagacacaatgaaaaaggaaaactataggccaatatctctgaagaacatagacacaaaaatcctcaacaaaatactttcaaactgaattcagcagcacattaaaaggttaattcaccacaatcaagtaagctttattcttgggatgcaaggttggttcaacacagacaaatcaataatgtgattcactacacaaacaccctcaacaaattaggtattgtaggaacatacctcaaaataataagaagcatctatgacagacccacagccaacatcatacaaaatgggcaaaagctggaagcatcctaagaactggaacaagacaaggatgctcactctcaccactcttattcaacatagtactgggaatcctagccagagcaatcagggaagagaaagaaataagtcatctaayaaaaaagaagaagtcaaatgatctctgctgatgatatgattc

SEQ ID NO: 299133 - DNA, 602 bp, Homo sapiens
agatcatatgattcattctatgaattgtctgtggcttttcaagacctttctagagttgaggttggacttaaacaaagacagctatgatgaatgtgtctcaacaaggaatgcaagtatagcttgcccaggaggccctctttctaactggactgcttaggcctggagccccttaaatcactaaagttactcagtgctcctgtttctaaaagcattccctgctgaaatgcrtatggtaactggaaaggaagggagagtgttgttcatgagggccaatgtggcacatgaactttttacattaactggctaacagtatgatttaggaggaaaaaggcatggtgaagtgcaaagaacactggactgggagtcagcaagacaggctgtggcatcttccactcttaccactcatcaattgggtaatctaggacatgcatgcatttaagctttgggtctcttgttggcatcaggagataatagataatatttatgacagatgatatttatgatcctactcagctctgaaatttggaattccacaactattaatatgaagcagaactctaagaggatgtagtataaattatatttccaaggcaaaaatggtt

SEQ ID NO: 299134 - DNA, 553 bp, Homo sapiens
  misc_feature (1)...(553): n = A,T,C or G
ctttataatttattaaaagttaagaaatagctatgtgccagttgccattctaggttccaaggatcaaaagaccaccctggggaaggagaagaataagttcataggggaagaagaagtaagttgaataaagaatacagtgcacacttcaatgtggaagcagacagcataattcctggcgtgtggaanaacaccagggcaggtttcataaagcagttttgagaggattaggcggtgatttcacttctgataacttttgaaaaactaaagtttaagaatttagcaggggaggatcaaaagctcaaagagaacttgtccttgagcaactaagctrttattgcaatagaaaactgaagccatttgctggagcggaagtgttattagataaaaggtacaggaagtggtgcaatacagagagagaatctatctccaggcatggtcagggaagcaagttttctgagggttgaccctagtcacaacggcctgtgactgtccccatatagctaggaaccactgagaatacatacttttgtctaaggtaacaaataagttagca

SEQ ID NO: 299135 - DNA, 581 bp, Homo sapiens
cgcagtggctcatgcctgtaattccaccactttgggaggccaaagcgggtggatcacgaggtcaggagttcaagaccagcctggccaagatggtgaaaccccgtctctactaaaaatacaaaaaaattagccaggcgtggtgatgggcrcctgtaatcccagctacttgggaggctgaggcagagaattgtgtgaacctgggagacagaggtagcattgagctgagattgcgccactgcactccagcctgggtgacagagagagactccatctcaaaacaagaaaacaaagcaaaacaaaaaaatccattaaggtggaaactactataattcctgtcttatatatgagaaaattgagacttaggtatcttgcctaatattatgcagctagtgtctttctagatttgaattcagaccagtgagtccagtgtctgcattgatatatattttcttgtttatccaatgagattggaccagatcataagaaatcttggaggaaatcctgataaaaaataatactattgataataactaacttattataatccttgctccatgctggacacaattcttaagcttcat

SEQ ID NO: 299136 - DNA, 533 bp, Homo sapiens
acttgtagtctcttcacagctatactggggactgtcttccacttcagaatttcccattttgagtaaggatgttgaaagatccaaccttaaaaaagaagacacacatattaaatacaaaaagaatataaataaataaacaaacaaagagaaaagggatatttcaaaatttataccagttcagtactcactgtgtaaatcctgcccagccatcagtctaccaaagcctatgtgtaaaaggaaccaaaatccatttgtgtcaaagtatgcaaatcatcagcctaagaataacctctcctcaaggggatttgcactgaaatgggatcgaagctttaaccttaagtaattaagtctctatgatggtgggctgagcccagtggctcacgcctgtaatcccagcacttcaagaggccaaggtggcagattgcttgagcccaggagttygagaccagcctgggcaacatagtgagatcccatctcttaaaaaaaaaaaaaactttatgatggcgtctcaagtatttgaggcctttcaagaa

SEQ ID NO: 299137 - DNA, 563 bp, Homo sapiens
aagtctgtgccatgtatttgacttgggggattgggaaggtgggatgaaatccactcaaggagcctttaacttggtgaaaggttttttccgtcctaattcacacaaagccactatttgcccagagggcaagtggcctytttttttctaatgtgggtaaaacccagtaaatgaactaattagctcctatttcctatctatgataaacaactaatacacaactaggagtatgtgggctgatgactattatctctgtactctaaaagtgtttctaataaactgatcagtagacatattaatttacacactgtcatctttggtttattgccaaaagatctttgttggaaaattcatgtgctacccatttaaatgtataaaaagcccaagtttattaagaatccggaaggatatttgaagtagctgttgaaagtaataaaaattgatgtgccatttaaaaagtggttctaatacattttgctacacatagaccattacctttatctacccatccccttaaaagaggcttaaacaccaagacagtacttaaccaccaaaggaagttcctg

SEQ ID NO: 299138 - DNA, 522 bp, Homo sapiens
ttagtgatgttgaacattttttcaaatgcttgctggacatatgtatatcttcttttgagaaatgtgtattcaggtcttagttcatttttcaatcacattacttgtttttttgatattgagtttttttagttccttatatattttgcttttaacaattttttttaaattaaaaaaaattttaaatagagacagggtctcactttgttgtccagatttgtctcaaactcctgggctcaagtgatcttcccacctcagccttacaaagtcctaggattacaggtctgagtcactgtgtccagctgagttccttatatattttggatattgtacccttatcagatatttagtttgcaaatattttattattgttattgaaaatggaattattttcttaatttccttttagatagttcattatttgtgtataaaaatgccactaatttttgtatgttaattttatatcccacaacttatttaartttgttctaacagttttttgtttagtctttaatgttttctaca

SEQ ID NO: 299139 - DNA, 634 bp, Homo sapiens
cctgtgtgacattcaaagatatagttgagtataatacattgtagttatatattatttagttataagttatatatatataaaacttaactaaaatctaatttataaaataactttactgggcaatgtggtttaaatgagttaaaaataaaattaaagtactatctgttgccatatgcaaaattatcacattyaggaagcaatgcttcactttggtaggccaaggcggggcagatcatctgaggtcagaagctcgagaccagcctggccaacatagcaaaaccccaactctactaaaaaaatacaaaaaaattagctgggtgtggtggtgcacacctgtaatcccagctacttggaggctaagacaggagaatcacttgaacccagaaggcagaggttgtagtgagccgagattgtgccactgcattccagtctgggtgacagggctagactccatttcaaaggggggaaaaaaaaaagaaagaaagcaatgtttaagataatgttaaacaaactacaggctatctggaatatgaaaatttcactttgaaagaccctggagatattgaaaacagacatctagatttccttcagaacaaaagctggggtattagaagctacttgtgtggctattaat

SEQ ID NO: 299140 - DNA, 589 bp, Homo sapiens
ctctacagggcagatctgcctcccgkgctgtctcagctacgccgagtcgttggctcagggcggaggattttcctattggccgcgttatttgaatggaatggaggataggtcgtgaagtaggtgctgctggttgatctttctaaggaactcagatgaacttgggcatgtcagaattaataaccttttaaaagtggggtctgtgtggccgagggttttaatggtaagttcttgaggtgaccacctattgacaagggttgacctgctgtaattgctgtggcttcctgccaacccccactttagaaatgtttttcttcctctctttacttgttttgttttgctttctctcacgcttgggttctcttctttcttccttcagtgctttaagcctgtctcgtactacccatgagcttagctcagcctgattactggtccttaccttttaagggatttctggttacagctccatctctttctaaggaggggtaaagacctagctgcgtctagcatttaaacggaacgttaaggaaggcaattaattcaaccactatttattgaatacctactatgagccagtaactgtactaggcac

SEQ ID NO: 299141 - DNA, 621 bp, Homo sapiens
cctaagatttttcagtttagcataatcggaaagattaaaaggtagtgaaaaaagaatattgtgctaagtgcttcactgttgttttaatgttacatctaccttataacattacctcatgtaccaccagtctacatgtcctacactttaggaaactgactgactttaattagtatgtgtaataataattacgattaattaagtgaaggttataggataggccttagtggcacccccaactcaaggtrtcaaggcaaggcattggcaggaaggccaatttgtatgaaaatatctgtgtgctgaaggaatttcagaaataagagtcattctccatggcactgaaattagaagaataaattacaagatcaatatctggaaggcaagtttaggtgcatgagttctatcttggatcactaatatttagttgagggatccattcaattgtccttcaaatcaaatcctaggaaaagctttaaaattccttcacagaccagagtgcaaaaacaaggtattcatgagaaccaaaacatgctgaccgtgctcaattttgacaggtgggaatatcaacttcatgtggttgtcttaaagattaaatgaataatgtatgtgagagagaaaaaaatt

SEQ ID NO: 299142 - DNA, 577 bp, Homo sapiens
tgtatgctctaaaatataacaataattcttttaatgcactagtttcttaaatcatgtagaaaacaaaatgtggacttacacaacaaagttactagcttttacatttcataattttaaaaaagtattagtctcctaaatcatgtagaaaacaaaagggagttacatataaatggcacaataatataatcctgtgtatttacctttactgagatcttttcttctttatacaatctcwagttattgtctaatattctttcatttcaccttgaagtctcccttgagaatttcttatagggcaggtctcatggtaacaactgtctcagcttttgcttatatgagaatatcttaatttttctcttacttctgaaggacagtttttctagatatagtaatcttggttaatagttttttcttttagcactttgaatatataagctcactatcttctgatgtccaaagtttctaatgagaaattttctgctaatcttattgtggatctcttgtatgtgaaatcttgattctctcttgtggctttcaagattctctttgttttttgaaagtttgattgtatcgtatt

SEQ ID NO: 299143 - DNA, 480 bp, Homo sapiens
catcttgtacaggtttgtagccsaggaaccataggctataccatagcctaggtatgtagtaggctataccatctaggtttgtgtaaatactctctatgatgctctcacaatgatgaaatcgcctaaggacacatttctcagaatgtatccccaactctaatcaacccatgactgtaatatgttatagtaataagtttttcctatgttgatttgtgtgcatagaatacattgttataaaatattattatttttgtagtgctaaattctatcttcaggcattttattagtgacttgtagatatgaatctatcagagcagtgtagtttttgtgttaccaggttttagagaaaacatgaaaaacctgtgggtgggataccaccttcctgatgtttttcctctcctgggttaacaaatgaaactgtgtgaccctcttaggcagcaagtaacagtagccctgccctaactggtgtcagctgactgc

SEQ ID NO: 299144 - DNA, 480 bp, Homo sapiens
catcttgtacaggtttgtagccgargaaccataggctataccatagcctaggtatgtagtaggctataccatctaggtttgtgtaaatactctctatgatgctctcacaatgatgaaatcgcctaaggacacatttctcagaatgtatccccaactctaatcaacccatgactgtaatatgttatagtaataagtttttcctatgttgatttgtgtgcatagaatacattgttataaaatattattatttttgtagtgctaaattctatcttcaggcattttattagtgacttgtagatatgaatctatcagagcagtgtagtttttgtgttaccaggttttagagaaaacatgaaaaacctgtgggtgggataccaccttcctgatgtttttcctctcctgggttaacaaatgaaactgtgtgaccctcttaggcagcaagtaacagtagccctgccctaactggtgtcagctgactgc

SEQ ID NO: 299145 - DNA, 582 bp, Homo sapiens
tccccaggtgtcgctcatgtacagcacggttgcagaactctcaagcagtggttctcaaacttccctgggtgcctaaatccttggaggtctggttaagaccttaatttttaaccttcacaccagtgttcaagaatcagtacatatgggaatcaggggttggggtaaagaatttacccttctaacaagctaccaggtaatgctgatgctgacccatcgcccacattttgagaagtattctatgatcctttactatgcacttaatctgcacatcgaaatagcattttaagtgttccattagtaaaaatatggttttatacttctcccaggttaatgggaaaaatgttctagtgaatctacccatttggggaaattgagccaaattcaagcaaattaaatattacccaacataatcgatgtccagacaatttatcttgcatttcrtagatcaagtctttcaagagccccaattatgtaattatgtgggaacagttgaaaaaaatatttgttattgtatcgtcatacctcggagacatcacagggttggttctagactagtacaataaagtcaatattaccataaaa

SEQ ID NO: 299146 - DNA, 602 bp, Homo sapiens
cctaaataaaataagttgctttaccaaaaacacacatgcatttgcatgtttatcacagcaatattcatagtagtgaagacatgccattaacctagacgcccatcaatggtggactggataaagaagatgtgctacctatacacatggaatattacacagccataaaaaagaacaatatgtcctttgaagcaacatggatacagctggaggccattattctaagcaaattaacatgggaacagaaaaccaaatgctgcatgttctcacttagaagtgagagctaaacattgtgtactcatggacataaagatggaaacaatagaaactgggaaatactggagtagggagggaggaggaagggtaagggctgaaaamctgtacggtactgtgttcagtaccggggtgacaagatcggttgtactccaaacctcagaatcttgcaatatgctcaggtgacaaacttgcacatgtaacccctgaacctaaaaagctaaaatcattaaacagaaaagtgagctggcatggaaaacagtattttgccaattgtgcaagaatttgactaagccttgcaaggcaacatagcagagtgattttttattctc

SEQ ID NO: 299147 - DNA, 326 bp, Homo sapiens
agaattccagtggctgattttatccagctgggaatatgttcccttcaagcttgrgaggggtcacccatcaaacagaattgaacagaaaaactaagcatccatcttaaaaagaagacaaggactcactagcactgcaactcagcttctgtgagacttcagctttggccttatcatccctcatttcccattaaataatttcctgtatttcatagcaatcccaggctgtctgccttttgaccttggcttcctgaggctgctgaagttgtgtgaagattctgttcattttgggtctctagtgaattaggacgtgattctattcagttcat

SEQ ID NO: 299148 - DNA, 610 bp, Homo sapiens
cgtctttctacattttcagttttgcattcatgagtgtgaatattacagaattgaaaggtctgtgtctgttttgctcacccctgcgtcctcttccacctggcacagagcatggcctgatgctgggaaatgaaaaaaagaaagaaaaaaaaataaacaaggatggaaggtgaaatggggagtgtggaaggatgctcttccttcccttgctrtaatcagtcttcctcctgcatctgagcaggaacgtggggaaaactgggtaggggacttgtcgggtggcattttgcagtgtcattttatcttctgagcgtaattgcaagaaaagtgaatccaactttagctgaaacattccaaaacagtttctctagccaaatgatgactgatttctcaaattggcaacattatcacaaacatgaaaaggggctgcccagaacataagcacctgtgcctgcctgtgctctgaagaatttggtgaacagataaagcgccaagattgagcagagtgtttggggtgtgggagtgcatgtgaaggtgatgtgaaggtaatcaacaagacattgagacttgaggactacaatttgtggctgatgagtacgggcttggccttccacaa

SEQ ID NO: 299149 - DNA, 610 bp, Homo sapiens
cgtctttctacattttcagttttgcattcatgagtgtgaatattacagaattgaaaggtctgtgtctgttttgctcacccctgcgtcctcttccacctggcacagagcatggcctgatgctgggaaatgaaaaaaagaaagaaaaaaaaataaacaaggatggaaggtgaaatggggagtgtggaaggatgctcttccttcccttgctgtaatcagtcttcctcctgcatctgagcaggaacgtggggaaaactgggtaggggacttgtcgggtggcattttgcagtgtcattttatcttctgagcgtaattgcaagaaaagtgaatccaactttagctgaaacattccaaaacagtttctctagccaaatgatgactgatttctcaaattggcaacattatcacaaacatgaaaaggggctgcccagaacataagcacctgtgcctgcctgtgctctgaagaatttggtgaacrgataaagcgccaagattgagcagagtgtttggggtgtgggagtgcatgtgaaggtgatgtgaaggtaatcaacaagacattgagacttgaggactacaatttgtggctgatgagtacgggcttggccttccacaa

SEQ ID NO: 299150 - DNA, 529 bp, Homo sapiens
cagatacaaaatcatttctttcacgggagagacaaaagccctggaaatgctgaggggttttcccctccctgttgccgatattgttagctagaagttgaagaccakttcatagcccgagatatttttgcttagtcttccctctagccttttagatgttcttttcctagcacgcatttgccctttggcccttgttcgtatctgtcattgactttgggacccttttcccatcatagagcaggttctttttgcaatgggatgggggcccctttgccctctataacctcatatgacattcaaagcccatgatatagcaaaacacaggggagttgctttgctgtgactgactctgccaacccagggaccctccaggagaattcaacagagcaggagctacatagggaagccaacctgcaagttattaatataaagcccttaccactctttccgtctaaatctgtgccttattttcagaaccttgtcactttttattccagccccttcttctgggttttgtatctgtgaatttgca

SEQ ID NO: 299151 - DNA, 513 bp, Homo sapiens
ttttaaataaagaagggaattgyggttcaggaatgttaaatgatttcctcaagcaacaagcagaaaaggcaggactcaaacaggggcattctgacgatgccccacttcatgagagtttctcccaattggatggaagcactttaaatctacttcctgtattttcatttgaacataaccaggtcattctagaattttttggcttcccaaagcaaaaaagttaggcagatcgtacattagttgactttctttcttttcataattttggtttgatgataatgagttgagtccctcttacaagagtccagctctttaaactcatttatcttgttgtatttcttttttcatatatattttgcctgagcccaaaatgcagatagtaatggcattcaacaatttccacagagaatctggagtctattattaaacatgaagtgatttgcttgaatgcccagaatgcaaacaagaatttatggaggtttaggctctctaatgtacatgtttgtggaaccatat

SEQ ID NO: 299152 - DNA, 513 bp, Homo sapiens
ttttaaataaagaagggaattgcggttcaggaatgttaaatgatttcctcaagcaacaagcagaaaaggcaggactcaaacaggggcattctgacgatgccccacttcatgagagtttctcccaattggatggaagcactttaaatctacttcctgtattttcatttgaacataaccaggycattctagaattttttggcttcccaaagcaaaaaagttaggcagatcgtacattagttgactttctttcttttcataattttggtttgatgataatgagttgagtccctcttacaagagtccagctctttaaactcatttatcttgttgtatttcttttttcatatatattttgcctgagcccaaaatgcagatagtaatggcattcaacaatttccacagagaatctggagtctattattaaacatgaagtgatttgcttgaatgcccagaatgcaaacaagaatttatggaggtttaggctctctaatgtacatgtttgtggaaccatat

SEQ ID NO: 299153 - DNA, 586 bp, Homo sapiens
gccattatctattttgtttaatctcctacagagctgaaaagtaatatggaacctggggcagattctatcctaagaaagaacttttaggattaggatataaaaggataaatccttagaggaaaaaaatgtcctcttttatgcctttgaacacttgtcattcttcttttgygcttgagccttctgtatctgactagctttaaatataacaaactgtacaaaaaagaacaatagaaatccttaaatcactgaaactaaatcttcttttctaaccagctcagccattcatcttagattttcacactcaagacaacttgcaaattgcttttcacccactcacctggggtgagtcatgctctctgccaggtaaatggagaagaatggcttactaagacaagaaaggcttttgattattttttctgttattcccctactttctatttttataagttttgaatctcttgtttcccttttctgaactaaaggatagaaactgtttttatacaggttatttaggatagttatctcacatttcattataatgaaaactagccctgcaacataatcttttgagaaaaagaaaccactc

SEQ ID NO: 299154 - DNA, 553 bp, Homo sapiens
gagtataataagatttctaaaacatttttactgttgtaattatgaaacaatagagtgattagcagttttataggcaggtataagtccatattgatttggaaacatttaattgtattaaacagattttggcartcaactgcttttcttatgtcttaggtgtctgtgacagccaaaattctaataagtgtgaaagattcaatatggaacaaacattacaacttttgaaattaatttgaatcacctcagtttaataaaatctaaaaaatttctgcttaataatggatggctgatttttttttcttttccatcctgggcacactaaaacaaaaaccaattcttttttctttttttccatttttgattactatggtgaataagattgtaaagaaagagtatgttacataaattgtcttaatttattgataactaaacaatccagagagcattataaatggcttgtggtaaggatttcctagggcacaaacaatatgacctagatctagtttttcttttcaagttttgagttctcttccctgaagctcctacatggtgg

SEQ ID NO: 299155 - DNA, 341 bp, Homo sapiens
cagagtgtagtgagggtacatgagacattttaccgcagacagcacactgctaagcacttaaattccagaaattgcacagggaacagcagagcagtctgatctacagagctgggattctaaaaacctaaaactctgatttcttggctcagaaattcatttgcaattactgaccacagagaaagcygccctcgaaaatttcatttgcttgagatgatgtaactgagaattgaaaaagtacccatgaatctttgtgaggagacatacactttttacttgaaatactttattttgttccattgactagaggaaagcaaacctacaaaaccgtttgcccaaattcc

SEQ ID NO: 299156 - DNA, 551 bp, Homo sapiens
acaggtgtgcgccaccatgctcagttaatttttttttttttttttttgagacagagtcttgctctgtcacccaggctggagtgcagtggcacaatcttggctcactgtaagctccacctcctgggttcatgccattctcctgcctcagcctcccgagtagctgggactacaggcgcccgccaccatgcccggctaatttttttgtatttttagagacggggtttcacagtgttagccaggatggtcttgatctcctgacctcgtgatctgcccacctcagcctcccaaagtgctgggattacaggcatgagccactgcacctggctggaattgtgtcattttctaggaggttttcaaggccttgggttctctgctcttctcttatctctctttgtaatgaatttaaagaccatttataggttgtttacattgttttataattatgattcacaactgytgtctgagcttcagacctatacccatttcattttggctgtagtatatttaagaagtctcacatatataataatcccaattgggattcttgattt

SEQ ID NO: 299157 - DNA, 464 bp, Homo sapiens
acccatttcattttggctgtagtatatttaagaagtctcacatatataataatcccaattggkattcttgattttctcccttctactcccagctgcctccctcatctcatgtgttgccatcatccacacagtgcctcacgttacatatgtatcccattcatttggcttcatcttcactatcacacatgtccctgagccagtggttctcaaagtgtcatcaacattgcccaatgacttctgataaaaagcaaatattgaggcttcccgcacctctagttcttctgaatcaggttatctgagagcagggcccggtaatatgtgctgttacaagccctccagatggctctgaggcacactgaagtttgagaaccacctcacttagctcccctattctagctagacacctgcaaaagaatcataattggtctttctgctgctacttttgccccctccattatcttccc

SEQ ID NO: 299158 - DNA, 505 bp, Homo sapiens
agttttgaatctcttgtttcccttttctgaactaaaggatagaaactgtttttatacaggttatttaggatagttatctcacatttcattataatgaaaactagccctgcaacataatcttttgagaaaaagaaaccactctatccaatacagacacatcaggggaggcaggatgcgtattagtgtaytgaagactttgagatgttttgctcttaaggaaaaatgaggcctccttgatttaatctagtgctttctaatccatttgagtatagaacaaaccattcttttttttcctgtaatatctatctctcaacattctgtggaatctgtattctttcaataacactgtagaaaacagtgatgttgcttaactaatactttggttgggattctagcatcaactttcaggctttctttgttcttgggctagaagaactcgtagggtcattgcaaaacttatagaacatgaactgggttgcaaacgctctcaattctggctagatca

SEQ ID NO: 299159 - DNA, 516 bp, Homo sapiens
caatacagacacatcaggggaggcaggatgcgtattagtgtattgaagactttgagatgttttgctcttaaggaaaaatgaggcctycttgatttaatctagtgctttctaatccatttgagtatagaacaaaccattcttttttttcctgtaatatctatctctcaacattctgtggaatctgtattctttcaataacactgtagaaaacagtgatgttgcttaactaatactttggttgggattctagcatcaactttcaggctttctttgttcttgggctagaagaactcgtagggtcattgcaaaacttatagaacatgaactgggttgcaaacgctctcaattctggctagatcatcttgatcgactcacttaacttctgtgaggtcaattaatggagttacagaaaaaccaaatatgactctatatttgagagtattttagaggggtaatagtcaattaaaactagtattttttttttctttttaaaaaaatataagggggaaagtgaac

SEQ ID NO: 299160 - DNA, 558 bp, Homo sapiens
agaagagggcaactttggtgcaatgaaaaatacatttgtctggggagctgaaagcattgttaagtctggttttgaggtataagcaaataaaacaatgataaaaactataaaaaatcattaccatctattgaacacatattttagcgtcattcttgtgttgagttagttgtttgtgtggggacgttctcaacatcatggctgcttcctcaaggtttggcatcttttttttttttttttttttttttttttttactattttaagcatacttttccctgtctggttaagatgctgtcataactctcatttgaatatraatattcaaattgcctcggtatccatctcatcctgtctctgtcttgtcactcttgatctatgtatttgaaggcagtcttcatccatttcctgtttttgggttctagacaaacaaggctgtataacctgaaccacttgagtggcttactctgctcctggaactaccaagaacgggcttactgagttcccttgcttatactcacacactcttcaagttaacaaatccaactctgtcacaggaaaca

SEQ ID NO: 299161 - DNA, 580 bp, Homo sapiens
ggtgaaaggtactttgagggctatgcaaatatcttgtttctcatcatactgtaacccaatacttttagcatcccatgattcttgcctaaaaaaattactacttaggtctttacaaaagggcgactttgtatttccatcttaactttattccatcatgctgcctattctcttgtatttgtttaattagttcaagtgtttactgatatcagtatggactcatggttatttattttatgagttataatccactggggtcccagagttggccaatgggatctcttccaatttggtttctgtgccctttcaacatgaccacttcagtttttgagaactttcttatattctggtacagcatgtctccagcttatmttggactttccctgccctagccctggtcccaaccattttctaagggttcttttaacctttttaatttaacaatggtatttataaataagatatgtgtgctacatgtgctcatttttaccagtgtaccattgctctcaggccctctcagggaacagagccaggcagaattggtatatataatatacatgtaaaatttacttctatatttacc

SEQ ID NO: 299162 - DNA, 576 bp, Homo sapiens
aactaaattccacacctgaattcattactttctacacacctattgtaccgtctctgttgcctgtctcgattgttagtattactggagattcagatgctcaggctagaaacactgatgtccgttttctttctcttccctttcacaatcccagctctcacatatgtaagtctaatgaattctagcagtcctacctgtgaagtactgaacagtgtcaaacactccaccaatggcctctttatgcctcccaccattttccatcacgtgcaatgctcaatgtctcctttcatccattcattcctccacgttcacctttgcaaactacagagctagtcacatcattcctacactaagagtccctcaatggctgtctgctgactacagattaaatccagatccctttcactggtmacagtagatatttaccattttgctcccatctgcctaataatgataacaactgatattgactaagtgcccacactgtgttgaaagctgtggatgtgggatttttatgtcatcatcactttgtgaggtaattttttttatccttatgataccagtgggaaagctgagcct

SEQ ID NO: 299163 - DNA, 482 bp, Homo sapiens
aacaatggtataagctcctttcagaaacccgtgttttctgtcccaaaacacagaagcctacagacatataggtcactccgtatcttttctttgcttctgtagtggctggtgctgggtcctaaatgttttgcacatcattttccctatgaggggtctcaacccaggtggacagtttggaacaaaagaaacaaaaagaaacataaggttttgaagtctgccagaccttgttttggattctggctctgccattttctaatcagcgactgaccatgagcctgtcatgtcattaacctcgctgaccctgagctgccattttgtgctgtgtgaccttgtgcagattgctatgtcttcctgcgcttccatttactcacttataaaatagcaaaaatgatctcagaggggagtaaaaaagatcaattgggkttttacctttctcaactaaaactggtggataaaagtgggacttttgaagatcactatca

SEQ ID NO: 299164 - DNA, 602 bp, Homo sapiens
ctccaatctttcttgccaacctgcatatttctgtaataagccatttattcagagctcaataattttctgatgtttgattaaacaaaatcaasaccaaaataattctattagggttaattgacatcttctcacaggaaaattagccactttgctggttatgcttttaataacaagcttcccagatttcaatggccatatttgaacacaattcttgagaactgctttgaagattgaatataaccttacagattgcttttaacaaaacagttaccatgtcaacagttcaaacaattatttagccttatggatagcactacaatattcacaagacttagcagctaggatttaactattaaggccttataattagtttcttaatctagagcttgaaaatgataagagtttaatgcctagactatgtcaataacttttaggcaatattatttactaaaatatgtggacccctaattgtcttattaaatatattgggataaaaatgaaattggcatgggcctaggtcaaataaactttctgagcataataatgaaccattattatttattattttgttcccttccctcacactgggataaatttgctac

SEQ ID NO: 299165 - DNA, 544 bp, Homo sapiens
acatgtcagatattttgtttatattctcatatattaggtacatgggtaggtattctataaaagtgcatctgttgatattcccagtgtccatccacagagaacagattattgttagtttggtagcatgtgaggcaataatgctataacaatgttgcagcattttgacctataagttgccttagctctgcattcattaattaaagcarttaggatgaaaatctttatatatctcgtctggcctgaaaaagctgacagttcaattggagttattggttaagtccctaaagttacaagcttttataattagcaattgacttcagaggatttaaaaaacaacagtgacaaacatgccgacatttccaatcccttctaacatacagaagtaatcatctatcatacaccacattagcaccatctacagacagtgcatgtacagagtgggcgatccactctgtactgaatgattagaagatactgttttcagcagaatcgatttgaaaagaaggaataatcaccagagaagtgccaaatagtgggtatgcaa

SEQ ID NO: 299166 - DNA, 544 bp, Homo sapiens
acatgtcagatattttgtttatattctcatatattaggtacatgggtaggtattctataaaagtgcatctgttgatattcccagtgtccatccacagagaacagattattgttagtttggtagcatgtgaggcaataatgctataacaatgttgcagcattttgacctataagttgccttagctctgcattcattaattaaagcagttaggatgaaaatctttatatatctcgtctggcctgaaaaagctgacagttcaattggagttattggttaagtccctaaagttacaagcttttataattagcaattgacttcagaggatttaaaaaacaacagtgacaaacatgccgacatttccaatcccttctaacatacagaagtaatcatctatcatacaccacattagcaccatctacagacagtgcatgtacagagtgggcgatccactctgtastgaatgattagaagatactgttttcagcagaatcgatttgaaaagaaggaataatcaccagagaagtgccaaatagtgggtatgcaa

SEQ ID NO: 299167 - DNA, 548 bp, Homo sapiens
ttaacattttgtcacattttttaacacattctccttctctgtctctttctgagtgtgtgtgggtataatcacacacacatacatctatatctatatatttttatatctataattatatttttcttaattcgatgcagttgcttctctttatccctttatatttcagtgtatttttcttggaaacaagggcattmtattatataaccacagtaaagttactaaatcagaaacttcaacagtgacactccatgttaatctacttccatgttacgaatattttatttgtcccaataatgcaatgatgtacttcttagcaatttttttcattataagatctaatccaggactgtgttttgcttttagatgtaatgcctcttcagtctctttcactcaggaaaagtttctcagcttgtttgtgtttttttatgacatcattttttaaaaaatatataggctcatgtctaaaagaatcatttgtccctcattttgactttgttctagtgttttctgatgataagattacaattaagcattcctgatcagagcac

SEQ ID NO: 299168 - DNA, 548 bp, Homo sapiens
ttaacattttgtcacattttttaacacattctccttctctgtctctttctgagtgtgtgtgggtataatcacacacacatacatctatatctatatatttttatatctataattatatttttcttaattcgatgcagttgcttctctttatccctttatatttcagtgtatttttcttggaaacaagggcattatattatataaccacagtaaagttactaaatcagaaacttcaacagtgacactccatgttaatctacttccatgttacgaatattttatttgtcccaataatgcaatgatgtacttcttagcaatttttttcattataagatctaatccaggactgtgttttgcttttagatgtmatgcctcttcagtctctttcactcaggaaaagtttctcagcttgtttgtgtttttttatgacatcattttttaaaaaatatataggctcatgtctaaaagaatcatttgtccctcattttgactttgttctagtgttttctgatgataagattacaattaagcattcctgatcagagcac

SEQ ID NO: 299169 - DNA, 602 bp, Homo sapiens
attatagtttcaggctaacacaagtgcaaccatttactcaagaagtcagtttccagttagagaatatcacatggagaacatttgaattgcatcccattctggatgaatctgaaatggtgctatgcttatgtatgccccggggggaggtttaaaggagaataatgtgtgcctcttcagttcatatatttcagactgttcttgtgtgtagctcatattttgccctaaagcctatacattttgtgctataactttatttttaagtgacgtttaagtgccagatggctatgttaccccaaaggtaaaaaacactgggaaataaaatggttcagaaaaaagaaaaataataaatttgtattatattatctttcatgtataacttttgtatactaaattccaatgggcagtttatcagttatgtaaacttggattttaaaattcaattgatatcttttctgttataattgtataagtgttcgagaatttttagttaggatggatttcagcayatttttgtcagattttcacctgttaattttatagggtatataattttagagggtatatacatattttaattaataatatggagtatatagtgttat

SEQ ID NO: 299170 - DNA, 630 bp, Homo sapiens
aacatatggtgatatcagtggagggggaggaaacggaaggagaagaaagggataacattttctagttcataaaaawatttttaaaatgaaaaagaagagaaaatacttttcttctgatgtgtgtatttgggtcatgttgtaaaatatatttcttatggtgaaccacagtcaaatacgtttttaaaaatatgtatccatagaggcactttaatactctgaggagggtagatgtatctccctcacagagtggttattaaatgaatttaaccagttgaagtattcaaagcaacacctgcacagggcagataaccaaaaagagttaagtaagaattactacttgttgtggacggtgttggtattagtgacatctatcaccctgtcaccatctatgtaaaaagtgtcatttgatacacagtctatgtagtagtgtcttcttccaaaaataaataaataaataaataaataaataagaccttactagatcagtggtttccagaatgtggaacaaaaaatagtgaggaggagcatctgaaatagacaaccaactttttatatgacccataacactgagttagtcagcttaatgttgtaataacagaacatccgaggctgggtaattcataaagaaaa

SEQ ID NO: 299171 - DNA, 634 bp, Homo sapiens
gaagcagtatttaaaatccatattttatctcatcctttgactctttgaagaactttaaagtttatctcaacttctataagatgtggtatgtaaataaatacacatttactgtatttgtttatatatgtgcccttacacattcatttatgtcttaatatgttaaaggcaccttaagttacagcttctgtcagctactttttaattgctggggaaaaattcagtatttaagtacttcaacttttcagcttgactcttacatgtgaacagagtttgtgaacatgaattattaatccatgccattaacttccatgcagtggcatcagcgattctcttggtttgctccaaaagataagcaatataaatgttttctatggtttctgtaaaagcaaaaattaagacagcagaaaggccctctgggaaaacaagggctactgccacaamaattggaagaatcacaaattcctgaacttccttaagtaccttctgatattttgggaggatttgatgtttatcttgactttgagtgtgaatttaaatcttttgtgtttaaatttcttgaaattaatttttccaacttatttcaaaaggaaaaggtatgtataacgtgaatgacagaataaagctattatcaaca

SEQ ID NO: 299172 - DNA, 650 bp, Homo sapiens
gcactaagtacttaagggtaaggaagttttcacaacaatcaaccacaattttattattattttaaaattttacccaatgggtttgtatcacaatggtcatattttcgaaaagaaaactcagacatctgggtctgactgtgctctgattgctggagggaaattactgcatctctagggcaggtggaagtttattgagcatggaagccttggtcccgtttggcagttgragacattccttatagcagatgtcacgacactctgaaaaactgtgcttgtaccacagtgaacattggcaaatactggttgaaactaacccactacactaggcagggagcactattctacaacagaccagttccaagtaaatgtaatgcacaagtttatgggtaaatacggtacaattgagagggttaaaggactagagtataaaggatttcacttcatgaaaagaaattggatgactaaacttgataaaaacaatttggtgaaggggtgggatccttgtatgaaagcaagaaaatctgggcatcaaactatttatgcctgaccccttttaattcatgtgtaaactttcattaatgttttatattataaaacataccattcaaataagaattcaaacacataaagcccagaaatgaataattttt

SEQ ID NO: 299173 - DNA, 610 bp, Homo sapiens
cctacaggcctgagacatctatatatttgccaatattctatgacatatggtcagaactctgcctagacagagataatggttataagctgggcatatctgatcctctctcatagaaattttagctagaatatcctgagaaaatgaagttgttaggaggtagggcagcagtttaagagatgtatagagatgccatgtcaaagacagttaggggttataaataagcacatccaatgcaacaaggcaaaaatacgggaaagaagaaatgaataagcaagtcagagatgcaggagaggggagcagacccccagagtagctgggcatgactggtggagaagcacccaaggcatgatgaactaacccctgcttctgaagtttctagagctgcctagtatccactctaggggagaactggctattctatgattattttctttggagtcctgtaagattcctgtcatccatggttcattatcttatgggtatcctttttgtaaaccccaacttacttgaggaaatatgaggagaagtttgttttgtgcaattataaaacytaattaggttaaataaataaaatatatgtgcattcctgagttggtatgacaattttatt

SEQ ID NO: 299174 - DNA, 430 bp, Homo sapiens
ggtacatattgttctcatttaatggtgtttaattaacactccaatagttaagtgactttgtagagaagaaatggaaggacagagtcaggtccccaacacaggtcatctaattcctgcatttgtggtctctccctaacccatggtatttctctcagctgccaaaggaaacttattaaagatattttaaaaaggcttttatctttagcatcttcttcctggtgctgctgtggtaaccattttcagcttggcaatttawgacaggttccaatttgtgcagatgaatagattaatcacatattccttaactagatttagctattttattttgaacatcctgtcttcaaccctccctagaaagagggaatggaggaagaagtaataccttgccacttaatctgtcatatactggctgatattatttaatttataa

SEQ ID NO: 299175 - DNA, 523 bp, Homo sapiens
tcactccaatcctatttcagaagcaaattttttataggattagctccagatacaaggttctacttcctttgatttttgctgggtctgcagggttctggcactggttaccatatcatacatatttcaattaacagttgccaggtgatccgtgatgcctcccttggtcttcatgaacaaattgaccagactttttccaagcatagataacagagtgacaccttgaccataagacatttatgtcttttctacagaaatgaaacccagtataaatagcagcgatatgttttttaaattaacaaatggaacctgaacttagagaagaatttttaaaagtacaataacaaatacgcggtgaatwttctttaccatttaatttagtcttaactttattcttctaagaaaaatctctgactcttttcttctataatggtttggattttaaaaaaataagtccatatcctgcacacatctccaagagtgcccgctcattcacaccattttcagcattcagagttgcttggtc

SEQ ID NO: 299176 - DNA, 544 bp, Homo sapiens
ttttaatatgtatgcatcatgacatttattcaagttagactttccagaaagagtgacatgcctaaaacactcttgtatgtttaatattcatacaccatttaaactctatgggtatttyggagttacgatagttcactctgtttgtgttatgcagaaaaattggtaaactctttcagggaaagcttgcattttaaaactacctctcaagtgtcccaggaggcacttcataatatttattattgctgctcttatgttgttataataggtgagctagctagtttatatcggcctaaacaacaagaatgggaatcatgaagggtgtcataaaaataataccatccatgttaaatatttaatgtcgtgttctcctagtgtcaaaatatttagtgcagtgagagcatcactaaggcagacggagatgagccaggactacattctgcacatatgaatgcattaaaaagaagcccacacagtttattcttaagattcactgcttttgctctagaaagttctcttggttagggaggggcataaggcaagactg

SEQ ID NO: 299177 - DNA, 600 bp, Homo sapiens
cacttcataatatttattattgctgctcttatgttgttataataggtgagctagctagtttatatcggcctaaacaacaagaatgggaatcatgaagggtgtcataaaaataataccatccatgttaaatatttaatgtcgtgttctcctagtgtcaaaatatttagtgcagtgagagcatcactaaggcagasggagatgagccaggactacattctgcacatatgaatgcattaaaaagaagcccacacagtttattcttaagattcactgcttttgctctagaaagttctcttggttagggaggggcataaggcaagactggcacccagatggcaggagtcgaatggcagggaagccagctcaccccacctgccctgaggccagccctaagcagggcagattctcctctttggaggctttccagtccagttggaaatgcctcaggccagctcccaggcctagatctgcgggcggctgctgccatgtagataagaatcatggctgctggcactgggtacactagatatcagttcacacatttttctatcttaatccatccagataagacaatgtattccaaccctgatacttccttca

SEQ ID NO: 299178 - DNA, 497 bp, Homo sapiens
ctccctgcatgtccatatacacattaattatccttcttcagaaagtcaggcgggctcctccccatgcataccacaccttccatagcacctccccggagacttacactgacagtgtctctctgcatgtgacactattggaaccaatcgttcctgtctgaagaaaagttgaggcaacccataaaaatagggaagcacaccgagaataaatcagcttttctcagcactttccacaagctaagcttgttcttatggaagctttactgggcctttcttttcgtaatgaacttgaaaagctattttcccagatgggcttggataaagttttcttagcaatcgctctcatatcacacctgcaggtatttacctcctgcatgggacctctttccaactcacaataggcatttcctttcttcggkggcgatgaggaaaagaggttgggggagaaagtgctgggatccgtgaagtgactgcagagctcgttaagcattgacaagtca

SEQ ID NO: 299179 - DNA, 644 bp, Homo sapiens
tgtgttccatgctggaaaatctggaagtggccaatgctgagattcattccttatctatgataaacatctgagcccctggtttgtaccatggaacacaggaccatccaaggaattgaggccttgagtttgggttaaatgaaggatgccaggtggaggttgttgagtgagaaggctatatgaactgcatgatgttcacaagccattgcagttttcctgtgccgcctgccgccactggatcgtttccatgtgtaaggcggttctcctacccagcctgccaccacggaatctctcccctgtatgtgagcccttaataaaaccccacgtctcctttgctggttctgggtctctttggcctctttaacctgtgccttccctattgagtttaacagaagttcggcacaacagtgggagagayacaatccagggagggctttaattcctccattgtggagctcaggagccaaccctttgacttcttttgtatcatatccccttccctttccagtgacctgattcagtctcatacatcagtttgcattaagatgtgtttttgaatgaacaaatgccacatcagaaccctcatccctcttagtgtcctggggcattataaacatgttctctgaaggcttaattttataatcctg

SEQ ID NO: 299180 - DNA, 622 bp, Homo sapiens
acttgcagggaggtgaattgttagcggcactaattattcatgcaaaggacttttatgaactacaaaactctctgaaattttcyattcaaattcaaggatctaatcaacctgcccaggtactagattagccattttgacaatattatgactttctgcttttagtgcaggttttttgcaatagtcccgggaccaggtcttttccttctgttaactttatgcctattctcagcagctaatattattcttgggagctacgtggtttaaatttaaatgcagcagtcctttaaaataagacatatgtaacctataactgcgtgacaggtcactgttgagcaaagtggtttccctgtttgaatgttattaagacaaaattaagatgcagagatactggattcccctatgaactggataatgattacaaattattgctctaaacatggcttaggtggtgatgcagcagtctttgctgcaggctggagaattatccttgtcttaaagggatgggatgcaggaaattctcaattcctgatttggttatccctcaaatgaccttaaagggtatcatggtggctgggagctgggagctccacgctatggctaccttttcagtgggggccatcac

SEQ ID NO: 299181 - DNA, 622 bp, Homo sapiens
acttgcagggaggtgaattgttagcggcactaattattcatgcaaaggacttttatgaactacaaaactctctgaaattttctattcaaattcaaggatctaatcaaccygcccaggtactagattagccattttgacaatattatgactttctgcttttagtgcaggttttttgcaatagtcccgggaccaggtcttttccttctgttaactttatgcctattctcagcagctaatattattcttgggagctacgtggtttaaatttaaatgcagcagtcctttaaaataagacatatgtaacctataactgcgtgacaggtcactgttgagcaaagtggtttccctgtttgaatgttattaagacaaaattaagatgcagagatactggattcccctatgaactggataatgattacaaattattgctctaaacatggcttaggtggtgatgcagcagtctttgctgcaggctggagaattatccttgtcttaaagggatgggatgcaggaaattctcaattcctgatttggttatccctcaaatgaccttaaagggtatcatggtggctgggagctgggagctccacgctatggctaccttttcagtgggggccatcac

SEQ ID NO: 299182 - DNA, 534 bp, Homo sapiens
agtatccaattataaaccctccatttatttttagaccaatgttctttaggacatataaagaaagtctcaagatttcccctctctcactcttcctgctaaaaatctgctgatttgaccccaatacatcatttgaaaagagacaggtgctgaggtttgatatstttccagtctttaagttttacctaccttcctttactcttaatttgtttgcttcaattgctttcatttttaatcacatcctcttctcacctgcaatagtctgttataatatatgtccatctcttaataagaaagattcaaacttactagctttgagaggacaatgccaattaaaccatcctgttttgattaccccttttttcctagtggcacaatttttacctttctaataaagtggttctcaagccctgctcccattagaatcacctggagagttttgtggatgacactggtgctcaggcccatccccacagaccctcatttaatcaatctgagatgatgcctttgcacaggtgtctttaaagcactgcaaga

SEQ ID NO: 299183 - DNA, 595 bp, Homo sapiens
ctttacttgatccaaacccatgtaaaaatgaaatgatgccatagtcatagttgaggacttaataaatataagaatatttagatgaaaaaaatctaaccttttaatttacaggattgtagaaatactcttaaagaacatcttggtgagatggtggagtgtaascagaaatgtatatttagttgtacagtaggaaatatatttttggtctttgtctctatttccaggcacagatctcctaaaaccctttgaatttcctgagaaataggagtaatatgtggattttttattattcaatgagcccatttcaactgtacttgagtttatgcaaatgagatgactcctggtaaggcccctagaaagtttcaggatgggggttggacaccggaaggttcacatcttcgttagagggttggattttttagcacctcctcaactctcagggagaggagaggcactggagattgagttcattcaccagtgtccagtgatttacttactcaatcatgcctacgtagtgaaatctacattaaaaactccgaaagaaagaaaagaaaaggaaaaaagaaaacaaagaaaggaaagaacgctaaaccat

SEQ ID NO: 299184 - DNA, 515 bp, Homo sapiens
ttgggaggccaaggaaggcggatctgaggttaggagttcaagatcagcctggccaatggcaaaaccccatctctactagtaacacacaaaaaattagccgggcgtggtgatgcgtgcttgtaaccccagctacccaggaggctgatgcatggaaattgcttgaacccgggaagcggaggttgcagtaagcagagatcgtgccactgcaccccagcctgggcagcagagtgaaactgtgtctcaaaaaagaatgaaatacatttcttataattcatgtttaattttagagctcttttattttattcaattctattcaaaccctgggattttaaaaggaaattttttttcaaaaaatgtttccatttgtaactattttgtaaaatgtgatttttaagattttctgtaactaaaatattacattcaaattaattaaattctgactgggtgcrgtggctcacgcctgtaatcccagcactttgggaggcggaggcgggtggatcatgaggtcaggagat

SEQ ID NO: 299185 - DNA, 618 bp, Homo sapiens
tcaaaccctgggattttaaaaggaaattttttttcaaaaaatgtttccatttgtaactattttgtaaaatgtgatttttaagattttctgtaactaaaatattacattcaaattaattaaattctgactgggtgcggtggctcacgcctgtaatcccagcactttgggaggcggaggcgggtggatcatgaggtcaggagattgagaccatcctggttaataaggtgaaactgcgtctctactaaaaatacgaaaaaaattagccggcgcggtggcaggcacttgtagtcccagccggtggcaggcacttgtagtcccagctactcgggaggctgaggcaggagaatggtgtgaacccaggaggcggagcctgcagtgagccgagatcgcgccactgcactccagcctgggcaacagagcaagactccatctcaaataataataataataataataataatwattattattattattattacattctgtgctaacataagactcaacagcctttgagtcaacttttcagtcaactttgttgtcctcaaaaaagcatcttaatgaaaacacagaagaatatacttaggaccttggattaggcagagttcttacatatgc

SEQ ID NO: 299186 - DNA, 615 bp, Homo sapiens
acttgagtttatgcaaatgagatgactcctggtaaggcccctagaaagtttcaggatgggggttggacaccggaaggttcacatcttcgttagagggttggattttttagcacctcctcaactctcagggagaggagaggcactggagattgagttcattcaccagtgtccagtgatttacttactcaatcatgcctacgtagtgaaatctacattaaaaactccgaaagaaagaaaagaaaaggaaaaaagaaaacaaagaaaggaaagaacgctaaaccatagcatctggagagtttctgagttaacgaacacatcctcacgttggaaaagtagcatgcctcagctccacaggggcagagactccctttactggagacccttctggacttcacctatacctctccatttggcagctcatttgtattctttataatacattataacaatacagacagcatttttttttkaggtctgtgagtcttttccaggaaattatcaaacttgagatggggagtattgtgggaacaccgaagtttgtagccaagttagtcagatgtatggatattctgaggacccagtacttgctattggcctccaaaatgagggcagtct

SEQ ID NO: 299187 - DNA, 608 bp, Homo sapiens
atttatgaaactggccctttcctctaggagcctaagtgatgacttttttggttagtggtgatgagcaattagctaaagaaagatgactcctgctccctgcttccttattctcatgcctggtttttggtccaagtcttggtctgtgaaatttaaagaaacccatgtagagtcatgcctttttaactctaattaagcagctttcataagagctgctaccagcctgatacactcagcaacatttccttttttctagcgcgcgcacgagcgygcacacacacacacgcaatcaaaaccaggactgaatctgataaagttttggaaaatggaaagagatactatgcctgagttcttccagcatagattagcatggagctttgtagtgaggatcttagatgttgttccatcttggcactcagatgagagtactgcttccattttaaagtagtaaaataagtatatgaagatgggggaaaaaagtacattgtgtctgataaaatgaagaaaactactgtatcctagtatccctaacaaagctaatggccttaaagaggaagggtcaagaggattcctgaaaccacaagaaaacatagtgataaattagatgtctc

SEQ ID NO: 299188 - DNA, 619 bp, Homo sapiens
ataacattcctgtttctacctaccaacttctatcattctggctttttcccacagttctcccaaaccacagatcccttcttcctcaggggcttaactccagacatctttttctctgtgtctrtcagctcttgctgtcttcacttccttctctgagacactgagattctttaatgctgcattctcggtgatatctttgatttctttaccccattgccttctatagcagccatgtggtaaaccctagtcttgagagatccaaacgtttggctcttcctacccttgtctggactacaaaagctattgaggaaaactaatacaactgtcaaggttctgccactgtgtggatttgtggtttctagttacaaacaggtcctccatccctagcgtgtgttcctagtctacacgcgactctcaacagctgctatttcaagtattttccatctccctcagaacatctagttctctctctctctccctttaccctgagcatttgacctcatttaaaagccataaagaggcttcagagtatggtagaaaatatattagaaaggtcaggagacctgtgctctgctgaacagccatgtgattttttttttccttgtgtgttcataaaatgtgt

SEQ ID NO: 299189 - DNA, 495 bp, Homo sapiens
attcagtatcttttactcacaaactccttccttgactgtacctgagtttattaagcttttgcaccttttatttcaatgwctgttgagtattttgtttctaatatatcagaattttacaatcacctactattgtttcttgtctcttagtgtgttgctactatcattattgtttatgatgattattattcttgcctttattttggtaaggattctaaacattactaaaatattttcatatgtttaagatttaaatttgcattgggtgatgtcatgtttcaattgttgattgtgttatctatctcgatgcttaggtttcttcttatgttttgaaagtttggcttgaaggctcgtgatctataggatgattttttttttaagtttccccctccccttcccctttacccttatttgttttgcagttgtcttaccaggtaagacccccagactaagtcgctcttataatagcgtattgggttcactagcctgaggtggtat

SEQ ID NO: 299190 - DNA, 495 bp, Homo sapiens
attcagtatcttttactcacaaactccttccttgactgtacctgagtttattaagcttttgcaccttttatttcaatgtctgttgagtattttgtttctaatatatcagaattttacaatcacctactattgtttcttgtctcttagtgtgttgctactatcattattgtttatgatgattattattcttgcctttattttggtaaggattctaaacattactaaaatattttcatatgtttaagatttaaatttgcattgggtgatgtcatgtttcaattgttgattgtgttayctatctcgatgcttaggtttcttcttatgttttgaaagtttggcttgaaggctcgtgatctataggatgattttttttttaagtttccccctccccttcccctttacccttatttgttttgcagttgtcttaccaggtaagacccccagactaagtcgctcttataatagcgtattgggttcactagcctgaggtggtat

SEQ ID NO: 299191 - DNA, 495 bp, Homo sapiens
attcagtatcttttactcacaaactccttccttgactgtacctgagtttattaagcttttgcaccttttatttcaatgtctgttgagtattttgtttctaatatatcagaattttacaatcacctactattgtttcttgtctcttagtgtgttgctactatcattattgtttatgatgattattattcttgcctttattttggtaaggattctaaacattactaaaatattttcatatgtttaagatttaaatttgcattgggtgatgtcatgtttcaattgttgattgtgttatctatctcgatgcttaggtttcttcttatgttttgaaagtttggcttgaaggctcgtgatctataggatgattttttttttaagtttccccctccccttcccctttacccttatttgttttgcagttgtcttaccaggtaagamccccagactaagtcgctcttataatagcgtattgggttcactagcctgaggtggtat

SEQ ID NO: 299192 - DNA, 616 bp, Homo sapiens
ctcagattggaaacatttgggaaaaaaataccaaaacatcatacaaataaaaaagataagtatttacatagcattgacgttgtattaggtatttattataagtaatctagaggtgatttagtaggatatgcataggttatacrcaaatgctacaccatttatatataaggactcacggattttagtatcctcaggtcctggaaccaatccctcccaccaagggatgactttattgtgactgccacctagtgacaggagttggttactttcaattgtagttgaaattttattctagttaagtgtgtgccttttctagaagatttgttttgtggccattatttaactgttgttgactatgatttttaaaaaccacataggtagaaaggagattgtaagttttagggaccatatattcatggaattttaaactgcttagcacctctattatgatagaacataaaacaagggtaacagaaaagaacagggtagaaggcaggttatcccaggattggcagctagaattggacttaatgacagttttctccatggtaaggtgtccatcaaatggtctcaggccttgaatacataccttttcaatacaggtaaaagtcagaga

SEQ ID NO: 299193 - DNA, 580 bp, Homo sapiens
gctgtaataatgctgtgtaacaaaccatgctaaaattcagcagctttcggtaacaagcatttgttagcataggtgtaaaggtcaactaaggttcagctgagctggtttgggctttttcaggctgttcttgactgctgactgtggctagggtttaagtctgcaccatgtatctttctctgggacccaggctgagtgagttgtagccacccagaatatgttttaattacatgaaatagcaggagtaccggaggcaagtcaaactatgcaattaaatttaaatccctccttacatcacgtcagcttatattccactagccaaaacaagtcatatggccaaggcttaaagccataggaagtattctccattgcccaaaaagaaagaggtgaaagcagattaaatatttgttaaagttccagtcgttcacattaacatatataaaatgatcaaatgaaatacaataaagtcttttaagaaaacacaggcttaaagggctaatactggaatataaatgccaaaagttcttagayatttcaaagatgcacatcctgaaagccttttaaggttggaaatgtgtgctgt

SEQ ID NO: 299194 - DNA, 572 bp, Homo sapiens
ttcacttgtaagtgggagttaaatgatgagaacacatggacacacagaggagagcaacatacactggggcctattagaaggtggagggtgggaggaggttgagtatcaggaaaaataaccaatgggtactaggcttaatacctgggtgacgaaataatctatgcaacaaacccccatgacacaactttatctatgtaaaaacctgcacgtgtacccctggacttaaaagtttaaaaaatgtagttttcaatactgttagttatctttttgttattgacacgattcctaacttaatttcattttgatcagcagatgtgatctgtatgaaaaattccttgaaattttattgagatttggagaacttttgcttttttttttaaagtcttaatattgcttgactttttaaattctattcatgcattatgttgataaaatttaatcaagtactgtatgaaagttaatgcagtctatttgttaataaagaaaccaacctaaaataacwtcatattttaagagcctcacattaccaaaatcggtcattctacatatgtttatttatttatagactatca

SEQ ID NO: 299195 - DNA, 572 bp, Homo sapiens
ttcacttgtaagtgggagttaaatgatgagaacacatggacacacagaggagagcaacatacactggggcctattagaaggtggagggtgggaggaggttgagtatcaggaaaaataaccaatgggtactaggcttaatacctgggtgacgaaataatctatgcaacaaacccccatgacacaactttatctatgtaaaaacctgcacgtgtacccctggacttaaaagtttaaaaaatgtagttttcaatactgttagttatctttttgttattgacacgattcctaacttaatttcattttgatcagcagatgtgatctgtatgaaaaattccttgaaattttattgagatttggagaacttttgcttttttttttaaagtcttaatattgcttgactttttaaattctattcatgcattatgttgataaaatttaatcaagtactgtatgaaagttaatgcagtctatttgttaataaagaaaccaacctaaaataacttcatattttaagagcytcacattaccaaaatcggtcattctacatatgtttatttatttatagactatca

SEQ ID NO: 299196 - DNA, 596 bp, Homo sapiens
tggcaactactattctgatctgttcttcatccctctagattgtcttttctagatgtcatataaatgctattgaacagtggttggccttctgagactgacttctttcactctgcatagtgcctttaagattcttcatgttggccaggcactttgagaagccgaggggggtgaatcacctgaggtcaggagtttgaaaccagcctggccaacatagtaaaaccctgtctctactaaaaatacaaaaattagctgggcatggtggtgggctgtaatcccagctactctggaggctgaggcagaagaatcgcttgaacttgggaggtggaggttccagtgagccaagatcgtgccattgcactttagcctgggaaacgagtgaaactccatctcaaaaaaaacaaacaaaaaaaagattcctccatgttgatgcatatattcgtctttattgctgagtagtattccatcatatggacatacyatcatttgtttatgcattcacccattaaatgaagcatgtttactggctttgaaaattattctacttccttgatcaagctacttaatgtctctatgcattagtatcttcatcagtaatg

SEQ ID NO: 299197 - DNA, 588 bp, Homo sapiens
ctttctgagataaagattaaaatcagccctgggtgcttacttagccttgcattcaaatggagattttttttttcttttttgaaacagagttaaaaatagagtgctctgatctcacatagaaagttttcgtttgtttcctgccctgtctgctcttaagatgtctgtatttgtcctctgtggggacttaatttccaactccttaaatacaaactcctgacctagtgtttatctggaacacactcatcatccctttttttttcttttaaccctatcccatctgcttaatttgtgtcttttcrtaattcagcgtttgctaaaaggaaggaatttaccttttaccctgaactacttgtcctatctttctgtaatttttaacatctcttgtaaggttgatgtcaaattgtggcatttattttagtcagtttatttctaagaggaccagtagataaattttgtgcttaattttgtacttctttataattggcctcttttttgattttacagaataccaagctgctattttacacttgaagagggagcacaaagaagaaattgaaaacctgcaggtatgcctctttgatgctactg

SEQ ID NO: 299198 - DNA, 536 bp, Homo sapiens
ggttttcagttacactctgaatgtagtcctctaatcttccagtgtcttctcagatgtgtcactctgtgaagggatgcagctctggaaaggtaagtgaaactctgtaggatacccaaatctttatgacaaaagggaagcctgagcatgggattagtaggacttctttggatctctacttcttcaattttgaaaggggaagaaagaaaagtacatgccctttgtctggcttgtgaggagctggtagcttaagaatatcgtttttgaccaacaccttaagcagtttgaaagtagaggacttggaaacgacagattgttgtatctgtttttaactaatgttctttgggttgtgggatgcaagacaaagaaccagccaatagtgacatttcctttacgggaatctttttcgtttaccccatttatcacatgcatatttcctaattgaggggaaacttcactgagcgatggcctctggcaggccccctgctcmttgtgcaatgcagtcacatttctagtttggtaactcccactgcaaaatg

SEQ ID NO: 299199 - DNA, 563 bp, Homo sapiens
aaacctctcctcttttctatcgatactaactcctttgattacctcatttgatttcattgctgtgaataccatatatatatatgtatatacatagataagtatatgcatatataaacagacatatatatgtatatacatatataagtatatgcatatataaacagacatatatatgtatacatatatatgtatagacatatatatgcrtatacatacatacatatatgattcccattttttatcttcggctctgatatcctcactgaataccagatttatacatttactccccacttaacatttcaaacttaacctgtccataagtaagctcctaatactccttcaaaacttattcatctcaccatcttctccatctcaaataaaggccactcttttctacctgttgctcaggtaaaactgtggtgttatacttgacttatctgtctcactatccctcattctatatatcagccactagaatcaaaacattctcattcctgcacaaccagctacatcctcatccaagcttccacatcattcatctggattatagcaataactcc

SEQ ID NO: 299200 - DNA, 591 bp, Homo sapiens
tcaacccttcagtgcctccccatcacgtatgggayagaatctaagctctttaacatgatgcaaaggcccttagtctcttctccagtctcttctcttgacaattcccaccttgccctcctacatcaaactatttctaggagttgatcaaatatgactaaagactgagctgagttcatcaatcaactcacacctgcatctttggaaagaattagaacccaatcagcctcaagacgaatgcaggagtgcagtctattttccttgctctgtcacttatatgttcttcatttgggcacttcatgttctccagcccacatttctcgtttataaaacaggaatcataaaaccaacaaagttgtgaagctaacgtaagttcacagatgtgaaaatcatttcacatgtgctatacacagtaaaagggcttttactctcatcattctgaaatgggaatccttgttccaaagccaggcatgctagacaggcagccctgttgctagacaagcagccaggagtgtcccatctccatggaatgagctaaaagttaatatgcatgaagctcagtcatttttgttatacataaaagagaatctcggc

SEQ ID NO: 299201 - DNA, 568 bp, Homo sapiens
aaagccttatgcagtttgctttatatgatttcttaagctttatatgttttcttatccgatctttccagcaatcctagaagagctacttagtctttccccatctttctgaggaacacagagtagatgggaaccacccagggtcacacttgaatagtcgtagcagcaagtgtcctcccaaccatgcccccagtatagcacacccaacatctgccttatgacagaaaagatgtctctgagcttttaggtgatcttttaaagttaggtgtgcaaaaggtagaaattggtctctgagaaaacaaggaatgaagaagcaggagaaagagtgtatgtgtgtgtgtgtgtgtgtgtgtgtgkgtgagagagagagagagacatagagacagagacagagaaagaaagacagacagaggaggcactctgaccttcctgtccctggcagctacatgctgtatttatgcaggtctgccacctttatcacagtgggtgttggaaggaaatgcatttctaaagttctctataacctgtgaaggaaggtttgtgccattggggaaggaaagcctgcttctgt

SEQ ID NO: 299202 - DNA, 572 bp, Homo sapiens
gcctaatcacctcctacaggcctcacctcttaatattgcrtttaggggattatgtttcaatataaatcttgaagaagacacagactttcaaactgtagcatccaccttttacaagtaaggaaactgaggcccagaatggttgtgtatctcttctgaactctcagttagttaattacaatttagttaaataaagaatgaaattacggtaaccacagaattaaaaaatcttgtctctagaacagtatttgtgcacagacagggaacttagaaaagtctatggcttgttaacaagaacgatgactctgttgcagatgggatagcgatgggaataggaaggaagatcaggagttagtccctgtggcctgcgtgtagtcaaagatgtcaactgtgttttctcatgctgatacctctacccccatgaaggggttaacagtctcaaggcatatacccaaaataaaaatctacttttgattttgacattttgtgaaggtaatttatgtgaatttatgtgtgcaggcttccgtgagtctctccgtgagaacagccgagggatgtgcggtggataaacaaca

SEQ ID NO: 299203 - DNA, 572 bp, Homo sapiens
gcctaatcacctcctacaggcctcacctcttaatattgcatttaggggattatgtttcaatataaatcttgaagaagacacagactttcaaacygtagcatccaccttttacaagtaaggaaactgaggcccagaatggttgtgtatctcttctgaactctcagttagttaattacaatttagttaaataaagaatgaaattacggtaaccacagaattaaaaaatcttgtctctagaacagtatttgtgcacagacagggaacttagaaaagtctatggcttgttaacaagaacgatgactctgttgcagatgggatagcgatgggaataggaaggaagatcaggagttagtccctgtggcctgcgtgtagtcaaagatgtcaactgtgttttctcatgctgatacctctacccccatgaaggggttaacagtctcaaggcatatacccaaaataaaaatctacttttgattttgacattttgtgaaggtaatttatgtgaatttatgtgtgcaggcttccgtgagtctctccgtgagaacagccgagggatgtgcggtggataaacaaca

SEQ ID NO: 299204 - DNA, 472 bp, Homo sapiens
cacaggactgtgatgattacaactcaagatgagatttgggtgaggacacagcaaaaccatgtcactgcctgaacccacaaaagtgctggtttcttctatcacttttatatttggttgaagtgctaaactacagggcatggagtccagcttccccagggactatctcttttgaggggctaggtgatataaactggaagtgtgagggaataaactccctacaatgagaattttaactactgagtaacaggtggtggaaaggtgctggcaaagaaatctgtcttcccacgtccttccagttatgtcccacatggttgagcaaccactcatgatttgttatgaacacatggccaattcrgtaacatgccaccttatatatgcttaccttcttttcctctttaccctcttttcctcattgccctctttttcctctctccctgccctgagattataagtcccaataaagtatttgcat

SEQ ID NO: 299205 - DNA, 597 bp, Homo sapiens
ttttaatcacttatccaaagatggaggcttttggggggtacctgtgacaaaaccaatgaaatccaaagcactgtcagaaatggaagatcctcgggggtcaattccttcatttcacagatgggaacacygatgtcttcttgcaccgagtcttactcaggtcacacatgcaggagttgggagatttggggctgtaggagaaatgttataacatcatcccacctggctttatccattaacatctgctcatctctgccctcagggagtcgtggagctggttgaacaataccagacagtacgtggagagccttgcattgtgttcaccacctcgctcatttttattcaaaatgattccagaaaatcaatgtgaccatctggcctcggagaaacttcactgaggtcccaaatgtcttcagtgcccagatgaatccttataactctattgaaaatacatttaaaaagcagttattgatcatgtattgtgatcctggtcccaagcctcacactgtcgtctccttccttcaaggagttaacagttttatgaagggaaacagccatgaaaatgaacagtcgcagctgaagcaggtaaatcaacagtag

SEQ ID NO: 299206 - DNA, 597 bp, Homo sapiens
ttttaatcacttatccaaagatggaggcttttggggggtacctgtgacaaaaccaatgaaatccaaagcactgtcagaaatggaagatcctcgggggtcaattccttcatttcacagatgggaacactgatgtcttcttgcaccgagtcttactcaggtcacacakgcaggagttgggagatttggggctgtaggagaaatgttataacatcatcccacctggctttatccattaacatctgctcatctctgccctcagggagtcgtggagctggttgaacaataccagacagtacgtggagagccttgcattgtgttcaccacctcgctcatttttattcaaaatgattccagaaaatcaatgtgaccatctggcctcggagaaacttcactgaggtcccaaatgtcttcagtgcccagatgaatccttataactctattgaaaatacatttaaaaagcagttattgatcatgtattgtgatcctggtcccaagcctcacactgtcgtctccttccttcaaggagttaacagttttatgaagggaaacagccatgaaaatgaacagtcgcagctgaagcaggtaaatcaacagtag

SEQ ID NO: 299207 - DNA, 573 bp, Homo sapiens
aaataaatagctaatgtaaggaagaaagagctgtgggaacatggggaaaatgcactcaacctaatttgtgtgtcacgtaatcagagaaaactttcagaagaaacacttgagccaatatttaatattgggcaggagttagccaaagaaggagaaccaaaggggaagaacattccaaagcggtagctaaaaagwgtaatgcctctgggaattgaaattattctgtaaagctcagtggatagaaccaaaatgggtagtagctcttcttataaaatgtctcttgggatcattcctggaagttcagtgacgtaggggtggtgaggtgtgtcaactgtttcacagatgttgacaattaccaagagacttggtgaggtctacagaggagaatgctgaattaggtaagttcctgtcatagtcttcgaggcatctgcctttactaaacattttagatctaagcaagagaaacaacagtctttctctaagactgaatgtgaggtcttcccattgaaccgtgaattccttgcgggcaaatgttgattttgttgtcctttaagcacctggcattaggactagcac

SEQ ID NO: 299208 - DNA, 612 bp, Homo sapiens
gtcgtgggagggacctgatgggaggtaatagaatcatgggggtagatttttcccatgtttttctcttgatagtgaataaatctcaatatatctgatggttttataaagggcagttcctctgcacatgctcttttgcttgccaccatgtaagacgtccctttgctcctccttcaccttccgctatgattataaggcctccccagccacttagaaccgtgagtccattaaacttttttctttataaattacctagtcttgggtatttcttcatagcagtataaaaagggagtaatacacatagcatgttttttttatccrtttactttctacttatttatgtctttgtatttaaagtgtgtttgttgtagaaatcacacagttggctcatgcttttaatccatgacctgcaagataatgttataacttgtgctttaataaatcataagtatttcaaagaaatttagataaaatagtcttttatatttacttagatattaacatgtatgatattcttcatttcttccataagattcatttccctttaatgtcatttttcctatacatgaaaaattacattttagcatttcttgtagtataatctagtggtgatac

SEQ ID NO: 299209 - DNA, 520 bp, Homo sapiens
gagatttttgaattaatgaattggtagtttaaactaactatattatgctaagaagtataatggaataaagttgacagcatgcaagaaaagataggtgatgtaagcagacagctgaaaactttaagaagataaccaaaagaaaatgctaaaaatcaaaaccattgtaatagaaatgaaaaagttacagtctttcatgaaattattaaactggatacagctaaggaaaaaaatagtgagcttgaagatacgtctatggaagctatctaaactaaaaattaaaaataaagactgaaaaaggaaacagaaccgtatacccaagaaatgtggaacaatttaaaaaggggtaacttatgtgtaatgggaataccagaagaagaagaaagaamacatgtaggaacagaataaatatttaaaatgataatggctgagaattttccaaaactaatgacaggtaccaaacttcagatactggaatttcagagaaatcaaacagaatatacagaaactaaaagcaaaacaa

SEQ ID NO: 299210 - DNA, 511 bp, Homo sapiens
atgggtcagtaacttatgtatacattaaaaaagagaattaaaaaataaataaaaacaagatcttgtttatatttaatttagctaacagctcttctgtgaaataataataacaatggtctatatgctgattatgccttatggataagtaaaatgaatyacagccatgttataagagataaggaaggtgaggttttgaatattctactataaaccacatgcattatccatgaagtgttttagtatagtagtcttatattagttttaaatgtatatttctaatattagggaaatcactaaagtaaattgaaaatataaataaaattgatatactaagagggaagtaaaaatggagtcataaaaagctcaattacaacctgagaaggcagaaaaagaggggaaaataataaagaaacaaataaaaagggcaacaaacgaaaagcaagtacatatgtagtagttattcatcctactatgtcaacaatgacttcaaatatgactgctctaaatatac

SEQ ID NO: 299211 - DNA, 611 bp, Homo sapiens
gtggctatactaatagcataaaatagatttaaaggttaaaaaatttactactaaaaaagtaacttcatttttaatgaatttaaaattcatggggaggaaataacaattataaaaattataggcatcttacagaggaaacacataaagtgaaaacacaagtttgaatgaagaactagacaatttcacaatagtagctggagacttcaataccggtagagcaagcagaaaaagcacaataatgcagaagacttgaacagctctatgaatccttgctaaccccaacagacatgtgtagaacacttcactcagtgattgcggcatacacattcaagaacacatgaaacatctgtaggacaaatcatatgctaagccataaaacaagcttcaatacatgtaagaaaattaaaaccatcaattgttttctctgaatgcaatggatgaaaagcagaaattaataacaaagaagatgtggataacccacacatatatgaaaattaaacattaagcattctcraataaacaagatatcaaaatgagaattacaacggaaattagaaaatacttgaagatgagttaaattaaaacactgcataccaaaacttacgggatcc

SEQ ID NO: 299212 - DNA, 566 bp, Homo sapiens
agaaattgcggtgctggaggtagaacccatgaatttgtggagctcctaccccacctaagtccgggcccccaggcacctttaccttcaagcttcaccacattcagcccccagcaattcattagttactgtggaaattttcctgcaagatatggactccagcgactactgctctaagttgatcttgactgtaagattccctgcatttgcttgtcttttcagattttagggtggcattttgccccatgaccaccattcttacttggatctaagaaaagataacttgtttctctttgctctggtttctcttgaggaggatggagtgatgctttcagatccccagtgctgaaatcagaagtcctccaactaacaaatatttaatgtgtttatttggtaaccaatgtctattttattttttaacttattttacttctgctaaattttgaatctctacatattttatttcaatatataacaatacctacgtaccagagacatctagaagcakaactcatttaaagagcaagaactagggagacagctgtgatttgccacagtacaggcccacg

SEQ ID NO: 299213 - DNA, 477 bp, Homo sapiens
aatctctacatattttatttcaatatataacaatacctacgtaccagagacatctagaagcataactcatttaaagagcaagaactagggagacagctgtgatttgccacagtacaggcccacggcattctgcttgtttgttaattggtagatgatggaacagttcagtgagtcattgccacactacagacctacragctctcaacactcacaactgtgatacagctagaaaatgttcttagcagtatgctgtgacttattctaaattcgtcatcagcattcaacttaggttttagcacacatatatgtgcaagtaaattttatatatatatatatatatatatatatataaatcatatattaactaactaaacaaaaaaatacaggttcttgtactttaatcttccttttgtaatatacctagaaggccatgattttaacattctggaaggaaactgtcattgcttttttcctctt

SEQ ID NO: 299214 - DNA, 573 bp, Homo sapiens
gggtaacttataatgaaaagaggtttaattggctcatggttccacaggttgtacaggaagcatggctggggaggcctcargaaacttacaatcatatgggaagtcaaaggggaatcagacatgtgctatatagctggagcaggaggaagagagagaaacgggatgtgctacacagttttaaacaacaaaatctcatgagaactcactcactatcatgagaacagcaagcagaaaatctgtcgccatgatccaattacctcccaccactcatcctccaacattgggggttgcaatttggcatgagatttgggtggggacacaaatccaaaccacatcaaccaataacaaagtagcaaagattccagatggaataacagattttaaaaggcaaatgatagaaaagtagtgaacttttattagtctaagacgaaacagactttaagaccaaaagcttttcttgagatcaaacatgaaagtttaattcaccaggaggggagaacaatcctaaacttacctaaacatagtaacataactttaaaatatataaagtcaaaaatgaaagaactacaagga

SEQ ID NO: 299215 - DNA, 626 bp, Homo sapiens
gccagtcttgggttctagactagtaaattggagaagttgcaaaccttgtgacctctggaataatggctggtaatcatttaactacacctacawcttatagaaactcatcctcctaacctggtggtctttcattagatttataaaggcagtatagcctgagggaggggctactatcatttaaactataaactaaatttctcctagttagattggcccaagtccaggaatgaccaagggtagtttggaggttaaaggcacatctctttcactgtcataattttctgactattataattttttacaaagatggtttccccatcatgtcaaacatatcattttttggtgtgttgggaatcattgaattcttcttttctaactctctgaaaatatatgataaagtgttttcaactagagtcatcctccagtgctacagaatactagaacatatacctcctttttccttaattgtccagtttgggaggattttgaccactgacttcaaggcattgtggggacattagtttgccgctagggattgccaaggtagtgaccagccactggctaagagtaaggattcacttgatgcagacagaccctcagcggggattgcttctcagcctcacagc

SEQ ID NO: 299216 - DNA, 510 bp, Homo sapiens
ttttcagttctagcattttccttgaatttttctgagagtttttatttacattacccatctgttcttccatgctgaccactttttccagaagtgttaactttagggctccagcagcccatcctccaggtaagacaatctcagctgtttctctgtgttcacctgtctctgcagatttcaggtgacagtttggcatgagacttcagttctttaatgggcccaagaaaagccattaactttcagtgcattcatattttttcttgttgtaaggagtggagtagctatttctaagattttttatacatcagacgtgaaagaaacatattgtattttttttaatagcagcatttcggctccttacttagtggttgttctttgtgtgcagaaaaccawgcgaaaaaaatgtgaaacatataccttttatttgggcatttgtaatggttctgaggagctgaaattgaagcttagtttcgtattaatacaaaatttcatccattgtactattattgtcat

SEQ ID NO: 299217 - DNA, 510 bp, Homo sapiens
ttttcagttctagcattttccttgaatttttctgagagtttttatttacattacccatctgttcttccatgctgaccactttttccagaagtgttaactttagggctccagcagcccatcctccaggtaagacaatctcagctgtttctctgtgttcacctgtctctgcagatttcaggtgacagtttggcatgagacttcagttctttaatgggcccaagaaaagccattaactttcagtgcattcatattttttcttgttgtaaggagtggagtagctatttctaagattttttatacatcagacgtgaaagaaacatattgtattttttttaatagcagcatttcggctccttacttagtggttgttctttgtgtgcagaaaaccaagcgaaaaaaatgtgaaacatataccytttatttgggcatttgtaatggttctgaggagctgaaattgaagcttagtttcgtattaatacaaaatttcatccattgtactattattgtcat

SEQ ID NO: 299218 - DNA, 548 bp, Homo sapiens
gggaaagctgataatactttctcataagaaaatgataagtattctgttttcctattacaacgggccacagtggtatgagacagttaattctcatctctagcatgtggtctactcaccaaagccatgtctatatatactctgtggcagaaaaattcaaattctgaaagtgctgttgaatggaacagatcagacacagttttgtccatgaggcagcaaaattggctgaaattcaaaagtgccattcagtttcttccagcagctgtgttgtaagatcagactgaccaatttgaatagaagttttggctggaagttctcagaactattctgtgagagaacgtgtggaagcaaccccagagcaattgagacctgcctatgcgatggcaaacagcattttaatgatgcctctcccaataaactccatttggaaataacatttcttctgcctctaaactactcrtattttattgcctgctatgcattcccttgagtctttgcagtgttcacatatatcatcttccctatgaaagagtagacacacatcatcactt

SEQ ID NO: 299219 - DNA, 610 bp, Homo sapiens
actattttccatagaggttgtactaatttacactctcaaaagcagtgtataagtgttccttttttaccacatccacaccaacatctattgctttttgactttttcatattagccattctggtacgagtaaggtggtatctcattgtggttttaatttgcatttccctgatgattagtgatgttggccattttttcttgtttgttagccatttttatatcttttttgagaaatgtctatttatgtcatttgcctactttttgatggatttttttttctgatttctttgagttccatgtagatttcagatactagtcctttgttggatgcatagtttgcaaatattatctyccattctgtgggttatctctttattcttatgattatttcttttgccatgcggaagctttctaatgtaatgaaatcacatttactttttttttgtatttacttttgaggttttaaaattatatctgtttttaaattttacataagggatatttacagtatgtgctcttttgtgtctggtctcattctctcaacatcatgtatatgagctcatcaatattcctgtatatagttattcattacttttcatttatatatggggtt

SEQ ID NO: 299220 - DNA, 621 bp, Homo sapiens
tttgttatggttttgcaaaaagccttaaatgattttttctgtttgaaaaaataaaattatattattttaaactcagctttttccaaaacacataattactattaatttttgtgatttgtaagaagtcaaaaactgatttaaatgattactgcaataaaaaagaacaagaaatagtttgctgacctaaaaatgctgagtaaaatataattgaatataatgtatttttaaatattttttatgaaaattcaaggcctataggaaagcagatggaggtattgatcttgaatatgaatgaattattcatattaaccctttttacagccaatataataatgagaggtgctgtaattaatgcaatggtgttatgtctcagagaaaatgctatgatataagcattttaagatatacgatatagaatcctaaagaaaaacacataaactaaagttgttctcaccyatttctctatttattcccagaatatacataaaccgtcatgaaagaaaaagaaagaaaaagagcccatgacagtaagtgtgtgaaattacgatgtcatagaaatccgtatttggtcttagtcccaggttcctgggtagactgcctaaaacccttgtaatttgctaa

SEQ ID NO: 299221 - DNA, 574 bp, Homo sapiens
atattattatataataattacataactaactcaacaagaatttacaacaattatgaatatgtatgcacccaaaacaggtctagcaagtattactagacctaaaaggagagttagatagaaatacaataatggtaagagacttcagcttcacattttcagcaataaacagatacttttagacagaacattaataaagaaacaacagactcaaactatacgatagatcaaatgtacctaacacatatttacagaacattccatctacagctgcagaattccaagttttcttaactgcatatggamcattctcgagggtagattacatattaggccacaaaacaagtctaaacagatttaagaagatggagataatatcaagtatcttttatgaccacagaagtataaaactagaaattaacaaggaagacttcaaaaaccttacaaatacatgaaaattaaacagcatcctccacattaaccaatagatcactgagaaaattaaaggagaaatttaaaaatttcttgaaacaaatgataataaaaacacatcatactgaactgtatagaaaataaa

SEQ ID NO: 299222 - DNA, 559 bp, Homo sapiens
attgtagcactatttccaaaagccaatttatggaattaacccatgtatacaaccatggatgaatggagaaagaaaatgtggtgtgtgtgtgtgtgttccatatatacacacatatatatgtatacacacatatatgtatacacacacatatataaatacacatatatgtatatatggaatggaatactattcagctgtagaaargaatgaaatcttaccatttgcaacaacatggatggacctgaagaacattatgttaagtgaaataagccagacacagaaaggtcacaagatctcattccatgtagaatctaaaaaaaaaaaaagttcatctcatagaagcagggagtagagcgaggcgagtagggagggaaagatggagagaggttggtgaatgaataaccattgataattacaaggaataggttgtggtattttactgcacaatgtgatgaaaatagttaacagtaaggtattatatattggaaaacagaaacgagaggattttgaatattctcacctcaatgaaatgatcaatgcatgaggtgatggatacact

SEQ ID NO: 299223 - DNA, 559 bp, Homo sapiens
attgtagcactatttccaaaagccaatttatggaattaacccatgtatacaaccatggatgaatggagaaagaaaatgtggtgtgtgtgtgtgtgttccatatatacacacatatatatgtatacacacatatatgtatacacacacatatataaatacacatatatgtatatatggaatggaatactattcagctgtagaaaggaatgaaatcttaccatttgcaacaacatggatggacctgaagaacattatgttaagtgaaataagccagacacagaaaggtcacaagatctcattccatgtagaatctaaaaaaaaaaaaagttcatctcatagaagcagggagtaragcgaggcgagtagggagggaaagatggagagaggttggtgaatgaataaccattgataattacaaggaataggttgtggtattttactgcacaatgtgatgaaaatagttaacagtaaggtattatatattggaaaacagaaacgagaggattttgaatattctcacctcaatgaaatgatcaatgcatgaggtgatggatacact

SEQ ID NO: 299224 - DNA, 559 bp, Homo sapiens
attgtagcactatttccaaaagccaatttatggaattaacccatgtatacaaccatggatgaatggagaaagaaaatgtggtgtgtgtgtgtgtgttccatatatacacacatatatatgtatacacacatatatgtatacacacacatatataaatacacatatatgtatatatggaatggaatactattcagctgtagaaaggaatgaaatcttaccatttgcaacaacatggatggacctgaagaacattatgttaagtgaaataagccagacacagaaaggtcacaagatctcattccatgtagaatctaaaaaaaaaaaaagttcatctcatagaagcagggagtagagcgaggsgagtagggagggaaagatggagagaggttggtgaatgaataaccattgataattacaaggaataggttgtggtattttactgcacaatgtgatgaaaatagttaacagtaaggtattatatattggaaaacagaaacgagaggattttgaatattctcacctcaatgaaatgatcaatgcatgaggtgatggatacact

SEQ ID NO: 299225 - DNA, 561 bp, Homo sapiens
caaatgtatatgtgagctacaaaaaagctgctgcttcactttgacacttgaactgtcccagaagaatatctcctgtggcccactgtaaccagaaacacacagaaagggtaattcttggaaatacaatgcagactagccaaataaacatttgagaaaacctcaacagtttgcaaataattaccaaattgatgatatatataactaaatgtttcagttccttttggctgctatagcaaaacaccttagactgtgtsgctgataaacaattgaaatttatttctcacagtactgaaggctgggaagtccaataaaaaatacaggcagattcgatatctggtgagggctgctttctggctcatagatgataccttctagctgtactctcacctggtcaaaaaaacaaaagagctccctggggtctcttttatgaggggattaatctcacccatgagggttttgccttcattgcctaatcacctttcaaaaggctccacctcctaatccttcattggagctaggatttcaatgtattcatttcatgggaacacaggcattcatatc

SEQ ID NO: 299226 - DNA, 561 bp, Homo sapiens
caaatgtatatgtgagctacaaaaaagctgctgcttcactttgacacttgaactgtcccagaagaatatctcctgtggcccactgtaaccagaaacacacagaaagggtaattcttggaaatacaatgcagactagccaaataaacatttgagaaaacctcaacagtttgcaaataattaccaaattgatgatatatataactaaatgtttcagttccttttggctgctatagcaaaacaccttagactgtgtggctgataaacaattgaaatttatttctcacagtactgaaggctgggaagtccaataaaaaatacaggcagattcgatatctggtgagggctgctttctggctcatagatgataycttctagctgtactctcacctggtcaaaaaaacaaaagagctccctggggtctcttttatgaggggattaatctcacccatgagggttttgccttcattgcctaatcacctttcaaaaggctccacctcctaatccttcattggagctaggatttcaatgtattcatttcatgggaacacaggcattcatatc

SEQ ID NO: 299227 - DNA, 540 bp, Homo sapiens
ttttacccaaactgacctgtcctggattcaagtagattatgctctcaactacagttaaatgttgcaccaacctggaacaccctgtcttccttactcatctggcttgtttcctccctctgcacttctgtccacatgactctctgacatgtcatccagccccatggttttaaatgctgtctctatatactgatggataccgtattttcagctgtaggattaacctattccctgaattccagattcaaacccactgactacttcattatacatgtatgtgtcatagacatttcaaaccaaacattagagcacacacacacacacacacctttcctcattctgcttcctaccatgaacttccctccatttcaataaatgcctctaccattggacactccaaaacaayggagagcatcttgatgtctccctttctctcacatagatcagatccatcaacatgtccggtcttttctgtcttaaaattgtatcctaactatgccttctacttagctttattcatgacaccttggtctaggacacaag

SEQ ID NO: 299228 - DNA, 592 bp, Homo sapiens
ctgagttatagtcaattcatttttttctctgaatcctgatatataccatttttatatataccttatatatacaccatttttgaaagaaagcaaagcaacttactatcccagttaaaatggctttgttaaaaattacacaaaaaaatagcggcttaaaacaacgagaagatttatttagctcagagatctccagctggagcaaggctcatagaagatagcttgtttctgctccatggttggtagctggggctggtgcaaggctgccctgggaggcaggcagcctcacatctgcctcactgtttttcagggattccacacactccatccagtttcaagaggaatagaaataaactccatgtcttgatggggaatggaaaggcactggaagagcacatggaaacagaaatattactgtggtcatttctggatgatataatttaccacatctgccctctggccactacaacttaatggcagtcttcccacttgcaacactcactcatctgctcttcaaaatttcatctyattattgctcaaggcgaagatccagcacagatgcaggtgtggccaaggcttctcaaaaggcttctca

SEQ ID NO: 299229 - DNA, 592 bp, Homo sapiens
aaaaacaataacgaaatggcaatggtaagttctttcctattagtaattactgtaaatgtaagtggattaaactccctaatcaaaagacagagtggctgaatggattaaaaaacaagatccaactacatgccrtctacaggagatttattttttgatataagcctgacagtaaaaaaataggaaaagatactctagacaaatggtagccaaagggagcaggggtagctatacttacacaaaattgattttaagttaaaaatggtcagaagacatgaagtaggacatgatgtaatgataaaagggtcaattcaccaggaagatgtgatgtaataattataaatatataggcagctaacattagagcactcaaatatatgaataaaaccttgacagaatttatgttagaaatagatattaacacaataatagtaaaagacctaaaaaattgcctttttagtagtggtaggtcagtgagacagagaatcaataagaaaacaaaggggctgaacaacactctacaccaatgtgacttaataaacatatactgaacacttcacccaacaacatcagaatcatctgcacaccaggttag

SEQ ID NO: 299230 - DNA, 592 bp, Homo sapiens
aaaaacaataacgaaatggcaatggtaagttctttcctattagtaattactgtaaatgtaagtggattaaactccctaatcaaaagacagagtggctgaatggattaaaaaacaagatccaactacatgccatctacaggagatttattttttgatataagcctgacagtaaaaaaataggaaaagatactctagacaaatggtagccaaagggagcaggggtagctatacttacacaaaattgattttaagttaaaaatggtcagaagacaygaagtaggacatgatgtaatgataaaagggtcaattcaccaggaagatgtgatgtaataattataaatatataggcagctaacattagagcactcaaatatatgaataaaaccttgacagaatttatgttagaaatagatattaacacaataatagtaaaagacctaaaaaattgcctttttagtagtggtaggtcagtgagacagagaatcaataagaaaacaaaggggctgaacaacactctacaccaatgtgacttaataaacatatactgaacacttcacccaacaacatcagaatcatctgcacaccaggttag

SEQ ID NO: 299231 - DNA, 592 bp, Homo sapiens
aaaaacaataacgaaatggcaatggtaagttctttcctattagtaattactgtaaatgtaagtggattaaactccctaatcaaaagacagagtggctgaatggattaaaaaacaagatccaactacatgccatctacaggagatttattttttgatataagcctgacagtaaaaaaataggaaaagatactctagacaaatggtagccaaagggagcaggggtagctatacttacacaaaattgattttaagttaaaaatggtcagaagacatgaagtaggacatgatgtaaygataaaagggtcaattcaccaggaagatgtgatgtaataattataaatatataggcagctaacattagagcactcaaatatatgaataaaaccttgacagaatttatgttagaaatagatattaacacaataatagtaaaagacctaaaaaattgcctttttagtagtggtaggtcagtgagacagagaatcaataagaaaacaaaggggctgaacaacactctacaccaatgtgacttaataaacatatactgaacacttcacccaacaacatcagaatcatctgcacaccaggttag

SEQ ID NO: 299232 - DNA, 576 bp, Homo sapiens
taataagcctgggtagaagactactatataaatatttcaatccttggttgtatgcggtatggaaaacacagtaacataaaattcactaatctgctatgtaatgtttatgtggatccagatgaagctgtgtcttcactagataatttatcaagtttactgatcttacagtatcatttactaagttatcaccgaatagaatgcacagacttaggacaaatctccagggtgcaactgcatcagtgcccatgattcttttgtagcacaatcatgcataacagcctcagaaagtggaagcgtggggtcagtgactgaagttgtacttcctcttgcttataccttagttatagtgagacagtgctgtgcaccattaaagagtttgcacacatcawtgtatcactaacaccattgaagttcttgcatttttaattattcatacttaaagaaatattacagaatcctgagccgtttccacaaatgtagaagctagaatgtaaatgacactggactggaaattttgtctgttttgcgctttgctgtattcccagtgcctacaataaggactgatatcataaatga

SEQ ID NO: 299233 - DNA, 576 bp, Homo sapiens
taataagcctgggtagaagactactatataaatatttcaatccttggttgtatgcggtatggaaaacacagtaacataaaattcactaatctgctatgtaatgtttatgtggatccagatgaagctgtgtcttcactagataatttatcaagtttactgatcttacagtatcatttactaagttatcaccgaatagaatgcacagacttaggacaaatctccagggtgcaactgcatcagtgcccatgattcttttgtagcacaatcatgcataacagcctcagaaagtggaagcgtggggtcagtgactgaagttgtacttcctcttgcttataccttagttatagtgagacagtgctgtgcaccattaaagagtttgcacacatcattgtaycactaacaccattgaagttcttgcatttttaattattcatacttaaagaaatattacagaatcctgagccgtttccacaaatgtagaagctagaatgtaaatgacactggactggaaattttgtctgttttgcgctttgctgtattcccagtgcctacaataaggactgatatcataaatga

SEQ ID NO: 299234 - DNA, 571 bp, Homo sapiens
aacattataacagagttaaatgactttttaaattcattttttaaaataaggcaatccattcgcaatatttagtaattaattttttgatgaattatttaataaataaattataatcaatgagtttaatgctgtcaatctatcaaaacactatagttagaaccagtaccataaggggcrtaaaaactgtaacacattgtcttgctctcaaggtaatgatcacctagtagacagaaaagttcaccagtgcttacaacactaggtaaagtaaaagtgctcaaaagaggcataagccaaatgcagagttggaagaggtcacatttaactggggagattacacaaatcttttaaaagaaataaaatttgaaattgtcctataattatcatttacatttcgacatggggtaaaggaaggggtgatatagatcatttcagattcatgaaataacataaagaagagcatgattttagaaatgataagacactttcaggaaatagcaaaaagtgtgaaactctttcatgagattcagatctccatctatacctcccaatatactttattcaaatggatgac

SEQ ID NO: 299235 - DNA, 568 bp, Homo sapiens
aatgcacaaatatcaaataactgaactagagaaattaaatgcaaagactagtacttggttaccctggcaacttaattgaatatttcacattactcttgggtcagtcaaaaactatacaaartgtatttccatgtattttctacagaatatttttgagaataatctcaagatatagagttttccaacgcttacctacattcttaagtgttttctttgttgagttcataagaaatatacatataaagagaattgaacaagttgtagtggataacaatttaagattttgaaatatattttcagaatttcaaggtacataggcccaaagcatttatattttcagtcacattatgcatatcaaaaatacatattttaagaataagacgtttgtatgtaaaagatgattcgtaaccctaggcacacaacctactcaatgtatccactcaagggatcctgttaagaaaaggctttctgtcaaaagccatacataaacacacacctcatcaaaacatgattataaaagcacttaggctctgcatttaaaatgtgaagttggtggttgatcagcaca

SEQ ID NO: 299236 - DNA, 586 bp, Homo sapiens
aatattacaaatcttaaaagaaaacagaaggaagatggaggtggtgacaatgtagattttttaacattcttaaatccctctgaaaatgagaagagtggtttatacataaaatattaaaatatgggcaacatctacaacaatgaccacacaaaaggaggtaagatagctatacacaccccaatgtgcttgcttggtcaagaagaaaatacaagtgaactctataggcctkgcatggcattagcgtctgagtggaggaagcagagagaagcagagaagcctctcacgactatggaagaactaaataaagaaaaactaatcccactaataggaactctctggagtgtacaatggactgatttgagaacaaaagatgaaacttgaagtgtttttgtttcaaattaataccagagtgaaaggggtctctgataaagtctgaaggtgctgggaccatctgagtcctgtgagcgcttccaaagattccttgcaggacaacgataaaacaaaacagacaatggaagcaattgcagcatcactggagtgagtgaacttactgtccagtcaaagctttcttcagaacaaagccctg

SEQ ID NO: 299237 - DNA, 612 bp, Homo sapiens
cattcttattgacaagctgctgaatgcatggagagagtgctcagaatgtcaaaacctgcttcctatttgtgcagaccaagaccaaactgttcttgtaaaaccagtcaggtgaggtccagaagataaaccatgcttgactctctccaaaggatggctggattcagaggctctcttagggacgagcttgtcttacaacgggataggacaagagaaggccccttaactgtgactggcagcaaactcaaattcatgtttcatttcaggaactttctccagagcagacaaagaattgcagaaggccctcctcccatcccactgtaaattaaaatgtactaataaaaaagaataaatcactaaaagttagacagaaaaatggaaaaagcagaaagaagagaggttctgaataaatgtaaaatatggccctgaaatggaaagccagcttatgatgatgcacgatttcttgttttctcttcagaggaaagaaaaccactttgcaacgataaactactaacyaaggtacaatcccatctcctgtactctgtgttcacgatgtgtattaacacatttcctcctatattttcaaacagataagcctggaaaaaggaagaacaa

SEQ ID NO: 299238 - DNA, 611 bp, Homo sapiens
agatctgaatgtaccttaacacgtcagtttctatgaatatgctcatgattcactttctgggaatctgcctgtgtttctctcatctcaagagcaacaattacttctmatgaagactctagggcaggagtcagcaaacaatttccgtaaagggacagatagtattttaggctttgcaggccaggagtacaaattaagaatagtgtgaaagtattccacacatttccacacattttactgacaaaattttaatatagtagtaatgatagggtatactttttaaatgtaatacaggtctactaatgagaagaatggattgttgtgggggagagttgacattttgcctaattagagttcaaaggtagcatttcttatcaaaaaccattctgagctcaagggccatataaaagtaggcagcaggctggatttggcccacaggaccatagtatgtcctagaagggggctttgctcaaagtgtgttcttgggagcagctgatttcatgtcactgcggtggcctcttagacctgcagagcccagactccaccagaggttctcaggctcatctgatcaaacctgtgcttgcctctgttgcaacgttggtttagtggtcaaa

SEQ ID NO: 299239 - DNA, 609 bp, Homo sapiens
gcaatttcatattatacaacctcattgatgaatgaaagtgaatttaatcatttcttattttcaattttcaaatatattgaaagtgcacacctaatatattcgcaaacataatgtataagaagaaaaagaatcatgaaaatttgatagacccagtgcattgatttgtgtgacagtatactgatattagtaagaaagtggccacaaattatgttgtaattctttatgtccatacatattaaatccctggagtttcttttttaaaaaccataataggccgggtgcagaggttcacgcctgtaatcccagcactgggaggccgaggcaggcggatcacctgaggtcaggagctggagaccagcctggccaactggcgaaaccctgtctctactaaaaatacaaaaattaactgggcgtggtggcgggcacctgtagtctcagctactcrggaggctgaggcaggtgaatcgcttgaacctgggaggcggagcttgcagtgagtcgaaatcacgccactgccctccagcctgggtgacagagcaagactctgtctccaaaaacaaaaacaagaacaaaaacaataaaaaccataatatattttgaagagagcta

SEQ ID NO: 299240 - DNA, 569 bp, Homo sapiens
aaatattttaattcgatcactgacaaagtcataaaattcaatgactgtttgtagaggaaaacatgctttcattatcttaattaaagcaagataagcctctctcaatgtgcatgcattttggagccactgaatggactggtgatgagacgaagcaacctttaattgggaccatgcttctccagtacattcgtttgtattccatggtgtaaacckggccttacgcgtggctccgaccttcggtggaaatgcatttgcgtagcaccacccaggggctcccttgctttggctagagcctcataaaagaccccaggttttgcgaaggattttgaacaccagcgtcttttaacatgtggaactttcggttttggtttagctctgtgaacgtatttaaaacttgctacattattccacagtgaaagttggaacctttttaagagttatcatagagtgccttttaacatctgtcatattttctataaacaacttttcagtgagaagcgtatatagtgtactcgaggtaggcattagctgctggcaaggtttatgatacaatagtgacactacaggac

SEQ ID NO: 299241 - DNA, 569 bp, Homo sapiens
aaatattttaattcgatcactgacaaagtcataaaattcaatgactgtttgtagaggaaaacatgctttcattatcttaattaaagcaagataagcctctctcaatgtgcatgcattttggagccactgaatggactggtgatgagacgaagcaacctttaattgggaccatgcttctccagtacattcgtttgtattccatggtgtaaaccgggccttacgcgtggctccgaccttcggtggaaatgcatttgcgtagcaccacccaggggctcccttgctttggctagagcctcataaaagaccccaggttttgcgaaggattttgaacaccagcgtcttttaacatgtggaactttcggttttggtttagctctgtgaacgtatttaaaacttgctacattattccacagtgaaagttggaacctttttaagagttatcatagagtgccttttaacatctgtcatattttctataaacaacttttcagtgagaagcgtatayagtgtactcgaggtaggcattagctgctggcaaggtttatgatacaatagtgacactacaggac

SEQ ID NO: 299242 - DNA, 617 bp, Homo sapiens
atgggacatcgttttaaaattctggtcattacaacgaaccacttttgaccttggttgacttttctcagaaycataatgcgaagtaaagacaaaaacaatgagaaaaggcaaagagatcaaattttggttttctctttttcagtaggatatgatgtttatcgaaatttggaaacaaattgtagcaagcacctataacatgtagatactcatgtttttatattaaatatgacattatttataaaaccctgtcgtcctccaaattccctttggatttttagtggtaagaagtgtagagcctaagatgactgcttttcatttcttcaagacaagggttcagctggtattggggaaacaatctttgtttgttcctgtctgctcaggaggactgtttctaattgatctggcatggaatttagttggagatgtgtatgttgcaactgaagcgcagagcctgtgtgctttgtaaagtgataaccatatgggccttatttgaaacatttgaggattttcgacattaacctgggttaaattgagctataaattcaactcaaatgtatatgtcctgacaaattcatcatcactttggatagattcaatccatgcttccctcagattaa

SEQ ID NO: 299243 - DNA, 555 bp, Homo sapiens
agactagctcttttttaaaatttagaaaatactttagcctctttcagaatgcctttttcatcttatgttgaaacagtgttctcatttgcattgtagattgtataagctgttataatgggcttctctttaatggatcctaactccttattgaatgacatcagttgttttgctcaaggtatggtgataggttagagcaatcagccaaaaccatttgtgtcaagtaaatggaattactaagaagtactaaaactcccacgtgagtatgggtgacctattaggtatgtgttaatatccttatcatatgttttactcaccgtaatttcaatgattttgcttgaaaatgtaaatcttccacccagccctttcagaactcactatgtaaactgaccctgcaagaaattcagtttaatctctacccttccatcayccagacaacatctatacacaaaaatgtgtaggacaaagaatcagaactgcttgaaaaaagaacaacaatagcatgcttcaaatcagaggcaaggaacactcctggaaattcatgaggcaagtgacggg

SEQ ID NO: 299244 - DNA, 594 bp, Homo sapiens
cataataggttgtttttttggtggggagaggggaagagtgaataattcaaaatgagtttattttgaaaatacccttgcaataaataygtgatcacttttgagcttctttgcagaattttattagacactgtatacacccctgcgtcttccagacactatttttcaactcaggttgtctcagtcgttgcctcccactgtctgttctgctcagtgcctcaacgtagtcagcacatcgtggtcttttcattcacacatttcctttcctgaccattatttatctaagggacaccttgtatggctcttgcagattcctgatagccttttcctgtgatgcttgtacagaattcaagcattaaattcattttcatgaaaaacaatgaaatgcaaatttaaaaaaacccaaaagaaacaaatctctgtgttcaatgaagattacagctttactctttctatatacaaatgtatatgtttgcctatagagattgcatttggagatttctctaaaaagtaacttcacataagatattcatgacaactgagtctgcattgttctccatttcccagcaagctttgtgacttttcggttgcagcagc

SEQ ID NO: 299245 - DNA, 600 bp, Homo sapiens
gctcatgccgaaagcccttcaatttttaacataaagcattatcactatcctgccatcttcacttccttcttttgcaatgacttgtctctgaaggatgtgacttttaacaaagtactgtgattacacttaaggacgtgaccctgttttctcttatattgcagatttaaagtccttatgataagtagtgggaaaagcataaaaacaagtctttcttttgatgttgtcttgactactgcaattacctggtctgcatcctattttccctcctcctcctgactcgcctggcctacacgcatgttttcttgcagacaacgtgcccaccacatagcatacattgtctcatgtrgtcctcataacaacttcacaagtcgttactattattttcctcattttaaagatcagtacattgaaaagtaagtaatttgcccaatgtaagtagaagagccaggattaattacactttttccagagcccaaacactaagaatgacacatatttctaggaggaatagaacctgctctgatcatgttagttacacccatataaaatcttacacacacacagaactatgaactagagtttaatgaaagagcaatgcct

SEQ ID NO: 299246 - DNA, 607 bp, Homo sapiens
ccacttgaaacaccaagggtcaccattatcaccaacaaactgaactgttatcaaataacaatttcatgtcatcctggggttaaatctgccacacaagaagtaatagtcctctatctgcttctcttaagatattaagagaatcaaatgagatagaatttaaactttagagkgttagagtttattattaatatctttcatttatctaaccaattattttcttctagttcagcttacgtaggaaaaattcaaaataaatataatgtaatgatttgtgtgaaatgatgctaaaatcgttcggctttgtcttaaacatttatctaataccaactgtccagatccaaagatgaaaaaaaaaacggcatacaggatcaggatttataaatggttcttttcttcttgtggtaatatgttatgttgagccattccagttcattcaacaactacttcttttacttggtaatgaaaatgtgcacactgactgagggtaacgtctctgactagggaagtagacacctccaaaagtggcctacatggggtttgatgtgaagccttaatttattgcactgtcacttaaacacatagtacaatgtttttgtaactgttaatt

SEQ ID NO: 299247 - DNA, 614 bp, Homo sapiens
ctttcggctgctggtggtttgtccccacctacttgtactctgatgtgtgtggggacatgttatcatctagctttgtcgctaatgttgtctagggaattttggtttggggatttaattgttctctctcctttgatgtgtggattgagagagactgaaaaaytgtactgctcctgccaccatctttctaagagctttgaataaacttcccgtctcaataattcatgagaacctcttcaattgtcccacaagtccagagtgagagcccattgctcccaaatatcctcctttctaaaattctaacagtaagggattaatttggaggtgactagcaggctttaaagacaccgatatctttggaatggttaagggggagtaatcagtgtatgagtaatcactcatacactggagggaattattttcagggagattttggtttacttaacccatagtcaagtgacattaagagatcagggtgaggtggacatgagaaaattttggagttgggacactggtaggggtccagcttctgggcacacagtggacaaggagtggggattcttagataggcatggagaaatcagacacactttactttgaatcttgcctatcctcag

SEQ ID NO: 299248 - DNA, 614 bp, Homo sapiens
ctttcggctgctggtggtttgtccccacctacttgtactctgatgtgtgtggggacatgttatcatctagctttgtcgctaatgttgtctagggaattttggtttggggatttaattgttctctctcctttgatgtgtggattgagagagactgaaaaattgtactgctcctgccaccatctttctaagagctttgaataaacttcccgtctcaataattcatgagaacctcttcaattgtcccacaagtccagagtgagakcccattgctcccaaatatcctcctttctaaaattctaacagtaagggattaatttggaggtgactagcaggctttaaagacaccgatatctttggaatggttaagggggagtaatcagtgtatgagtaatcactcatacactggagggaattattttcagggagattttggtttacttaacccatagtcaagtgacattaagagatcagggtgaggtggacatgagaaaattttggagttgggacactggtaggggtccagcttctgggcacacagtggacaaggagtggggattcttagataggcatggagaaatcagacacactttactttgaatcttgcctatcctcag

SEQ ID NO: 299249 - DNA, 594 bp, Homo sapiens
catcaattcctagtttcagaatatattccggtaaccctgcgaattccattagtgtaaataccgaaggtttggcaacacgcgtgcatcagtacacatcagcatgaatgccacagtgattttcagcggtactcagcttcgtcccaatcagaaggctcacttaacaattctgctcagaaacaacgaggacaaaaagcagctcggatcaaggataccatttgatttgcctgcactaataagtgccataaattatttaaggaacttcaaagtcttgaaactggtgaagtacaccagggcaaaagtagaatttgtttgtttattatcaattatttacacaatatgttttacaacatcagatgtgtagaaaaggcataatcctgagcaatggtgcacaataaaaaatagattatgttaattctggtgaaagctttttaacgtargccatgaagttgtggacgccatttgatgcagtatttataaacgtttcaataacaatctcaataatactgaactctgaaaaccattctgaaatacatttctatttatgatacctgggtgagtgcacacataatttcttttttaaaaaatttcaacttt

SEQ ID NO: 299250 - DNA, 543 bp, Homo sapiens
ccccttgcccccattttcaatgtgtttctttgtgtgggcaaaacgtgaattatgccagggttatttcactgatcataaattgcccttaattkttttcaataaaaaatgttatttagtaagacatagtataatgggagaaaaaaaagaaaagtcagagcttggaaacaatctggacatttacatttgacccctccaggtaaatgtggttctcaaatttccactggtctgttaattgtcatgggagtacagttataaacggattactggcttccgtcgtcctgtaaaccttgttgcagcactctgctatcatgaaccacatgaaatgaggtacttagaggacgtccaattctaacctcactgaatgaggagccagaaattgtacttgtatccggctgttagcgcaaggtttcagacgggaggtacgcagaaagaacagtgcatacttgtttcaaatactggtgggctgatttttacacacagttttctgtagttatctgagttgcttatatgtcagagccacaccagaaatccttaagaaggtac

SEQ ID NO: 299251 - DNA, 543 bp, Homo sapiens
ccccttgcccccattttcaatgtgtttctttgtgtgggcaaaacgtgaattatgccagggttatttcactgatcataaattgcccttaattgttttcaataaaaaatgttatttagtaagacatagtataatgrgagaaaaaaaagaaaagtcagagcttggaaacaatctggacatttacatttgacccctccaggtaaatgtggttctcaaatttccactggtctgttaattgtcatgggagtacagttataaacggattactggcttccgtcgtcctgtaaaccttgttgcagcactctgctatcatgaaccacatgaaatgaggtacttagaggacgtccaattctaacctcactgaatgaggagccagaaattgtacttgtatccggctgttagcgcaaggtttcagacgggaggtacgcagaaagaacagtgcatacttgtttcaaatactggtgggctgatttttacacacagttttctgtagttatctgagttgcttatatgtcagagccacaccagaaatccttaagaaggtac

SEQ ID NO: 299252 - DNA, 486 bp, Homo sapiens
tatcactcattcaacagaacatcaaggcttggccagctgccaataaaaatctctttaaaaaaatcataggttgcaaggagccactaagaaaattaatttctracacagtgaaaagacaaaatatattatgatcatgttatcagcctcaaaatgcattttctgaaatgttgttatgtgcctggacgtatttaatcctcacacctgcaaacccagagaacagattgcaagttcattacactgtttgcagcctttaaaggattttttttcctagagataatatgtaacaaatatttcagttgaaataatgaaaatatcaatacttgtaataaaacttttctttaaaaaaggaattaaaaaatgaaaatgagtgaaataaaaatgtttttcccttccctttagacattctttcaattagaaaggagaccaaacttaaattatagctaccaattaatttttctgctctggaaagtgaaataagcatctttc

SEQ ID NO: 299253 - DNA, 499 bp, Homo sapiens
ctcctccaaacttcattcttcacagccttcggtataggctgtcggtcttcctattttgaaacttcctggccacataggattatatccgtgcacctgaccttgatacttttccaaactccataaccatggcttccactcccattcctcatctttttattggttcctaattgaaagctttactcaaattttagtccttaagtccttgttcttttatctctttccagggacaaatttattctcaaggtttaaccacaacttcctactaaatgcacatcaccaaaaattctgatgtgttttccctgaactcttgtcacaaatcttcaagtcctactgaatgttcactctgacattgcattgtcatcttagatgcatgaaggtgggagccaaggtctgtcttgatcacttccgagctgtaggtgtccaagtgctgcctcttaggtgctgaacccttatrtgtgtggcacatcataaacatttgttgactccataaatattttaa

SEQ ID NO: 299254 - DNA, 597 bp, Homo sapiens
atcatgtcatgcacgaacagagacagtattatttcttcattcccaatccatatacattttatttgcctttcttgtcttattgaattagctagtacttcaagtacaatgatgaaaagcagtggtaagacaggacagcctggctttgttcctgatcttagtgggaaagcttcaagtttctcactatgaagtataatgttagctgtaggggtttttttgtagatttttaaattttattttttatttatttttttagagatgggggtctagctatgttggccaagttgatcttgaactcctggccccaagcatcccacccttcttggcctcctaaagtgctaggattacaggcatgagcctgtaactgtgccagctcccccctccacctttttttgtagatttttaagaattgagaacatatctcactgttcctagtttactgagaggttttcattatgaataggtgttagattttatcagatgtcttttctgcatctatgaaaatggtcatgtaaattttcttctttagcttgtcaatgtgatggattacattaattgattgtcgaaccagccttrcatacctgggataaaccccacttg

SEQ ID NO: 299255 - DNA, 568 bp, Homo sapiens
gttaattgctgacaaagaaagttgcaggtgggcatggaaagctggagaggggttcaatgcaaagtttcttaaaggcttaaaccaataaaactcgaatcccattcctcattctccaaggagcccactccattatgaaaaagaacttcaagcaaatttgaatctttcttcactgagttctaacatactccagacctgtattgtggaagctcttcctaaagtccatttgtgtggaatgactgcgctgctatatcccatcgtgggcaaaggatacctgctatgaagggcgaactggcatcaagcctaagtcttcattaagagcaaggtaagaccattaaaatgtgtttttatttctgtatggccatgtattccacattcgccagcgactaatgaggaagataaaataraaagcagctccccttctgtgaggtgtccattcaggacattgcagggcctcattaatgaactagtgctgtaataaagcagaaatatacaaatggcagcactgacacccataagcccttcctctggcaggtgctttacaaacagtaagggaactgactctcctttt

SEQ ID NO: 299256 - DNA, 454 bp, Homo sapiens
accctttcactctgaacaggtagtgtgcaaggaagatccctgtgtgtctcccagtgtagctctgtgagtagtttacccaacytaagcagacgacatcctcaccgccagcagtaaatactcttctcgacagcacgccactttggcaaaacactcaagtgagcagataggagccgcaatgcaaacagtgtttcgaggctcagtgtaatatgtgagttttatcaagggatttgtaagaggagtaggcagccgttgctggcattgctatcacagggataaaggaagtaagtgaagagtgccaaagcacagtatttaggaagtcatagtaataataataataataataataataaaatgtggagttcaaggagctgcaataaaaggaaaagagcttcagtcttaaaactagggctcctcgattcatgaaaatgacaaatgcaaggtggaaaacgcacat

SEQ ID NO: 299257 - DNA, 623 bp, Homo sapiens
attttctgtaaatgaatatatttatcaaaatctataataagtktacagggtccattttaatgtttgcagataatgagtttaagagcaacctggaaaatgtcaatgatctcttctatagaggacaattggtgagccatcacagcacagggctgtcaattactcactccgccttgctaatttcaataccgtggccaacttgagatattaggaaagctaattaacctctgtgtaactcaatttgccaatcagagaaagctgcaaaattggatcattctctcaactgcacttttccatctcacaaggacaggtgctcactgacatcagaaaacaaagcattagagtcgtgacaaggtggggagaagaaaatccggccaaaaacaggcagcatgtcttggccaggtgaggaacagctgaactttctgctttccaaattgttgaccttcagtccatgttgttcttccctcctcatggactgtttataagctggtcctttcaaaagcatcagaaagagatggaagaaggaaaggaaactagcatttgtcaaaatccagatttcagaaagaagatggttaacctttggtgcagcaatatggtgagaaataataagacacagaagccaggag

SEQ ID NO: 299258 - DNA, 623 bp, Homo sapiens
attttctgtaaatgaatatatttatcaaaatctataataagtttacagggtccattttaatgtttgcagataatgagtttaagagcaacctggaaaatgtcaatgatctcttctatagaggacaattggtgagccatcacagcacagggctgtcaattactcactccgccttgctaatttcaataccgtggccaacttgagatattaggaaagctaattaacctctgtgtaactcaakttgccaatcagagaaagctgcaaaattggatcattctctcaactgcacttttccatctcacaaggacaggtgctcactgacatcagaaaacaaagcattagagtcgtgacaaggtggggagaagaaaatccggccaaaaacaggcagcatgtcttggccaggtgaggaacagctgaactttctgctttccaaattgttgaccttcagtccatgttgttcttccctcctcatggactgtttataagctggtcctttcaaaagcatcagaaagagatggaagaaggaaaggaaactagcatttgtcaaaatccagatttcagaaagaagatggttaacctttggtgcagcaatatggtgagaaataataagacacagaagccaggag

SEQ ID NO: 299259 - DNA, 623 bp, Homo sapiens
attttctgtaaatgaatatatttatcaaaatctataataagtttacagggtccattttaatgtttgcagataatgagtttaagagcaacctggaaaatgtcaatgatctcttctatagaggacaattggtgagccatcacagcacagggctgtcaattactcactccgccttgctaatttcaataccgtggccaacttgagatattaggaaagctaattaacctctgtgtaactcaatttgccaatcagagaaagctgcaaaattggatcattctctcaactgcacttytccatctcacaaggacaggtgctcactgacatcagaaaacaaagcattagagtcgtgacaaggtggggagaagaaaatccggccaaaaacaggcagcatgtcttggccaggtgaggaacagctgaactttctgctttccaaattgttgaccttcagtccatgttgttcttccctcctcatggactgtttataagctggtcctttcaaaagcatcagaaagagatggaagaaggaaaggaaactagcatttgtcaaaatccagatttcagaaagaagatggttaacctttggtgcagcaatatggtgagaaataataagacacagaagccaggag

SEQ ID NO: 299260 - DNA, 567 bp, Homo sapiens
ttcgtatgggcctcttttccaagaagagggaaacctttcctagaagtccccagacagacttgcctgtatgtctcactgaccacaactgcgtaaggcaacctattcattcctacagcatttactggtgaggggagcaattggcttagggaagcacaggctaagggcctgagggtgaattacaaggcaagatacagtgttctgttagaaaagagraagaaagagaatgaattttgagtaaacaacaccaatgtctactcacccactggagatttacatgccaaaattaactttctgctgccttacccaggaccacatactgaatagtcacagattttgctgaaagaaagccgatctttgtgcctttctcttattaggaccacacattagggctggcgctctctctctctctctctctctctctctctctctctctctctctctctcatttttcctcctctattactttctttgacagtaaccccggaatgtctttgcttttccattcagcagacctctcttccttcttcccaccatggctcttaggcatgttaggtgacatgccttgaa

SEQ ID NO: 299261 - DNA, 549 bp, Homo sapiens
tgttgcttgtgtaagccaagacaaccttgatgttatcataaacatgtacttacctaagtgctgtcctttggcaaattatgggctatgagacacagcattcttacctttccctgaggggtcaatttcagtgatcctacacattccttctgaagcacgtatgctctttctatacggtgtgtaagctctgggtctggggagtaacagtacagagatctacctgtcttgttgccacatgtttctaaattttccagtaagtcaccttctactgacaaagaaaaaaawatatatatatataatacacacacacatatatatacacacatatatatacacatatatatatacacacacatatatatacacacacacacacacacatatatatatatatacacacacacatatatatatatatcttccctaatgcacctcaaattctaccatggaaaaacaaaaaggaaaaggaaaatacatagtatcccaagtggttaagtgctatggggaaaaagaaagtagaaaaggagaaagaatatttaacttcacattttt

SEQ ID NO: 299262 - DNA, 534 bp, Homo sapiens
ttaaatttaatcattgattataaaattgcacctaaatttcaaaaatgtgaaaaatgagaaagtacaacttagaaactaggaaatatattaagtatgcatatttatttgtataattatttgcatcagaaatagggaaccatttaggagaggaaaagacaacaaagtcttcctaacagtgattatctctaaatggtagaattatgggcatttttttttagcttatctgcattttcttattttctacagtaaacacatattactgacataattttaaagaaacwtgatattttaaagatgttatttagaccaacccttaatccattgcttgaaaacctgcaatgaatcctcaaataattagtcacttcagtctttaataccatagaaaccaatagctcccaaagcagcccaggcagctctaattatttgaaatgagagctgttgaaagcaaaggtctgcactgcctgtgccattagggggtttaaggatatgggtttgatcccagcacaggtcaattaactctgcttattcgtagag

SEQ ID NO: 299263 - DNA, 637 bp, Homo sapiens
aaaaaaacccacaaacaagtacctatagtgaccttttaaagtattagaaagggcaggtcaatctatatcgtgttcccataaaaataaattctagtaaaaaccacattatcagctctggcataaggtatattatctatcactccctcatcgcatcccggtccagtgtttgagaatgctgtatagccgaatgaaggcccacagaacagtgacagtccccccagccacaccccacaatgttatggaccgtatggtttttacacaacacacaatctgcatgctcaagttaagagaccttgtgcctgaatactctgccaaaaccctaaagcgctttatcgcggtccttggtgggttccgactctatgtccgcgggtcccttaatcaacgcgctgcacccccacctcgccccacycgcttcctcctccccttcctccagcaaagcagccctaggcctgaaagggtacgcctaggggtcttgggagggaaaagacccccggccaatacaaaggacgggatggagcgtccgacccggagcttcctagccctccgcccccaccccgacccgcacccccacccgtacccccacccggtcccttctgccaggcccagacgcaagcggcctagtcgctccccttccgca

SEQ ID NO: 299264 - DNA, 593 bp, Homo sapiens
ataggtatctcaatgccgactctgctacttgagcaaggttttgtgaactaatgactgaatgtcatcaagccttagccttcccatctgctaagtgaaaataacctgcttcatatggtttttataacagtcaaatgagataatgcaagaaaggcatctagcttagtagatggctcatagtaggcactacaaaatgttagctatgatatgtgataagtggataacaacatgttttatcatcaataaatgacgttaaaattctaaaaactattkaaatgaaacatactttctcttaataaatgtaagtttattggatttaatcctctccataaaacttagtttggagaccctgttttaaaaatgctcagtccacttaaaacaaactatgttgcacgtattttcgtgtttaagtgttaaagtggcgactctgcatcaaggaattattttcagcagactgcattgtctctcttctgtagttctttcctgtgaaacttcctaatatcacaaagatgaaatatgaacatatggctgaaagtaagaaatcggcaacaaggtcccacattcagaagattgcagctggaagtattttttccttt

SEQ ID NO: 299265 - DNA, 649 bp, Homo sapiens
tagaaaatgttattactaggccaggcgcggtggctcacgcctgtaattccagcactttgggaagccgaggagggtggatcacctgaggtcaagagtttgagaccaacctgaccaacatgaagaaaccctgctctactaaaaatacaaaattagccggacctgatggcgctttgcctgtaatctcagctatctgggaggctggggcaggagaaactcttgaacgcgagaggcagcctgggcaacaagagcgaaactctgtctcaaaaaaaaaaaaaaaaaagaaagaaaatataagtactgaatatattctattctattttcctcagctttctattctatatggattttcagtgacattaaaattgacgcaaaagtaattgtggtttttgccatagttttgcaccaacctaatatttctttctgtttcattccttcatattctcatgtctgctgttgatcaggctgaaaataaataacaytaaaacacaatgaagttaggttactgagataaaatttttaaaatataaacattttagtatggtgatatggcatggtaatactctttggggaataaatatcctagatataattattttaaagacaggctgcaagtcctgattgtgattttttttctacctatcccaaacaa

SEQ ID NO: 299266 - DNA, 554 bp, Homo sapiens
aatgactctaaaaaaagacatgacagatagctagmtagatagatagatagatagatagatagatagatagatagacagacagacagactttatagggttaaagtaacaaattaaataagaaaatgtgtataggtcatttagcacagtgccaaataattacttaataaaacctgggcaaatgtagtagatgatgataatgatgacgatgatgatgatggtaataatctcctgattcatttcatttattctatagagtttttttttaattcctattatgtgccagatactgttctagtgcagagcttggtaatatctggccctccatctgcttttgtaaataaagtttcactggaacacattcatgtccattaatttatgaatggtctactgctgcatttgcacaacaacgtcaaagtatacactccataagtagtcctttacagaaatcatttgctgattctgtaaatcgtgttctgtagaaccatggagtttgcattctaatggggaaaacaatgaataaattaaaacttagatgtataatatgacatattgtg

SEQ ID NO: 299267 - DNA, 554 bp, Homo sapiens
aatgactctaaaaaaagacatgacagatagctagatagatagatagatagatagatagatagatagatagatagayagacagacagactttatagggttaaagtaacaaattaaataagaaaatgtgtataggtcatttagcacagtgccaaataattacttaataaaacctgggcaaatgtagtagatgatgataatgatgacgatgatgatgatggtaataatctcctgattcatttcatttattctatagagtttttttttaattcctattatgtgccagatactgttctagtgcagagcttggtaatatctggccctccatctgcttttgtaaataaagtttcactggaacacattcatgtccattaatttatgaatggtctactgctgcatttgcacaacaacgtcaaagtatacactccataagtagtcctttacagaaatcatttgctgattctgtaaatcgtgttctgtagaaccatggagtttgcattctaatggggaaaacaatgaataaattaaaacttagatgtataatatgacatattgtg

SEQ ID NO: 299268 - DNA, 543 bp, Homo sapiens
gggttgatttatcctgaagtctctctccctrgcttgtagatggccatgttcttctgatgtcttcatatggcctttcttctgtgtgtctctgtcctcaactccttttcttacaaagacaccagccttattagattattgctcacagatattacttgattttaccttgattaccttaaatgccctacttctacatgcagtcacattctgaggtactgggggttaggatttcatatgcatttttatggggggcacagtttagttcataacaccaggggaattttgaacataaatttgccatcaaatattactgtaatatactatatgtacattattataagtactatatattcctgagctgaagtctagtgactgtcacaatacactgagtaacacggaatatgttgcttctaaatgaatgcaacccagacataaattcatggttggctttcatgtgctcttctaacaacacaactctcagcatttttttttttttttttggaatttcttaaagtcacctctcagtcaggaccaagtgagcccaca

SEQ ID NO: 299269 - DNA, 550 bp, Homo sapiens
ctgtgataagaaagtctaaagttgaaaacaacagcgttgccacctcaattttctataaaaatataatacattaatttatcaggaaatatttgagagctataaagaacagagtttacatatgggtgtactttacacctgtgtggggatcattcatttcacaaacacttatttgagcacttargccaggcaagctgataaaaatatgtccatgtattatttaaataccattgtaaactgaccatcattcaaaatgtaggccttgataattttaagtgctttattttaattgctgtggatgcagactccaattattattagggtagctatcttaaaagttctttatctggggacatcaccacactggtttgtcctttagataactgggacatatattttatataacacatctaaagcaactgagagggatgttaaattctacatgctatgcctattttcattaaaattacaaaatcaatttaatcttacggaggacatggaaatcatatcacctaactgcctagtactctatatttgaaaatttagttgcaca

SEQ ID NO: 299270 - DNA, 420 bp, Homo sapiens
atgcagatgtttttgagttaaaatgaaaatggaattcagaactcacatacgtattataataagggaaacagttctcacacatgcaatataggaacacttgacttcatggtttgggctcctgaggtctcaagtgtgttgacattacttttgatggcctggattttttttttttaatgtgttctccagaattcactcaggaatgtttagatgtgattttgtatattttgattaacctattgtcttgcaattactatagytatgtagtaacctttattccaccttcattatgagaatgcctgtaggaaaaatacgtttgtgctggcctaaaattctccagtttctaattctccttttctaactaaaaaaaattgttttgataacctgaattttttgataaactattttgttaggaacagaaat

SEQ ID NO: 299271 - DNA, 550 bp, Homo sapiens
ctgtgataagaaagtctaaagttgaaaacaacagcgttgccacctcaattttctataaaaatataatacattaatttatcaggaaatatttgagagctataaagaacagagtttacatatgggtgtactttacacctgtgtggggatcattcatttcacaaacacttatttgagcacttaggccaggcaagctgataaaaatatgtccatgtattatttaaataccattgtaaactgaccatcattcaaaatgtaggccttgataattttaagtgctttattttaattgctgtggatgcagactccaattrttattagggtagctatcttaaaagttctttatctggggacatcaccacactggtttgtcctttagataactgggacatatattttatataacacatctaaagcaactgagagggatgttaaattctacatgctatgcctattttcattaaaattacaaaatcaatttaatcttacggaggacatggaaatcatatcacctaactgcctagtactctatatttgaaaatttagttgcaca

SEQ ID NO: 299272 - DNA, 610 bp, Homo sapiens
taaattttcagaacttcttagaattatttgaaaaaaaaaagcaacaacaacaacaaaaaaccaagtggcatctaaatgttaataaataatattgctttataaattggattacctaagatttttcatttatgatagttttctgtcacagtttgttcattggatatagggtctaattgttcataaatataaaacacttcttcattcttataacagtggaacttatatagacagtactgtaaatacagcttttaatcaagacattggaaaaatgttaatgcctttgagtctttaatacagttttaaacttstacaccagaaaaatcaaatcgatgctaaaatatcacattagaaaaattttatttaaagacttgtttttttaataatacttgataagcttcagaaattgggttatcttgatgaaaagtatgcagcaaaaatatagtcatattcatattgctgagtagaaatgcaatttataaagctgtatataaaatacccagtaatatcatcatttgttagcttgctaaaataacacaagcagttattaaagtcctccaacacctgtatcagcacaatattgatactctcccaatccacaaaattaataaca

SEQ ID NO: 299273 - DNA, 583 bp, Homo sapiens
tgacttgggatttgtgtgattggttaatttattgcggcaatggcaggcctttcatctatggcaacatttaatcagcacagccatggaggctattaccggttagctcctttctcaagtcagccagggctgcaccatcagccctatcacwactcccctgaaatttccaaattatctggaacaggctttagcctcacagtaataaaaattagaagagattcctgatagcactggtggaaaaggctttcacttgcacagggcaaattataaatagtatgaatgtgcactttaaaaaaaaaattctccacctcttaagagatgtgcaggacttatcacccctgctctgatccaaatcctcatggttgaaaatttatattagattttatcagagaggcctaagtctagaaaaatcaatgaaggttatcttttatgttgcaggaacttgtggaaatattgattttcattttatagtgaatttggagcatgagttggtaatcactgctgagccgaccacaatgtttgcctactgtatcttttactgagttttgctcaagtatttaagatagtattcctgttgattttagtc

SEQ ID NO: 299274 - DNA, 507 bp, Homo sapiens
gaaatagaagcaaatgcaatgacacacacacaattaaaaaaaagcaattacaagcaatatatcaacaagtacaaaatggcacagcacaattatattcccaggggacataaaagggtgaactgmaggaggggagcgaggttaattgggaaatgcttcctcagggcaatgagagctgaacaagatctgaaggaagggatgggttcaaactggtagagaggagcatggaggcaagccaggagcatggagggaagccaggatggagggaatggtcttaaacagaagaggaagggagaaatcaagcactgcatagggaataacaaatgggatcttttgcctccagtggagaggacaagtggaaacttatcaagtcatcattctagaaaggtttggaaggggagtggtgtggaggcagtgggaagtgagagttttaaagaaccttgaatgtaatgatgtactctaaaagctacaagcattttaattgtattatacaagttagttttctaaatc

SEQ ID NO: 299275 - DNA, 507 bp, Homo sapiens
gaaatagaagcaaatgcaatgacacacacacaattaaaaaaaagcaattacaagcaatatatcaacaagtacaaaatggcacagcacaattatattcccaggggacataaaagggtgaactgaaggaggggagcgaggttaattgggaaatgcttcctcagggcaatgagagctgaacaagatctgaaggaagggatgggttcaaactggtagagaggagcatggaggsaagccaggagcatggagggaagccaggatggagggaatggtcttaaacagaagaggaagggagaaatcaagcactgcatagggaataacaaatgggatcttttgcctccagtggagaggacaagtggaaacttatcaagtcatcattctagaaaggtttggaaggggagtggtgtggaggcagtgggaagtgagagttttaaagaaccttgaatgtaatgatgtactctaaaagctacaagcattttaattgtattatacaagttagttttctaaatc

SEQ ID NO: 299276 - DNA, 466 bp, Homo sapiens
acattacttttaaccctttgtgactgtttttaaaattaggaatttgatcttacttttcatacaatcattatttttatattgccaggctgtgtacacagttttatgaataytttaattagagatgggaacttgtctgcataggcaataggccttgacagagatctttgagttccagagggttatagaatatttcaaagttttaatgagccctggtttaaacaaagatgcagtttgaaatcacattatagtttaaacaaaaattctatgtaataatagaccttgaataaattatgtattatttagccctaagttctgaaagaataaaatgtagcctgacttctaaagacaccgggtcatattgggaatattgctattttaattttactgcttaataatgaatgtggtctattttaatatttatgtttttttgtccatatcatcaattttctttcatctcaaggtatta

SEQ ID NO: 299277 - DNA, 532 bp, Homo sapiens
tatattctttgagacaatgaaaatatgacatatgcaacagtcaagaaaaccaatattcaattttgatattacttcaggattaagaattagcacagaccaaagaaatgctcaaagaatgtaatgactcgatcattgggaacatcagttccagttttacgtgtgtcagtcataaataattcaggttgtaataacacatcggaaccccttttctactcctgaaaacaaagggcctaaaacctgtataagcctcctttttgtagctgtacgagatagctttttcctctgaatgaataaaaaatgttctttgcctctggaattcattccttcattccttcaytcttttatatatttgtcagatatttatgaagaactaattaggcacaaataaacaaggcttgggaaaatacaagtcgcaataacatctgatatcataagagttaactttaggaaaggattatttcagaaaagaaataggtcaattttcagaaaaatggtaggagtgaggctcctcaatacgaagcagatgcagaaa

SEQ ID NO: 299278 - DNA, 573 bp, Homo sapiens
agtgtagaattccactgaggcctgcattcccccacctaacagagaatacctgcctttgatccaactagaactttggctgctccaaaggccaaaatatgactacgttgactcagggactggttcccatagagttcttacagaaagaaaacagaagcttgctgagtttcaggaacatgtatgaaatgaaactttgttattgcttactaataagcatctgcacatatagcagattttgatctggcatatgtctcattatagcaaaccagaaaaaatttttagagacaagkataatcacttcctatccctagtcactgaaagccaccagtatttacaaaaggaacataataatttctgaaataacaagaacttaggtcagtttgccacagagccaattctagaaggctggatcaaaagtcatttgtgcaaggacaatggcagtgggtctgtaaaagaaggaataattcagagagagatgtattaaatagaatcaacagaacttgacatgttagatattagggataaaaattaaaaaatatttagagaagtttgtgcctgttacttaaaaaagagtag

SEQ ID NO: 299279 - DNA, 544 bp, Homo sapiens
atcaaaagtcatttgtgcaaggacaatggcagtgggtctgtaaaagaaggaataattyagagagagatgtattaaatagaatcaacagaacttgacatgttagatattagggataaaaattaaaaaatatttagagaagtttgtgcctgttacttaaaaaagagtagaaaatttgaaaaaaaaaattcttggccattaccttagtgccttctgggcgctataataaatgaccacaaacttggtggtttaaaacaacaaacttattttctcacagttacggagggcagaagtctgaaatcagtattactgagctgacatcaagttgtcagcagggatatgttccctgcagagactctagggaaaaacatgctgcttgccacttttattatagcttctgatggctgctggagttccctgcattgcagccaaattactccaccctctgcctctgtggtcacactgacttcttttctgcgcctatggaatcctcccctgcctctctcgtaaggacactcatgattgaatttagggccacctggataat

SEQ ID NO: 299280 - DNA, 544 bp, Homo sapiens
atcaaaagtcatttgtgcaaggacaatggcagtgggtctgtaaaagaaggaataattcagagagagatgtattaaatagaatcaacagaacttgacatgttagatattagggataaaaattaaaaaatatttagagaagtttgtgcctgttacttaaaaaagagtagaaaatttgaaaaaaaaaattcttggccattaccttagtgccttctgggckctataataaatgaccacaaacttggtggtttaaaacaacaaacttattttctcacagttacggagggcagaagtctgaaatcagtattactgagctgacatcaagttgtcagcagggatatgttccctgcagagactctagggaaaaacatgctgcttgccacttttattatagcttctgatggctgctggagttccctgcattgcagccaaattactccaccctctgcctctgtggtcacactgacttcttttctgcgcctatggaatcctcccctgcctctctcgtaaggacactcatgattgaatttagggccacctggataat

SEQ ID NO: 299281 - DNA, 615 bp, Homo sapiens
tcctgcgttcaatttttaggaaacatttccagaggcattactattaacctggaaacctatttcattcagtcatagaagtcccacctaagtcttttcaaatcacttaaacctgatttcttcatggcagacagcagaatgacttcctacctcaactctacccccttggcaatgaatataaaacacattctgatacatacatgcaagtttcttgtaaaataaatctctaaagccaattgtaacacactgggtgtcccaaatcttcttcccaaagatcaaagcctaattttcctggattgttagcatgattgaaatgaaaacagcctgtttctctattcagycttatgatcatgacaataaaaagaatagtgtggtagaaacagcagtacatttttagggatgataaacctcagctggaattttttaacaaaagttttgcatttgaagtttataccagcaactaactttagacagtcacatatgatccagaatcgagctttgaagatgaaagatgaaaagccacacaacagaatcaggctggtcaaaagaagatgaaataaatgagtaaataatgcaggaagtaatcagattcagagaggaatgtagtatagttaagga

SEQ ID NO: 299282 - DNA, 628 bp, Homo sapiens
ttgagcatcgcagcccttagttatcagagagatttgtaaatctgggaaggatttttgggggacttgagtgaaacagaagtttctgccttaatttaaaaaaaaagggaaacttgaacaacaaaacacawtaccagaaaagaattggacatctatggtatttttctacctttctggattacaatcaattatgtattatgatgactttttaatctttctctcagaaagaaaatattcagttgcacacagaagcaaaaaatattagttctcaaataaaaaacttataattaaaataagacagtagagctttctaaagtgtactcataaaatattaatagatatcctgccaacactttttaaacataagaaatgcaactgtgaaagacatagagcaaaattagtaacggaagaaattttctcacaagtgttattaatggcatgaacagaaatccaattaaatgtaatctgtttcctacaataaaagtgtcctggcacagaagtataaattttttttttttttttttttttttttagcaaatctcatccatgacacaaatcaaaaagacacttgcttaggagattcctcaaatagttgaataaataaatacatcttattgtttgtactggcaca

SEQ ID NO: 299283 - DNA, 628 bp, Homo sapiens
ttgagcatcgcagcccttagttatcagagagatttgtaaatctgggaaggatttttgggggacttgagtgaaacagaagtttctgccttaatttaaaaaaaaagggaaacttgaacaacaaaacacattamcagaaaagaattggacatctatggtatttttctacctttctggattacaatcaattatgtattatgatgactttttaatctttctctcagaaagaaaatattcagttgcacacagaagcaaaaaatattagttctcaaataaaaaacttataattaaaataagacagtagagctttctaaagtgtactcataaaatattaatagatatcctgccaacactttttaaacataagaaatgcaactgtgaaagacatagagcaaaattagtaacggaagaaattttctcacaagtgttattaatggcatgaacagaaatccaattaaatgtaatctgtttcctacaataaaagtgtcctggcacagaagtataaattttttttttttttttttttttttttagcaaatctcatccatgacacaaatcaaaaagacacttgcttaggagattcctcaaatagttgaataaataaatacatcttattgtttgtactggcaca

SEQ ID NO: 299284 - DNA, 641 bp, Homo sapiens
aatcataagctttctcccctgctatttaggtatgtaataaaatgagtattttcaaatcaaaaatatgcgattttgtaatatggtaagtccccttatctacttaaagaactttgaaaacacattactgatttgataaatctcaaaggcagccttagcacataaacaatatggattactgtgaaaaatctgctagactatctaaatatgtgaatttgtatagggttatattttgaggcataaaattacttaaagtgtgtcttctaaagagaaaaaatatgaggccatgtttttcagctccattaaaattttctataataataaatgtatcagcttttcctcatgactcaactygttataggagaccagcgcagccatttgtgactggtttcatatttatacatttgtattatctattttctatcttttaatgtcttctcatattgtttccctaaaatagcaaaactaagacaaactattgttaggatgctttgagttgtatacttaatagaaatcccaacataaattattttaaacattgtaggatattcattagaccacatacctaaaaacacagagattcttattggtacaattagttgaactttgtgctgagtgggtcaacttggaatcagctttgtggc

SEQ ID NO: 299285 - DNA, 565 bp, Homo sapiens
gggtttacataagaagtaaatggaacagtcagtcaggactacatcttaggtcttacagttctaatcttagtgtacatggcctcttggtctgtaaaatgcaattacatgatacccagagatactgaacttttaggttgtacatccaaaataaagagaggaacgccttagctggaacaaaaagaagagtatatgtaacttaagatctttcattgtgctatgcctcttccatgtttgagttacagggttttcgtgtggtcactaagtaaagaaaacagggggatgagttgatgcttgctaggtggggttgttggccctgacctgacttggacttctcagaaatatcacagtgttaagaataatcaattttgatcttwcaactgcagcagccctaatagatgaagagtggtttattattttttttaagtctatgttgtttcaagccagctagaacgttgctttgttaatcaaataaactattatttgtttctgaaacagtgggggagggaaaatataaacataataactgataatgtcataattacacaaatgagtttttaatactcct

SEQ ID NO: 299286 - DNA, 565 bp, Homo sapiens
gggtttacataagaagtaaatggaacagtcagtcaggactacatcttaggtcttacagttctaatcttagtgtacatggcctcttggtctgtaaaatgcaattacatgatacccagagatactgaacttttaggttgtacatccaaaataaagagaggaacgccttagctggaacaaaaagaagagtatatgtaacttaagatctttcattgtgctatgcctcttccatgtttgagttacagggttttcgtgtggtcactaagtaaagaaaacagggggatgagttgatgcttgctaggtggggttgttggccctgacctgacttggacttctcagaaatatcacagtgttaagaataatcaattttgatctttcaactgcagcagccctaatagatgaagagtggtttattattttttttaagtctatgttgtttcaagccagctagaacgttgctttgttaatcaaataaactattatttgtttctgaaacagtgggggagggaaaatrtaaacataataactgataatgtcataattacacaaatgagtttttaatactcct

SEQ ID NO: 299287 - DNA, 553 bp, Homo sapiens
gccaatcgttttggattgcatctctgagaagctgaagtgccttatttcagaagatgcagttgcttttgatgtgaccatatccaaaatgtttcatttttattcrtgtttttttttggcaaacacttattgaagacaaactacattgcaccttccttaacaacttgaccagaatgagtttgctaaaatatttcttctgtaggcttcattgtcatacaatctacctcactgttcagagaacatttatttactcatctagacattttgagtaacagtgcaataatcaggacgtacttctgttcccctgggtgtgcaagaggaagcaggacaagaatttcaaaaagagaaaaatgtatttatgtgtacatgtatgtatatgtatagtaacacacacacacacacacacacacacacacacacacgcacacagaaaataaacaaacaccctgataactggagttaaatttccagaagaaataataacgtagaaaagaatttgacataaagactgagataatgggaactgtagacagtcataatcaaaagggaaacagaa

SEQ ID NO: 299288 - DNA, 615 bp, Homo sapiens
atagtagaatagtggttgtcaggtgcttggggagggaaaaatgaaagttgatgtttaaggggtgcaaagtttcagttatgggagataaataagttattgagatctactactagcacagtgcctaaagctaataattttttgccaacttaaaatttgctaagatggtagatcttatgttgcattcttacaacacacccacataaatttcagtaataataataaaggaggctagaggaaactttgggaggtgacgggtatatttttggcgttgacgatattgatagtttcatgagtatatgcttatcctcaaactccttactttgtktacattaaatatgtacaactttttatgtgtaaatcttacttcaatattttttaaaggagtagaagaaaataatatgtgccaatgaagaaaatgcctccatggtaccacagactaacactgaacactttggtgtcttttcttaggattcagcctggatgagaggtagagattatgaagtcagacagttctgttgattacctatttttgcaaatgccacaggttaccattgggagataaggagttaacacaaacacatgtgatgttgctgattgtgtgagtactaaataata

SEQ ID NO: 299289 - DNA, 598 bp, Homo sapiens
tgtgcctgctgagtaagtaaatacatacatgtatgttgggtgtaagggtgcatatttatgagaaacagggatgtgggggaagtcaaactgtgaaaagagctttactcacagatcrccctgaccctttgtaataccctcaactgttcttaaaaccacaggaaatctatttgtttatggaagtgtgccaggtgtttctttctcataaatttgtaattgattaattatgatcatctagaaaaaaagggcaccactatgatgagtggttgtattttccatcagtatatttaataagtgagtattttcactgagaaattatgatgaaaaaaggagagaggagagactatgagcacagctagacaagtggagttataatttaaccatagtttacaatcctaagccaatcaaattttatatctacttaaagccatcaacttcacaaaatctgcaaatattttgttatcgaattatgcctgacatttatttttcagaataatgttcagtctaaaccagtgaattaaaacattacatgatggtaatttaaaaagaccctgctatacttggataataatattgtattaaaattaattgtgaagagata

SEQ ID NO: 299290 - DNA, 596 bp, Homo sapiens
tcagctattttcaggaaacagggactatgggaagtaccaggccttgttttaraaaacatttctcgtgacttgaggacttctgtattcaatatttggcctttgcttcttcccagaaaatgaagctaggcagctgtgcagttgtccaccaagccacagtttctgcgtaactcctccacatggatgactatttctagtaaccacagcttctctacgtcggcttcatttctgcctctctggcttctgaaacccaggcttccatcatcagcctgagagtccgtgcacacctttggctttacaggctctagaatccatctgtccctgtgtggctcctgagaggattctgctttcccctttccctcctaatttgcactttgctgggtcctttttccacctattttgtggtttggcatttcacgtctcctttttttttttaagagtttacatttctgttttttttttttttaatatctccatgttgctttttgttggttttctagaaaaggtggttgaaatgctgacttcatactgcatcatcacaccgatatctgtccttaatagttttaagtttcactttctcaatctgtttaatgaggtat

SEQ ID NO: 299291 - DNA, 626 bp, Homo sapiens
agtgtctattatgtatttaggaaatgaagcaaattttcaccttagtggaagacacacataattagcaaggcctatctgtcctcagatgcacccatggtttggacatggcttgattctcttttgatcatatccatcctgtaaatttgaggctcttagatagaggacctctcacctatcttcctgggaagcttacatagagctgagcccttttaaatgctcacaacaccctcagccccttggcaggcactttatccatctccartctgtaaaggaaaaccctccccttaatacctagaaacaaagaatttgagttgaaaacttagctgaaagctcaggtattttgtgtcttcttttaaagcaaaagagatataagtaaacaaatacagttgaaactttattcagagatagaaattcttaagaaggaatcagataagctgacagaaaatatactttgcaatacactggttccctgagcaaacagctaactcaacaaagaatatagaagttaccatttttcagccaacaagaaattatacttttgtccacacacttctgattttttgaccacacttattggaaaaactgatcccaagtaaaacagtgaaattgggtaatttttgttcttt

SEQ ID NO: 299292 - DNA, 626 bp, Homo sapiens
agtgtctattatgtatttaggaaatgaagcaaattttcaccttagtggaagacacacataattagcaaggcctatctgtcctcagatgcacccatggtttggacatggcttgattctcttttgatcatatccatcctgtaaatttgaggctcttagatagaggacctctcacctatcttcctgggaagcttacatagagctgagcccttttaaatgctcacaacaccctcagccccttggcaggcactttatccatctccaatctgtaaaggaaaaccctccccttaatacctagaaacaaagaatttgagttgaaaacttagctgaaagctcaggtattttgtgtcttcttttaaagcaaaagagatataagtaaacaaatacagttgaaactttattcagagayagaaattcttaagaaggaatcagataagctgacagaaaatatactttgcaatacactggttccctgagcaaacagctaactcaacaaagaatatagaagttaccatttttcagccaacaagaaattatacttttgtccacacacttctgattttttgaccacacttattggaaaaactgatcccaagtaaaacagtgaaattgggtaatttttgttcttt

SEQ ID NO: 299293 - DNA, 583 bp, Homo sapiens
aacatcatgtttcctttccttttcctcytcatctaaaggtttggttttttttaaaggaggaaaaaaaacactatttaaaggagaaaatagactgggcacagtggtccccagcactttgggaggccgaggtgggaggattgcccaaggccaggagttccagactggcctgggcaacatagtaagatcctttctctacagaaataaattgtaaacaagaattagacacgtttggtggctcacacctatagtcccagatactcaggaggctgaggcaggtgaagtgcttgagcctaaggagttcaaggctgcagtgcgctgtgatcatgccactgcactccagcctgggcaacagagtgagactctgtctctaaaacacaatcaaataagataaataataaataaaaaactttaaaaccactaacatatatcaatagccaacaattcttgttaataataaataaaaaactttaaaaccagtaacatatattaatagccaacaattcttgttataacatgttttgcagaattcaggataaagacaaataatatccagaaaagaaatgctattttctaactttcatga

SEQ ID NO: 299294 - DNA, 477 bp, Homo sapiens
gcattgtaggcaaggcaacagaatgtatatagcaagagaactaccaaagatggtggaatgtttgagaccttaaagaaattcagcattgatggctggaaagcatgagatcacaaaagccctttaaggacctaactgttctgatcaaaacactgcatcaatcgtttagtctattgtgaatttagctgtgttgatatactatytaatggattaaacttacaaattggacatttttagcacccccttgagcagtccagcgtatgaattatacattatgataccctcattggaagaacaaagttgcttcacctaatagtttattaatataaatgtcttcattttctgaataaaaatactgttaaaaattatgtatatgtatatgtatatgtatatgtatatgtatatgtatatgtatatgtatattgagaagaaacagaattagcctcttaccctttcctgagtaggtactcagaatgataa

SEQ ID NO: 299295 - DNA, 477 bp, Homo sapiens
gcattgtaggcaaggcaacagaatgtatatagcaagagaactaccaaagatggtggaatgtttgagaccttaaagaaattcagcattgatggctggaaagcatgagatcacaaaagccctttaaggacctaactgttctgatcaaaacactgcatcaatcgtttagtctattgtgaatttagctgtgttgatatactatctaatggattaaacttacaaattggacatttttagcacccccttkagcagtccagcgtatgaattatacattatgataccctcattggaagaacaaagttgcttcacctaatagtttattaatataaatgtcttcattttctgaataaaaatactgttaaaaattatgtatatgtatatgtatatgtatatgtatatgtatatgtatatgtatatgtatattgagaagaaacagaattagcctcttaccctttcctgagtaggtactcagaatgataa

SEQ ID NO: 299296 - DNA, 598 bp, Homo sapiens
attcaaaaatccttttataaacccaatactctagaacctagtgggccgtatggctgcatagtaactatcctctgccatcttatttctatgttattgcaatgtgaagaacacccatgctattattattcccaaactcttccagaactgtataaagaaatatagttctttaggtccaagttcactggctagttccagtagcaaaattatagactctcacaccttcgattaccatgattaaacatagtaattgaaataagagargagaaaaatatacagagtctgcatcccagtccctgtaaatctcttcacttcaaagtactagtccctgcagctttacagaggataataataacacgtgtttccacactcacaggctctcaagagaataaaaagagatggcactaacacttgccacccaaacattctttactacatctcagagaaaaatctaaaaactcaagtatatgggtaagaggacgggacatgatgaaaaaaaaaaagataagtgaaaaataatagaaaaaccattggcttcatagccaaaccaaactatgtgaattctgatcttattaccatttcatccttaagcaatgtattt

SEQ ID NO: 299297 - DNA, 553 bp, Homo sapiens
taaacagatgcagtaggaagtactcagggacaagagagggatacaggcaaaggctgtgggatttcagagaaaggttgcctccaattaggagattcacataaagatamctagcagtgtttgcaacaggcttacattgagatcagtggcttaaattcgtctggagagggagaatctttcttaaggatttgatttttaaaaggaggagttatctcaaaggaatgaacctatgatgaaaaattgacaacccccagtagtagtgaggcagctgagtcttctctatctgtcacatcaggtagaaaacagcctggtcaacccacaattcacctgctcctgccccatgacttgatttttccacacttactcccatgtagctcaaagtgagttcatctctactttagcagggctgtagccaagaagatgctcccgttagctgttatttaggcaacacgtagatggattagtgccactaaatcagtcagtgcactggcagcatcagcatcaccagggccccacccagacctgttgaaacagagtctctggggtgaggctcagc

SEQ ID NO: 299298 - DNA, 274 bp, Homo sapiens
ccttgagcaagtcacctttccagccttagtgtatctctctacaaaatgaagagatcaactagaatgatttcagtagacccccgtagctctgtgattctgtgattttaatttaagtaacatcagtctctccacttgctttattttctttttgattcattgatgttgcagagtataaaggaagattttgaaagccaggtcacatggtaagtcatccctattctcacccaraagaacctaaaacactatcagttacagtaatcacactgagtattta

SEQ ID NO: 299299 - DNA, 573 bp, Homo sapiens
tgaggattcccatatttacggcatgttgccactctaaggattttcmattttattctgaaaattatgagggatgcagggaattttagaatactaaatgacatcttaatatttcaattttgaaagcttgttttggcaacagattggatagttggcaaagggttattcaagtttaaatattataaggattggagcaagatgacacccacctaggagagcttgcccccaaattaaacaaaaattgaagagtctgggcttggaaaagaaaagtacatgcttcaggtaacttcatccacattcaacagtaaaaagacaaagaacagtcactggatattttaggagagctaatgacacattagatggataccaaatttcccagacaaaagaactaacagatgggttggtttgctaagagggcaaagtggaaaaaagtaactttaaaatgtcctcagagagaagagaatggtgtgaaataagactcagagttgttattttaattaaaatgtaccaaaccacacaatcaatgagcttgtaagaaggttgagaatactcccacagatagaagcaaaaaaggtc

SEQ ID NO: 299300 - DNA, 522 bp, Homo sapiens
tcaagagaactatgctttaagtccagccccataggccccacctcaaggacaccagttgggagccaggatggatgtccagccccagctagaagaggcatcacaggttgttctgagaaaaggttgtcagcagacaaatggcttcctgcctttgagctctccttagaacgaattatagtttgttgtgtttgcagaaaacaaataggaacagtcactttaatcactcactcagggaaactcaagcagcagttcatccaaaatatattgagaaaagattctgggayggcagctcccacattaaggacgagctcagtgtagctaaaaaaccaaaaccaaaaaaatctgtctgaaaatatctgaagcagtgtgggaaacaataaaaaagaaatatcaactctaaagaaattcactgcagaaggttatatgcctaagtaacatataaaaattgccccctgctttgttcatattcgaactctctctcacagtcctcctcctctgtacatcctatttctgaagtttgaaagg

SEQ ID NO: 299301 - DNA, 578 bp, Homo sapiens
gtaatgatgttaattatattaatgctgttagggttcaatattttcagtgtaagggaagagatacaaatataaaatcaaagacattacatcagaacctgttgtcttaaatttgaatggtaaaatagtgtaaattttataaatatcaaatgcattttctctttaaaaacttaawtattttcggccaggtgcggtggctcacacctgtaatcccagcactttgggaggccaaggcaggtggatcagctgaggttgggagttcaagaccagcctgaccaacatggagaaaccctgtctctactaaaaatacaaaattagccgggcgtggtggcgcatgcctgtaatcccagctacttgggagactgaggcaggagaatcgcttgaacccgagggggaaggttgcagtgagccgagatcaggacgttgcactccagcctgggcaacaagagtgaaactctgtctcatgaagcaaaaccaaaacaaaacaaaataaaaacttacatttttctaagtttttccactgaaaagttctagaaaaactactgactcagaacagatgaccatcccaagtgtctggacta

SEQ ID NO: 299302 - DNA, 496 bp, Homo sapiens
ttcacttattcactcatataaccattccaaagatgctgggtacttattatgggtcaaaccctgttctaaaatataaaggtagcaaaggcatagttcctgcccttaaggaaattatgtttttaggaaacagactatgcttagattaagtttgattatgactgtcacgaataataacattgtcattcaaaayaagatgggacaataacataatttggaaaatactttggtataacgtatgaactagctttgaaaacactttgcaaagcaatgtctcagaaatctttgatcaattgaaaattgttttcaatgttattactttgaaagacagcacagacttgcacatattctaacttctttaaaatatttttagtctgagtctgagtcaggaagactgcttgagcccagggatttgagaccagccttggcaacatagtgagaccccctctctaaagaaaaaaaaaaaaaaaaaaggcaggcagggtggctcacacctgca

SEQ ID NO: 299303 - DNA, 578 bp, Homo sapiens
ataattatgtcatttaattagaattaagagagaaaatatttaaaatcagagtgtgctatrggggcaggggaggggagtaaatcgtcacagcttaactttttagactgtcaacattatctccagaagaagctgcccatacagtcatagagatgcactgcaagtattgagaaaaaaaaacatcagttcctcaaactgcttgaactttcctaccatttgatgaccactctataaattaggattttataaactttctaattatgtaaatcggtggtccccaaccttttttggcaccagggaaaggtttcatggaagacaatttttccacagacaggggtggggatgttttctggatgattcaagcacattacatttattgcgcactttatttcaattgttattacatgataatatataatgaaataattatacaactcatcataatgtagaatcagtggaagccctgaggttgtttttctgcaactagatggtcccatttgggggtgatggaagacaatgatagatcatcagacattagattctcataaggaacactgcaacctagatccctagcatggaca

SEQ ID NO: 299304 - DNA, 578 bp, Homo sapiens
ataattatgtcatttaattagaattaagagagaaaatatttaaaatcagagtgtgctataggggcaggggaggggagtaaatcgtcacagcttaactttttagactgtcaacattatctccagaagaagctgcccatacagtcatagagatgcactgcaagtattgagaaaaaaaaacatcagytcctcaaactgcttgaactttcctaccatttgatgaccactctataaattaggattttataaactttctaattatgtaaatcggtggtccccaaccttttttggcaccagggaaaggtttcatggaagacaatttttccacagacaggggtggggatgttttctggatgattcaagcacattacatttattgcgcactttatttcaattgttattacatgataatatataatgaaataattatacaactcatcataatgtagaatcagtggaagccctgaggttgtttttctgcaactagatggtcccatttgggggtgatggaagacaatgatagatcatcagacattagattctcataaggaacactgcaacctagatccctagcatggaca

SEQ ID NO: 299305 - DNA, 568 bp, Homo sapiens
tatagaatgtttgatacctggtatggcaagctcctgtttgtttaaaaaaagttgtcttgactatttttgcacttttctttcagatgggattccttatctacttgtcaagttccaagggaaaaatattgaggggttaatttgaattgctttgaatttattaacttatttgatgagaattgatgtcrttacatgcaagatcctggtatgtcaggttttctcttacctgaaaatcacttttcagcatatttgtacaattcttttcaagtcttaatatttctgggtatttttttggatgtcttagttttatctccattttgaatgggcacagttttgattccactttaaaattggacagttgcatatacattaaaaagatacaatttgggggtaactcccttattagaattattgactctaatagttttccaggtaattttcttgaaacatttatataatgtgaaaataataacttttaaaagtttctttttaattttttatacatcatttctttttctaaaatctgttttcccatttcattggctagtaacaataataataataataggtt

SEQ ID NO: 299306 - DNA, 476 bp, Homo sapiens
tcaatgatgtggagcaccttttcatatacctgtttgccatttttaaaaaatttttaatatttgtgtatacacagtaggtgtatatatttatggagtattacatgagttgttttgatacgggcatgcaataakcacatcatataacatggaatattcatgccctcaagcatttatcctttatgttacaagcaatccaattatacgctttaagttattttaaaatgtacaattaaattattattggactgtagtcaccctgtcgtgctatcaattactaggtcttactcattctttctattttttttgtacccattaattatcctcaccctctccccctaccttcccaccccttcccagtttctggtaaccatcctactctgtctttaagagttcaattattttgacttttagatcccacaaataagtgagaacatgcgatgtttgcatttctgtgcctgtcttatttcactttacac

SEQ ID NO: 299307 - DNA, 596 bp, Homo sapiens
tcttcaaatcttgttcctcctgaacctttgattgcttaccaaatcaccagcatcaacacaggagcataaatatctggccacctgtcctttcagggaaagggcttaaagagatatactgcttggaggtgtgagtactgtgaggattcctgagtcattagggatagccctgagatgagagtaattcttcagtagtccactggggccagcacatagtgcagtgcttaactgtttttggccttagtaagggggttgcaggatgatccctatggagctgtagatatgggagaagagtgaagaggccgtgtggcaggagtaggcacattgggagtgctcaccagctgctcaggcaatgtacttgtgctttcaggatctcctcaaactcagtctcatatagaccacttcctcttgagggtagaatgctgctgggcacacccagcctaatggtgtgtgaatctaaataaattagacagtcacttgctgtccacrgtaagaagttcagtctaccagggctaccaaccatgtcttaaccccaaaatacaaaaatggagttctattatttaaccttccagtgtagttagatgcagccagcccactcc

SEQ ID NO: 299308 - DNA, 506 bp, Homo sapiens
tgagtagggctatagatttaygctatgatttacttacaacagttaaactacccagactttgtgtatcaacatggacaaaattctaaataacagtgttgaatggaaaccagcaaactgcaaatgaatatatatagtattattctatttctttaaaattttcaaatccacaaaagaacatgtggtcatgattacgtgggattatatgacatatagaagccaggtaatgttatcttctaatctcggggaggggagggaattggctgtctctgcatggttttatttcttaaaaatattttgagattttatacaaataacagaatgtgttactttttttgatgaaaaggataagccagttgtcttgtagattattatctgtgctttttaatatgttcgaactaattagtaatttatattagcaataaataaaccaatgtaaagtttggggggaaatgacaccagcgataatgaagtgttagagaggaagattagaaggccccacaaaggaa

SEQ ID NO: 299309 - DNA, 501 bp, Homo sapiens
ttataaggactctcattcttaccaccttataaaggactctcattcttaccaccttataaaggactctcattcttaccaccttagtggttgctcttgagtttatacctgaatcagttaaggagckgcacaattatgcttccttctcccaggtgtgcagagaggaaagggtgaagcttggactaaaccaggtctattaatttctcaaaggaaattacaaaaattaaaatttgggctggggttatacacacatgaacgattaacaggtagaaaaacattcttcaataatcagatactacgaagtcttagtagcttacttagttcacaagaataaatttctcattttaatactttttttgcatgaaatttctaggcactatttctattttaacttattcattctagaatctttctagtttccagaatcaaagtttctctttctagaattccttctaggataaagcttattgcattctaaagacagtgttagagctattagaattt

SEQ ID NO: 299310 - DNA, 564 bp, Homo sapiens
aagtaacctaacttacagtaacaaccactatcactttcagtactgcaactttaatagaatcatttctcttaaaatttcacaggacatacagatgtccattatcaacattgtcattaacactgttacagccakggccatacaaaaagaagatatagaacatataactattaatcaagagaacaaaaaaattttttgcacattatataattgttctcttagaaaattcaaattattaaaacttttaaaactaccacaaactattagtaaattcccccaattatataaaactgaatttgataaactattagaaaaaatgaaacaaaggtagatccttgcctaatttcagagtataataaaatttcacttggatttaagatttgactgaaaaagtaagaaaaaaggaggaaggaagggacggaggcagaaaaaaagggaaaaaaaaacattggaatgaatgaaaccacaagaaaatagagattaatatttttacatcttgaaattccaaaacatttttatatatgacatcgatggtagaaatcataaggaaaaggcgtgatatttatg

SEQ ID NO: 299311 - DNA, 570 bp, Homo sapiens
ttgttagctctgtctccttggggaagtgtttcactcaccaatcatcagtttcttcatctgtaaaattaggataatgatactcacatcagaaggttgtcatgaggagaatatctgtttcctaatgaactacctggaaaagcctctgaaatgttatgctcaaataaatgattcaactttggttcaaacctctaaccaaggaatggaactttttcacatgggactcgaacaagatttacaatacattatgtcttcactttgaaatgactaagacatttcatgttgaaatgacaaaggccgtggttaattgtagtgctaaatgtttaatgtgtcctttagtttgatctggttattgataatatgaatcaatcctattgcatgggaccaaaatactgttccatgtgctgacatttttgcagtctgcaaatcctgggttttgccacacttgtccatttagcacctccctcayataataaaagtatagcagatttcctttttgatcattatgtagaaggagaaaactgagggtaagagggaaaagtacttattgattccgtgaactgttagcaaaaa

SEQ ID NO: 299312 - DNA, 586 bp, Homo sapiens
ttatgctcatgctcactaatgacacactttttgtgagacaggatctttgctgaaaaagcaaagggctggggatgtacaagtaatgaaaatatagctgcaagtttccatgcaggttgctgtcacaacattctcatggaatccttacaatcactccttaaggtacaatgtaaacatcattatccctattttacagttaagggaaactgaggcatattgaagtgataggacttgcccacaccaatcccaactggactatcagctcaggccttcctttctctctggcccagggttttcacttatgttgatttgaggaggggtagagagagaaaaaagaaaaygatttctgtcttctaagagcttatactgtagaatgggaatttacttatgaacatgaattgatataagataaaatacctataccattttgaatcaagcacatttgtttttatgtggttcatatctactacacaccatgctgggcacttttcatgatccttgaaagccaaacaaccttgccatgtgtccttttatgtaaatatgaaatgcatattttttctttaccttcttctttttgttaaaattcccc

SEQ ID NO: 299313 - DNA, 485 bp, Homo sapiens
ctttgagataatgtgttgaaggtagaggcaataaagtggaaggagcccaggccattgaaaagtggcatggacaaagaactcctaaaaacagccagttattatttgactaacaaagaaattgaggaacagagaagttaagtgactttttcctggctagtaatcagaaatcatcagaaaaaaataatattttactgtgataagaatgctatttgaatttcaaggtttatctattacaacaytgaacattacttatcctagctaatataggtacataataaaggtacaattactgtaaccattttacagagaaggaaagagaagcttagagaggttaactacttcttcaagtgtacacagtgatatggtttgatacttgttccctccaaatctcatgtcaaaatatgattcccagtgttgggtaggtgggctagtgggaggtgattggattgtgggggtggatccctcatgaatggctttgaatcatc

SEQ ID NO: 299314 - DNA, 485 bp, Homo sapiens
ctttgagataatgtgttgaaggtagaggcaataaagtggaaggagcccaggccattgaaaagtggcatggacaaagaactcctaaaaacagccagttattatttgactaacaaagaaattgaggaacagagaagttaagtgactttttcctggctagtaatcagaaatcatcagaaaaaaataatattttactgtgataagaatgctatttgaatttcaaggtttatctattacaacattgaacattacttatcctagctaatataggtacataataaaggtacaattactgtaaccattttacagagaaggaaagagaagcttagagaggttaactacttcttcaagtgtacayagtgatatggtttgatacttgttccctccaaatctcatgtcaaaatatgattcccagtgttgggtaggtgggctagtgggaggtgattggattgtgggggtggatccctcatgaatggctttgaatcatc

SEQ ID NO: 299315 - DNA, 570 bp, Homo sapiens
gagtgaaataacttaaagtagaagtgattaaggttatacaactagcaactgacagagatgaccttgaaacttagtattgtgtgactccaaaatgcatgcttctggccgggcgcatggctcatggcygcaattccagcactttgggaattcgaggtgggtggatcagttgaggacaggagtttgagaccagcctggacaacatgtgaaaccctgtgtctactaaaaatacaaaaattagctgggcatggtggcgaggcctgtaatcccagctactcagcaggctgaggtgggagaattgcttgaacctggggggggcggaggttgcagtgagccaagattttgtcattgcattacagcaagggagatagagggagactctgtctcaaaaacaaacaaacaaacaaaaaaacatgtttcttcattttggagtaataagcagaatctgagaatgaactgtgtattacataataaaccaatactacatggctgaacttgacaatataactaagtaatgtaagagaatatcctttttcttagtatatacaccctgattattcacaggtaaagggc

SEQ ID NO: 299316 - DNA, 570 bp, Homo sapiens
gagtgaaataacttaaagtagaagtgattaaggttatacaactagcaactgacagagatgaccttgaaacttagtattgtgtgactccaaaatgcatgcttctggccgggcgcatggctcatggccgcaattccascactttgggaattcgaggtgggtggatcagttgaggacaggagtttgagaccagcctggacaacatgtgaaaccctgtgtctactaaaaatacaaaaattagctgggcatggtggcgaggcctgtaatcccagctactcagcaggctgaggtgggagaattgcttgaacctggggggggcggaggttgcagtgagccaagattttgtcattgcattacagcaagggagatagagggagactctgtctcaaaaacaaacaaacaaacaaaaaaacatgtttcttcattttggagtaataagcagaatctgagaatgaactgtgtattacataataaaccaatactacatggctgaacttgacaatataactaagtaatgtaagagaatatcctttttcttagtatatacaccctgattattcacaggtaaagggc

SEQ ID NO: 299317 - DNA, 570 bp, Homo sapiens
gagtgaaataacttaaagtagaagtgattaaggttatacaactagcaactgacagagatgaccttgaaacttagtattgtgtgactccaaaatgcatgcttctggccgggcgcatggctcatggccgcaattccagcactttgggaattcgaggtgggtggatcagttgaggacaggagtttgagaccagcctggacaacatgtgaaaccctgtgtctactaaaaatacaaaaattagctgggcatggtggcgaggcctgtaatcccagctactcagcaggctgaggtgggagaattgcttgaacctggggggggcggaggttgcagtgagccaagattttgtcattgcattacagcaagggagatagagggagactctgtctcaaaaacaaacaaacaaacaaaaaaacatgtttcttcattttggartaataagcagaatctgagaatgaactgtgtattacataataaaccaatactacatggctgaacttgacaatataactaagtaatgtaagagaatatcctttttcttagtatatacaccctgattattcacaggtaaagggc

SEQ ID NO: 299318 - DNA, 684 bp, Homo sapiens
ttgatggctttggggtccttgggggtagggtgtggtcagtgaaatcttcccagaggaggtacatttgagctgataactattaaataattaaaaaaaatacacaccaagagtagtaagttttactctggaggtaggttcaaagaaaaaagatagctcaaaagataaagtgtccaactctgagttacaatcaaggtgacatttgaaatgaatattaaaggatgaattttcccaggaggcaagggagagaggtattctgaggagaggaaaccgcatctccaatgacacggaagcatgaaacatgaaaagcaaatgcacactaggtaattttaagttgctttgtgtggcctgagcctgcccatgaaggaaagtggtcaaaaatcaagctagaggtcaacagagggagataaggaaggactgcatatgaaattccaaagagtttgagttttgttctgggaagcatgaggcctgtattttagtaaagcastactttgtgactgattgggaagagtgactggagaagtgttgggctggaatcaaggaaacacaatgaaaaggctgctgtgatcatccagcaaagagatgatgaactagcactgaggagctagtgagagtgagatggagtaagaggagaaggtgggattgaaagatatttaggcaataaaatcaattgattttggtaactgt

SEQ ID NO: 299319 - DNA, 307 bp, Homo sapiens
agtggtgttctggctttggcagagtcaaccttctgagaaactcatggacatgtctgtgcatgcctgaacttgtctgacaaagccaagcagagatttcaggattggccagattcagacacaagcggcctgcttgctcggaaccaaaatggaacagtcagaggaagtgcaggattagaaagaagaaacaaaagattacagtctgaaatctgttaacagcagaggttgcatggtgaatgaccatgctgatgacaawaaactaagctgtcatctattgaatggctcactgacaagatcccatattaggctt

SEQ ID NO: 299320 - DNA, 439 bp, Homo sapiens
taattagaattggcataaaagatgttatctagtttccattcctactgctgccatttggatttaagagtgtggagattggccaggcatggtggctcatgcctgtaatcccagcactttaggaggccgaggtgggtggaccacctgaggtcaggagttcaagaccagcctgaccacaatggtgaaaccccgtctctactaaacacaaaaaattagccaagcctggtggcaagcacctgtattcccagctacttgggaagctgaggcaggagaatcgcttgaacccgggagatggaggttccagtgagccaagaccacgccattgcactccagcctgggcaacaagagtaaaattccgttttaaaaaaaaaaaaaaaaaaaaaaaaaaaamaacaacaacaaagtgtggagattttgaatttaggtccagttctaccaaccg

SEQ ID NO: 299321 - DNA, 608 bp, Homo sapiens
tgtcccgtcctctgacgttctcgttggtggcatcagtctgggtcataccacacataccacatccttccaccactccctgtagtacccttatctcagcaagagcctttaactgtatctcttttgtaatacacattttatgtaataaaattacatgttagattttatagagcaaagaataatttaaaagaaactcataaaaaacaatgaaggtttggttatacatttatcccattaccatttactaagtcacttctgtatgccatgaaatggaaaaattaggaagaaaatagcaccacctctcccatcaaagtgttcacagcctagttaatagagacagactcaaaatatttgactttaaaataatgaggaattgggtactaatcatttgttcatattaatgggatacctacagacttcatcttttcaggctgctatgacaaaatattaatagcttaaactggataattaataatcaacagattttgctgcttatatttatggaggctgggaagtccaaggtcaaggcaytagcagattcagtgtctgatgagggcctgttcctcttagatggcactttctgtatcctcacatggtggaaggggcaagat

SEQ ID NO: 299322 - DNA, 577 bp, Homo sapiens
gactctgtgaaataagttcataaaattattgtgtccattttacagattagaaaactgttgtgtcaaaaggctaactcaytttctcaaaatcagtgcaacaatttatataagaggccaggagccagacctttatctctctggttgccaaccatggggtaccattttagaaatctcttttagatatgaaactatcctacttgaattaaagagagaaaaaaaatcagacagttacatttgaaaagaacaattaagtgtttattaatatatttctttgtttattcaataactgttattattagttccttatagcaatttattatactgtgtgctgtacccataggacggaaaaatgaatgaaacattgcctgctcacagtgagcttacaatctagcgcagcctagttagcgtaaaattatcagtattttaacagctttgtgctttaagagcacagaggagggagcaattgatttccttagggatgtagttatacaaagaatatctcaaagacagatggcatctaaacataagcctacagaatggattaaaccattgctaaatgcagaaagtggtcttcagg

SEQ ID NO: 299323 - DNA, 606 bp, Homo sapiens
gagggataaactttagatagcaagggacacagccatatattgtgatggaagaaagagaggaaaatggatggaaatgaagcttatcttaaagacttgtgggagaacactgaagaaatttcctgtcctggattctattactaataaaggaaggttttatctgtggagagccaagaattggtagagcttccagactcacttgggatcagtgaaatagtggccagggaggaagcttgagaggagcgtgtaggagaaacatgaatgattgctctgtgttgaatagacaaatccatagagtgttgagagctcaaggtctgagactatcaatttcttgtagccccaattcacagggttggacattttktttaattctcccagttttcagcagcagtgttcagattgtaacattaataaagcaaatcagtgaatattgcatagtagaggaagtaaaaatattctattgataaaggaattctttaaagtgggcacccaggatctaagctgtggaaagaaagggaagtctgggcatgactggtagggagaaattagaggggtcaaatgattgaaggtattttttctcttctctctaatctgttttggatatccctt

SEQ ID NO: 299324 - DNA, 590 bp, Homo sapiens
gttctgtttattataaattacccagtctcggatgttttgttatagcagcataaatggactaagacactaaaccaccagttttcgctctatgatcacattctattttggtatactttttgtgtgtgttagttgttattggtgttaatgattgcctcgagaacagcaagggggatgtttgtctccatgattcaatcacctcccaccagtcccctcttccaacactgggaattgcagttcgacatgcgatttgggtgaggacacagagacaaatcatatcacttcctcacaaacacacctgttcatgttttaacagctacctgagcatcactcagcccagtcatgttgacacataaaattaaacatcacacctttattttcagtagaacccttttcaataaygctttttccattaaaaaatgtgtggtcaaaactagtagttattcaatcagttataaggttttaaaacttgaatatatctcttccagcatcttctgtcttctggattctatgtggattagtttttccctaagccttttaatcatttgttatcctgagattttccttctacacaatcctagagatttatattt

SEQ ID NO: 299325 - DNA, 613 bp, Homo sapiens
gccattcaggttgtagatttttgcttaagtttcctatttttaatacatgtcttatctcaacctcagctttgtcctgggtatccacatcaagagcatctttagtttcacttctccaaagaataaaattcccacgttctttcggcctggtttggggaagagcagcacctggcattctggccaggagaagataatctggaattataaaactttttaaaaattaactttcaatgaatcctcctctcttcaactgtctcctcattcctaccttgtaagataccaggtgactttcctgagcctttgcaaagttttgtggcatgaatcatcttgtttcttttgatcttcttcatgctccttcagtcatttgggtttctgcttcctcaccactgatgatgtggttttcattaatccatctgcttcccatcttcctgaattttgttgacatacctcatctgtttacttacaccttctatttttttccactgggtacttctgggtttataccatgtttattcctttacaggcatgatcatggcatttcagaagattctaagaaaaatgtatgttctaaatacatyatgcttaaatgaaaaacaataacaaatttttattgttt

SEQ ID NO: 299326 - DNA, 568 bp, Homo sapiens
ttgcattgccagtaagaaagactgggagagaaacaggttgaggaatagatcaacaaaagtccaaagtttccttttagtacatactacttttgagcgatgccaagtagcagcttaactatctcagtctggaatttacggtagtcagtaataacatttaaagttgtggaaccagatgagattacatagaacagagatctacaaactataaccatcagtccaaatatggccattggttgtttttattggaacatgaaaatgtttgtttttgtatattctatatggaaacttttgcactacaatggcrgagttaagtaggtgcagcagaaaccacattgccctaaagtttaaaatatttactatctggtcttttatgggaaaagtttgctgatttttgacctagggagtaattgaagatgaataagaaagtcaaggatgaagttctggagttcacagacatttaaagattggaaagatgaaggtgacccagcaaaagatactgagaagaaacagcaagtgaggaaaggaaaaccaagtgagtgtgatatcccaggaaccaagtacattcttg

SEQ ID NO: 299327 - DNA, 517 bp, Homo sapiens
ttcctaaaagtcctgggtaagttcaaagctggttcataactatctcttcatcagtgttaacaatgtgaatgatagaatgcaccataatcttatggagatggttatagaaataaagacctcatgtaacaagcaatttctaagcataaggcaaagcactgacatttgactcctgtcttaataagagttcttcagagagaaacaactgatagaatagatagatagatagatagatagatagatagatagatagatagayagatagatagatagacagatacatgtacatacagacaggaagagagagaaaggaaaagtaatttatgaatgaaattagctcactccactatgaagactgataagtcctacaataggctgtctgcaagccagagaacctaggaagcctcgattatggctcagtccaaatctaaatgcctcaaaacaggaaagctggtagtgtcactcagtccaaacctgaaagccatagaaccaaggatgctggtggggtgtctctcagtct

SEQ ID NO: 299328 - DNA, 522 bp, Homo sapiens
tttcctataacatcagccatgccctctgtccagtcatgaatattcattcctccaaggtctggagtgctctggtacttctcaggatgtcagaagaacctagttgaatgaagttttttgagaagggctgtaatttccccatcttcactgcttttgtatgaatcttagcatctgggaactactcactgtttaattatattaaactgtgtgtgtcagatttggataaagaygttgtttgagcatgacacttagcactgctaattggcttgaagaaacaaaacttattctactgaaatttttttatgacaaaatgtatcccagtttacccaatgtattccatgccttttagttagtaaaatgtttacagttttaagttgggtaagacagaattttccaggaatatgtcagtgtttccattatgcccttttttttcaccccaaagtagcacaagtttattactatgtccataaaaattaatattccaccgaaacttggcaccaaaccgtaaagtaaatgtttacatat

SEQ ID NO: 299329 - DNA, 619 bp, Homo sapiens
accaacagcttgcaccatgcacttggaaaaactgcaggcactcaaagccagcctgtgaaagcagctgcaggggctgtatccagcagagccacggcggggagatgcccaaggccttgggagccaccccttgtatcagcgtgtcctccatgtgagacatggagtcaaagagattattttggagctttaacatttaatgactgctctgctaggtttcagacttgcatggggcctgtagtcccttagttttggctgattctccattttgggatgggaacatttacccaatgyctgtgccctcactgtatcttggaaataattaacttgacttttatttttacaggttaataggcagagggacttgctttgtctcagatgagacattggacttggacttttgagttaatgctagaatgagttaagactcttgggggctgttttgtaagcatgattctgtgttgaaatgtgagaaggaaatgagatttcagggaggctaggtgtggaataatatattttggctctgtatctccacccagaactcatgttgaattataattcccagtgttgacagggtacttggtgggaggtgattgaatcatgggggtggattttccccatacta

SEQ ID NO: 299330 - DNA, 563 bp, Homo sapiens
ggctctcatgaagctcacagtataacaagaacaattgacattaagtaagtagtttcaataaagcctggtatgttttataataagcttaatccaggtactttaggagagcatagctgtaatacctcacctccctcaccgaagggattcaggtaaagcttcatgaaagatgtgccttttaagcagagacctgtagagggctaagatgtgcccaaaaaagaaaagggaggaaaatcttatagaaagagggaataaaagatacacaaacctggaggttaaaaacaaaaacaaaacactgcatggtatagttaagtaartaaataaattttgtatccctgaaatatagaatatatgaaaaaataactagagataaggccagggaaataggcaaggatcaaaatcctgtgaaactggataaggagtaggaaaaggagcatatgagccttgctaagggggttgtactttatgctgaattaatgcagggccattccaagattttaagcagaacagtagtataattacatttgcttttatcaaggtcattctggttgtagtacgttggaagg

SEQ ID NO: 299331 - DNA, 553 bp, Homo sapiens
actcaattagaaatgaaatgagagctgttgcaattgatattacagacatacaaaagattattccaggctactatgaacatctatatgcacacaaactaaaacatctagaagagatggctaaatttctggaaatatacaattctcttaaattaaaccaggaagaaatagaaactctgaacatatcaataacaagtagcaagactgaaacagtaattttaaaaattgccaacaaaataaagtccaggacaagatrgattcacagctgaattctatcagacatgctaagtagagttggtaccaattttactgaaactattcaaaaataaagagtgaaccctcccaaaatcattctatgtcaccagccactagggtggtataagtcaccccaataccaaaaactggaaaggacataataaaaataaatctacagaccaatatctctgatgaacatggatgcggaaatcctggacaaaatactagctaacagaatccaagagcatatcaaaaagataatccaccatgatcaagtgaattttgtaccaggaatgcaggg

SEQ ID NO: 299332 - DNA, 595 bp, Homo sapiens
aatcaaatcataaaaggcaaattaaattgagaaaatgcatacaaaatatattaatgtgtgcacgagaaggatcacagagtgattatcctatccctaatggggtgcagaagattatataccaacttgaggttacagaaagaatgggggcttaaagcatggtcaaaatcaggttatggtggtaaatcagctgttggtggcaaaacagatcatgagaggtagagaagaggaggcttggctagcaaaggtgatcttgttatgtagattaaacctcacaggtagcaaccctcagagagaatagatgacaaatgttcctttcagacctataaaggtatcagattcacagttatttttttctagatctggacaaggggaggcctggatgcatcaatgcagattctcttcacatgcaaatctccccaacaaaaacagctttgcaagttacttctgtttgctgactctgtgacagccatcttaaaacatgtcaaagaaatatattttggcrtaagacatttttattttctttataaccaatgacgtatgatggaggaggcaatgtgtgagtcacaagactaggtcataaaggcattgcaacttc

SEQ ID NO: 299333 - DNA, 536 bp, Homo sapiens
agtcgcatgacaccagctgagaataaggccttttgaggctgctggagaaagcgatcaatggagtgagaccagagaggctgttcttgtcagccacgatttacacactttgaggaatcatcccccttccctctgttcatgagtgatttgtgctcagtgagctgacattttctctttttattcatttatttttattaaaaatcaatacatgccctactataaaaattctaagtaaaaaatattgcatagaaagcaaaattattcttttaccatgcccttatgtccccaattttatagtcagtcccaagtcactatgtatccttgcacatattattgtctacatgtgctaaaaagagtaagctcatgcatttttattatctatataatatttcatcaccttaaayatctatataatatttcatcaccttaaatatgatataattgtatttcatggacatcatttcatataaatcatcacgtccaggcagtgtgttcttttcacaagcttatgaagtgaactagaaataggaaaatgtttt

SEQ ID NO: 299334 - DNA, 524 bp, Homo sapiens
gggaaatctaaggcaaatcttcataattttagttcagatttctttccactgtagaagattgccttgaaaatctcctgtttccatcatctagagtacttgaccagggaccttctataaatttagcacaggtttcatcttgtaatacacaattcagtacttaattcttggggcactgcaggccttgtaagagcttagagaaaagtacaaacattacttttctattctatgyttcaatcatcttttaaattacttgacatattcatgtctaaattcaaacaattaagacttcctctgcatttgttctatacatctcaaggtgtgggatatctctcttgattagctagatagatagagatctatattaatctatatatatgccactagtatgctagagatatgtatccttattggtgtcttccagatagtagtatgtagttttcatgggccagagtttgcttttgtttttgttttcaattacaaaattgtatatatttatcatgtgcaacatgttgttttgaaataca

SEQ ID NO: 299335 - DNA, 615 bp, Homo sapiens
acaattaagacttcctctgcatttgttctatacatctcaaggtgtgggatatctctcttgattagctagatagatagagatctatattaatctatatatatgccactagtatgctagagatatgtatccttattggtgtcttccagatagtagtatgtagttttcatgggccagagtttgcttttgtttttgttttcaattacaaaattgtatatatttatcatgtgcaacatgttgttttgaaatacatatacagtgtggaatggctaaattgagctagttaacatatgcattacgtcatatatttayaattgttttgttgtgagaacagttcaaatatactttcttagcaatcagcaagaatttttgagccatgtgaataagtaagcacctttaaatgtgcaacaattgggaagtagccatatacagtacgttaagataggcattttcggtattttaccaggtatttattgatttctatcaagtgtatcctcaagtactattaatgctaatagatgttccacatgttttaggagaaaaatagtatgttttttaggataagagaaacattaagtttctaagagactggactcctgagaaattgtgatggcaaag

SEQ ID NO: 299336 - DNA, 615 bp, Homo sapiens
acaattaagacttcctctgcatttgttctatacatctcaaggtgtgggatatctctcttgattagctagatagatagagatctatattaatctatatatatgccactagtatgctagagatatgtatccttattggtgtcttccagatagtagtatgtagttttcatgggccagagtttgcttttgtttttgttttcaattacaaaattgtatatatttatcatgtgcaacatgttgttttgaaatacatatacagtgtggaatggctaaattgagctagttaacatatgcattacgtcatatatttataattgttttgttgtgagaacagttcaaatatactttcttagcaatcagcaagaatttttgagccatgtgaataagtaagcayctttaaatgtgcaacaattgggaagtagccatatacagtacgttaagataggcattttcggtattttaccaggtatttattgatttctatcaagtgtatcctcaagtactattaatgctaatagatgttccacatgttttaggagaaaaatagtatgttttttaggataagagaaacattaagtttctaagagactggactcctgagaaattgtgatggcaaag

SEQ ID NO: 299337 - DNA, 615 bp, Homo sapiens
acaattaagacttcctctgcatttgttctatacatctcaaggtgtgggatatctctcttgattagctagatagatagagatctatattaatctatatatatgccactagtatgctagagatatgtatccttattggtgtcttccagatagtagtatgtagttttcatgggccagagtttgcttttgtttttgttttcaattacaaaattgtatatatttatcatgtgcaacatgttgttttgaaatacatatacagtgtggaatggctaaattgagctagttaacatatgcattacgtcatatatttataattgttttgttgtgagaacagttcaaatatactttcttagcaatcagcaagaatttttgagccatgtgaataagtaagcacctttaaatgtgcaacaattgggaagtagccatatacagtacgttaagataggcattktcggtattttaccaggtatttattgatttctatcaagtgtatcctcaagtactattaatgctaatagatgttccacatgttttaggagaaaaatagtatgttttttaggataagagaaacattaagtttctaagagactggactcctgagaaattgtgatggcaaag

SEQ ID NO: 299338 - DNA, 541 bp, Homo sapiens
acattaagtttctaagagactggactcctgagaaattgtgatggcaaagaataaaagcagagcacagtttcacaattaaataattctgggcaaatgtcctactaggtttcttagacaattttatttcttggacagcaggtacagagaattgagtaacccgtgctcctcacttcattgtacatcatactcaattattccagcatgttcctttccttattttattctatttatttttattctctccttcatccctcccaccccattgtcatttccctaccactgattcctttatgctgaattcaccataaattattcaatatgttctttgatatgtatgtaatagggtttggctttgtttycctacccaaatctcactttgacttataataatccccacatgtcaagggcaggaccaggtggaggtaattaaatcatgggggcagttttccccatgctgtccttgcgatagtgagtgaattctcacaagatctgatggttttataaggatctggcatttctcctgctggcactcattccctct

SEQ ID NO: 299339 - DNA, 482 bp, Homo sapiens
tttgggctaatactgaaattagttaagactttggggaactgttggaagggcatgattgtgttttgaaaagtgaggacatgagatgtgggagggttgaggggtggactgatgtggtgtggctctatgtacccatccaaatctcaccctgaattgtaataatccccacaagtcaagggtgggaccaggtggatgtaattgaatgatggggacagttccctcatgctgttcttgtaatagtgagtgagttctcacaagatatgatggttttatgattgtccagcatttcaccagctggygctcattctctcttctgttgccctgtgaagaggtgccttctgccatgattgtaaattttctgaggcttccccagccatgcagaactgtgagtcaataaaaccactgttctttataaattacccagtctcaggcagttctttgtagcggctgagaacagactaatacagtatatatccctgaaagaa

SEQ ID NO: 299340 - DNA, 482 bp, Homo sapiens
tttgggctaatactgaaattagttaagactttggggaactgttggaagggcatgattgtgttttgaaaagtgaggacatgagatgtgggagggttgaggggtggactgatgtggtgtggctctatgtacccatccaaatctcaccctgaattgtaataatccccacaagtcaagggtgggaccaggtggatgtaattgaatgatggggacagttccctcatgctgttcttgtaatagtgagtgagttctcacaagatatgatggttttatgattgtccagcatttcaccagctggtgctcattctctcttctrttgccctgtgaagaggtgccttctgccatgattgtaaattttctgaggcttccccagccatgcagaactgtgagtcaataaaaccactgttctttataaattacccagtctcaggcagttctttgtagcggctgagaacagactaatacagtatatatccctgaaagaa

SEQ ID NO: 299341 - DNA, 665 bp, Homo sapiens
cttaaatctatccatcttgctgttagcaatctaatttactactggaaacttctgcataatattttatcactgcaaattcacccactgcattttgttcatctatatcttctgtgatggacatccaacttcccccaatttgctatttccttaaacaatgatgtactaaactttctcatacctaccttttcatggaattgtgggaaagtttctctggcatatacatataagagtaggattatttgtttgtgagagataccataacttattccatccagtctttccaaattactctccagaaaggcagtaactggttaaacatttactagcagtgcataagcattcctcacaatcttaggaacayggcataatccaattttatattgttgttaacctgctgagtataaagttattttaatttttacttttcagattactataaatttgaataactcataaacatagtgatttttatttccttttttgatttatttttatccttttccagttgattttgtactgtattcaaacatttttctcttatcagtcatcactcatctgctaactttgtctgtaacatcctctcttgaagagatgtctaaactttgataaagtcacatcaatctattttcctccttaaggtatgtgcttttgtgagtgttatttaa

SEQ ID NO: 299342 - DNA, 665 bp, Homo sapiens
cttaaatctatccatcttgctgttagcaatctaatttactactggaaacttctgcataatattttatcactgcaaattcacccactgcattttgttcatctatatcttctgtgatggacatccaacttcccccaatttgctatttccttaaacaatgatgtactaaactttctcatacctaccttttcatggaattgtgggaaagtttctctggcatatacatataagagtaggattatttgtttgtgagagataccataacttattccatccagtctttccaaattactctccagaaaggcagtaactggttaaacatttactagcagtgcataagcattcctcacaatcttaggaacacggcataatccaattttatattgttgttaacctgctgagtataaagttattttaatttttacttttcagattactataaatttgaataactcataaayatagtgatttttatttccttttttgatttatttttatccttttccagttgattttgtactgtattcaaacatttttctcttatcagtcatcactcatctgctaactttgtctgtaacatcctctcttgaagagatgtctaaactttgataaagtcacatcaatctattttcctccttaaggtatgtgcttttgtgagtgttatttaa

SEQ ID NO: 299343 - DNA, 588 bp, Homo sapiens
ctttttattttattttatttttgagacggagtcttgctctgtcacccaggctggagtgcagtggcgcgatctcagctcgctgcagtttatttttatatttaagtttcagattacttatggtttatatttgtataaggtagaaatctaactttatttttctccatatagtaagtctttttttctcagcaatatgaattaaacatttactcttttccctgtgatgtttatgcctcttgtatcayttgaaaatgtacatacgcatattgtgtctgtgtgtgtgatatttgtttcattgctttctgttttattaatctatttgcctataaacagatcagtactacattttttattaatatatttttatagcttgtattagtatctggttagtctttaacttctattttattatttcttaagtagcctttgctattcatgaaactttgtctctcataaacattttagaatcagttttcaagtctgccttcaaaggtttgctatattttgagcagaattgttttgaatttttaattcttctggaaaaaaattaacatctttacaatgtttcataatttaattgacaaagacagt

SEQ ID NO: 299344 - DNA, 548 bp, Homo sapiens
tcacatcaatctattttcctccttaaggtatgtgcttttgtgagtgttatttaaaaaatactttctcacttgaagtttgaagagacattttcccattggttttgactttttattttattttatttttgagacggagtcttgctctgtcacccaggctggagtgcagtggcgcgatctcagctcgctgcagtttatttttatatttaagtttcagattacttatggtttatatttgtataaggtagaaatctaactttatttttctccatatagtaagtctttttttctcagcaatatgaattaaacatttactcttttccctgtgatgtttatgcctcttgtatcatttgaaaatgtacatacgcatattgtgtctgtgtgtgtgatatttgtttcattgctttctgttttattaatctatttgcctrtaaacagatcagtactacattttttattaatatatttttatagcttgtattagtatctggttagtctttaacttctattttattatttcttaagtagcctttgctattcatgaaactttg

SEQ ID NO: 299345 - DNA, 579 bp, Homo sapiens
agaagggaactatgagattcccacatctggtcatcagtggcttctaaacagaagcttctttaagcctcatatatgtgtgaattgtgcccccagacatgtgcacaatttgcacaaacagaggtggcatcacagggtgacttctagaatcagagatccaagggtactcctctaaaatacgtgcagagatctttgccattagctgaagggatacctgaggatactctcccttcttttcctaaactmaacctagaagtctacttttaaaagtaaaatatattaataaataatggatgccagccagtttgcaatgtgttttacatgagctcttatttaaaacacaacagacttatgatgttgattcaagcaatatgctacaagacactaacatatagactaacataataataaaataaacaaaaattttattctaatcattatgacacaagacctgatagaaaactataaattcaacttaaacccgagtaagagaagaagcataaccaaatgtgaactgttgaataatgatatgctttaggatatatacaaaatgaaaataaatggaaacataaaaaacagtct

SEQ ID NO: 299346 - DNA, 579 bp, Homo sapiens
agaagggaactatgagattcccacatctggtcatcagtggcttctaaacagaagcttctttaagcctcatatatgtgtgaattgtgcccccagacatgtgcacaatttgcacaaacagaggtggcatcacagggtgacttctagaatcagagatccaagggtactcctctaaaatacgtgcagagatctttgccattagctgaagggatacctgaggatactctcccttcttttcctaaactaaacctaraagtctacttttaaaagtaaaatatattaataaataatggatgccagccagtttgcaatgtgttttacatgagctcttatttaaaacacaacagacttatgatgttgattcaagcaatatgctacaagacactaacatatagactaacataataataaaataaacaaaaattttattctaatcattatgacacaagacctgatagaaaactataaattcaacttaaacccgagtaagagaagaagcataaccaaatgtgaactgttgaataatgatatgctttaggatatatacaaaatgaaaataaatggaaacataaaaaacagtct

SEQ ID NO: 299347 - DNA, 548 bp, Homo sapiens
ttttgtgaacaaaagtaggaacttctggcattagctggatgaaagcaagaatgcttcgaaatgtagccatttagcacctttctgtcttggctgtttacttttytttgctttcactcaacacgtgattactgacactctcccggacttcctgaatacacttttggggtttttatgacatcacaatgtgaatgccctgtgagaagcctggaattcttaaagctgtgcaaacagcgttcctaaagaatttctttactataaattcaaaagataagagttatgaatcctccatctctatgacttgattcatcaaaatattttcatttcatggttatagaatattcaaaaatatttattatctgtataattttatatagaagttatttaatctaaacaagggtcttttaaaactggcagtagtgttccttttttcccattcaaagttcttacataatagatttttctgcataatataattttaaaactcttgataggtgactgcaacatttttgagaccatgtcataagatgaaatgcagatgtataattatt

SEQ ID NO: 299348 - DNA, 548 bp, Homo sapiens
ttttgtgaacaaaagtaggaacttctggcattagctggatgaaagcaagaatgcttcgaaatgtagccatttagcacctttctgtcttggctgtttacttttctttgctttcactcaacacrtgattactgacactctcccggacttcctgaatacacttttggggtttttatgacatcacaatgtgaatgccctgtgagaagcctggaattcttaaagctgtgcaaacagcgttcctaaagaatttctttactataaattcaaaagataagagttatgaatcctccatctctatgacttgattcatcaaaatattttcatttcatggttatagaatattcaaaaatatttattatctgtataattttatatagaagttatttaatctaaacaagggtcttttaaaactggcagtagtgttccttttttcccattcaaagttcttacataatagatttttctgcataatataattttaaaactcttgataggtgactgcaacatttttgagaccatgtcataagatgaaatgcagatgtataattatt

SEQ ID NO: 299349 - DNA, 548 bp, Homo sapiens
ttttgtgaacaaaagtaggaacttctggcattagctggatgaaagcaagaatgcttcgaaatgtagccatttagcacctttctgtcttggctgtttacttttctttgctttcactcaacacgtgattactgacactctcccsgacttcctgaatacacttttggggtttttatgacatcacaatgtgaatgccctgtgagaagcctggaattcttaaagctgtgcaaacagcgttcctaaagaatttctttactataaattcaaaagataagagttatgaatcctccatctctatgacttgattcatcaaaatattttcatttcatggttatagaatattcaaaaatatttattatctgtataattttatatagaagttatttaatctaaacaagggtcttttaaaactggcagtagtgttccttttttcccattcaaagttcttacataatagatttttctgcataatataattttaaaactcttgataggtgactgcaacatttttgagaccatgtcataagatgaaatgcagatgtataattatt

SEQ ID NO: 299350 - DNA, 548 bp, Homo sapiens
ttttgtgaacaaaagtaggaacttctggcattagctggatgaaagcaagaatgcttcgaaatgtagccatttagcacctttctgtcttggctgtttacttttctttgctttcactcaacacgtgattactgacactctcccggacttcctgaatacacttttggggtttttatgacatcacaatgtgaatgccctgtgagaagcctggaattcttaaagctgtgcaaacagcgttcctaaagaatttctttactataaattcaaaagataagagttatgaatcctccatctctatgacttgattcatcaaaatattttcatttcatggttatagaatattcaaaaatatttattatctgtataattttatatagaagttatttaatctaaacaagggtcttttaaaactggcagyagtgttccttttttcccattcaaagttcttacataatagatttttctgcataatataattttaaaactcttgataggtgactgcaacatttttgagaccatgtcataagatgaaatgcagatgtataattatt

SEQ ID NO: 299351 - DNA, 527 bp, Homo sapiens
cacaatgacatcccaatatgttttgtcatattttatttgtgagaagcaagtctccccatacagactgtgaacatggggtcactctaagttctgtccatcacagttcccaagacacaaatactatcttggcatgcaaaagaaaaatttaattatttcatatacaattttagtatcaagcacatattaagacattatattctagcaattatactattctatgatatatgcatgaatatctgtctcacttcttgtagttacctttcatrgatatacactcacaattatctgttaaagaaaacaagggaagaaataaggggaggaaaggggaaggaaaaaaaagaagaatataacatatttctatattaagataacggagcaaaaatgatcaaaagataatttcttttgctggccattgaaataagtggggccataacttacggtaggacaaaaataacagtaaaactaggactggtaaagggtattcgaaataacatggcaaagaaaaaagttcaccaatttacttacaa

SEQ ID NO: 299352 - DNA, 554 bp, Homo sapiens
ataaggttaatccactgattcattcatttattcatccaacaattgttagttatttgtttgcttatctatttctagttgttctcctaatataatgtggggcagaagcaaaaatcaaacatatttgagaatggcataccaaataggcttcaggaaagccataagagaaaagcaatggagtaaagtactatcttgtagtcagaagatttgaagtagtcaggcatcatttttatttactgctaggccggygttttactgtcttaagtgcagctgtcaccttttttattatttttctatacttctgactactgctgatctgtgcaggtctttaagaatttatagaacaccttgaagaaaaggggattgataaaccagaagatagtagctggtgcaaaacggtgttttaaatgtacattctatctccacttaaaagaaatatattttttccacttcagaatgtcttgatttccagctccaccaagttactagttagtcatttttcacatccaagtttccttatctataaaatggcaataataataacagagttgtgcttc

SEQ ID NO: 299353 - DNA, 623 bp, Homo sapiens
acattagtaatttataagaagtgtgttctcttctgactggtgttgacctgtttgaatgtttacttataaagactagggggtacattttattatatcatcttttagagagattaatagacatgacagatttctcattgctgggaccactaatggcctataaaataaccatttggattattttataatttttatgatcccaataaaatcaatagcctctgactttatatgcaaagaatgaattacacagactagagaggtgttacatttaaatctcatggtaaaatttatcctgttggcaaaggtgcccttcaagatgggggcctagatgatatacaaacacacacacatacaaatccagtttgtttgtgatgaataggtatgagttttatcttattaaatygtcttgcagaagagagacacagagacagaagatataatcctaaatttgcttctaaatatacaaaaatagtaacaacttaaacaaacatcacaatgatacgaataaacacatgcctccatcattacagacctattcaatatattttgaggcttcaatcatgattgctggatagagtttggctttttggagataaaaagaaacggaaaacacacattctcactta

SEQ ID NO: 299354 - DNA, 592 bp, Homo sapiens
aaatataataaagtgttttggaaagcaggaaactttattttataactttaagtgaaaaatatgtggcattaaggcctgattttttattgttttgtctttttttaacttcgggaattaaaattttttgtttaaatgctgaatttgaaaattgaaacagacttttgggttttgttataaaagcaaagtaataatgtttttatgtattttatagggttatatagcataataacttgaatttatggttggatttgactgaatttatayagatactaatttgaatgacttatacacagaaaatgtgcaatattttaagtataaaaattaaactggaactgtttgcttttgttttatagtataaataaaaataacctagatggcaaactatttaattatttgagcagaacttatgaatgaaagatatattttagagccatatgactgagggacattttaacttgcactttttagtggcaaaagtagtgtataaactaatgttagtgtatacactacaaaagggctaagtgtgtaatattttttaatttcattttaaaaatgaaagtctttttttttacggtgaagggcaataacacta

SEQ ID NO: 299355 - DNA, 534 bp, Homo sapiens
gtcaaatattccatgatgtcaggcaaactaatttgttgataatagtacagaccaggaataagttatctatgaagtgtcacttctaattttaaatattatgagaaaggcattatctgtcaaaattttatttaagtgwtatttatgagtaagtgcagtcttaaacttgaatgtagtacactggtgtgctgtaactggtgaaaacgtgtttcatgctttctcattttcggcaagagattgtgacctccttgagtgcaaatctgcaaatttttaaaatttaatttaatatttttgcattgcatagaacagtgcctgacattaaagggctactggcaaaactgaaaaaagagtggaagaaaaataaataccaaaaaagtagagaagaaagaggtagatgaaagagatataggtaaaggaagaagatggtagagaaagaacaagagaaaaacagtagagggagaaggcaagaaataagagaagggacaagaaggttacaaaggtagagtgagcacttggtaaggaggaaaaagtagaaag

SEQ ID NO: 299356 - DNA, 568 bp, Homo sapiens
catgctttctcattttcggcaagagattgtgacctccttgagtgcaaatctgcaaatttttaaaatttaatttaatatttttgcattgcatagaacagtgcctgacattaaagggctactggcaaaactgaaaaaagagtggaagaaaaataaataccaaaaragtagagaagaaagaggtagatgaaagagatataggtaaaggaagaagatggtagagaaagaacaagagaaaaacagtagagggagaaggcaagaaataagagaagggacaagaaggttacaaaggtagagtgagcacttggtaaggaggaaaaagtagaaagaggccagaggggttaactaatttctcccatttccccatcacagaacagcaggttgtggcttccaggaaccttcaacctatacacaaggtctcttctgcttcttttagagagccaaactatgcaatgagcaattccataaagcttggagagccacccatagctctttactgacagatttgaaacccctcctgtagagtacacaagattcaggagaagattctcacttcctatgtgaatgttgt

SEQ ID NO: 299357 - DNA, 492 bp, Homo sapiens
ttttcatttattcatcatttcactctgcccttggactcaaaagagcccatgccacctcctgatggaaaagcccaagttacgtttgggaattataatttctctttttctgattctacttactggcagggtaaaatatgtagaaaaaaagtgttcctccatttgccttcttaaatactttctcttgtttataaacctaacaatcatctatcagcaatgctgtttctaccctgccagaacaaggcctcargaaaccatttcctctggagcaattccagaagggctcagtgagcactcaataccttttacactgatggactgtatgggtttcttgctctcagcccctgtaggatttgcacattttgttttcatgcccatcactcatggacagaagtaaaaatatgctatttacctctttccacttatgtagacctcacattttgtttcaccttagtggcagtgaggggggagttttgttcacatttagcaagtctg

SEQ ID NO: 299358 - DNA, 492 bp, Homo sapiens
ttttcatttattcatcatttcactctgcccttggactcaaaagagcccatgccacctcctgatggaaaagcccaagttacgtttgggaattataatttctctttttctgattctacttactggcagggtaaaatatgtagaaaaaaagtgttcctccatttgccttcttaaatactttctcttgtttataaacctaacaatcatctatcagcaatgctgtttctaccctgccagaacaaggcctcaggaaaccatttcctctggagcaattccagaagggctcagtgagcactcaataccttttacactgatggactgtatgggtttcttgctctcagcccctgtargatttgcacattttgttttcatgcccatcactcatggacagaagtaaaaatatgctatttacctctttccacttatgtagacctcacattttgtttcaccttagtggcagtgaggggggagttttgttcacatttagcaagtctg

SEQ ID NO: 299359 - DNA, 553 bp, Homo sapiens
gtgtgttatacctcagcaaagtgcttggctacatttgttcattccctagagatctgtagaagtttgaacttccatgatgatttagggcatctggcagaataaacttataagcagcaaaatgttgaagatgtggcctggttgattgtaacagccaaagctcagatgcaggagcaagagactgacttaaagttggaagctgtatttaaaagaaaagcagaatttacacgtttggaaaatttgcagcctggccatgtggaagagaaagaaaaagctttcttggaagaggaattcaagtgggctgtggagcaaccacttgttagagatatttgcataacgaaaagggagcaaagttgtaatatccaagacactgggtagaagggatttggcttgtctcaaatgagaccttggagttttgaattaatgctagaatgagttaagactttggggcagtgtaaggaaggcatgattatactttgcaatgtgagaaggacrtcagattttggaggggtaagtggcagaatatagtttggagacttgtctcacccaaatctca

SEQ ID NO: 299360 - DNA, 580 bp, Homo sapiens
atctcaaaaacaaaaaagaaaagaaatttgataaaaagaatgaagaaaaaatttgaaaaagaaataaaacctctgagaaatatgaaattatgtagggagaccaaatctatgactcaatggcattcctgaaagagaaggcaagagagcaagcaacttggaaaacatttaacgatatagttcacattttcccaatctcactagacaggttgacatgcaaatctaagaaaatcaaaaaacccctgtgagatattataaaagataatattatrtaatcataatggactcaaaccaacaagaagacttaactatccaaaatatatatgcacccaacattagagcactcagtttttagagatcttcaaagagatttagaggaccacacaatctccaagacacatagccatcagattttccaaggttaatgtgaaaggaaaaatcttaaaggcagctacagggaagggacaggtcacttaaaaatagaacccaattaggttaaaagaagacctttcagtgaaaacctgacaaggaagaaattggacgcctatttttaatgtcttttttaaaaaagatattccaacca

SEQ ID NO: 299361 - DNA, 461 bp, Homo sapiens
catgggttggagttaaatgcttatggcttttctagggagagaatacaagctgccagtgaatctacccttctagattctggaggatggtgacctccttcccacagctccactaggcagtgtcctgacagggaatctgtgtgggggctccaatcccacattaccctgagcctttgccctggtagagcttctctgttaggaccccacccctgtgggcaggcttctgcctcggcttttccgtacctcctctgaaatgcagatggaagctgctaagscttcttcacactcacattctgagcatctacagacttaacactacatggaaaccaccaaggcttatgggttgcaccctcctgagttgtggcccaagttggacctgggactatttgagctgaggctgaagccagagtggctggaatacagggagcagtgtcctgaggctatgccaggcagctgggcacttg

SEQ ID NO: 299362 - DNA, 415 bp, Homo sapiens
aggttacctgatgcttttgcctcacagcttttatgactctttccttaatcttgaatttagatagtctgatgactgtgggtgttggtaataatctttttgtgatgaatttcttaggagtcatttgagcttcttgtgttctgatgtctagatctctagcaaggccaggaaagtttycctcaattattccctcaaataagttttccaaactttaatatttttcttcttccttaggaacatcaattattcttaggcttggctgtttaacataatcccaaatttcttgaaagctttcttcatttctttttgtctttgtctgattgggttaactcaaaagccttgtctttgagctctgctgttctttcttctatttcttttagtctattgttgaaactttccactgaattttgtatttctc

SEQ ID NO: 299363 - DNA, 479 bp, Homo sapiens
atatttttgagcatcactgcttaagatattgtctttttccattctcacttgcctttttgtctggcgatgctagagtggctatgggtattttggggattcaagtagcggaaaaatgataggggatgcatttggtttatttttatcaggatatattkatatggtttatcaggatatatttatatggttcacctccaggcataatttattgctagccatctcagtgcagtagaaacttgcagaaataatcatagttcccactgtgccatcttacacagcagtgtgactaaagatgcagggccagatgtcatatcatgatgtcaactttcctagtgcacttgggtactaataactcttaatttctggtgagatagaaaagaacaatttctggtgagatagaaaagaacaatcaagcctggcctaaattatagaagacatcatgaaggaaatgattcaaactgacacctgcaggataaaccagc

SEQ ID NO: 299364 - DNA, 481 bp, Homo sapiens
ttttcccatactgttcttgtgatagtgaataagcctcatgatatctgatggttttatataggacagttttcctgcacatgctctcttgcctgctgccgtgtgagatgtgcctttgctcctccttcaccttctaccatgattgtgaggtctccccagccatgtggaaatgtgagttcattaaacctaattttctttatawattacccagtctcaggtatgtcttattagcaacatgaggatggacaaaaacaccatatttgtggatgacatgatactatatccagaaaaccccatagtctctgcccaaaagctttttgattttacaaacaacttcagcaaagtttcaagatacaaaataaatgtaccaaaatcaaaagcatttctatacaccaataacatccaagctcagggccaaatcaagaatgcaatcctatttacaatagccacaaaaacaataaaatacctgggatacagcttacca

SEQ ID NO: 299365 - DNA, 509 bp, Homo sapiens
gaaataaaccttaaatcagatttcaaacacgcagctcattaaggctctgcccttttccccaaacaaagcttttgcatttccacttatacattctacagcttgtcctggatatggggagcatggggtggagaggaggtggacatggtgagagaggagggatttttttttttatgcaaccacattcttttatggaatgaactatgatgtgaaaattagtcttgcatcttttagatcataaatctgagtggggcatgytgtcttggcaaaaaccagtagcaacgtgctaagtgtttattgccaaaagcaatagcatcatgacagcagataattatgaacagtgctggtgagcagggctgggaggagatggctttgagagagtgagagtaggggctctggctgaaaccaatccagactctcaaatccttcccactgatctgccttgaagctcaatccgctttcttctttataaagagcaaggatttgggccgagcgcggtggctcacgcctgt

SEQ ID NO: 299366 - DNA, 430 bp, Homo sapiens
gaagtttaggattatagaatcaacacatttcacatttcaacggaaatgcagggtacatgatagggaagataagagataagagtgggaggttgaactcagtctgcacaccttattatgattgttcacttcacatcatacacagcctagggctctatacttcctgagcttgacattacatactgcctcacacttaagtgtaaaattagcaaatgggaaaatacctgagctcattagataatgactaatcatgatcattttaagcacagttgtcagatttgacaaataaaaacataggacattagttaaatttgtatttargacaaaaatattttcatagtaggaataagccccatgagatatttgggacatatgtatattaaataagtatgtattgtttatctaaaattaaaattcaactgggctccctgta

SEQ ID NO: 299367 - DNA, 614 bp, Homo sapiens
taatcagttaaatgtaagttgcaaattgcttcagaaaataatagaaaaagaacagaaagaaaacattaagaaaatataaaaaacaaataacatgaagcaagatatcagaagtaacattattaagctataaacataataatgatgaagaatttttaataacaggtatgctatggtttttcataacatgggatgcttagtgaaawaaagcaggctatgaaattgcacgcacatggatcacaacaatgtgtaacatgccaggatgttgacaggcagctgaatgaatagttttaaatatgtgtcttagaatcccgcaggacaggacttgagttcctaatccacgaatcacccactgtgtgaccgtgagccacctataaaacccctgtgcctcaatgtcttcttcttttttaattaatataataatagtagtttgttggtgaagattaagttaaaactatcttccagctttaggaaagttccaggcacaaagtacatgctcaataagtggttacaatgattacactattaacagcttggtaaacagtatgccagtgtctttgattcattccctaagagctcccttcgcaaagcaatattggggacaaagcttggaaggg

SEQ ID NO: 299368 - DNA, 614 bp, Homo sapiens
taatcagttaaatgtaagttgcaaattgcttcagaaaataatagaaaaagaacagaaagaaaacattaagaaaatataaaaaacaaataacatgaagcaagatatcagaagtaacattattaagctataaacataataatgatgaagaatttttaataacaggtatgctatggtttttcataacatgggatgcttagtgaaaaaaagcaggctatgaaattgcacgcayatggatcacaacaatgtgtaacatgccaggatgttgacaggcagctgaatgaatagttttaaatatgtgtcttagaatcccgcaggacaggacttgagttcctaatccacgaatcacccactgtgtgaccgtgagccacctataaaacccctgtgcctcaatgtcttcttcttttttaattaatataataatagtagtttgttggtgaagattaagttaaaactatcttccagctttaggaaagttccaggcacaaagtacatgctcaataagtggttacaatgattacactattaacagcttggtaaacagtatgccagtgtctttgattcattccctaagagctcccttcgcaaagcaatattggggacaaagcttggaaggg

SEQ ID NO: 299369 - DNA, 584 bp, Homo sapiens
catctggagatcttcatatacatatgaacaggcaccaaaatgttaatagtaggtctttccaggtggtaggatcttgtgtgacttaatgtcctttatatatttattctagtttttctaaaattatcatgtatttacaattgttgttaatcatattttaaaatatttcttaaatttaacttcttattgcactaacagaatacacttcaacacagtaacagactagcaagtagtcagctttgcagatgtcaccacatttatgtacagtgaactgagaggttcattagcaatgtgtaataacatgtcttakggtaacatagaagggataatagtcctcctaaaacactctatttaggcatagggagaaaaccaaattcatttcatgttggatttagactaataaatggctacaaatattcatcaacctctattgcctttggttttatgtaaagcctaaatataattttcaaatcactatttatttgcccttaggaaaagcaatggctactacaagtgatctctttataacactggagttagctgaaattcaattgggtattcaattattacctcagaccatattggta

SEQ ID NO: 299370 - DNA, 566 bp, Homo sapiens
attggtcttactacaagttgagttaccaggtaaggcactcatgtttcttagcttaacataaaaagacaacaggcatctcaacaagtcacaagacaaatgttacagggatggtttaaatatactgtttggagggtagggccaagacggccaactagaagcagcagtgattggaggctcccactgaaaagaaccgtaacagcatatgaatcctgcaccagcaatggaggtatccaggttctgtcatcagaactgactaggtggctggtgtgacacatggagaggaaggaagagcagtgtggtgtggtggcccacctgagagccacacaaggcaggggagcccccacccactagccaagggaagcagtgagtgagcgtgctacccagccaggaaaactgtgctttttccatggaactgtcaacccacggatcaaaagatcccactcatgagcccatgccaccagggcctagggtcccaaccatggagccacagasattctcaacaaccactaagctagaatctgcttaagcctgccaagctgcgggtggggaggggtgaccagcatcca

SEQ ID NO: 299371 - DNA, 610 bp, Homo sapiens
ttgctgattgcatttgtgcaaaataggccattatggcaaagcaygactgatgagcccatgttggagagaatctccttcaaataagtcatcacctactgatgaatctgagagcctggaatatctcttaggaacattttattaatgtctttgtatgcaaattctgtgggaatgagagagaagtattttcccatatatagtcatagattagacttaggaatcatgaggattaattttatgcattaacttgactgggctaaggaatggctacatagctgatacaatatttttttctgggtgtgtctgtgagggtgtttccataaaatattagcatttaaatcagtagactgagtaaagaagattgcctccacccatgcaggtgggcatcatccatttcattgagggtctacatagaacagaatggtggagggaggatgaattttctctgtttgagttgacagattcatcttctaccatgcttggacatcagtgctcctggttcctgggcctttgaacttggatgaggacttacttagaccattgtctcccttggttctcaagcctctgggttgtgctggaactacactgctggctttcctgggattttaacttg

SEQ ID NO: 299372 - DNA, 543 bp, Homo sapiens
tagtacagtttccatataccttatcacccagtttcccttttggttaacatggtatatgttattcatatggtacatttgttacaattaatgaaccaaatgatgcattgctatcrattaaagcccatcatttgttcagatttccttagctcttaacttatatccttttctattccaggatcccagccgggataccatattacattgagtagtcatatctccttaggctcctcttagctgtgatactttcacagatgttctttattttttatgaccttgacagttttgaagtgcactggtcaagtattttgtagaatgctaccctaatgaaatttttcagatttttgttttcatgatttgactgaagttatgggtttttgggaggaagaccacaggtaaagtttcattttcattacattctatccagggtacatatatcagcatgatttatctttgttaatattgaccttgatcatctggctaaggtagtgtttgtcaggtttctcactgtaaagttactctattttcactcttttccatactgta

SEQ ID NO: 299373 - DNA, 543 bp, Homo sapiens
tagtacagtttccatataccttatcacccagtttcccttttggttaacatggtatatgttattcatatggtacatttgttacaattaatgaaccaaatgatgcattgctatcgattaaagcccatcatttgttcagatttccttagctcttaacttatatccttttctattccaggatcccagccgggataccatattacattgagtagtcatatctccttaggctcctcttagctgtgatactttcacagatgttctttattttttatgascttgacagttttgaagtgcactggtcaagtattttgtagaatgctaccctaatgaaatttttcagatttttgttttcatgatttgactgaagttatgggtttttgggaggaagaccacaggtaaagtttcattttcattacattctatccagggtacatatatcagcatgatttatctttgttaatattgaccttgatcatctggctaaggtagtgtttgtcaggtttctcactgtaaagttactctattttcactcttttccatactgta

SEQ ID NO: 299374 - DNA, 546 bp, Homo sapiens
ccatattacattgagtagtcatatctccttaggctcctcttagctgtgatactttcacagatgttctttattttttatgaccttgacagttttgaagtgcactggtcaagtattttgtagaatgctaccctaatgaaatttttcagatttttgttttcatgatttgactgaagttatgggtttttgggaggaagaccacaggtaaagtttcattttcattacattctatccagggtacatatatcagcatgatttatctttgttaatattgaccttgatcayctggctaaggtagtgtttgtcaggtttctcactgtaaagttactctattttcactcttttccatactgtacccattgggaaaagagccatcatatatggttgacagttgaagagtggggattcatgccccttctccttgagtgatgagtatctatataaattatctggaattcttctgcaggagatacctgtatcttattccttacttattcatttaatcactttttatataaatatgaatcataaatatatatattatacttt

SEQ ID NO: 299375 - DNA, 546 bp, Homo sapiens
ccatattacattgagtagtcatatctccttaggctcctcttagctgtgatactttcacagatgttctttattttttatgaccttgacagttttgaagtgcactggtcaagtattttgtagaatgctaccctaatgaaatttttcagatttttgttttcatgatttgactgaagttatgggtttttgggaggaagaccacaggtaaagtttcattttcattacattctatccagggtacatatatcagcatgatttatctttgttaatattgaccttgatcatctggctaaggtagtgtttgtcaggtttctcactgtaaagttactctrttttcactcttttccatactgtacccattgggaaaagagccatcatatatggttgacagttgaagagtggggattcatgccccttctccttgagtgatgagtatctatataaattatctggaattcttctgcaggagatacctgtatcttattccttacttattcatttaatcactttttatataaatatgaatcataaatatatatattatacttt

SEQ ID NO: 299376 - DNA, 546 bp, Homo sapiens
ccatattacattgagtagtcatatctccttaggctcctcttagctgtgatactttcacagatgttctttattttttatgaccttgacagttttgaagtgcactggtcaagtattttgtagaatgctaccctaatgaaatttttcagatttttgttttcatgatttgactgaagttatgggtttttgggaggaagaccacaggtaaagtttcattttcattacattctatccagggtacatatatcagcatgatttatctttgttaatattgaccttgatcatctggctaaggtagtgtttgtcaggtttctcactgtaaagttactctattttcactcttttccatactgtacccattgggaaaagagccatcatatatggttgacagttgaagagtggggattcatgccccttctccttgagtgatgagtatctatataaattatctggaattcttctgcaggagatayctgtatcttattccttacttattcatttaatcactttttatataaatatgaatcataaatatatatattatacttt

SEQ ID NO: 299377 - DNA, 590 bp, Homo sapiens
gttccttatataagtgctggaggaaactaggctttttttgtccttccacctttcacaatgtgaggacacagtgttcatcccctctggaagatgtagcaagaagtcaaaagctgttaccagacactgaacctggcagcaccttgatcttgaacttccccacctctgtaactgtgggaaacaaatttctactgtttatcaatgacctagtctgtggtattttgttgtagcagcaaaaatggactaagacataatctgattgtcttagttcatttaagttgctataaaggaatatctaaggctgggtaatttataaagaaaagaggattacttgcctcactgttctacaggctgtaygagaaacatggcaccagcatcagcttctgatgagggcctcagagagcttccaatggtggcagaaggggaaagggaataggcattacatggcaagagaggaaggaaggacggaggtgggttgggggaggtcctaaactctcttaaacaatcagctcctatattaactaatagagtgagaactctcctaattaccatgacagcaccaaaccattcatgagggaatctggggccatgac

SEQ ID NO: 299378 - DNA, 589 bp, Homo sapiens
taatctaagcaggtcagcctcctgctgcactgagcagagtgggaaaaggtgagcactatctcgtgggtcaaatgaaatttcaccaaaagcatatttgagtttgtgcaaagtttttgaaaaaattttattttgaacattttagattatttcctccttggatatacttcaatagtgggattattagaccaaagaaaatgaaaaatttgaaagctgctcacttctacatgccacataattaatatctaaaatttcctatcatggactaaaatcttattatttgtctgtttcattattattgttgatatatataagacataattaattttrtacatttacatggatattaagttcttctgtcattggtggttgctattattgtcacatagaaattttaattgaattggggaataagacatgttgcaaggggtcaggcacatattagaaacaaagattaatatattttttctttcaaaaatgtgtaaactacacatctctacctatctattcaagcagattttttctaaagataatagataaaatctgtgttcagaaacatagtaaatagtcccagtttaaatacatgctaatt

SEQ ID NO: 299379 - DNA, 592 bp, Homo sapiens
cgctactagttgcatgactttgtgtaartaacttaacatctttgggatccagttttcttatagttgaaatcgggataaaaatagtacctattttacaaagtagggtaaggattgaatgagtgaatgtacgtaaaatgatccaaacaatgtttgggatctcagcaccattaaagtaatagccggtggtgtgctgataaactcacattcagaaaattaaaagtcctggtttgtagtgtttgccagtttccttggtgtaaatactctcatcattcttttttttttatattcttaataaatgtattttatattattattactattttttatcaatttcaacttttattttagatcaggggtacatgtgcaggttttgttacatgggtatattgtgtgatcttgggatttggagtacagttgatcctgtcagccagatagtgcacatggtacacaataggtagttttctaacctttgcccttcccccaccacaagaagttcctggtgtctattgtttccatctttatgtacccaatgcttagttcccacttataagtggtatttggttttctgttcctgcattaattgacttaggat

SEQ ID NO: 299380 - DNA, 625 bp, Homo sapiens
tcaccatacaggccagcaggtggtgcttacaggtaagagttggctgagcactgtacaatgatgtcagcagaagttgtgattggacatgcagtttgacctcccatccatatgtggtgcttgcaggtgagaggcggctgtggtgatggcagtggaaattttacttggcctttgttgatcaggggaactaccagggtgtgcctggtgatggggagcatggagctctcaagtgtcccattccacactctgaccaacgggggtgcaggggggaaagctgggtggggctgggttgggcgaacctacctccaggctctccaggctaactagggtgggaccaagcacaaccttggtgggagctgaggggcagctctcaggccactggaacaacccagggaggggcagaggtgtttctcctgtgccaaagaacccaccaagagaaaaagcggcagccagggtttttttcctggctgttcaaagtatgaaggtttacttgatattttggttcctctcagtgaagaggcacatgtcagctgcatctratcaatcatcttcatttctcgtgagtttgtgaatcctatgcagagcaacagcagcagaagtttggcaccgttgtgctcatatctccata

SEQ ID NO: 299381 - DNA, 625 bp, Homo sapiens
tcaccatacaggccagcaggtggtgcttacaggtaagagttggctgagcactgtacaatgatgtcagcagaagttgtgattggacatgcagtttgacctcccatccatatgtggtgcttgcaggtgagaggcggctgtggtgatggcagtggaaattttacttggcctttgttgatcaggggaactaccagggtgtgcctggtgatggggagcatggagctctcaagtgtcccattccacactctgaccaacgggggtgcaggggggaaagctgggtggggctgggttgggcgaacctacctccaggctctccaggctaactagggtgggaccaagcacaaccttggtgggagctgaggggcagctctcaggccactggaacaacccagggaggggcagaggtgtttctcctgtgccaaagaacccaccaagagaaaaagcggcagccagggtttttttcctggctgttcaaagtatgaaggtttacttgatattttggttcctctcagtgaagaggcacatgtcagctgcatctgatcaatcatcttcatttctcgtgagtttgwgaatcctatgcagagcaacagcagcagaagtttggcaccgttgtgctcatatctccata

SEQ ID NO: 299382 - DNA, 590 bp, Homo sapiens
agctttcttattcaggcctactgttcctttcaaatttttgagtatgtgtgaggtaaaggtcattgtttgttgttttcccttaatgaatatctatttgctttggcacaatttattgaaaagattttgctttcctcactgaactgcatcacactcgtgtagaaagtcaagtgaccatatatatgttggtttagttctggacttttattgttctgttaatctatttatctatgcttatactactgccactctgtattaattaacgtaagttaatattaagtcaggtagtataagcccaccaacyttgttcatcaagatcgttttgactattttttcatctattcatatccatataaatttacaaatcaaattttcaaattttactgaaattttcactgggattgtgatgactttagtgagcaatgtttgctgatggagaattgaaatcttaaaaagattgaaccgttgcatctttgaatatggtatagctttccatttactttggttttaaaacatttttctacactctattttgtagaggtcttccacaatttttatttaatttcatcctgagtgttatggagcaaattgtg

SEQ ID NO: 299383 - DNA, 624 bp, Homo sapiens
agtatcactctgggatgatgaaccattatgttattcttgggtgacctagagttttctaaccccagcatattctgtggtccagcaaaattgacatcatttacgatcttgtaaaaaatgcagaacctcaggccacagcaggaccaactgaatcagaattttcattattgaaagatcccytggtggtaattcacatgcccattaaagactgagaagcactgtcttagtgtctattcttaggcaatctcccaggtgatcatagcaagtaggccacggtcactctactaattttctgtctaatctggatttcaaaggtgaaacggaatgaaagaatcaagcatttattcaaacaacaaacaagttccaatcacttattctgtgataagcaccatgtcagggggtggaaagatagagacagggatatatgtaatccccatctaagaagtcagaattttagtggaagatacagtgaactagaggttactccacaaatcttctatccttctggagtcatgatgtcctttaatgattaaactaaataatgaggctctaccttatactactatacatagttcaatgccttccttactatttctaaggattgctggggatatagtttgaatgttt

SEQ ID NO: 299384 - DNA, 624 bp, Homo sapiens
agtatcactctgggatgatgaaccattatgttattcttgggtgacctagagttttctaaccccagcatattctgtggtccagcaaaattgacatcatttacgatcttgtaaaaaatgcagaacctcaggccacagcaggaccaactgaatcagaattttcattattgaaagatcccctggtggtaattcacatgcccattaaagactgagaagcactgtcttagtgtctattcttaggcaatctcccaggtgatcatagcaagtaggccacggtcactctactaattttctgtctaatctggatttcaaaggtgaaacrgaatgaaagaatcaagcatttattcaaacaacaaacaagttccaatcacttattctgtgataagcaccatgtcagggggtggaaagatagagacagggatatatgtaatccccatctaagaagtcagaattttagtggaagatacagtgaactagaggttactccacaaatcttctatccttctggagtcatgatgtcctttaatgattaaactaaataatgaggctctaccttatactactatacatagttcaatgccttccttactatttctaaggattgctggggatatagtttgaatgttt

SEQ ID NO: 299385 - DNA, 582 bp, Homo sapiens
ataagtgatactaagggcagatgatgtacttgggtgtggcactcacctgggcagtcatgagctctctgtgatgctgatggccacatttccttttgctgcctcagagccctgtttagtctactacgcagagtcacaatactctgtatctgtgtcttctcaataatgataaatcaagactatgttctggacagtatgtttaattggtagattggtaaggacacagcaaactctggtgtccctggccctagagcatagggatcaaacatagtctttaccgccaatggggaaggacaagaaaatagagtgagattcaaaaggagaagaggaccctctagttcagtacatgaaagttcacagtcacttgctctggactcaagatcgtatccgaaaatgagcatgattctttttatctctaaataagttgctatattaactatatcatattacattatattatattgttttctctggaataaagagtttgtttcaacctcctccttaaatcttgtatgctcctgagaaggtacaatgttttctgccttccagttaagcyatgtggagcctcaactcccaaaaagagat

SEQ ID NO: 299386 - DNA, 484 bp, Homo sapiens
tggtgtccctgttgaggcatgcaaaagaatctaagaaaagcttgtggtctttattatttcacactgtttccgctgtccttatattgaagaacactaatttaagaaggagaaaaagggcacgaaaacttgtattgttatacrtagcatgacatattgggtttttattctccaaaacggagagccaaatatatcatcaagacagtttgggtacatctccaaaaagaatacaccaaacacctctcagtgaacagaattagagctagcagtcttgacacctgccaccttcttctctccccacccaccaaccatgtgagcacaaagacctctccctccaccacctgccccacatgtccaaagattgcagaggtggatttaagagcattgtctgtgagtggcatctctgcggcttaggagaatacaactaggaaaaggaccacataaatctcatatctttgttgttcttttggttttttccctcttttct

SEQ ID NO: 299387 - DNA, 581 bp, Homo sapiens
cgcccaggggccacaggttggacaagcttgttctaactgatgtcgatagacttcatcctraggacactgaggaaacaggaaaggtttagacaaggtggtgggtgacatgctgactctctcagtccattcaggctgctgtaacaaaacaccataaattagatggcttttaaacagcaggaatgtatttctcaccattctggagactgagaagtctccagacttcccagttggcactagatcatggtgccaacagatttggtatctggtgagggcctgtttcgtggttcacaaattccaaattcttactgtgtcctcatgctgttgaatggttgaagagtctcttttataaggggactaatcccatttgtgagggcagaaccttcatgaccaagtcacctcccaaaggccacgtctcctaataccatctcgtttggggttggaatagtaacatctgaatttgaaggggacacaaatgttcagaccacagtactcacaatgtgctttgcacacataactttgtttgcactatgaagaccagattatgcaggtagagacaaaactagaaaagaggagatggcagt

SEQ ID NO: 299388 - DNA, 581 bp, Homo sapiens
cgcccaggggccacaggttggacaagcttgttctaactgatgtcgatagacttcatcctaaggacactgaggaaacaggaaaggtttagacaaggtggtgggtgacatgctgactctctcagtccattcaggctgctgtaacaaaacaccataaattagatggcttttaaacagcaggaatgtatttctcaccattctggagactgagaagtctccagacttcccagttggcactagatcatggtgccaacagatttggtatctggtgagggcctgtttcgtggttcacaaattccaaattcttactgtgtcctcatgctgttgaatggttgaagagtctcttttataaggggactaatcccatttgtgagggcagaaccttcatgaccaagtcacctcccaaaggccaygtctcctaataccatctcgtttggggttggaatagtaacatctgaatttgaaggggacacaaatgttcagaccacagtactcacaatgtgctttgcacacataactttgtttgcactatgaagaccagattatgcaggtagagacaaaactagaaaagaggagatggcagt

SEQ ID NO: 299389 - DNA, 616 bp, Homo sapiens
cagtttaattgagtatgactaggaaatggtaaaatgtgatttatttgctgcaatgaacagtcaggaaagatatgaaataattctagcatttcttattgaatttcattttgtgaatgtgaatgcataaacaatgctttggatttttttctcatgccattgatgcaaagagcgaaagtatataaaaccctaaacaatttccttcattattttatgttctatgttgttgaatataaacaatcagacactyctggggctttgccttccccttagttttcacttttttgtttttttaaaataaaatctatttatttacatgaaaatacatactatatcatatttttaacagttttattgaagaaaactcacatcttatacaatttacccacttaaagtatgcaattgaatggtttttagtatattcacaggattatgcaaccatcaccacaatctaattgtagaacagtttatatcctccaaaaataaatttcatacagtcatttccatttccgccacccctctccctactctcggccttagcaaccactaatctactttctctccctatagatttgtctatttggtctttcacataaatagaatcttgccatatgtagtc

SEQ ID NO: 299390 - DNA, 594 bp, Homo sapiens
tgttttcttaagagacttcacaacttcaataacacttattgtaggtaatattggtcatttaatacaggggttatgcctatgagctagggagtgtgggaaaacttgataaatttattacacatcctctgaggagttttacttttatattaatacaagcactgataaaactgaatacaaaattcacagtgaatttttaagctattgctgtgacttcaaagcttatagcctctagctatgccctgggcccctggtccttgccccttgtagggacaggttcactccgatttgctcttagggtattggctgtaaggtttgagaagcactgatgaaatgaatttatttttttccacatggtttttgatacgaattcaaaataacttaaatggtatttcctcaatggagccatatggacctagaagttaagagatgctgcattaaaagatgctgcyttttgtttcacaagtttaattgtaaattgaccaaaaccatcaattagaaatcatctccaatgttaacttcagagtactgagaagagattcatgagagggtactctctaggtgtaaaacattctaattttattaaccactaaatac

SEQ ID NO: 299391 - DNA, 594 bp, Homo sapiens
tgttttcttaagagacttcacaacttcaataacacttattgtaggtaatattggtcatttaatacaggggttatgcctatgagctagggagtgtgggaaaacttgataaatttattacacatcctctgaggagttttacttttatattaatacaagcactgataaaactgaatacaaaattcacagtgaatttttaagctattgctgtgacttcaaagcttatagcctctagctatgccctgggcccctggtccttgccccttgtagggacaggttcactccgatttgctcttagggtattggctgtaaggtttgagaagcactgatgaaatgaatttatttttttccacatggtttttgatacgaattcaaaataacttaaatggtatttcctcaatggagccatatggacctagaagttaagagatgctgcattaaaagatgctgccttttgtttcacaagtttaattgtaaattgaccaaaaccatcaattagraatcatctccaatgttaacttcagagtactgagaagagattcatgagagggtactctctaggtgtaaaacattctaattttattaaccactaaatac

SEQ ID NO: 299392 - DNA, 576 bp, Homo sapiens
tttgggcctggcatgctggttcatgcctgtaatgccagcactttgggaggccaaggcgggcagatcacttgaggcctggagttccaagaccagcctgaccaacatggtgaaaccctgtccctactaaaaatacaaaaattagtgggccgtggtggcacaaacctgtaatcccagctactcggtaggctgaggcaggagaatcacttgaacccagcaggcgcatgttgcagtgggcccaggttgcaccactgcattccagcctaggtgacagagtgagactccgtctcaaaaataaaaaaatttttttaattaaaaaaatagaaagatcgcttggtttgttgtactggatttagaccagtagtcctcctaaaggtattagttcaactacctaatattgttttgcttgttcawgaattctcactttatgaacctcctactgaaaagaacttaatttaaaaaacttttttctcatgtttcattctggtaatcaaaagaagagtcccctaattccagaattactgaataggcacacatggtccttgtggaaatatttgttgtataattacattacctggg

SEQ ID NO: 299393 - DNA, 576 bp, Homo sapiens
tttgggcctggcatgctggttcatgcctgtaatgccagcactttgggaggccaaggcgggcagatcacttgaggcctggagttccaagaccagcctgaccaacatggtgaaaccctgtccctactaaaaatacaaaaattagtgggccgtggtggcacaaacctgtaatcccagctactcggtaggctgaggcaggagaatcacttgaacccagcaggcgcatgttgcagtgggcccaggttgcaccactgcattccagcctaggtgacagagtgagactccgtctcaaaaataaaaaaatttttttaattaaaaaaatagaaagatcgcttggtttgttgtactggatttagaccagtagtcctcctaaaggtattagttcaactacctaatattgttttgcttgttcaagaattctcactttatgaacctcctactgaaaagaacttaatttaaaaaayttttttctcatgtttcattctggtaatcaaaagaagagtcccctaattccagaattactgaataggcacacatggtccttgtggaaatatttgttgtataattacattacctggg

SEQ ID NO: 299394 - DNA, 635 bp, Homo sapiens
gagtgcagttttggttctttttcaagcacactcactcactttgggacaagtacctttttttctatgctattttcactggaagtagagatggatgtgggcagctgagataacagaaagctgaactactatgtttatatttttgtcctctgaccctccctcttcagcatatattcccttcacctctttttcaccattaaatgtcttaaaagagttttttatttcattactgtctccatttcttcacctctcactcattgtctctttagggcactcccagtctggtttccaccttagacacaccaaaaaaactttcactaaggtcattagtaacttccatctggcaaactcctataactatctctcatattgttaatgttgccacacctttctggtttcttttctacctcccagtctaagtctcatttcttcaggaagcatttttcaaatgctcttcaaaccatgttgcaaaatctctgtagttwtctattcatgtacaggtcgattagtgtctgtcttccctgtttggctttaagctacaggagagcagggagtatgtaatgttcaccattgatacttagtgcttatgccaaggactggcacatagcaggtatgtaataagtatttgttgattgatt

SEQ ID NO: 299395 - DNA, 516 bp, Homo sapiens
cttgtcaattttttttttgttgcaattgtttttgggaacttagtcataaattctttgccaaagcctatattgagaagggtatttcctaggttttcttctaggatttttgtagttggaagtgttacatttaaatcccatcttgagttaatttttatatgtggtgagaggtagggtccagtttcttctgcatatggctagccaactatcccagtaccatttattgaatagggagtcatttcctcattgcttatttttgttgattttgtcaaagatcagatatttgtaggtgtgcaggtttaattctaggttttctattccrttcaacttgtctatgttttttttttgttgttgttgttgttttttaaaaccagtgccatgctgttttggctgctgtagccttagagtgtagtttgaagtcaggcaatgtgatagctccagttttgttatttttgtttaggatactttggttatttggactcttttttggttccaaatgaattttagaaaaattttttc

SEQ ID NO: 299396 - DNA, 653 bp, Homo sapiens
ggtccagtttcttctgcatatggctagccaactatcccagtaccatttattgaatagggagtcatttcctcattgcttatttttgttgattttgtcaaagatcagatatttgtaggtgtgcaggtttaattctaggttttctattccattcaacttgtctatgttttttttttgttgttgttgttgttttttaaaaccagtgccatgctgttttggctgctgtagccttagagtgtagtttgaagtcaggcaatgtgatagctccagttttgttatttttgtttaggatactttggttatttggactcttttttggttccaaatgaattttagaaaaawtttttctaattctgtaaaatactctgtgttaatattaaatggtgtggtattagttttctaggactgccgtaataaggcgctacaggtttaggagtggcttaaaccacaaaaatctattgtctcacagttctggaggctggaagtccagaatgaagatattgagaggtggctcctcctgaggactgttggggaaagaatctcttccaggtctttctttttgagttttagatagtggcctctttctatgtctcttcacattgtctttcctctatctgtgtctgtgtgtctaaatttcaccttttcctaagaacccc

SEQ ID NO: 299397 - DNA, 563 bp, Homo sapiens
atttttggcatgagatgtgttattttcctgaaatgaggggtctggtaaagggctgtgaattagatgttgcccttgctgtgtgccttgtttgctctgccatagaaaacaaaagatccagtttctacattagcatttcaatgttaaatgcaaggagaattggtctcagggtcaccaatgtctgggactgaaattttacccagctccagaaagtctgctggcaatarcccattctttctgatttttaaatgcagaaacacttcttttttaggcacttcaaacatttctgttttcattggagctaaaggattttagtgcatccaaatgtaatgtcactgataacaatggagaagataatgctgtctttgcctcagtttctatgttttaaaaaataaaaacgagttaaaattttcactgtatgttgagagacttgtatttactgtttaaaaggaataaaaattaagttttctagaacttgaagcaagtaggagaaattatattttgagtgtttgctggagaagaaattgtatcataattatctcctcagtgtgctattgcaaaaaaaa

SEQ ID NO: 299398 - DNA, 607 bp, Homo sapiens
tataaggaatgtttataaattgacaaggacaagacagatattccaatagaaaaatgggcaaaggactcaagtaggcactttatgagaatctaatttcaaatagtcaatggtcatacaaaaagatgttcagtatcactaatcataaggaaatggaaaattcatatgtattttgatacattaagcaccaaccagattaacaatttaaagagtctgacaactttttaaaaaataagtgttggtgagggtgtgaagcaatacaaattcttagacactgcaagtgggagtataaattggtaaaatcacttggcataatctgctagaacacacatattctgccatcttccaatttctttactagttacgtgtactcgagaaatccatacacaaatgcaccagaatacttaaatgaatatgttcattgtagtattctattaacaagtcaagctggaaatgacccgatgtcctcaacagtacaaatgaataagttaattacaaaaatgtgcctatatataacaaacataaggaaaaaacaaaagaatatcasttataaaagaatacatataaaatgattttatttatatacatagtatagttttaaaatagacaa

SEQ ID NO: 299399 - DNA, 606 bp, Homo sapiens
tgggtaatttataaagaaaaagaggtttaatggactcatggttccacatgggtagggaaacctgacaatcataacagaaggtgaaaagcatatcttgcttggtggcaaacaagagagaaaatgagagccaagcraaaagggaaacccttataaaaccatcagatctcgtgagacttattcactaccataagaacagtataggggaaactgctcccatgattcaattatctcccaccaggtccctcccacaacatgtgggaattatgggcgctatgcttgaagatgagatttgggtgggaacacagccaaaccatatcaaggggtaagaagagtcttggtgaaagtccagctttttattagttgtaacagattctttttgattacttaatttcaataaggatatttttaagtctagttgtggaatatatgggagatggaagatgtgatctgaagaaaaacttcgagatctactggtttgcttaattaagatctactggtctaacattctgtgagataattctaatacatgcttacatacatacatttatattttaattatttgtcatttattttaaagttctataaaaatgattttagagtgtggtt

SEQ ID NO: 299400 - DNA, 559 bp, Homo sapiens
tgataaggaaagctgaggactaaactctaatcagcgttctgtgtcctaaatctcttctggaggatattgcaaagagtcatgcccacaggtcaaactttaacattcatttctgctgactccaagatgtcagacaaagtctttcttgctttaccaactgcaaatcaaaaaatctctgaatccacctatggtctgcaagcccctgctttaagatatctcaccttttggggccaagccaatgtatagcctctatatactgatttataactttgcctgtaatctctgcctccctgcctttaaaaaccctttgatrtaagctctcaggagtttgggtgttaagcattagcttcccagttctccttgtttggcaccctacaataaacacctcactttgctcttgctgcaaattctgatgtcagtgtttggctttgctgtgctggataggtggactcaagttcagtttgataacaaaacaagtctatttctaatatttacccagaaacaaaaagaatctacctatggagagaagtctcattccctgctcccctccacctccaccaac

SEQ ID NO: 299401 - DNA, 472 bp, Homo sapiens
ctactcctggtaaagatactgtgaacactgtggaaataacaacaaaagatttagaatattacataaacttagttgataaagcagtggcagggtttgagaagactgtctccatatttgaaagaagttctattgcgggtaaaatgctgtcragcagcaccacatttttacagaaaaatattttgtgaaaaaaagtaccaatcaatgcaacaaacttcatttctctctcattttaataaatttccacagccacccttatcctgatcagcaaccacgatcgtgatcagtcagcagtcatcaacatagaggcaaaaccctccaccagcaaaaagactgtgactagctgaaggctcagatgatcattagcaataaagtattttgagcaataaagtattttaattaagatacatatattatttttatacatactattgcacacttaatagactacagtatagtgtaaacataactttta

SEQ ID NO: 299402 - DNA, 572 bp, Homo sapiens
tgcattcagtgtgtacatatgtgtcagggacataagccacaaaaggacccatkacctaggcatcaaacctagacctgtctaatcccacaatgcaggggttgaactattatgcaatacagtcttttaagaataaattagctttcttttttaaaattaatcttgaattttaaacttaatctttaaacttaaaatttaaactcaaccatatagaccttcctactactttgattttatctttcatcaaaatgtaattttttacttccagtattcccattagagtaattttttttcagtttatgaggtcttccgcttcttttagggctttataaaggttgcagctctatgtatgataaacatttgttcaatttgacaaaacaattctggcaagcaactgttttcatggtctagttagtagtacctattttgaaaccttcttaaggggcaaacataattcctccatctaagaattgtcttctcagctcttttagtgtctccatttttcctatatctaaaacagtttcttagacatcgaaatctgtaaaatgcaatagagatttccttcactgagggat

SEQ ID NO: 299403 - DNA, 494 bp, Homo sapiens
actaaatcatatggtagttctatttttaatttttttgaataacttctatacagttttccacaacggctatagtaatttacattccattccctccaacagtgcacaaagtttcctttaatctccatcttcacaacacttgttatctcccatcttttttataatagtcatccaaaaatgtgtaagtggtatcttactgtggttttgaattatattttcctgacgattcgtgaccttgagccttttytcttgtacctgttggacatttgtatttcttctttggaaaaatgtctattcaagtcctttgccaattttttaatcagattatttgtttttttgtttttgttgttttggttgctgttgttccttttgctattgagttttatgagtccttatatgttctggatattaattctttattaggtatatggttttaaaatactttcttccatgccatgggttgtgtttttactttgttggttgtttcttttgctatg

SEQ ID NO: 299404 - DNA, 567 bp, Homo sapiens
gcagggcacagtggctcacacctgtggctcccagcactttgggaggccgaggcgggcagatcacttgaggtcaagagtttgggatcagcctggtgaaaatggtgaagccccgtctctactaaaaatacaaaaattagctaggctggttgcaggtgccctgtaatcacagctactcggaaagctgagggatgagaatcgcttgaactcgggaggcggaggtttcagtgagcagacatcgcgccgctgcactccagcctgggaaatagagtgagtgagattccttctcaaaaaataaaaaagaaaagaaatatcaaaatgacagcaataaatacctatttatcagtaattattttgaaattaaatggattaaaaagaaagattggcagaatraatgatacaaccatacaagatactttagatccaaagatacaaataggttgaaagtaaaaggatgaaaaaagatattccattattccatgtaaatataactgaaggagaacaggaatggctatactaatatcagacaaaatagactttaaatcaaaaaagtttacaagagacaaagaa

SEQ ID NO: 299405 - DNA, 439 bp, Homo sapiens
ttgtgtgctcatgggcttgtggagggagtggggctgtatgtagcaaggagggagataatgtattgctagagacagccaaaaaaaagaaaagacaattacctgctgttagagttcagctcattcaaggaaaagccaactgacatgtgaaataaagagcatttcctggggttttataacatgtgttgccgacagctatggtgcacagtttatctacaatcagctgagaatttctgctcagaagtataagaaatggatttttctctctaaattggggcttagcaagggaacatggggaaatgaagatgtctgagagattagagtytacagattgcagcatgaatagtttgagctagtgacacctccctgcctttacttgtaagcaactctttcacagggaagtttctaggttgtagcagagtattggtgcctttcacagata

SEQ ID NO: 299406 - DNA, 644 bp, Homo sapiens
gatgacctagtgtgcatgggagaaagaactttggcctgggagtcataccaagtctgaataatggctctgtcattgcctccctgggtaatatgaggtctgagtcgagttaacatctgatgccttaccatcacgygtgatgctaatcttgggatttaaggccatgtatgtccagccttggggagttattttggcacacttaggtttttatgtttttagcctgtaaaatatggatgtatataatatgatacccctgatcaattgcagattttgtattctgagacatgatactgcattgatatcctcatattaacttacattgttaatactatttcaattatattcccagtgacgaggaggagaatttaagataatgattttttaaatgtcattacattttcctatttctaagatggctgtgacattaacaaacatcattattttgataacagcttttccaggaaacaattatgctcccttaaataaacaaaaatactgtccaattagccaacagcatcatgtatttatataattaaatattatttaaaattttaatacatcttagaatctaaaatttcgaagaattgaacatttcttcacattcaggctctaaaaacataattactattgatttttgactgttttgt

SEQ ID NO: 299407 - DNA, 601 bp, Homo sapiens
ccagttttaggctattataaaaaatattattatattagtcactgcctaacttcttttatctgctagtatatattcctaggaacacttgggtttactttgcaatgtttttgctgttactagcttattgacttaatgctgttcacagggaaagttattccttgcaacctgcctacttgtcagtcagctagctacttaattacaaaaattgaatataaattggtcctccatatctgtgagttccacatctaggaattcaagcaacttcagaaaaataatattttaaaaaataaacaataaaaatacaaaagttaaaaaacagtatgttttaaaatakagtatactcactatttgcatagaatttacactgaattaggtattaaaagtaatctagagatgatttaacatatatgggaaaatgtgcttaggttacatcccagaagagtttaagggatgagaaatattgatgtggacctccacatctaggaattcaccaacttcagataaataatattgaaaaagataaacaataaaaataaaaatacaaaaattcaaaacaatgttttaaaataggatatacttactatttgcatagaatttactc

SEQ ID NO: 299408 - DNA, 601 bp, Homo sapiens
ccagttttaggctattataaaaaatattattatattagtcactgcctaacttcttttatctgctagtatatattcctaggaacacttgggtttactttgcaatgtttttgctgttactagcttattgacttaatgctgttcacagggaaagttattccttgcaacctgcctacttgtcagtcagctagctacttaattacaaaaattgaatataaattggtcctccatatctgtgagttccacatctaggaattcaagcaacttcagaaaaataatattttaaaaaataaacaataaaaatacaaaagttaaaaaacagtatgttttaaaatagagtatactcactatttgcatagaatttacactgaattaggtattaaaagtaatctagagatgatttaacatatatgggaaaatgtgcttaggttacatcccagaagagtttaagggatgagaaatattgatgtggacctccacatctaggaattcaccaacttcagataaataatattgaaaaarataaacaataaaaataaaaatacaaaaattcaaaacaatgttttaaaataggatatacttactatttgcatagaatttactc

SEQ ID NO: 299409 - DNA, 593 bp, Homo sapiens
gagccacatattctaaaacagaacaacatatgcaaaatgcaaaatctatctggaaattaaaaatatgtaaataaataaayaaaaggaagcactcataaaaactctaagagtaaaaagagaaaacaaaacaatatgtagagtgttctagactattagaataaccagtataaaagacacatatttgtccaatggtactcatataggctttatacatacggtagaaaatgcaacaatataaattattagtcatagtgtgttcagcagaaagctaaagaaaacccaactaatattggcttgaataagtaagatgtttataatcccagccaatacattgtcaagatcaagccacccagtgctttttgttattgctcagggttgtcatcaatatacttaagctcttcttctttatcccctttgctatcctcagtattctctagatccatgtgtgtgatacctccaatcataagatctgtgtctatggtgggaagaatggagaaggccatgagcaaggtgctgaaaatacatggtctccaccgccagaagtatctctaggtgcaaggcagttgaagttgagtactttataacaactatag

SEQ ID NO: 299410 - DNA, 579 bp, Homo sapiens
tgctgttaggaagagaaacgtctacaacaaygacattatttctttgacggctgtcaaatgataacttcagcaccctccctccttaaggcaatcagtgaagcacagtacaaggtgagagagagaagggacatacttgattcttaggcaatgagtccactcactttcagtcatttgtcgattctgaattatttccatgatacatcaacctacttagtgtagtcatggatgcccatatgaactgctagtttggcaaatgtataagaataattcgttttacaatgtaatcatttatcagagagccaatgacagttttattgaattagatacacaaaatagtttatagtcagaggacactggaggacaaatcactagtagtggtaattcctcctgcgtgatgtgcctcacacatcaggaaataaaataatgtgaatatgggaacagctaaggcaatgtatgagtgttccaacatcattgaaggcaacttttctttgctttactctagaatgtcacacacttaaaataatgtattatgaatatgtgacatgaaagtaatatcctgtgctacaggacccaatctat

SEQ ID NO: 299411 - DNA, 463 bp, Homo sapiens
ataagcgtaaggtacctttccctaattcccagcacagtttcaggacacccctttcccatgtataaattttatttttcaatttggtaggtgaggcccctgagaagatgtattttgttcacatcatacctagaagttccaattcacaaacaaaacattattaagcacaagggaataataccagcrttttataacttcactcatatttaaaacctctgaatcattaatttattttatttaattgctgctctgatctgctatttaaattgactctctgatttaggctctggcctttaattttgttgaaattatgttagtcttggtttttctcaccttcaaatgattatcacttcttccaaattgtttctgttataaaattttatcctaatatctgccagaataactccattaaatacacctttcatcactataacaagtgactttctcaaatatctctaataatgct

SEQ ID NO: 299412 - DNA, 463 bp, Homo sapiens
ataagcgtaaggtacctttccctaattcccagcacagtttcaggacacccctttcccatgtataaattttatttttcaatttggtaggtgaggcccctgagaagatgtattttgttcacatcatacctagaagttccaattcacaaacaaaacattattaagcacaagggaataataccagcattttataamttcactcatatttaaaacctctgaatcattaatttattttatttaattgctgctctgatctgctatttaaattgactctctgatttaggctctggcctttaattttgttgaaattatgttagtcttggtttttctcaccttcaaatgattatcacttcttccaaattgtttctgttataaaattttatcctaatatctgccagaataactccattaaatacacctttcatcactataacaagtgactttctcaaatatctctaataatgct

SEQ ID NO: 299413 - DNA, 519 bp, Homo sapiens
ggaataagaaaccaggttaataaatatatcaatatataaaatagtcttttcttctttgtttgagttttctaatttatgtttaatgattgaagaaaaatatgacactgcttgatgtggttctaaatatatttatttagagaaaatatgtaacacaaccaaattatgaataggggagagtaaagagatgtaaaagaaggtatggtttctacacttcatttgaatagttaaaatgatatatataattaaaattctcctcataacaatattcttttaacctgccagctgatatcggtaattctatgccttgaatctcatttgattaatttgaarctgtaccctttgaacagggtccaaatatttttcaacaattatacacatgtgaattttttatatagtttcttaaagttttatatagttttttaaagtgttgcttttactatttttcttttctccaagcataatatacaaggaaaagtccacataagtttatacctcaaggagttttcaaaacagtgactc

SEQ ID NO: 299414 - DNA, 604 bp, Homo sapiens
taactgtagtacatacaaattttagcttaacctcctgtgaaccttaagcctcattgccattttgaagtttgaatgaaataataaatactaggtatcatgcataatgcctagtacttagtaggcactcaatataagataactgtaattatgaagaaatatgtarttatcattttattttacaaaaggaaatgaaatctcatagagactcaggggtacactttgtgtggttaatgttcttctcacttccctacacattttccatatttacatagatgattttattacaaaatattatgcaaaatgagaaatgtcctttaagtgttttaataaactttatcagtgtttttttattatatcaataatttgtgacagtgaaaagttatatcagccacaaatcctatattaatactcacctcttcactagcagactgcatggtaagttccagatgggattcctctgaagtccaggtaaatgaactcaagtgtatccttcatcccagttctgtgatgaaagcctgctgttccttgggaaggcaagaggaggaatttgaatggcatctttgttggtggaagagaggggatgataagagtgcttgtacatgat

SEQ ID NO: 299415 - DNA, 604 bp, Homo sapiens
taactgtagtacatacaaattttagcttaacctcctgtgaaccttaagcctcattgccattttgaagtttgaatgaaataataaatactaggtatcatgcataatgcctagtacttagtaggcactcaatataagataactgtaattatgaagaaatatgtagttatcattttattttacaaaaggaaatgaaatctcatagagactcaggggtacactttgtgtggttaatgttcttctcacttccctacacattttccatatttacatagatgattttattacaaaatattatgcaaaatgagaaatgtcctttaagtgttttaataaactttatcagtgtttttttattatatcaataatttgtgacrgtgaaaagttatatcagccacaaatcctatattaatactcacctcttcactagcagactgcatggtaagttccagatgggattcctctgaagtccaggtaaatgaactcaagtgtatccttcatcccagttctgtgatgaaagcctgctgttccttgggaaggcaagaggaggaatttgaatggcatctttgttggtggaagagaggggatgataagagtgcttgtacatgat

SEQ ID NO: 299416 - DNA, 604 bp, Homo sapiens
taactgtagtacatacaaattttagcttaacctcctgtgaaccttaagcctcattgccattttgaagtttgaatgaaataataaatactaggtatcatgcataatgcctagtacttagtaggcactcaatataagataactgtaattatgaagaaatatgtagttatcattttattttacaaaaggaaatgaaatctcatagagactcaggggtacactttgtgtggttaatgttcttctcacttccctacacattttccatatttacatagatgattttattacaaaatattatgcaaaatgagaaatgtcctttaagtgttttaataaactttatcagtgtttttttattatatcaataatttgtgacagtgaaaagttatatcagccacaaatcctatattaatactcacctcttcactagcagactgcatggtaagttccagatgggattcctctgaagtccaggtaaatgaactcaagygtatccttcatcccagttctgtgatgaaagcctgctgttccttgggaaggcaagaggaggaatttgaatggcatctttgttggtggaagagaggggatgataagagtgcttgtacatgat

SEQ ID NO: 299417 - DNA, 620 bp, Homo sapiens
ggatgaactaatttacactcccaccagcagtgtagaagcatccctatttctcaacatcctctccagcatgtgttctttactgacttttaatgatcgccattctaactggcgtgaaatgatacctcattgtggttttgatttgcatttgtctaatgaccagtgatgatgagcattttttcatatgtctgttggctgcataaatgtcttccaaacacacgttctcactcataagtgggaattgaacagtgagagctcgtggacataaggagctcatggacatcacacactggggcctgttggggggtggatggctaggggagagataacattaggaaaaatacctaatgtaggtgaygggttgatgggtgcagcaaaccaccgtggcatgtgtatacctatgtaacaaaactgcaagttctgcacatgtaccccagaacttaaataataataataaaaaatatatatgtaattagttaatggagctattaaaaattagtgaaactcttaaaatcatatattcttaaatattatgaataacctattaacccaaaattaggaatatcaaacatatatattttgtttttacaaaggcttttaatgacaatttatattagctctgt

SEQ ID NO: 299418 - DNA, 556 bp, Homo sapiens
ttggctgtttttggactttatataaatggaatcacatgttatacactttttttatctttttttatttcaaattatatttgtgagggtctttcctattgttgcttgtagtcatgttgtgttcttttcatttgctgcacagaaatccattgtataaagttagagatgagtaaagaaagtgtgaaaatactggctgtcaattaatttaggaaagtatattgatacttggtgcctctccagtgtcttagccacattttcatgtttgaggatgaggagacctcaytactctacagttctacctaagagataatgacaatgccttccaacacctaacaacagagcccaaaatatatgaagcaacaatttatagaattgaagggacaaatagttcagaaataatagagactttaatacccaaatttcaataatggatggaaaaaataggagatcagcaaggaattagaagagtagaaaatataaactcactaaacttagcagacatctatagaatgctacacccaacagtggcagaatatacgttgtttttaagtgcccagat

SEQ ID NO: 299419 - DNA, 585 bp, Homo sapiens
tctgctgcattttccagcatcatttcctctcctcctttatcactccctttctctccagtcactgctccatcactgggatgagacaagcacccctcggtaccaatcaacacagtgcaggtcttctctgaagaaaagcaaactctttttcctaaagtatttcacaagctgcctgcctgcctactctattctatgtaatgaaggcatttagttctctatatgtgtatagatggaaagagtagaatagggactccgtgggggatgagtgcaaagtgacctggtctcatatgcttttctctcatcttggctccttgactagtcatcctgcttacctagtcagtcctatcattttactaagtgcttatctgcctgagctaactgtcttgaatgtgattccttgctgggatacattccattccaaattgggcacattatttttcagaatcttctcctttctatattttgggtatgctcattcttcaacttttaccycacaacaatattcaggcttctcctatagctaatagttgttcacaccgtgttgtgacagtatgcattcgcatctcgattagacaattcatgatgagg

SEQ ID NO: 299420 - DNA, 572 bp, Homo sapiens
agaaaactaaaccaaggtaactaaaatccagagtagaaaacttgagctgaaaagcagttgcctgggctttgcggaaggggtttcctccctttggtaacagagatttgtttagggacagaagaaaaggaactgagatactcaagtaaatccaaggactctcaaaatgctacaccccacatcaccagcacagatgcacttttgcgtggttcataaacataaaattaagaaattaatataaagaatggtctcagatgggtaataaccttgggacaattggcagaagcaaacataaatctctctgaagggactcaacccagtccmcacagaattaccatcaactaagctttaataagatgagctcggaaccccaaattacaggaaataggaagaaatacatcacactgaataagagtcagcagataaaggtagcagagttattagaacgaaactataaactaaatgttttaaattattaaggatataaaatacagtctcaaaaacatgagaaaagaataaaactttttaaagagcaataggaaacaccatgtttacctattacatgacataatatt

SEQ ID NO: 299421 - DNA, 572 bp, Homo sapiens
agaaaactaaaccaaggtaactaaaatccagagtagaaaacttgagctgaaaagcagttgcctgggctttgcggaaggggtttcctccctttggtaacagagatttgtttagggacagaagaaaaggaactgagatactcaagtaaatccaaggactctcaaaatgctacaccccacatcaccagcacagatgcacttttgcgtggttcataaacataaaattaagaaattaatataaagaatggtctcagatgggtaataaccttgggacaattggcagaagcaaacataaatctctctgaagggactcaacccagtccacacagaattaccatcaactaagctttaataagatgagytcggaaccccaaattacaggaaataggaagaaatacatcacactgaataagagtcagcagataaaggtagcagagttattagaacgaaactataaactaaatgttttaaattattaaggatataaaatacagtctcaaaaacatgagaaaagaataaaactttttaaagagcaataggaaacaccatgtttacctattacatgacataatatt

SEQ ID NO: 299422 - DNA, 572 bp, Homo sapiens
agaaaactaaaccaaggtaactaaaatccagagtagaaaacttgagctgaaaagcagttgcctgggctttgcggaaggggtttcctccctttggtaacagagatttgtttagggacagaagaaaaggaactgagatactcaagtaaatccaaggactctcaaaatgctacaccccacatcaccagcacagatgcacttttgcgtggttcataaacataaaattaagaaattaatataaagaatggtctcagatgggtaataaccttgggacaattggcagaagcaaacataaatctctctgaagggactcaacccagtccacacagaattaccatcaactaagctttaataagatgagctcggaaccccaaattacaggaaataggaagaaatacatcacamtgaataagagtcagcagataaaggtagcagagttattagaacgaaactataaactaaatgttttaaattattaaggatataaaatacagtctcaaaaacatgagaaaagaataaaactttttaaagagcaataggaaacaccatgtttacctattacatgacataatatt

SEQ ID NO: 299423 - DNA, 572 bp, Homo sapiens
agaaaactaaaccaaggtaactaaaatccagagtagaaaacttgagctgaaaagcagttgcctgggctttgcggaaggggtttcctccctttggtaacagagatttgtttagggacagaagaaaaggaactgagatactcaagtaaatccaaggactctcaaaatgctacaccccacatcaccagcacagatgcacttttgcgtggttcataaacataaaattaagaaattaatataaagaatggtctcagatgggtaataaccttgggacaattggcagaagcaaacataaatctctctgaagggactcaacccagtccacacagaattaccatcaactaagctttaataagatgagctcggaaccccaaattacaggaaataggaagaaatacatcacactgaataagagtcagcagmtaaaggtagcagagttattagaacgaaactataaactaaatgttttaaattattaaggatataaaatacagtctcaaaaacatgagaaaagaataaaactttttaaagagcaataggaaacaccatgtttacctattacatgacataatatt

SEQ ID NO: 299424 - DNA, 511 bp, Homo sapiens
tctttgactgtgaagaaagatgggctcctttcaggcaagattgtagaggctggagctggagagggcagagggcatgtggtggcagctaccaatgcagctcccagtgatctccacctcctggtattcacacttttgggtagtcccctcccacctggtactagtgtaagtctgtgtgatcagtagactatggcaaagtgatggtatgtgacttccaaagttaggttataaatgattgtagtttctgtctcagtcaccctgtcttggataatttgctctggagaagccatgtcataagctatggagaggcccatgtggcaaagaactaaagcctcctgccaattgagcttcagatgcctgcagccctggcaaccctgggagaggccctgaactagaaacatcctgctaagccactcccaggttcctgacctcataacaaaagctacaaagtgtggaatcattaattaagcagcaataaataastaatacggggcaggtatttgggagattgtgt

SEQ ID NO: 299425 - DNA, 595 bp, Homo sapiens
gatcctacttatttaaactttcaatggaaagctctgctcttgtctgtagctgatctgggtgcaatggttttggcatctattgagcrgaaagtttgctcaactttaatttttcagccagaattgtgtaagcagaaccaattgagatgtctatggtgttagttatttttttgtgctggtaattgtcagtcctcttcaattagggcacaaatgggatgatttttttcctcacaagttgatgtggatggtcggtcactgcaggcttcatcttcaacattgtctcatcctttcttaaaatgaggtatctgtttgcaaactgctgatttctttggggctttgtccctataaacttttgtaaagcatcagtgattttatcattcttccacccaagcttcaccataaatctgatgtttgttcttcaattttagtagaattcatgttggtctgatagaggctcttttcaaactcatgtcttatcctccttagtgcctcaaactagattctgttcaacatattataacaagttagtatgagtttatgttggtgcagaaaaaattttaaatccatgcatagttttctcataagacacatttttcat

SEQ ID NO: 299426 - DNA, 595 bp, Homo sapiens
gatcctacttatttaaactttcaatggaaagctctgctcttgtctgtagctgatctgggtgcaatggttttggcatctattgagcggaaagtttgctcaactttaatttttcagccagaattgtgtaagcagaaccaattgagatgtctatggtgttagttatttttttgtgctggtaattgtcagtcctcttcaattagggcacaaatgggatgatttttttcctcacaagttgatgtggatggtcggtcactgcaggcttcatcttcaacattgtctcatcctttcttaaaawgaggtatctgtttgcaaactgctgatttctttggggctttgtccctataaacttttgtaaagcatcagtgattttatcattcttccacccaagcttcaccataaatctgatgtttgttcttcaattttagtagaattcatgttggtctgatagaggctcttttcaaactcatgtcttatcctccttagtgcctcaaactagattctgttcaacatattataacaagttagtatgagtttatgttggtgcagaaaaaattttaaatccatgcatagttttctcataagacacatttttcat

SEQ ID NO: 299427 - DNA, 525 bp, Homo sapiens
cttacagttccacatggctggggaggccttacaatcatggtggaagacagaggaaaagcaaagggacatcttacatgtcagcaggcaagagagcttgtgcaggggaattcctctttataaaaccatcagatcttgtgagacttattcactattatgagaacagcctgagaaaatacccaaccccatgattcaattagctctcaccaagcccctcccatgacatgtgggaattatgggagctacaattccagatgagatttggctggggacacagccaacccatatcacatggatatgaggcagacaycttgacttttcagttcacaggtgtaagagaagccatgtcttttcctgatagagaggactaagaaatgcaaagctataatagattggactttggattgtctttcgtgaggagtggtggaagatgctctaccttcaggacgaagggaacaaagggatatttaatggccagaagagtgaactgcagtggagactgttgttgctcaccaagttggctcacat

SEQ ID NO: 299428 - DNA, 605 bp, Homo sapiens
gaacttgttatgtatctcctgccatygtgtggtgggagggtccatattggactttcgtctggcttctgcctggaaaatttaaaagatggagatggtttgactagatgcttgaaccttgggaataaagggaagatggttgacctgggcagcttgctcttctagagtttgttgtgagcagagagtgtgtgaatgtttaagagctgtaggatgacacaggagaagtcaactgggagaggtggggaagcactgagttgaataattgaaatgttagctaaggtgagaagggcagagtatggcattctaggtagagggaccagcatatgaaaaggctcagaggcataaaagggtctagaatgtccaaggaaaagtaaaatgttcagtgtgactagggtgtaatttggaggcatgagaagaataagaaattcacttgggaaaatgtcctaagcaaatgctgtttgtcctttgtcctttgggaactagggaattactgtagagttttttttttaattaatatactttatttttagagtagttttggaaatatagaaaaactaagcaaatagtatagagagttcccacacagcctcctactttcccctattatt

SEQ ID NO: 299429 - DNA, 594 bp, Homo sapiens
taacaagttggttgaagaggaaaaattccaggccttgtttaaagatggttctgtccaatatgctggcactacccaaaagtaggtggttgtaccgttgcagttccaccacagcatggccttgaaagacagggtgaaggaaaatcttcccagtggacagtatgaatctatattgacttagggtagcggctaatggtttggctggatggtcaaaccttaaaaggatcatgattaaaaacctggtggcagggagagctgagaaagaggttwgtaggtagaatgttacgaatttgcacggaatgggaagatagtatatcccatgtgaatgctcaccaaacagcaatcttatcagaagaagatcttaataagtaggtggatgagattgctggttttgtgaacatttgttaccctctttccccaggttccccttttttgttctatggaagccacataaaatggtccatagggctatctgggggctcagcaacatggactttgaatcaccgctgctgagtgtccaacctgccaacagcagacatcaacacagcatttatttggcaccattccctgggagtaccagtttagccacctggtgac

SEQ ID NO: 299430 - DNA, 541 bp, Homo sapiens
acagttcagctcaaagtttgcgagctgaaaataccttaagagtccacacaggtctgaaaaacctcgaaactttctggttaccataggtacctttttgtcttatctaataaaagcagcaccccattttgggtatcttgcctgtagcagcagtttgtaaaattctttcaaagggcacaagacaaatcaagttttcccaggctcagttctgggattcagctgagcttttatggtcaagggcatactcctaaatcagacaggatgctctaaacattctcattagtccattttgaataggactatcatagtgcttggtctggcatgaactatccatcagaataactctgcatactttttgtttacacatgtgtattgagtaattttttgaattaccttaataaacatctggcactagaattcttgatgggaaggaagtgtttttgcttgaaaaaaaaaagagtttaataatgaagcaaacgaggtataattcctccttcycccactagagcctctctgcatgagatgaggaaaggaatttatgtct

SEQ ID NO: 299431 - DNA, 585 bp, Homo sapiens
tgcatatatgtttataatttttatatcttcttgacaaattgatttatttataattataaaactgttctttgtctctgataacaatttttgtcttaaagtctattttgtctgatattagtatagccactccagctttcttttggttactgtttgcctgatatatgtttttccattcttttaccttgaacctatttctgtttttkaatcaaacatgtgtctcttatatgcagcatatagttggatcatgtattgtccattctgcaagtctctggccagtcctattctgaagttttcttgtaatacttgccaaatgcagaaatagtagccaacacatctactaatgttctgtttttcagtctcttttcctagagatgccatataagtaaatatgaagcttgcctcccaagttagattggttagtaatattttggcacaacataacatgcattgacatatttctggtctccaacaccaggcttcctctcagcacaccatcagctattatagcagtgccctatttcaatgtacctatatctgtcttagtatgatatttatattagtcatagtatgataaactatacccta

SEQ ID NO: 299432 - DNA, 585 bp, Homo sapiens
tgcatatatgtttataatttttatatcttcttgacaaattgatttatttataattataaaactgttctttgtctctgataacaatttttgtcttaaagtctattttgtctgatattagtatagccactccagctttcttttggttactgtttgcctgatatatgtttttccattcttttaccttgaacctatttctgtttttgaatcaaacatgtgtctcttatatgcagcatatagttggatcatgtattgtccattctgcaagtctctggccagtcctattctgaagttttcttgtaatacttgccaaatgcagaaatagtagccaacacatctactaatgttctgtttttcagtctcttttcctagagatgccatataagtaaatatgaagcttgcctcccaagttagattggttastaatattttggcacaacataacatgcattgacatatttctggtctccaacaccaggcttcctctcagcacaccatcagctattatagcagtgccctatttcaatgtacctatatctgtcttagtatgatatttatattagtcatagtatgataaactatacccta

SEQ ID NO: 299433 - DNA, 564 bp, Homo sapiens
tggagagggaaagtggtataaaagtaccatgaggccaggcatggtagctcacatctgtaatcccagcactttgggaggtcgaggcaggtggttcacttgaacccaggagttcaagaccagcctggacaatatggcaaaaccccatctctactaaaagtacagaaattatacaggcatggtggagtgtgcctgtagtcctagctacttaggaagctgaggtgggaggatcacctgagccctgaaggttgaggctacagtaatccgagatcatgccacggcactccaacctgggcaacagagtgagatcctgcctaaaaaaaaaaaaaaaaaaaaaaaaaawatatatatatatatatatatatatatatatggtttggccactgactgaatagctatacacacactcactctgtcacccaggctggaacaagggcagtagagtgatcacagctcactgcagccccaagctcctgggctcaggcaatccttctacctcagcctcccaagtagctgggactacaagcacatatcaccagacccaactgattttatttctaatttttt

SEQ ID NO: 299434 - DNA, 504 bp, Homo sapiens
ttttcctaactttctgaccacttgtggggatagaggggtgaatgatgggcagamccttcacgtgtcttgggtcatgtgagcatctgagcctacagagaacactccttttgcttctgaagctcttgcagcccgttctgagaaatgtaatgctgaccagttcatctcaggcatttctttctctccggacattataggatcaccctcaaaacacgtgtgagggcacatacatcatcagcttcccatagtgagtagttcctaggacttggataacatttcaagcttgacatggctaaaacaataccatatctgcagttaactttaggtgactcaccagaagagctattttaaacaaatttgtagcgactaagattacatttgttctatgaaaaacagactgaaaggacaaaaggctaatgcaatatttttgaaacgctctttttaagctcaatgaagtcctgctgtattttcttgacagcatcctagttaccaggcataacaggaggg

SEQ ID NO: 299435 - DNA, 504 bp, Homo sapiens
ttttcctaactttctgaccacttgtggggatagaggggtgaatgatgggcagacccttcacgtgtcttgggtcatgtgagcatctgagcctacagagaacactccttttgcttctgaagctcttgcagcccgttctgagaaatgtaatgctgaccagttcatctcaggcatttctttctctccggacattataggatcaccctcaaaacacgtgtgagggcacatacatcatcagcttcccatagtgagtagttcctaggacttggataacatttcaagcttgacatggctaaaacaataccatatctgcagttaactttaggtgactcaccagaagagctattttaaacaaatttgtagcgactaagattacatttgttctatgaaaaacagactgaaaggacaaaaggctaatgcaatatttttgaaaygctctttttaagctcaatgaagtcctgctgtattttcttgacagcatcctagttaccaggcataacaggaggg

SEQ ID NO: 299436 - DNA, 644 bp, Homo sapiens
gttaaatattaatattaattatcccaagctatgtgttttgcaggaggttttttctttgtgcatccttataattgattttctaaacaaagaaccagcaattattttaaccagtaataaactcataaaataaaagaacttgaaaatttactaagaatattgttgcataattatattttttataattatgtaatttacataattagtcacaactgtattttatttggtaatatattccatatctttgagtttggaaagttattttctatctggaaatcagataatatcccaatttttctgggttttaataatttaatttttaatagtttttatattttatattttattctttttaactgtatttttgtctatttgtacacatctaatctccaacagcacagccaggggctccaaggatggccgatgaggaacagtgtctgaagtagtgtttcccaaagagtcacccctctggctatgtgcaaatccatggttcagactccagactgtggaatcaaagtttctgggtatggagccaaggaatcttcatctttttcaagtccttatctctacccttgtccaacccagcaattaayatttatcctaaacattgaaaccttcccttctaaagggaaaataaagagaagtcc

SEQ ID NO: 299437 - DNA, 603 bp, Homo sapiens
caagtgattctcctgcctcagcctccagagtagctgggattacaggcatgtgctgccccacccagctaatagttgtatttttagttgaaatggggtttcaccatgttggccaggctggtcccagactgctgacctcaagtggcttacccgcctcggccttccaaagtgctaggattacagcactttggagccactgtgcctggtcccaggtaatatttttaatgraatctatcatttcccaaaatgtatcacatattttgctgacttgtttgttatctgtctcttccctgagaatgaaaactccatgatggcaggattcttctctgtcttactcactgatacattcttagagcctagaattaggcctgacacagtcagcattcagttgtttgaataagaatttatagtgttagttcactatactcctgctgtattaagcaccacaggtgacctcttactcatcccacatcaattatgttgccttgaggttgttctcaaagctcatgtgctataagctgacttcatgattttgcctgtacaatgcagataccctttgagttagcaaactaaagtaggaacaaagagggatgggggagagagcac

SEQ ID NO: 299438 - DNA, 461 bp, Homo sapiens
cagtaataataatttaacttcatcgagcatctactttgtgctaggtactgtggcaaatgcatcataagcattattttatttaattcttaaaacaattccatgtagtagatactactattatctccattttacagtgaggaaactgacttagacaaggttggtgacttgttcaaggtagtcactagtgaaagtaatggcaacgtttactgagtacttgmaacatcgcagacatccatcagagtacatcgcaggtattaggtggcttaatgcattcagccccataaatagggtatttgagtttgcccaagagagtcatggtttactcttgctgttccagcataattatcaatagttcccctttttactcttaaaagcatccttgtttgaaggataaagttacttgagcacctgtgaggcaagtattatttttatttcccttttatgaatgagtaaatgagatc

SEQ ID NO: 299439 - DNA, 461 bp, Homo sapiens
cagtaataataatttaacttcatcgagcatctactttgtgctaggtactgtggcaaatgcatcataagcattattttatttaattcttaaaacaattccatgtagtagatactactattatctccattttacagtgaggaaactgacttagacaaggttggtgacttgttcaaggtagtcactagtgaaagtaatggcaacgtttactgagtacttgcaacatmgcagacatccatcagagtacatcgcaggtattaggtggcttaatgcattcagccccataaatagggtatttgagtttgcccaagagagtcatggtttactcttgctgttccagcataattatcaatagttcccctttttactcttaaaagcatccttgtttgaaggataaagttacttgagcacctgtgaggcaagtattatttttatttcccttttatgaatgagtaaatgagatc

SEQ ID NO: 299440 - DNA, 547 bp, Homo sapiens
gcatctactttgtgctaggtactgtggcaaatgcatcataagcattattttatttaattcttaaaacaattccatgtagtagatactactattatctccattttacagtgaggaaactgacttagacaaggttggtgacttgttcaaggtagtcactagtgaaagtaatggcaacgtttactgagtacttgcaacatcgcagacatccatcagagtacatcgcaggtattaggtggcttaatgcattcagccccataaatagggtatttgagtttgcccaagagagtcatggtttactcttgctgttccagcataattatcaatagttcccctttttactcttaaaagcrtccttgtttgaaggataaagttacttgagcacctgtgaggcaagtattatttttatttcccttttatgaatgagtaaatgagatcagtttctagggctaagtaacttgccctaggccacctgactaagaagcagccacaccaagattcaaacccaagtgatcaaatcagttttccttgtaatcctcatgttatgcat

SEQ ID NO: 299441 - DNA, 598 bp, Homo sapiens
tccaacatagccaactgtctgtcacatgaacctgaaatgtctacattagaaacatgctaaattttttgaacttcaaaatgacttctcttccagcatgttttcctgatcaaagttctcaatatcagctcagtcattcaagtctagaaacagcatttttcttgtttctcacctcatcccttccaaccaaagaattagtcattaagttgtgacaattttagttcttacagtgttctcaaattcttcctctccccttcctctgcacagctgccactgtagctgcagccctgaccatcttttttcccaaatattgcaacacrtttctaactgggtttgcagctatgctttctactggcacagatcaatttccaaagcatagattcatttatgaattttctctaattgaagccctttggtgcccctccacccatcactagaaagtcaaacttcagaacatatatgtaaggatagtttgtgatcttttatgatgtaatctctgcccacttagctaacttcattcttctccactgcactaaacatggtagtgataccaaaccatctgttgttaccaaaacatggcacagggctttacatccacaca

SEQ ID NO: 299442 - DNA, 523 bp, Homo sapiens
gaaacagcatttttcttgtttctcacctcatcccttccaaccaaagaattagtcattaagttgtgacaattttagttcttacagtgttctcaaattcttcctctccccttcctctgcacagctgccactgtagctgcagccctgaccatcttttttcccaaatattgcaacacgtttctaactgggtttgcagctatgctttctactggcacagatcaatttccaaagcatagattcatttatgaattttctctaattgaagccctttggtgcccctccacccatcactasaaagtcaaacttcagaacatatatgtaaggatagtttgtgatcttttatgatgtaatctctgcccacttagctaacttcattcttctccactgcactaaacatggtagtgataccaaaccatctgttgttaccaaaacatggcacagggctttacatccacacacaccgttgcatatgcagctctttttctaaaatattcttcctcctttgtcataccatcaaaaccctatt

SEQ ID NO: 299443 - DNA, 616 bp, Homo sapiens
acatgttaacttactgaaccattgcaacaaaaccctctttagtgccggaactgaggcagagagaagtgaagcaactttcccaacatcacagaactggaagttgcagaacggggattcaaccccggcaacctgcttccaggtttgaactctcacagcatagctacactgcctattagtaaaagtgagataatgaataaaggtgcttagtccaaaatgctgctctagcaggcakagtgggtgccttggggtcaggtggatttgagtgtgattctgccatttaggagccgactgaccttgaactggttatttatctaatagatacctcatctgaaaaattggcatattactagtatttcatagaattcattctgcatgttgtaaaacaacccataaacatgttcttagaatagtgcctggcacatggtaagatcttcattgatgtgcattttataattatgtctaataataatctttattatcacagtctgctctgtgctataattgcttgtgtgtttaattttaatccatcctgtgaggtcatagtctttttgttcgtggcatatgttttaggtccttgcacacagtagatgctcaatgtttgttaaatgagtaaata

SEQ ID NO: 299444 - DNA, 582 bp, Homo sapiens
cttaaatgagccctagcaaggacaatgactcagaaataagttgatttttctgcagatgcttctgaagttctcaagtacttgggggtcaaactggcaaaatttatagaaagattcactaagtcctagaaagccttggagcatgtgagggaggaaggtaaagtagaaawatccgtgcttgcctcattctgggcaagcaaggcggggcactcagtggatattcagagggcctcctccctggagggagaagaagacttgtgcagaagatccaggcaggcccatttctttttctttttctttctttttttttttttttttttttttccctcaagacagggcagcaatctgttgcccaggatggagtgcagtgggttgatcttggctcactacaacctctgcctcccgggttcaagtgattctccgacctcaacctcccgagtagctgggactacaggcatgcaccaccacacctggctaatttttgtgtttttagtagagacagggttttaccatgttggccagaatggtttcaaactcctgatgtcaagtcaccagtccacctaggcctcccaaagtgctgggatt

SEQ ID NO: 299445 - DNA, 403 bp, Homo sapiens
atccaagctcatgccactatgaaataagagatacatccaagccttctgactcctggtctgccttgttactgctaacgcaagccgcctctgcaggtgcggttatccctggaggcrcttccattaagtccagtcagcctccctcttacccattttgcacaggcatacatttgccaaagctgtgcttctggaaggacttacacagattccaagttgagcatctgagaaagagctgagaaagacatgagaagtcccctagttcaaattcttgttttaataaattgggaaactaaagtaatagccagacatcaaaatcagttcttccagcaccttgctctgatgctaggtcttttaccctccctgtaggccctggttgtttcaccaagtccagcccgtgggcctggct

SEQ ID NO: 299446 - DNA, 582 bp, Homo sapiens
cttaaatgagccctagcaaggacaatgactcagaaataagttgatttttctgcagatgcttctgaagttctcaagtacttgggggtcaaactggcaaaatttatagaaagattcactaagtcctagaaagccttggagcatgtgagggaggaaggtaaagtagaaatatccgtgcttgcctcattctgggcaagcaaggcggggcactcagtggatattcagagggcctcctccctggagggagaagaagacttgtgcagaagatccaggcaggcccatttctttttctttttctttctttttttttttttttttttttttccctcaagacagggcagcamtctgttgcccaggatggagtgcagtgggttgatcttggctcactacaacctctgcctcccgggttcaagtgattctccgacctcaacctcccgagtagctgggactacaggcatgcaccaccacacctggctaatttttgtgtttttagtagagacagggttttaccatgttggccagaatggtttcaaactcctgatgtcaagtcaccagtccacctaggcctcccaaagtgctgggatt

SEQ ID NO: 299447 - DNA, 568 bp, Homo sapiens
aaagccatgtatcttatattctgtgggtaggcttatcttaatttagggattacaccatgtaattattgtaaataaaggaaataaccaagctatgcaatttaatttggtcatatctgcagaggatatagaattctggctaggatagaagatgacaattagtgaaaaaagcggtgttgtgtatgattaagagaaagaacagtgcagaaataacaaatacaccacacacacttatgtatgtttaaatcttgcctacctctacccatgatgttttgaaacatatatgcatcttaatggctgaatcgagcaaatcttcatatgtattaccttacatacttagcatttatttttgstgagaacacttaaaatctactctcctagcaagttttaagtatacaatacattgttattaacaatggctatcatgttgtgcaacagatttcttgaatgtattcctcccaaatgaaatttcatatcctttaagcaacattaccccaatcccttctttccagtccgtggtaaccactattctcctctctactctgagttcaactttttaatattccacata

SEQ ID NO: 299448 - DNA, 568 bp, Homo sapiens
aaagccatgtatcttatattctgtgggtaggcttatcttaatttagggattacaccatgtaattattgtaaataaaggaaataaccaagctatgcaatttaatttggtcatatctgcagaggatatagaattctggctaggatagaagatgacaattagtgaaaaaagcggtgttgtgtatgattaagagaaagaacagtgcagaaataacaaatacaccacacacacttatgtatgtttaaatcttgcctacctctacccatgatgttttgaaacatatatgcatcttaatggctgaatcgagcaaatcttcatatgtattaccttacatacttagcatttatttttggtgagaacacttaaaatctactctcctagcaagttttaagtatacaatacattgttattaacaatggctatcatgttgtrcaacagatttcttgaatgtattcctcccaaatgaaatttcatatcctttaagcaacattaccccaatcccttctttccagtccgtggtaaccactattctcctctctactctgagttcaactttttaatattccacata

SEQ ID NO: 299449 - DNA, 609 bp, Homo sapiens
cctaaacatctgtgtattaacacttccacctgataatttgcattttataaagtatagggtggcttttgagctaactcaaggcatggcattaattttgtgagctgccctatccttgactagtcatttgttcttggatcctttgctgctccttgtgaaatatatatctagtcactttcatgtaccccaaagaggggaagctactggctacctaatcctcaagaatttggagatcaccattgtgttggtgaggcatactttgcctcccaaattaatgaagcaaaatccttcaattttcatcttggtccagtgctgggaactgccttggcattgtggataccagccctagctcttctgtgcctactccwttccaaagtccaggcagtgtggctcactggctttcagaggtctaataccaggaatctcttcaaggatgagatatctcacaaaagagaattctatcgaaaagagacagataaaatgctgagcaggtgtctctggcttgaaacctctgtagtctacacagaatacctccattgtatcttagctgccttgaacaacagctctgaggacctacagtgatagagacttctctacattgatgttgtgaag

SEQ ID NO: 299450 - DNA, 543 bp, Homo sapiens
ggtagatgacgggaaatcaattaatgggtacaatgtaaacactgttggctgggcatggtggctcacacctgtaatcccagcaccttgagagaccaaggcaggtgaatcacttgcctggccaggttggtgaaaccctgtctctactaaaaattcaaaaattaaccaggcatggtggtgcctgcctgtgatcccagctactcaggaggctgaggcaggagartcacttgaacctgggaggtggaggttgcagtgagccaagatcacgccactgcactccagcctgggtgacagagcgcgactctgtctggaaacaaacactgttggcttaggccacactgaatttataaaaaaaaattcttcaacaaattaaacttagcttactgagaagtaaataaaatatcattccattggcttctgttcatcattatttacagagaaaagtcagtcattatttttatcactgttccctagtatgtgtcttttttctttgactgctcttagatctgctgtttactactactttaggctgtttgattacagtgc

SEQ ID NO: 299451 - DNA, 554 bp, Homo sapiens
catggacacaggcttgaggggctagccttggattatttcactgcatacaactgggaattaggcatagagtatcttgtcacagaactggcataaaactcaagtcccctgaacagaagggaaatgaaactcacaggctttggaattaggcagaggtatttgttaaatttcttaatctcgtaggcccaatatttgcatctggaaaacagggatgagaggtacctcatggtactgtagaaggataaacccagtacttaacaagctgcaagctctcacaaattgtagcaatcattgcaaccctcaactcatcaacaaaattttaggatktgttcaaggatttaaaaatgaaagccaaaggccagcgcccctggtttctgcttcccagaaggtttttgactgatgaagtggccatgagcctacagtcccttgggtctgaacctagacccaggggtgtagaaggggagagtgacaagctgttaacagttctgacttcttgctctacattccagtgtcagtggctcttcttacggcaggaggcaggacacagaacaggaaat

SEQ ID NO: 299452 - DNA, 601 bp, Homo sapiens
ttcacctaaaaaataacatgttcaaaaacacttttaaaagcctaattgttgcttttttaaaacctcagatcattctttaactactggccttcatgacatgagaaatgttgtttgagatcaaccatcttctatttgttctcattccctcccctctccacttctattttcccatctcatatctctgtctcctcttcttttctcctcttstcctttatcctctaccccacccaaatcaagcctttcctccagtcaaggccaagttctcaacaacctgctgtaactggcatggaccaagacactctgagtttcaatctgttgcttagcaccaaggttgcctggatacatctcctggtgacaactggcctttggctctgactgcttatgcacataaaccatgcagtgagcatctctgttcagaggggcactgggccagaaccaacttccacaatctccttttgaagtgcctgagtggtggtgggagggggagctagctttaaaggaaaagagacctaaatttttacactgcgctacaaggtaacattttgcagtgataaagaaaacactacacagtgataaactgaataaaatttcctgttgacca

SEQ ID NO: 299453 - DNA, 601 bp, Homo sapiens
ttcacctaaaaaataacatgttcaaaaacacttttaaaagcctaattgttgcttttttaaaacctcagatcattctttaactactggccttcatgacatgagaaatgttgtttgagatcaaccatcttctatttgttctcattccctcccctctccacttctattttcccatctcatatctctgtctcctcttcttttctcctcttgtcctttatcctctaccccacccaaatcaagcctttcctccagtcaaggccaagttctcaacaacctgctgtaactggcatggaccaagacactctgagtttcaatctgttgcttagcaccaaggttgcctggatacatctcctggtgacaactggcctttggctcygactgcttatgcacataaaccatgcagtgagcatctctgttcagaggggcactgggccagaaccaacttccacaatctccttttgaagtgcctgagtggtggtgggagggggagctagctttaaaggaaaagagacctaaatttttacactgcgctacaaggtaacattttgcagtgataaagaaaacactacacagtgataaactgaataaaatttcctgttgacca

SEQ ID NO: 299454 - DNA, 544 bp, Homo sapiens
cccttgtaaactgaattgcctggacccaatattactttttgtgttcatttctgttttgytttcccataccctttggcaatgtcttgtatgaatctttcagcctggttgcaactgtactataaagtataatgggttgagtcagacaactgctgggtagctaggaagaagtactgccccctctacccccacaaacccccagcagaggtcagaagggtgaggtcataatcaataaaacagtccaagatggtcagattgtgcagtaagaggcaaatttgaatatctaattgtcctctccccatagagattattctcccattgtttgccttagaggtcatgaagtatattttcattaataagatgtaaaatagtggcctctccttctagaaaatctcagaaaaaggaggcgaagagaatctgagctcttctgcctactgaagagacactggcatgtcaggacatggtatgtgaccttcaaagagtagagaaggtcttggagttgatagatgcagcctgggtcaccgggattgaacctttcacagagcat

SEQ ID NO: 299455 - DNA, 544 bp, Homo sapiens
cccttgtaaactgaattgcctggacccaatattactttttgtgttcatttctgttttgctttcccataccctttggcaatgtcttgtatgaatctttcagcctggttgcaactgtactataaagtataatgggttgagtcagacaactgctgggtagctaggaagaagtactgccccctctacccccacaaacccccagcagaggtcagaagggtgaggtcataatcaataaaacagtccaagatggtcagattgtgcagtaagaggcaaatttgaatatctaattgtcctctccccatagagattattctcccattgtttgccttagaggtcatgaagtatattttcattaataagatgtaaaatagtggcctctccttctagaaaatctcagaaaaaggaggcgaagagaatctgagctcttctgcctactgaagagacactggcatgtcaggacatggwatgtgaccttcaaagagtagagaaggtcttggagttgatagatgcagcctgggtcaccgggattgaacctttcacagagcat

SEQ ID NO: 299456 - DNA, 592 bp, Homo sapiens
gctcaggatcaatgtctcaggatcattggaatggtcactgtcagaggaaagatgggatttggtggcttgggattgctgattagcaatgctataactttgacccttccatagttttccacgtactctgtggcagtaaagcaaactggtaattctatgattcttttccatgattctccttggtcctgagaaggtggctgtcccaggggagggaagttcttgagctgacgaagccctgtgaatcaccagtcataggtagtgcggtccctctgctgtcagccatcacctttaatgatgtatgtgtgcacgcatatgtgtgcatatgaatgcccaagcacatgcctctctaacactcaggcacctgggcccacatggcgggtgctccttgctgtgatgccaggtgcakcccctgccatgcacaaataatgaggcacacgggcctgccttctgctcagggtgtttttcctcctttatcattcacattaaatgttacaggcacttgactttatgacttcttcattctgcatattaagcagctgacacaggcagccttctccagacagcggtctgtacaagcctgcagcattatttaacg

SEQ ID NO: 299457 - DNA, 602 bp, Homo sapiens
taccaatccacagcttgtttgcctgcataattcattgattttttcaggattaaacttaacttctgcctccagtgaggaaccttcttggatccagtgaaggtttggggtgctccttctcaacgcaccatccagacctcactatcattctctggcacctccttctccccttaggctgtgagctcctcaaagacagagaccatatagctgtcacctagcaaagtgcctgcaaaggaacagactccaaacctttctaaggaagaagcagtgaggaggagagaaaaaggtctgtaagagtggatttgcgctggtgccacctgggtttttctcagtcttcctgggaccaattcccatgacagagaaatttgccttaagagcaagaaaatccactgggaaggaagtaraatttatatgattctatcaagtgaattataaaggagccagaatctctggcacactcctgctgggaaatgaggagggtgagatttaccacctgcctcctgctttaggtttttatgaccttcacatttagatctttaaaaagtgaggggagatctttaaaagtgaggggagaatccttgtccatcgttctttgtattagtgaa

SEQ ID NO: 299458 - DNA, 564 bp, Homo sapiens
taggtcatgacaataacccagcacatgcaatattctatttaagcctcaaaaatccctgtgatattattagctgcagggtgtacataagaaaacaagggcaagttaatcctaactgacattccattttagtagaggcagaaaaactacttggatttacctttttttttttttttttgattataktctaaattagggaaatattccaaagcacagggtatttcctgacataagtaagatgtacccttgatcagatttggtggtctcaaatggtttattttttgaaaatctcagaagactagggcccagattatctaacaaactttctcacagatccacctcaacttttcaactggctctgaagcactgggaaaccgaaaagcggtaagaacataataccactagactttggctaaaggggaaaccaaaactgtctcaataagataggaaacatgtttagaagcatttgtcccaatgtaccacagcagtcagagttccccatccttacatgagcaagaggatgaggtgggcatgtcatggtggttgtggaacctatcacaggaaaat

SEQ ID NO: 299459 - DNA, 593 bp, Homo sapiens
agaaccagagagtgaaataaggaggccagaactggacaaagaactgtggtccaaaaaagaaagaagaaagaattaagatagaggtgggatgaggtaatgcatggaggctgaggagctcggtctgtcctgataagagtttcagactaaaaccatagaggtcaccctttagcaagcctgggactcatgaaggcctgatgtaaagagctagactagcaaggtcagccatctgtagagaaagagcttcttcacgtatggtgagcttcagttcaggagagcctcaaaygtcctctggagcttcactctccatctgtaaaatgaggaccaatatctttctctggtccattcagtagagtctttagaagtagcaagacaatggatgcctgatcaattgttaaatacatgagactggtctgattaccatcctcaattgcctgaaactgcaagagagattagttttatttaacaagagaccccttttaaaatgcaaatatatttcactcaattaaagaaatcaagtttattcttagtttttgtgataggtttgctttataaagtatctgcaaacactgagttagcaaatactgagccattgt

SEQ ID NO: 299460 - DNA, 562 bp, Homo sapiens
atcattcactgtcactgtacctgggagaaataccaaaacaactttactaaaacttactaagatactattattgtgcccattaattgttttccagggagatgcacattttttagcacaaaatgcccagatagaattggtaaaactgaaaatattaattttaatacgtctttaacaatgtaatgttttaccaaaaacttctcttatctcatcctattctttaaatataaacttagctcacttgcaaatggggccatgtctgccatataacctagttagtaacatcagtcacgactatcaaattatcagcccaatcagagtcactttatgtcataaaatgtctgacttcatttttgaatttaagtaaatggactaatagacgtttcagaaatattgttaaaaattactcaaccatatatcgtggaacttgtgttttttaaggtagcatamtaaaagcagtcaaatcaagattatgctgatacaaagcgaatatagtctattcatataatttataaaaacaacaaacacttatgctgcttctcactacttaatttgaagtaatgca

SEQ ID NO: 299461 - DNA, 577 bp, Homo sapiens
gggctgaaccccaactcaaggcacatgggctgtgtatgccccatgtgtgggtggattgggctggttctccagggcctcatttctcaggactcagtgctgttaatgagcaacaggaaagcgtgggaagtggaggtcagggaagttgagaagagtgcagggctgcagggaaggtgaatgagcagcacagatgttggtggcgaggggatcccaggcaaggctttactgatggttcccactatttcctgcagagcgttcctaacattaaattggcatctgttccttattggtcatcaagtatgattggaaatacagggtttctccacatctacccctcccacattgcattctgtctgacaaattatgatagtttattccyactgatgttttatctaagtgcctcttcaatccatttgctttgtgactgaaaagaaaaaatctttagaaaagttcaataacttcataaattttcatctatagagaaagcaatacatgaaaagcctttcaaattgtgcttgtaacgtattttctctgctctgttgcttatccattccactttggggtcccagaaatgtgtcat

SEQ ID NO: 299462 - DNA, 557 bp, Homo sapiens
tggaaaacagtgtgcagattccttaaagaactaaaagtagaactaccatttgatccagcaatcccactactgggtatctacccagaggaaaagaagtcgttatatgaaaaagatacttgcacatggatgtttacagcagcacaattgacaattacaaaatcayggaaccaacctaaatgcccatcaatccatgagtggatgaagaaactgtggtatacatatgtgatggaatactactcagccataaaaaggaatgagttaacagcatttgcagtgacctggatgagattggagactattattctaagtgaagtaactcaggaatggaaaaccaaacgtcatattttctcactgatatgtgggaactaagctgtgaggacgcaaaggcataagaatgatagaatggactgtggagacttggggggataaatgagatgagtagagggaaaaaagactacaaatatggtgcagtgtatactgctaggttgatgggtgcaccaaaatctcacaaatcaccactaaagaactcactcttgtgactaaataccacctgtacc

SEQ ID NO: 299463 - DNA, 594 bp, Homo sapiens
aagtaaatttatcagtttaacacaatctcaatctaaactccaatgggattttattttgaaacttcacaaaatgattttaaagttggtcttgaagagtaaactgttaacctgaagacttaaagagtcaaaggccaaaggaaatgaccaacttcctaggagtgctgtgaacactgaaggaatcaacagaggtagagcacttggaaaacatctggactagaataagtgctcagtaaatgttaactattctcaccattattggactgaaaaacatgggattactcctaatataattctcctcatggtagaaaacagaatgaaaatgacttaaggtgaaatatctgggactaatgtgtcctgtagtaaaagaaaggaaagaaatggtttgttaagtagagggagaagtgaaatctagagggtgagttttaagataaaattaaaccatatctgtgtgctgcgtgtatgagtctgttagaagggaaaatatgatgatatatgagagtaaagggataatttctggattccttcccttcaataggaaatagggaataaaatacatgaatatagtagamaagcggaggaatggttctggcctag

SEQ ID NO: 299464 - DNA, 603 bp, Homo sapiens
ccagttttcccagcaccatttattaaatagggaatcccttccctattgcttgtttttgtcaggtttgtcgaagatcagatggttgtagagcaacacactattaatgaagaatctccttaagcatgtgatgtaatgccctctcatactaatgagaatgctaatatttctctaattaaaaatttggaatactaatatttctctgattaaaaatttggaatacattcttctatgcactaccaccaccctatcaaaaggatcacagagaaagatatggaaggttagtatccagagaagaaagtggaaagacatacaacttaaagcccaaataactgaagatatttagtataaggtatctgaaaaccaagctatccatttactgrgctgaaaagtcagtctctaggtgtgagagttgattcccctctctctctccttctgtgtgtgtgtgtctgtgtgtgtgtgtgtgtgtgtgtgtatttgtgctggtgataagatggccaaaggttacatcaatagagaggcatcccccactatttaaaaaaacacacatataaacaaccacgcaactgttctagaatcaattactaacataattcatatctcaca

SEQ ID NO: 299465 - DNA, 507 bp, Homo sapiens
atccatttctaaaactgtgttgaactctgagtcaagtttcagatactgaaagactctatttcattattttaaataggaaaagaatgtattcccaacccatccaaaatccctgacatattgccccaaatatcgctaaaacscttgaacacctataaacagtccaccaaagatttctacagaatgaaaacatttaaaacaccaattactgaattattgaacacttactgaactcattagtgagtacgtttgtgtataatactcaatggttctaaacaatattagatgcaaaatacatattttttctagtctgccacaaacatgtatttactatatgtaaataagcaatataataaagatactaaaaaataccagagctactatctaaattggatgaagttggggtagtttggggaagggcatgggaggtgccaggggaaagggaaggtagtaaagggcacaatatcaagcaaagctccacagagggtaacttggagtcaatgccacagg

SEQ ID NO: 299466 - DNA, 507 bp, Homo sapiens
atccatttctaaaactgtgttgaactctgagtcaagtttcagatactgaaagactctatttcattattttaaataggaaaagaatgtattcccaacccatccaaaatccctgacatattgccccaaatatcgctaaaacccttgaacacctataaacagtccaccaaagatttctacagaatgmaaacatttaaaacaccaattactgaattattgaacacttactgaactcattagtgagtacgtttgtgtataatactcaatggttctaaacaatattagatgcaaaatacatattttttctagtctgccacaaacatgtatttactatatgtaaataagcaatataataaagatactaaaaaataccagagctactatctaaattggatgaagttggggtagtttggggaagggcatgggaggtgccaggggaaagggaaggtagtaaagggcacaatatcaagcaaagctccacagagggtaacttggagtcaatgccacagg

SEQ ID NO: 299467 - DNA, 569 bp, Homo sapiens
ttgggagaccaagggaggagaaacttaccaatgactatgcaagcccagctgccttgtctcaagtggggccatttggagacaggttctcaagaatccccctgtgggatcatgctgaagctatcctcactgggacattacctgagactgcacgctctagcttggccttctctccttccctgccctgcttccccaatatcattagtgatttctttggagaacatgtcattaatgaatcacttatacatgaatctaatctccctatcaggatctgattctgaggaaacatcctaacacagccaaaaracacaactattttgtgaacatcacaaatgatccagtaataataagcagtggatttgctgatagcataataattgtcattcagatttcaaaggatgactccagctagaagcatgaatgatgaatgcttctaagtagtattttagagtgactaacaagatatattgttaaatttaaaaacaaagatggaaaaagtatgtacagtatgctattttatctcagaaaaaggtagaaataaaatgcatgtacgctcttgttttgactggatg

SEQ ID NO: 299468 - DNA, 569 bp, Homo sapiens
ttgggagaccaagggaggagaaacttaccaatgactatgcaagcccagctgccttgtctcaagtggggccatttggagacaggttctcaagaatccccctgtgggatcatgctgaagctatcctcactgggacattacctgagactgcacgctctagcttggccttctctccttccctgccctgcttccccaatatcattagtgatttctttggagaacatgtcattaatgaatcacttatacatgaatctaatctccctatcaggatctgattctgaggaaacatcctaacacagccaaaagacacaactattttgtgaacatcacaaatgatccagtaataataagcagtggatttgctgatagcataataattgtcattcagatttcaaaggatgactccagctagaagcatgaatgatgaatgcttctaagtagtattttagagtgactaacaagatatattgttaaatttaaaaacaaakatggaaaaagtatgtacagtatgctattttatctcagaaaaaggtagaaataaaatgcatgtacgctcttgttttgactggatg

SEQ ID NO: 299469 - DNA, 313 bp, Homo sapiens
aattataccacattcataggtcagagtaatcctaaataggtatacttttctagcaagaaaatattgacattttgctacttaagactacccttgtttcattgtaacttaccagtgctaagctacactttcatttccccaacagggattcttgaagcttgcaagagcattgcagcatgttaaggcaaaaatagctttaaaatattaagaaccatrttctggggtgaaagatgagacacagattttgtgtcacaagaaacggactaaacactgcctatccccaccaagtggggagagaaggaaagactaaaactag

SEQ ID NO: 299470 - DNA, 476 bp, Homo sapiens
aatagaaaagttacaaatatggtagctaataatccaactatatcaataattacttcagatgtgagtgatctaaatacaaaaattaaaagacagagactgacagaatagattcttttaaagaaacaattttatattgtttccaaggaagacttcaaatataaagacatatagattaaaaataaagagataaaggaaaataaaccttagtaacactgatcaaacaaaactttttattgcttcatagaaagcagacttcaaaacaaagaaaattgtcagtggtaaatatgagagttacataatgatatcagggtcmattctccaagaagacatgatgatctttaatgtgtatatgcctaagaacacaccatcaaaatacatgaggcaaaatcagatagaactggaaggaaaaagagatcagtctgtcattataattcagacttcaacacatctcaatcagtaattgacaaaaccaccag

SEQ ID NO: 299471 - DNA, 476 bp, Homo sapiens
aatagaaaagttacaaatatggtagctaataatccaactatatcaataattacttcagatgtgagtgatctaaatacaaaaattaaaagacagagactgacagaatagattcttttaaagaaacaattttatattgtttccaaggaagacttcaaatataaagacatatagattaaaaataaagagataaaggaaaataaaccttagtaacactgatcaaacaaaactttttattgcttcatagaaagcagacttcaaaacaaagaaaattgtcagtggtaaatatgagagttacataatgatatcagggtcaattctccaagaagrcatgatgatctttaatgtgtatatgcctaagaacacaccatcaaaatacatgaggcaaaatcagatagaactggaaggaaaaagagatcagtctgtcattataattcagacttcaacacatctcaatcagtaattgacaaaaccaccag

SEQ ID NO: 299472 - DNA, 575 bp, Homo sapiens
attatcctaatagaactaactcagaagcaggaaaccaaatactgcatgttctcatttatcagtgggagctaaacaatgggtactgatggacataatgatgggaacagaacyggagactccaaaagcagggaggcttagaggacaataagagtttaaaaattacctattaggtacagtgttcactacttgagtactgggtacactaaaagcccaatgcccaccaatatgcaatataaccctgtagcaaacatgcaaatgtactgtctgattcttaaataaatttatttaaatatataataatacactgagaaaacatggcattttagtatgcataatctgaatttaatgatgaggaaacatcagacaatcccaaaataaagagcattttacaaataactgtcctgtactcttcaaaaatgtaaagccatgaaagataaggaaagacagaagcactttcagatcaaaggaaacaaaaaaaaagaaagaaaaacaaaacataagaaccaatgcaacatatgctcctgggttgacccctttccccataaaagacaatattggaataattggcaaaacaa

SEQ ID NO: 299473 - DNA, 575 bp, Homo sapiens
attatcctaatagaactaactcagaagcaggaaaccaaatactgcatgttctcatttatcagtgggagctaaacaatgggtactgatggacataatgatgggaacagaaccggagactccaaaagcagggaggcttagaggacaataagagtttaaaaattacctattaggtacagtgttcactacttgagtactgggtacactaaaagcccaatgcccaccaatatgcaatataaccctgtagcaaacatgcaaatgtactgtctgattcttaaataaatttatttaaatatataataatacactgagaaaacatggcattttagtatgcataatctgaatttaatgatgaggaaacatcagacaatcycaaaataaagagcattttacaaataactgtcctgtactcttcaaaaatgtaaagccatgaaagataaggaaagacagaagcactttcagatcaaaggaaacaaaaaaaaagaaagaaaaacaaaacataagaaccaatgcaacatatgctcctgggttgacccctttccccataaaagacaatattggaataattggcaaaacaa

SEQ ID NO: 299474 - DNA, 550 bp, Homo sapiens
tggttaatgggtacaaaaatgcagwtagtaggaataagatctactggtcagtagcaaaatagggcaattatcattaacaatagtttatggtataattcaaaatagctagaggagtggatttacagtgttcccaacacaaagaaatgatccgcatttgaggtgatggacatcccaattatcctgatgtgatcattacacattatatgcttatgtcaaaatatcacatgtatcctataaatatgtacaactattgtacactcataaaaattaaaaataagaaaaaatttaaaacaataagttaaacctaaatgtactgtattattcaaaattctgccaaagtatcaacccatgaaaaatggaaatacatgtctacgtaaaggtttgtattgaaatgtttatagagatattatttggaacagcctaaaattggaaatgttcttaatatcccaagaacaggaaatgtctacctacaatgtgatacatccatacaatggcgtactactcagcaataaaactgaacaaagtactcctacgtgctataacacaaata

SEQ ID NO: 299475 - DNA, 550 bp, Homo sapiens
tggttaatgggtacaaaaatgcagatagtaggaataagatctactggtcagtagcaaaatagggcaattatcattaacaatagtttatggtataattcaaaatagctagaggagtggatttacagtgttcccaacacaaagaaatgatcygcatttgaggtgatggacatcccaattatcctgatgtgatcattacacattatatgcttatgtcaaaatatcacatgtatcctataaatatgtacaactattgtacactcataaaaattaaaaataagaaaaaatttaaaacaataagttaaacctaaatgtactgtattattcaaaattctgccaaagtatcaacccatgaaaaatggaaatacatgtctacgtaaaggtttgtattgaaatgtttatagagatattatttggaacagcctaaaattggaaatgttcttaatatcccaagaacaggaaatgtctacctacaatgtgatacatccatacaatggcgtactactcagcaataaaactgaacaaagtactcctacgtgctataacacaaata

SEQ ID NO: 299476 - DNA, 558 bp, Homo sapiens
aataaaactgaacaaagtactcctacgtgctataacacaaataacttcaaaaatattatgcatagtraaagaatctggtcacaaaagactacatgtgttacatccagagaaagctaaatctaaagcaaattagtggtcacttggggcccaggggtaggaatacgaattgactgtagatggacataagagacagtgttggggtgatgaaaatattttaaagctgtattctggtaatgtttgtacaactctatgaacttattaaaagttatttacttgtagtgtgtaaattatatttcaataaaacccttcaagaataaaatgcaaataataactggctgaacactgaactgaactgtaaccctcaaaaatttataatgggaataaaaaattgttccatattttttccacacacaaattgtatccatattttttcaattcttgctttctttcctccagaaggcatgttctgcctcatttattattatctccccgcctgtacccacgacatatctccttcaagcccgttcaatatttcccactaacaattcatttcctact

SEQ ID NO: 299477 - DNA, 547 bp, Homo sapiens
ttggggtgatgaaaatattttaaagctgtattctggtaatgtttgtacaactctatgaacttattaaaagttatttacttgtagtgtgtaaattatatttcaataaaacccttcaagaataaaatgcaaataakaactggctgaacactgaactgaactgtaaccctcaaaaatttataatgggaataaaaaattgttccatattttttccacacacaaattgtatccatattttttcaattcttgctttctttcctccagaaggcatgttctgcctcatttattattatctccccgcctgtacccacgacatatctccttcaagcccgttcaatatttcccactaacaattcatttcctacttctcctatattttaatcttctctctattagctccttttccatgaatgtatattaagctcatttctcccataattaaacaaataataaacttccatttttcctgaatgtgtctctagtctgcctcctttccatcttctaaaaatatgtttaaagacaggtagttttcagttgctgcctctatctc

SEQ ID NO: 299478 - DNA, 547 bp, Homo sapiens
ttggggtgatgaaaatattttaaagctgtattctggtaatgtttgtacaactctatgaacttattaaaagttatttacttgtagtgtgtaaattatatttcaataaaacccttcaagaataaaatgcaaataataactggctgaacactgaactgaactgtaaccctcaaaaatttataatgggaataaaaaattgttccatattttttccacacacaaattgtatccatattttttcaattcttgctttctttcctccagaaggcatgttctgcctcatttattattatctccccgcctgtacccacgacatatctccttcaagccygttcaatatttcccactaacaattcatttcctacttctcctatattttaatcttctctctattagctccttttccatgaatgtatattaagctcatttctcccataattaaacaaataataaacttccatttttcctgaatgtgtctctagtctgcctcctttccatcttctaaaaatatgtttaaagacaggtagttttcagttgctgcctctatctc

SEQ ID NO: 299479 - DNA, 570 bp, Homo sapiens
cctctgctaaaaaagaagacataacctcatgtggcctgatgagaagtcatcttatacttcagtaatcaggccacatgagattatgtcttcttttttagacataaggcctagatggtaatataagaaaacattatactggggcagcaggcagaaaaggggcattaagcttcttgtggaaacataaaattctaaaaactacagcacactatactgacccctgcagagaaacttttgaattttggctgtaacataccactgggatgctgaatgtatttctactagctaagagaaaaaagaacagaaagccaataaaaaacgtattgcctatcatctgtgcattctggatagataattctccataactttgatggcatacttatggatgcttaaacagatggtgacatgagtcaatttcctttagactcatcaaaagtaaaggaatataatcattgcttatttattaggacaattctagttgttataatgcaaaaagygtgataaataaaacacaacaattgttaatgttttgcttaaagtaagttccaaaatgggaaagattgtgagagggaa

SEQ ID NO: 299480 - DNA, 584 bp, Homo sapiens
atgataatcacaatatttaaaaattggcccaacatgagctctgagcacaattcagatgtcacacaattaaaaatgaggctaatcrcaatcctgcacccatttatataaactgacagtaaccctgctctcttttcacactgggggatgatgaagaaagcctccaggtacctgggagctcagattacagaagtgtgtctggaatctgaggataggtttctgatgtaaggtagaaaaccagtcatatcaaccagtctcaactgtattcattgttcagttcctttaagccaaaagcctctacccgcccctagttcctgagggaaatttgaataggaacatggctgaatctgggagcttcctgttcagggaatatgtatctgttcctgcaagaacctctgcagagttcagaattttggtagggaaggaatgagagcttattctatgtagcagaagttcataaatactgttggggtcagaattgatgtacctcgcacctggcatcaaggaaaatagactcctacacaggcccaccttgtttagcagatggaaatcaggaccacggagagccatgcccaagaaaataatat

SEQ ID NO: 299481 - DNA, 584 bp, Homo sapiens
atgataatcacaatatttaaaaattggcccaacatgagctctgagcacaattcagatgtcacacaattaaaaatgaggctaatcacaatcctgcacccatttatataaactgacagtaaccctgctctcttttcacactgggggatgatgaagaaagcctccaggtacctgggagctcagattacagaagtgtgtctggaatctgaggataggtttctgatgtaaggtagaaaaccagtcatatcaaccagtctcaactgtattcattgttcagttcctttaagccaaaagcctctacccgcccctagttcytgagggaaatttgaataggaacatggctgaatctgggagcttcctgttcagggaatatgtatctgttcctgcaagaacctctgcagagttcagaattttggtagggaaggaatgagagcttattctatgtagcagaagttcataaatactgttggggtcagaattgatgtacctcgcacctggcatcaaggaaaatagactcctacacaggcccaccttgtttagcagatggaaatcaggaccacggagagccatgcccaagaaaataatat

SEQ ID NO: 299482 - DNA, 584 bp, Homo sapiens
atgataatcacaatatttaaaaattggcccaacatgagctctgagcacaattcagatgtcacacaattaaaaatgaggctaatcacaatcctgcacccatttatataaactgacagtaaccctgctctcttttcacactgggggatgatgaagaaagcctccaggtacctgggagctcagattacagaagtgtgtctggaatctgaggataggtttctgatgtaaggtagaaaaccagtcatatcaaccagtctcaactgtattcattgttcagttcctttaagccaaaagcctctacccgcccctagttcctgagggaaatttgaataggaacatggctgaatctgggagcttcctgttcagggaatatgtatctgttcctgcaagaacctctgcagagttcagaattttgrtagggaaggaatgagagcttattctatgtagcagaagttcataaatactgttggggtcagaattgatgtacctcgcacctggcatcaaggaaaatagactcctacacaggcccaccttgtttagcagatggaaatcaggaccacggagagccatgcccaagaaaataatat

SEQ ID NO: 299483 - DNA, 471 bp, Homo sapiens
gctgtgttcccacacaactctcatcttgaattgtaataatccccacgtgtcaagggcaggaccagggggagataattgaattatggaggcagtttcccccatgctgttctcctgatagtgagtgagttgtcacaaggtctgatggttttataagggacttcctccttcactgggctctcattctttcacctgcctccatgtgaaaaggtgccttctgccatgattgtgtaagtttcctgaggcctcccyggccatgcatagctgtgagtcaattaaatctcttttctttataaattacccagtcttgggtacttcataacagtgtgagaatgaactaatacacctggtctgactagataaacttaatttcatatttatttagctaagtatatttttgtctttattctccaaaactgtttatttaaaagaaaattgacatgcaatatttgattttgtttagcgagaataatt

SEQ ID NO: 299484 - DNA, 521 bp, Homo sapiens
tttttaaaatctctatattaaacaaaatgtttcaactcttgaagtagctcttgtgtatggtggagcttatataacattctatatatcaacagagctttgcttcartcccaggcctgaagctgatctgaatgctgatcaacacaccacctatgagcatttcatacagaaaaaagagcagctaatgtacctattgatttgcaaccacttattttatatatgcatgtgcaggtcaattcttcattgaaaagtacacactgccttaatttgacagtttttctcttgcttttaaattacttcaaaagaaagagaaaagaaatctttaacaagctcttaagcatctgtgctgtatgtacaacaggcagattttttatggatttagctaattattggctcctagaatatacaaaaaacaacaaataaattgttggaacaaaggagcaaagatgctttgtcacataacaataagcatccaataaatatttaaataaataaaaaatgtaaagctgacttttgccataaca

SEQ ID NO: 299485 - DNA, 521 bp, Homo sapiens
tttttaaaatctctatattaaacaaaatgtttcaactcttgaagtagctcttgtgtatggtggagcttatataacattctatatatcaacagagctttgcttcaatcccaggcctgaagctgatctgaatgctgatcaacacaccacctatgagcatttcatacagaaaaaagagcagctaatgtacctattgatttgcaaccacttattttatatatgcatgtgcaggtcaattcttcattgaaaagtacacactgccttaatttgacagtttttctcttgcttttaaattacttcaaaagaaagagaaaagaaatctttaacaagctcttaagcatctgtgctgtatgtacaacaggcagattttttatggatttagctaattattggctcctagaatatacaaaaaacaacaaataaattgttggaacaaaggagcaaagatrctttgtcacataacaataagcatccaataaatatttaaataaataaaaaatgtaaagctgacttttgccataaca

SEQ ID NO: 299486 - DNA, 556 bp, Homo sapiens
gtgaatgtgctatggcagggggccatcaataaaagtgctctggcagggccactgaggctgcactgcaagccattgtacccaggcaggagctctgggaggggtccgcagacaggaagccctcttcctgcactactctctccagttctgtcagataaagatgattaaagctacctacaaaagtatggagaacatttaggaatgggcatctatggctgtgttccactgcagctgtttccatgctaaactgcttgggctccacagattcaagctctgccactgcctacttcttgggcagttccccctgtgaactcaaatctcaatgggggttgtgtgcattcctgcagttagaaccctggtgacccatgttgagagtgggctgctgtgcatttatttcacacaccccttccttaggagtcattcaggaacgggaacaagtcctggtactcagcaaacccatgtggggtttccggcttccttccccttcggcctcaatgccygtgttgtctgtctatctgctcagtaaattctctctgaagatctatccagagtatgccag

SEQ ID NO: 299487 - DNA, 621 bp, Homo sapiens
taaaccccaatgtgatagcattaaaagataggacctttaggagataattgagtcatgaggtcagagcactcatgaatggaattagccaccttatgaaagggctgaaagraactatctaggccctttataccctttcattccttttttctcttccattccttcaccccataaagacatagtgttcatatcctcccctcgatgaggcaacaaggtaccatcttggaagcagagactaggtcctcaccagacactgaacctactggctccttgatcatggaagttccagccttcagaactgtgagaaaacaaaattctattatttataaattacctagtctgggacattttgttatagcagcaacgatggactaagacaccaactgaaagtgtaagcaggaatacagtcccttttctagtaagtggaaatctctatggaactttgtttctctctgcttatcttgattatatggtgtaaatttcacagagggacaaatttgaattaaagtacttggaggtgtgtcagtgttttcagctgagttcttattgaatattaaggtccactataatgagaatgatcaagtaatccattgtccataatacacgtttgagagtgaaaagggg

SEQ ID NO: 299488 - DNA, 655 bp, Homo sapiens
aatgctgcaccggtttttcctgtctgaagctcatttctcatattttgcatggctgactaaagcactctaatcaattatgttttcttagcatattgtctcatcctaaacaaacttccttaagaaatcatttataggagccaaaattgactaatattttcccatgtttacattctgcatagaatgcattagagttagatatttttgttatttatttaatcactgctagtcactcccctgctcaaatgtaagcycctgagagcagtattttctgccttcctaactgttgttccccaattttttgaccagtgtttcaaaaagaggatgtacacaataaatatgtcttgaatgaatagatgcctgaatcaacagtgataagctcattaaaaaatagaataaaattggtcagactctaatgaagagacacaatataacataaatatttaaagaaaagctgcataatgaaaaaaatttttaatgtgtgtgtaagagaatacggactacaaccacatgaacagaaaaaaattaagaatttaaagaaatataaatgtgctaactccttcaccttccatagcaggagattaaaagttgacaatctacaaaatataaatttcagcctattattacaaaatagaaaggcaaccattcataaactaaa

SEQ ID NO: 299489 - DNA, 655 bp, Homo sapiens
aatgctgcaccggtttttcctgtctgaagctcatttctcatattttgcatggctgactaaagcactctaatcaattatgttttcttagcatattgtctcatcctaaacaaacttccttaagaaatcatttataggagccaaaattgactaatattttcccatgtttacattctgcatagaatgcattagagttagatatttttgttatttatttaatcactgctagtcactcccctgctcaaatgtaagcccctgagagcagtattttctgccttcctaactgttgttccccaatttttygaccagtgtttcaaaaagaggatgtacacaataaatatgtcttgaatgaatagatgcctgaatcaacagtgataagctcattaaaaaatagaataaaattggtcagactctaatgaagagacacaatataacataaatatttaaagaaaagctgcataatgaaaaaaatttttaatgtgtgtgtaagagaatacggactacaaccacatgaacagaaaaaaattaagaatttaaagaaatataaatgtgctaactccttcaccttccatagcaggagattaaaagttgacaatctacaaaatataaatttcagcctattattacaaaatagaaaggcaaccattcataaactaaa

SEQ ID NO: 299490 - DNA, 655 bp, Homo sapiens
aatgctgcaccggtttttcctgtctgaagctcatttctcatattttgcatggctgactaaagcactctaatcaattatgttttcttagcatattgtctcatcctaaacaaacttccttaagaaatcatttataggagccaaaattgactaatattttcccatgtttacattctgcatagaatgcattagagttagatatttttgttatttatttaatcactgctagtcactcccctgctcaaatgtaagcccctgagagcagtattttctgccttcctaactgttgttccccaattttttgaccagtgtttcaaaaagaggatgtacacaataaatatgtcttgaatgaatagatgcctgaatcaacagtgataagctcattaaaaaatagaataaaattggtcagactctaatgaagagacacaatataacataaatatttaaagaaaagctgcataatgaaaaaaatttttaatgtgtgtgtaagagaatacrgactacaaccacatgaacagaaaaaaattaagaatttaaagaaatataaatgtgctaactccttcaccttccatagcaggagattaaaagttgacaatctacaaaatataaatttcagcctattattacaaaatagaaaggcaaccattcataaactaaa

SEQ ID NO: 299491 - DNA, 655 bp, Homo sapiens
aatgctgcaccggtttttcctgtctgaagctcatttctcatattttgcatggctgactaaagcactctaatcaattatgttttcttagcatattgtctcatcctaaacaaacttccttaagaaatcatttataggagccaaaattgactaatattttcccatgtttacattctgcatagaatgcattagagttagatatttttgttatttatttaatcactgctagtcactcccctgctcaaatgtaagcccctgagagcagtattttctgccttcctaactgttgttccccaattttttgaccagtgtttcaaaaagaggatgtacacaataaatatgtcttgaatgaatagatgcctgaatcaacagtgataagctcattaaaaaatagaataaaattggtcagactctaatgaagagacacaatataacataaatatttaaagaaaagctgcataatgaaaaaaatttttaatgtgtgtgtaagagaatacggactacaaccacatgaacagaaaaaaattaagaatttaaagaaatataaatgtgctaactccttcaccttccatagcaggagattaaaagttgayaatctacaaaatataaatttcagcctattattacaaaatagaaaggcaaccattcataaactaaa

SEQ ID NO: 299492 - DNA, 644 bp, Homo sapiens
atatatatatacatacatacatatatatatatatatatatgaaaagctcagcaatacaaataagatatccaaacggtcagtaaatatatgaaaatgtgcttcaatattcttagtcttaagaggctcacaagaattctgggttggattcagaagctcatggcagaacaacacgtttacaactaggaagttgaattataaatttaattatttaaagscatcatagaactatgtaagcaatcagaattagaaattaaaatttcagaaaagagagaatttttctgaggcaaaatgaacatctccaacttaaaaatgtcctggggtaatctcctgtttttagattcgaattatggatcctccttattcaggcagaaaacctctgctaggggtaaaagaaacaagcaaatgattgaacagttattagtgttagcatgacgaattagaaatttgaggcaacagaaatcatggtcagtttttcccatggcatattggctggggtttgctgctgcttgtgaagctagggatttaaggtgaaagtttctaaaagtcagaataatctcgtctggtctgtgaggtttgggaagcaaagacctgtgagtcttacaaggcagaagtcatcaaacacaattcttgttttaacccaagac

SEQ ID NO: 299493 - DNA, 654 bp, Homo sapiens
tgggttacaacatggtcctttagctcagcaaaattcgctattacccaccttctgaagcgtactctgtcaattcaactttctcactttcagctcagttttgtgcccttgccagagaggtttcgtggtcatttcaagaagaagagccactctggctttctgagttttcagcatttttgtattgattatttctcatctttatgggcctatctatcttcaatctttgaggttgctgacttttgaatgggattttgtggggttgttttgttgttgttgttttctgtttgtttgtttttcttttaacagtcaggccactcttacatagggctgctgcagtttgcctagagccccctccagaccctagttgccccggtttttttccatacctggaggtatcactartgaagcctgtgaaacagcaaagatggcagcctgctctttcctctggaagctctgttccagggcgggcactgacctgttgctggcctaaatgcatttataggatgtggctggagacccctgctgggaggtctaacttaggagaaatgggatcagggacccgcccaaagaagcagtctggcttccctttggtagagcaggtgcactccactgaggtgaaactcttaatcgtctgtaccatttgtattctccaaagcc

SEQ ID NO: 299494 - DNA, 654 bp, Homo sapiens
tgggttacaacatggtcctttagctcagcaaaattcgctattacccaccttctgaagcgtactctgtcaattcaactttctcactttcagctcagttttgtgcccttgccagagaggtttcgtggtcatttcaagaagaagagccactctggctttctgagttttcagcatttttgtattgattatttctcatctttatgggcctatctatcttcaatctttgaggttgctgacttttgaatgggattttgtggggttgttttgttgttgttgttttctgtttgtttgtttttcttttaacagtcaggccactcttacatagggctgctgcagtttgcctagagccccctccagaccctagttgccccggtttttttccatacctggaggtatcactaatgaagcctgtgaaacagcaaagatggcagcctgctctttcctctggaagctctgttccagggcgggcactgacctgttgctggyctaaatgcatttataggatgtggctggagacccctgctgggaggtctaacttaggagaaatgggatcagggacccgcccaaagaagcagtctggcttccctttggtagagcaggtgcactccactgaggtgaaactcttaatcgtctgtaccatttgtattctccaaagcc

SEQ ID NO: 299495 - DNA, 617 bp, Homo sapiens
gggcttcttttatgaaaatattttgaatttttctctgggattttgtaaatgtctttttgattgaaatcagtcgctggagaattattttgtttttttggacgtgtcatatttccttactttttcatgtttcttgtgtccttactttgatatctgcacaccgagtgtaacagctgtttcttccaattttttgaatttgcttttataggggatsaattctcctgaagatatatttatggtattggttgaatagagcactgcactttagctttgattctgggtttgctgtagtgtagtctcaatatgatttctttggctataaacagagtcagtggtgtctctgactttcttagtggcttagagtgcatatttactgttagtggctgtgatgatgttttactggagactaggataccaggttggtgggccatttggcctcagtgatgcaacactgcaccaagcatccctgttgctatttttcaggatggcatgtgctgacaccaatattagtaggcccaggtaggccgattttgggcctctggataccttgctcaggtgccaagaatgacagcagtggactgggcagatgggtggattctcaagtccttaggcagtaggta

SEQ ID NO: 299496 - DNA, 583 bp, Homo sapiens
tttagtacaataatattgaaacactaggtcttgttccttaaccaaaccaaggctcctatacaaaggacatattcctaggagagtgctgagcttagtcgggtagaggagtgaagttaatttggcattttctcacctccaaagactttagcaaactcacttatagtggtaaaagccattctctactaaatagctagaaggcagaaattgtcctagacattacatacacatcccttctaatctttccatcactcatcagggtaaataatcttatctgcatatttaaaacaagggaattatcttttcatgagtggaagataaattttagaccccacaggagaagagagatgataacatagtaacccattttgtgtatgaagggagtgaagggtattagcattccagcaatagctgatctctccttctgagcctggagacaactcagtatcmccttatgttaatctctaggtcaatgcaattagtttcaccctgagaaaaactgctttctttaaatttatataacttaacaccacaagctagaagtcagcagaagttaaatttcgatttataaaagtatacttttaat

SEQ ID NO: 299497 - DNA, 587 bp, Homo sapiens
ttgtttgtatatgtcaggtgttcagctcaatatttctactggtaattttgagtttctgctaatatatcctaaattaaaggtttttaatattccacatcgtctaacttgaggggtcactagtggatgcctacatgtggattatctttagtatgttttattttwaaaaaatcattttcctttcattttcttcccttcatgttgaaattagttgtttctatgctaatacgagaataataaaatgaaaaagaaagggaactgaaattagccagacctgggtttgtgtccaattgccccatttctgtgtgtaagatattgaacagtttacataggctttttgtgattgaggttaacctgtaatatgggaattattagcatccagccaaaatgaaggatgtgtggtaaagcttaactgatataataatgtgttgtatttagaagaatgtgttgtacctagcaggtattcaataaatattactgtttcttctcttgttatggttgctatttcattttgcttggcctgtctcctttaacttacagtgtttttttaggtagttgaacactgaaataataattaaaagacaaagtat

SEQ ID NO: 299498 - DNA, 558 bp, Homo sapiens
tttcagtgagactttaataattttatggataatcgtatgagccagtcacacatattctataaccataatctaaaacatcttttccaatagtttgttttaggaaacaatatttctacaagaagttacacatagagagatygccataactaaaaaactttgaaaatattaaactgaactaagttgaacaagtttgtccatagatgacatatggaaagtcatgaacatcttcaaagaactgtgcctgccggtgggtgtacaagtgtgtgtgctggaggtattatactattgtgtagttcacaaagctaaccataaagtggggtaaaacaaaaattgtctttttgtctgcttaactctaaacagttagcttatcctgtcagtggattattttaatttttaaaaaagaaagtcagtgaaacagtattcaacatatattataaaaactatttaattatatttataaaaactattcattgattatagaaactattgtttaggaaacaacacatataacagaggagtaagaaatggtgttatggcatttattgaattctgaagaaa

SEQ ID NO: 299499 - DNA, 558 bp, Homo sapiens
tttcagtgagactttaataattttatggataatcgtatgagccagtcacacatattctataaccataatctaaaacatcttttccaatagtttgttttaggaaacaatatttctacaagaagttacacatagagagatcgccataactaaaaaactttgaaaatattaaactgaactaagttgaacaagtttgtccatagatgacatatggaaagtcatgaacatcttcaaagaactgtgcctgccggtgggtrtacaagtgtgtgtgctggaggtattatactattgtgtagttcacaaagctaaccataaagtggggtaaaacaaaaattgtctttttgtctgcttaactctaaacagttagcttatcctgtcagtggattattttaatttttaaaaaagaaagtcagtgaaacagtattcaacatatattataaaaactatttaattatatttataaaaactattcattgattatagaaactattgtttaggaaacaacacatataacagaggagtaagaaatggtgttatggcatttattgaattctgaagaaa

SEQ ID NO: 299500 - DNA, 558 bp, Homo sapiens
tttcagtgagactttaataattttatggataatcgtatgagccagtcacacatattctataaccataatctaaaacatcttttccaatagtttgttttaggaaacaatatttctacaagaagttacacatagagagatcgccataactaaaaaactttgaaaatattaaactgaactaagttgaacaagtttgtccatagatgacatatggaaagtcatgaacatcttcaaagaactgtgcctgccggtgggtgtacaagtgtgtgtgctggaggtattatactattgtgtagttcacaaagctaaccataaagtggggtaaaacaaaaattgtctttttgtctgcttaactctaaacagttagcttatcctgtcagtggattattttaatttttaaaaaagaaagtcagtgaaacagtattcracatatattataaaaactatttaattatatttataaaaactattcattgattatagaaactattgtttaggaaacaacacatataacagaggagtaagaaatggtgttatggcatttattgaattctgaagaaa

SEQ ID NO: 299501 - DNA, 569 bp, Homo sapiens
tagtgaagccctggaagggatactggaagtgctttgcctaaatatcactggttgctataaatctcagtctcaggaaccaagatcagctttcttttctaggctaatattaaaaacttgtttataaaaaatacatacatacatatatgtcaaaagattgtaatattcacatttctgacaatatacacagcaaacatgttatgattatatctttctgtggtttctgtttttatctttggcaaaagatatacacttctgaaattaaatatttcagatgtaaagctgttgaaactttaaattattcgaagccttgtgagaaatgtggctatgtggcctgagtcaggtggcatgcagctgcaacttctgccttttgttgctgcaaataattaggaagaccaaatggtaccagagatgataccccttctgatcactactgtcctcacagagtaatacagttatctttcttggaatgtagcaacgtgtaaccaatagaattsctgtaacatgcactggtcttgtgtgggaaatgttgtaatcctgctaaaatttatctgtctctgcctatataagtg

SEQ ID NO: 299502 - DNA, 520 bp, Homo sapiens
gagagagtgtaagaccatcaattttattgatgccaaggaatggtggtatgatacatggtactatctgaaaaggcacaggatggggcrgacatagactctgttattcaaaaattgtttggaaaagaaacagccatacataggttctgaaagagcaaagagatgttaagatcttttctagatatcatttatgaataattccagtccccaaggcagatgaaataactttcctggggtagtccttctgaaagtcaacttgacacactgaatacagagcattaatttcatgtgagcaacttactagctgtgtgcctctgggcaatttttctttaaacacttttttgtttcagttttcccatttccaaatggaaattgtaatagtacattacccacagtgttggaaataataaataagttaatatatgtaagtacttaaaacactgtcattatggattatatttcccagggcttggctaaggtaatgagaaagtgttaagagttgtaatggtttttttttttagat

SEQ ID NO: 299503 - DNA, 520 bp, Homo sapiens
gagagagtgtaagaccatcaattttattgatgccaaggaatggtggtatgatacatggtactatctgaaaaggcacaggatggggcggacatagactctgttattcaaaaattgtttggaaaagaaacagccatacataggttctgaaagagcaaagagatgttaagatcttttctagatatcatttatgaataattccagtccccaaggcagatgaaataactttcctggggtagtccttctgaaagtcaacttgacacactgaatacagagcattaatttcatgtgagcaacttactagctgtgtgcctytgggcaatttttctttaaacacttttttgtttcagttttcccatttccaaatggaaattgtaatagtacattacccacagtgttggaaataataaataagttaatatatgtaagtacttaaaacactgtcattatggattatatttcccagggcttggctaaggtaatgagaaagtgttaagagttgtaatggtttttttttttagat

SEQ ID NO: 299504 - DNA, 594 bp, Homo sapiens
tgggctcagtgtgcagcagcaataatgtattgaaataactgaaccaattggaccggatagaaacattccatggagttattctggtctggcagagagacagatcatggtctataaataatrtgcctccctcaaccactaactgatggagtggcctagatcaaatgtttcagtgtttgggtcttaacaagactgtaggacaagatgatctttcagaatctttctagggttaattttctggagcccctaaaaatccacagggcagaactgatttcattaggcctccctagtctccagaataaataagacataaaaaataagactgacaaagtagaaagtgagtaagtggttctctgataaatataagtggtataaaaaaggctctctagacatcctggcaaaaatgggtctttttttctaaatagcaattttctatttctaaaatagatatctgtatgatttagttcacctccctacctcaatctgcctgtgcagactttacctaaattaacttaagtgggtatgttggggacagaatagggagaaaaggattttaatgaaagccatagaggacacatgtttcacaattattagaca

SEQ ID NO: 299505 - DNA, 603 bp, Homo sapiens
atatactcactgtctgcacagatgtacagtctcttctatttttaacattccccacaacagctattcatttatttcaactgatgaacttacactgatacatcataattacccagagtctacagttgacattaggattcattcttggtgtcgtacattctataggtttggacaaatttataatgacatgtagccaccattatagtatcagacagagcagttttattgcactaaaaatcttctgtgttcagccaatgcatcctcctttctgctaatccctgacaaccactgatctttttactgtcttcacagttttgccttttccrtaacgtcaagtaattggaataatacagtgtgtagcctttttgaattgacttctttcacttagtaatatacatttatgtcttccccatatcttttcatggcttgatagcgcatgtcttttgaataatatttcattgtctggatgaaccacatttttatctatccactcacctgcaacctacatcttgattgctttatgaataaagctactataaacattcttttgcaagtttccatgtgaaataagttttcaacttctttgggtaaataataaggagccac

SEQ ID NO: 299506 - DNA, 614 bp, Homo sapiens
cgggggcatgtctttcctgtgctgttctcatgatagtgaatatatctcatgagatctgatggctttatgaggcagtttccctgcacaagctctctctttgcctgctgtcatccacgtaagatgtgacttgctcctccttgccttctgtcatgattgtcaggcttccccagccacgtggaactgtaagttcaataaacccttctttctgtataaattacccmatctcgggtatgtctttatcagcagcatgaaaacagactaatacaatgactgacctgttagagttcacacttgcatggagactgtaggccctttattttggccaatttctcccatttggaatgagtgtatttacccaatgcctgtaccaccattgtatctaggatgtaactaacttgcttttgctttgatgggctcataggaagaagagatttgctttgactcagatgagactttggatttgggcttttgggttaaagctgaaatgagttaagactttcagagatggttgaaaaggtatgactgtgttttttaatgtaaggacatgagattcgggagtgcagtggcagaatgatatggtttggctgtgtccccacccaaaatttcatcttgaa

SEQ ID NO: 299507 - DNA, 491 bp, Homo sapiens
gaagtggggataagccagaagtgacaggccttatccagagccagcaaggccagtctccagtctcactcccaccatgccccacacatagcaccaagtttatatccagacagctgatgcacagggctgagttcttgctccagccaacaagccttcctgctgagaaagcaagaagggctcttcagaactcacccttccatacctatctgcactatcagctatagcttctgtgctcatatctgtacttcccatttgctccccaatcctggcttcagctcaggaaaatttgtgctcaatcaaaattattacaaagtttaggtagaagcttccttcaacctgtgaccccaccctaattctgctggctgccttcctcaaggaaccccatgagataaggycaggaatggcttccctgggtttgagctggggactgggagtgcccacagggctcttctcactgctttttctacttttatatttcactcagctccctaaac

SEQ ID NO: 299508 - DNA, 622 bp, Homo sapiens
catcactactctgtttaaatttacgattgagtagagtgtatttctttttaacaacatgagcaaagaaattatttccagttgcagttttacaaattgctctcaattgtcacatttatcttctagcccaatcaagtgtaatttaccagaaaaactgcagaatgtttctgtatttaaaatgtgtgaggtttttataacaattcccaccccctcaaatyttccccgtgacatagggagggggccggcatgtttcaaacaaactcatcaaggtataatggctcccctgaaccctatctgtcaccaaaataagatagccaattgctaagaagtcactggtttggttcacagtaaatcaatcaaaatggcttgaaagtttgaggccctgtctgatttcaggtatcttaacgaaaaacgtgtgttgatgtaagataagccaatcattcatttagtgattgagatacaagagggcagcaactattattctgttctgatgggatcttgggctatgaatcattgaaaatccatgatgaagttttcaccatgaggtggcaaaataagaaaaagcaaagttaaatagtgaagttttttttttttctcaaaaactaaatttgttccattaaaaaaa

SEQ ID NO: 299509 - DNA, 506 bp, Homo sapiens
tcaaatatgaggtgcatattctatatcacaaaacatatttctttatttttatgagatctaatagattagatatgcagactttaaaagatacatgaagtcaaaattatttttgctttcacattgtatttgcgatcttattttttgaaaattttgtttactgaacatttagtaagtgctaatccctgtgttactgctgggacacagtagtaatccatacagtctggtgagggttatggcaggaaatagaaacctatgtgtcctgtagcaagtcctaggcttggtgtggcacagagaaggyaccctcaaaccacagtcttcagggatttttctactctgtggcatcattcataaaaatcagaacaggcatggtgcagcttttgaatctaggagacctggacttcatttctcctgtcattcaccactgtgctgccttgaatgagttatttaacatccatcaacctcagctctcacattggttaaatggggaaataaccattgtcctgcag

SEQ ID NO: 299510 - DNA, 480 bp, Homo sapiens
atgtacctgaatctctgggacacagctaaagcagcattaagaggaaaatttatagcattgaatgyccacaacaaaaagctagaaagatctcaagttaacaacctaacatcacagctaaaagaactagaaaagcaaacaaaccccaaagctagcagaatacaagaaataaccaacaaaagagctgaactgaagcagacaaagatatgaaaaatccttcaagaaaatcagtgaatccagctttaacccaaaagtccaagcccaaagtctcatctgagtcaaagaaagtcccttctgcctatgagcccataaaaagcaaaagcaagttagttacatcctagataaaactagttttcaaaaaattagttttttgaaaaaattaataaaacagactgcaagctagacacataaagaagaagagaagagataaatagagacaatcagaaatgataagggagatatcaccactgaccccacagaaat

SEQ ID NO: 299511 - DNA, 480 bp, Homo sapiens
atgtacctgaatctctgggacacagctaaagcagcattaagaggaaaatttatagcattgaatgcccacaacaaaaagctagaaagatctcaagttaacaacctaacatcacagctaaaagaactagaaaagcaaacaaaccccaaagctagcagaatacaagaaataaccaacaaaagagctgaactgaagcagacaaagatatgaaaaatccttcaagaaaatcagtgaatccagctttaacccaaaagtccaagcccaaagtctyatctgagtcaaagaaagtcccttctgcctatgagcccataaaaagcaaaagcaagttagttacatcctagataaaactagttttcaaaaaattagttttttgaaaaaattaataaaacagactgcaagctagacacataaagaagaagagaagagataaatagagacaatcagaaatgataagggagatatcaccactgaccccacagaaat

SEQ ID NO: 299512 - DNA, 559 bp, Homo sapiens
tgtatcagtgaacctaatactcccataggtttttacactaataattagcatcttttattataccttgaagaacttccttcagcactttttgtaaggaaggtctagtgatgtcaaacttcctcagcatttcttttagagacaatctttatctttcctccatttctgaagaacagctttgccaagcatagtattcttgtttgtcagttttttttttttttttcaccacattggatatagcagctcactctttcttggagtgcagtttctactgagaaatattctgatagtcttataaaaatgtccttgtgtgtcaagttgctttactcttcctgctttcaaaattctctctttktcttttgaaaacttggttataatatatcttggtgttacgttcttgggttggggacctttgaggtatataaacctggacatcctacccttcccaatatttgtgaagattttgtctattattttttaagtaagcttttatctcctttatctttctttcttataccatgagtttcataatttgtgtatcagtccacttgatggtgtccta

SEQ ID NO: 299513 - DNA, 488 bp, Homo sapiens
aaaatgaagaacatgttgcagtcactctgttttactcactgttgatgctgcttcactctttcatattagcttaccccattagacaccactgttgtggatgaccttagtatccttgtttcaggcacagatacactcttatttgcttgctggatgtgatgtttgtatctctgccttgcagtgtgtgcacttggactaccttgcaacatacttccttgtagttaattgtagagccattatatttttagtgaccttgtgaaatgaaacattaaaaaaaatcacacttctgcatgcacacacaatcacaygcacatagatgcatgcaagttcatcagatatataacctattggtttttatactcctgtgactcatttctgacaaattgctgttttacctgttaggaagttaataacatttgacataaacttgaagtaaatttgcataagaaactttgatatttaatatggcatcacctgtcataggtagatat

SEQ ID NO: 299514 - DNA, 488 bp, Homo sapiens
aaaatgaagaacatgttgcagtcactctgttttactcactgttgatgctgcttcactctttcatattagcttaccccattagacaccactgttgtggatgaccttagtatccttgtttcaggcacagatacactcttatttgcttgctggatgtgatgtttgtatctctgccttgcagtgtgtgcacttggactaccttgcaacatacttccttgtagttaattgtagagccattatatttttagtgaccttgtgaaatgaaacattaaaaaaaatcacacttctgcatgcacacacaatcacatgcacatagatgcatgcaagttcatcagatatataacctattggtttttatactcctgtgacycatttctgacaaattgctgttttacctgttaggaagttaataacatttgacataaacttgaagtaaatttgcataagaaactttgatatttaatatggcatcacctgtcataggtagatat

SEQ ID NO: 299515 - DNA, 619 bp, Homo sapiens
gtatcttattgtgcttttaatttgcattttaataatctcaagcatatatttatgtgctcataagccatttatgtcttcttttagtatctgttcaagtgttgtatatacttaattatagtatatatatgtatgtatgtatgtgtgtgtatacatatatatatacatatatatgtatatatataaaattgaatttctcagtctataaaagtggcatatctttctatttatttaggctcttaatttctatcaatgctgttttagttcttagcatggaggttttgcccacttttgttarattaattatatatatacaaactatatatatatagtttgtatagtttggctcgtcttctcttcttaatggtgtcttttgtttaccagaagttttaaagtttggtagattctatgaaaaattttttattgtgatcattgatttctgcttcctctttaaaaaattttgcccacctcaagggcacaaaggttaattattctgtattttcttctagaagctttatagttttagcttttgtattttgtctatgatttattttgaattaattgggttatggggtatggtaagggttgtttgtttttcctatatggatagccagttgtccag

SEQ ID NO: 299516 - DNA, 619 bp, Homo sapiens
gtatcttattgtgcttttaatttgcattttaataatctcaagcatatatttatgtgctcataagccatttatgtcttcttttagtatctgttcaagtgttgtatatacttaattatagtatatatatgtatgtatgtatgtgtgtgtatacatatatatatacatatatatgtatatatataaaattgaatttctcagtctataaaagtggcatatctttctatttatttaggctcttaatttctatcaatgctgttttagttcttagcatggaggttttgcccacttttgttaaattaattatatatatacaaactatatatatatagtttgtatagtttggctcgtcttctcttcttaatggtgtcttttgtttaccagaagttttaaagtttggtagattctaygaaaaattttttattgtgatcattgatttctgcttcctctttaaaaaattttgcccacctcaagggcacaaaggttaattattctgtattttcttctagaagctttatagttttagcttttgtattttgtctatgatttattttgaattaattgggttatggggtatggtaagggttgtttgtttttcctatatggatagccagttgtccag

SEQ ID NO: 299517 - DNA, 562 bp, Homo sapiens
gtgaggtactattcttttcattgtgtcatttgttgcctgaatactttgtgtttttttttcattgtgttattctttcatagatcctgtgagatttatcctttaagagattttattttggtgtaatttgggatttgtttcaagatttaagcttcttttagcagttcttgtaatgctggcttggtggtggyaaattccctcagcatatgtctgtctggaaaaggctgtctctttccttcatttataaagctttgtttcagtcaatatataattcttggctgatagttgttttatttaaggaggcaaaagataggaccccaatcccttctagcttgtagggtttctgctaagaaatctgctattaatctgataggttttcttttataggttacctgatgcttttgcttcacagctcttaaatattttttttcttcattttttctttagataacctgatgactatgtgctgaggcaatgatctttttgtgattaatttcccagctgttctttgagcttcttgtatttggatgtctagctctctaggaagttttcctcaattattccc

SEQ ID NO: 299518 - DNA, 551 bp, Homo sapiens
aagaaatacctgagactgggtaatttacaaagaaaagctgtttaattggctcatggttctgcaggctgtacagaaagcatagcagcatctgcttctcaggaggcttcaggaagcttctaattatggaaggcaaagaaagaaaagttgccttacatggcaggagcaggtttaagagaaagagagagtgaagggggatgtgctgcatacttttagacatccagatctcatgagaacttactgtcacgacagcagtaccaagagaatgatgctaaaccatgcatgagaaatcccccaccatggtccaatcacctcccrccaggccccacctccaacactggggattacaatttgacttgagatttgggtgggaacacgtatgaaaaccatattatatgcacttgagattggtttgtattcttgtctaattgacccatttatcgttatgaaatgccctttctttgtctctgataataaacttcatcttgaagtctacttctaatattaacaaaacaatgccagttttcttatgcttaatatttgcatgttatacc

SEQ ID NO: 299519 - DNA, 522 bp, Homo sapiens
ctaagttggttgccaacttgatattttcctttaaatccagaagaaatttagtgcaacacaaagcttcagcaataccaatcatttttctctctttctgttgcwtcctaataatttctatcaatcttaagatgcttccttcaatgattgtccttagagttattcctcaaaaaatgttttttaaaatatagtaaaatttacctaacataaaatgtatcattttaaccattctttttgatgcatgtatttatttatttttactgggtgaaatatacataaaatatatgactttagatgtacagttcagtggcattaagtgtgttcacatggttgtacaaccattatcactatacattttgagaacttttacgtctttctaaactgaagctctgtaccttttaaacaataactcccaattcctctctcctcttgggttatttctttgatctaaggtattgtcatcagaaactgtcaccaaaaatgcacatatgtttcctgggtatggagaaaggctagcacattaac

SEQ ID NO: 299520 - DNA, 462 bp, Homo sapiens
aaatagctttgtccaagattgcacagatggcttcaggcagagctggcatttgagctcaagccctataaatctgatatgggaaggcattacctggaatatttgttatttatgcagattttcgtttaagacagggccagagaatctacatttttagcaagcataatagacgatgttttttggactttaacataagaatcaacaggaaggcttgttaaaacagagattcccatccatcacctctagagaggttgattcaggatgtttagagtggaacctgagagtcagcatatgtaacaagctcccaggtgatgccaatgtttctggccagattttgagtaacaaacctctaggygtttctgattctggtggtgtggatcactctgaaaaacatcactatttcaaattatctgcatagttaattggttagctgagagttatctacagagaaaaggaaggagcttc

SEQ ID NO: 299521 - DNA, 606 bp, Homo sapiens
taccaggtgcattgactgatgtctgtaatctcagcattttgggaggccaaggttgatgggttccttgatcccaggaatttgagaccagcctggacaacatgatgagactctgtctctactaaaaatacaaaaaaaaaaaaattasgtgggcatggtggcatgtgcctgtagttctaactactagagaggctgaggtgggatcacttgagcccaggaggtcgaggctgcagtgagccaagatcatgccactgcacttcagcctaggtgacagagtgaagccctgtctcaaaaaacaaacaaaaaaatttactcttagcaattttcaactatacaatacattagtattaactgtagtcaccatgctgtacagtcaatctccagaacttatttctcctattgaagtgaaactttgatcccttcagccaacgtctccccattctctatctcctttactctcaccctcagcccttggtaaccatcggtctactctctacttctatgagatcaactttttaagattccacatataagtgagatcatacagtatttgtcttcctgtgtctggcttatttcacttaacataatgccctccaggctcatctatgt

SEQ ID NO: 299522 - DNA, 563 bp, Homo sapiens
tgccttcctcctgccactctttgggggatgcccacgtggtggtgccgacctacccttgaatccaaagtacccttgggggtgagtctccccatttggagtcacattgccctctttctttccattctggccaatatttcttgttcttctggcctgcttttggaggaggaggacccacaggagtgtggctggttccctagtgatatagtctcttcagctttgtgatacttatggcacctgcccaagccttgggcttcatatacctcagcaggtctgacatatttctcaaatgtagccattccctcaggaattcttttttctctagtttatgcctcacrgtcaatccaatatgtctgtacaaaattgaacctcactgtgaacatgcttaaaatttattcccatgaggatcttttgaactaatgagaagagtgggtagggcttggtagtagagtgtttataacttaacatgcaagcatacttgggactcagctctgagccagctgggatctcattgcaaaaggatgaagaggtggacttcaaatactatttcatgtaataacctctga

SEQ ID NO: 299523 - DNA, 419 bp, Homo sapiens
ccagtgattgccagactccaaagctcatgctttttttgctctgcctttatgctgaactcatttttctcagtgtcttagcagcaatctccttggtaggatgtttggtaggtcctgtgaacataggtaaacataggtatgggtatatgcatggtttgctgyctttgtcttcacacagtaaactgtaaatttctaagatcctttttatgttccaaactgatattttaaaaacttagttaataagagatatcatcagcagggtcatcttattatgagaggaaataaaatatagctcttttcctcaatctctacacatacatacatgcaaatataaggagagaaaaaattcttaaaaaatacttttgaatacattatttaacctttaatatttacattaactaaattacacatgagcttactgt

SEQ ID NO: 299524 - DNA, 592 bp, Homo sapiens
tgaatcatgagtgaaggctcctcaaaagaataagaaaggagtgaatacactcattttccagtctccgtggatgggcttcataatggcctcaatcaactctcaacctgtcattttggtctcactacaggctagctatcttcctgttcactatcacattgcccctgcctcctggtttcccctaaactttgtgtgattttgaaacttggagccctgtgcctttcttgtctcttacctgcctaatgagttcccactcatcctttaagacccaggccaaataccactctttggtgaaatcttttctcatgtcatctagactgatagtctatgcctcatttatgttttctggcattgaataaataacaaaataaaattaagtgttaaagactattatgattgagaaactactacatgctaaggagtcatcaggctttatcttatttgatgcacatataaacttatgtccattttacagatracaaaattaagattcagaatatttaaataatttgtccagcattacaaatacagtaagcagagttcaatgtacgtctaaagcttgtgctcttacctaccagggcactatttattttat

SEQ ID NO: 299525 - DNA, 571 bp, Homo sapiens
gcagttatactcctaggtgcttaccctagagaaatgagaattcaagttcacacaaacatctgtatccaaatgtttatagcaacattattcataattgccaacaactgaaaactattaagatggccttcaatgggtggatggataarcaaaccatgatccattcatacaatggaatactattcaataaggaaggactcaacagtatgtacaacaatattgattattttcagatgtattatgctaagtgaaagaagccagattcaaaaggttacataatataaaattaaatttatatgacattctggaggagataaaactataggatggagttgccaggggttgggggtgggtgaagaatttgactccaaaggggaagcatcagggacatggggtgagagaattgttctgtgtcttaattgtggtgatggttacatgactatgcatttaagacgttcacaattgtacacccccccccaaaagttaatttaatatatgtaaacaaacaaaaaacttctctaaataatggaagggaaaaaaatttagtcatcagagatctaccataggttagtca

SEQ ID NO: 299526 - DNA, 570 bp, Homo sapiens
gagggcttcctcaagagtttgtaaatcagagccatagttgacctggatctgagtgatacccaggtatatgttctctccattactccattttataatttaggaaccaccagatcagatgttcccaaatttgtgaagaggaactacattctggttttttgttttgttttgaaacctcatattggtggagggaggggccaggagaaagaggttgaacctgatgtggatgaatgtgaggataagggcccctgatagtgaggggctacaggcatgcgccagcagggccggctaattattttttttaaagctcttgtagagatgcagttcctcactttgttgtcccaggttggtctcaaactcctgggttcaagcaatcctcctgccttggcygcccaaaatgctgggattacaggtgtgaggttcttcacaggggaatgaagtgagcagaaagtagctgcttgccaagtgaaagaagcaatggaccaatataggctttgaggtgcacttgtaagctggtgtgttgggaactgccgacgtggttagatgatgctctctgatggtctttctgttata

SEQ ID NO: 299527 - DNA, 529 bp, Homo sapiens
gtgttgagtcctgctaacttgacaagcactgcaccacttgctgagattacaaagataagtaagatatgctctgtggctctggaaaatcaaaagctagtagaagatgcctgtagttcatctggaaaaagagagcttataaagttttttctacaatatgacctcatttgaacatatggggtgcwgttattattttccttattttacacaggaaactgagtctcatggaggttaagttataatgctcaacttgttattacttgcccagtatctgttgtcccttaaacaaggactgggaccatgtctatctttttcattctgtagttccagtacctagcacagtacctggcacataataggtgttccatttgagcacctatttgatggattaataaatccatcaaacatatttgatggataatatctccaacaaatattggatcataggaaagcattactagcattagtcttcttactcttgaagtaagtactctttcactatgccttgctgcctctgtaattataaacctgt

SEQ ID NO: 299528 - DNA, 544 bp, Homo sapiens
aacaaagtatcataaactagatgacttcacagaagtttatctcacagttctggaggctagaaatctgaattaaggtgtaggcagggttggttccttctgggggctgtgaaggaagaatctgttctaggcctttctccttcgcttatagatggcatcttctctcagtgtctcttctggtcatcttccatctacatgtgcctgatctaccctagtgacctcattttaacttgattactcttgtagaagctctatgtccagataggtcatattctgaggtattgaggggttaggactccagcatatctttttgtgtgtkggggggacataattcaatccataatgaccatattatctaatcaggttgctgtgaggattaaataaattaatacaagtaaagcatttaaaagactgtctggcacactgcaagcacacaaaaacattagctggtgttattatgtttctgaaactcttgttacaccaagatgttaagatatcacccttaagaataagccaataaaaattatgctgtttgagtatattcgtg

SEQ ID NO: 299529 - DNA, 581 bp, Homo sapiens
attaaaagtatagtgatttaagcaaagttttaataaattgattaaaagataaaatcaaggaaatctccaagaaagtagaaaatacaagtagtttaaaaatgtgaaaaaaagcctaaattgtaatgtacaaatccaggaggctaatgtccagtgagtagaagctccaaaaaaaacaaacacaatgagagaatacaaacaaatttttaaaakggaatttatcagagctgaaagacctgagtctttagactgaagaaaaaaaggaggaagaaaatactagaatactacacaaaatgaatgaaaaatgacccatattcagtcacagaatggtgaaatttaagaatatcaaagattttttaatccaaaaaacattcaaagcaaaaaaaaaattgcctttttttcccaaaaaatcagattgtcatctaacttttcagcaatactgaattctagaagacaatgaaacattgccttcaaagttctgaggaaaaatgattttaaatgaaaaagtcaacattcaatcaaattatcagtataattggagagtagaataaagttattctaagtcatggaaggacttagtaagt

SEQ ID NO: 299530 - DNA, 581 bp, Homo sapiens
attaaaagtatagtgatttaagcaaagttttaataaattgattaaaagataaaatcaaggaaatctccaagaaagtagaaaatacaagtagtttaaaaatgtgaaaaaaagcctaaattgtaatgtacaaatccaggaggctaatgtccagtgagtagaagctccaaaaaaaacaaacacaatgagagaatacaaacaaatttttaaaagggaatttatcagagctgaaagacmtgagtctttagactgaagaaaaaaaggaggaagaaaatactagaatactacacaaaatgaatgaaaaatgacccatattcagtcacagaatggtgaaatttaagaatatcaaagattttttaatccaaaaaacattcaaagcaaaaaaaaaattgcctttttttcccaaaaaatcagattgtcatctaacttttcagcaatactgaattctagaagacaatgaaacattgccttcaaagttctgaggaaaaatgattttaaatgaaaaagtcaacattcaatcaaattatcagtataattggagagtagaataaagttattctaagtcatggaaggacttagtaagt

SEQ ID NO: 299531 - DNA, 602 bp, Homo sapiens
gtgaaggtaggtcattgggattttaatggaagatgaaagaagccacttaaaactgtttgaaaytcatgcctatggtgttctgtaaagctacttgggaagttcagtaaagtattagatgcctggtcatattataaagtagtctctttaacaatacgtgtttgtccccaattatagttacttgctatttaaggcattttcctgttaccatcttcagtggtcttagatcaccttttccaaccaaaagattctaaagccttaaaaatctcacttttttagagtaactcagaatgaagctgagggaaaataccaggaacgtttgcaattacctgactcagcaaaagtttgttctcctataattaaatactagaagaaacaataagatttagtaactgctttcagtgagcttggtcttaatatggaaaatggtaaatacattatcacatgattgaaagtaataactcatataaaatgtaagcacttcatatctctcaagtacagctggagggattggtcaaagcttcttcaggaggtggcttttgagttggaaactgaaaggtgggtagaatttggtcaagcagaattaaagaactgaggggaaggga

SEQ ID NO: 299532 - DNA, 478 bp, Homo sapiens
gcaggtaactgagttaattttattagtgtttgcctgggacatatacctattattagggtaggcaggacaaataagtaaagtctaaatgttaaattacttaaagcttcttttcccataagcctttcctaaaatttgtctaaagaatattgctttgtagaagatggagtttgtgattaatgtgtcaattattgtaaataatgatggcatagttttaaatgttagttttaggctgttcatcttattacacaagtatataatttaatctgaataaaggattcccaaaggtaagtgtaaagcctctagtttctaaagtagagttagtatttagtttttatcaagtggttttatatgttaaagcaaaacaaatctttgcttggcatacygtctacctagtctttgaagacaaaacaaaggagggaggagctgttttgatcaaataaaaccaatagcgtgtttaattatgtgttaacatatgtga

SEQ ID NO: 299533 - DNA, 478 bp, Homo sapiens
gcaggtaactgagttaattttattagtgtttgcctgggacatatacctattattagggtaggcaggacaaataagtaaagtctaaatgttaaattacttaaagcttcttttcccataagcctttcctaaaatttgtctaaagaatattgctttgtagaagatggagtttgtgattaatgtgtcaattattgtaaataatgatggcatagttttaaatgttagttttaggctgttcatcttattacacaagtatataatttaatctgaataaaggattcccaaaggtaagtgtaaagcctctagtttctaaagtagagttagtatttagtttttatcaagtggttttatatgttaaagcaaaacaaatctttgcttggcataccgtctrcctagtctttgaagacaaaacaaaggagggaggagctgttttgatcaaataaaaccaatagcgtgtttaattatgtgttaacatatgtga

SEQ ID NO: 299534 - DNA, 582 bp, Homo sapiens
cttaaaatcaacatataagccctgagagggcagcatgatcacctgactgatttgccttagggatgatatagagacattaattgctttcacccctacatgcctttaagtaaacaatgatattatttttcttcttgcaaagataatactagtttaattgtagaacacttaaacatawggaaaagtaaaaagaaaaaaataggtcatctaaatcttgtcacccagagataatcagggctaacattaggcatctctctaatgctttttctgtgcttatatatttgtagatattatacaatttatgaaatacatacatacaaatacatactttctgaaaattgatcataatgtacatacttgatttgcaaactgattcttgctcattcaaacagattacatatgaagaaagtttttctaacttaaaattatgagaactgggtattataacaatattttgataaacaatgccatttgcattaatgaaagtgctacaatatttattaagtttattgagagtgccagaggaggaataaaaccagtaagaatgttaaaggctttttacacctactaaaataatattcatta

SEQ ID NO: 299535 - DNA, 591 bp, Homo sapiens
tgaatcaaataaggtatataggctataatgtgcttagacatcttgatttcactgacctgaggatccctgcaagaagcaggtatgtgaaattcactcctacgtttactgtagaaatgctatcgagggtagctctaccacaccacttaatgcccccaatattaaactctttgaatttgttttagatttcagtaccaggaaaacatgtcttgctgagaaacatatatgcttcttccttcatcatcatagcaacaattttaatgattgtgatttctaacctcttcttccccarccaggaagctgagagccaaatttgaagccaaatcaaaaaaattatgttaattcttaatattagcatcttctcatgttactcttccctggtattgttttctgttttccttttattaccctcattgttacatttgtatataaaggacgattcttccttatttcttttctctcaatttagaaagtgaaagcaagcatcttttttgttaaagaaatgtagcattttcgttagaaatttcatttcactagaaatgaaaatactgtttcaccacctgattattttgttcatctcaatttgtgtaatca

SEQ ID NO: 299536 - DNA, 437 bp, Homo sapiens
gtaagagtaaagaagccctacctagttgggttgataagcaaagcttttatagtggagattgcacctaagaaagctattaaggtgccctctcttctgagtactaacaracgtcatgcatcaagggccaaatagatgaaatagcatttgtacatcagtgcagctatttctgatcaacctcttaccctggcattttgcttatgtggccttcacttctctttactgagctgcaggcctacatatcaatctgctcactggatatcctttatgacccaaaagtatctaaaactcaccatgtccaaagcaaaattcattatcttccaccatcccacttgttcttgctcctgtcttcccaaattcctcctacctcatcttgaatctaatcgccaaaaagacctgtcaaatccactccttatatttcttattcccacacccacctc

SEQ ID NO: 299537 - DNA, 606 bp, Homo sapiens
acttgatttaaaattgacttatttcagtttgagtatgtatctatacatacacactaatctgaaatatttatactaccaccattgtagggtaccgggtatatatactttgtgctggaagtaaagacaggaagccttttcttagggagcttaagtttggaaactggttaaaccatcaaaatataatgtgctgaatataataattaaaaagaaaacaaggtatatagtattataacattaggtgaaggaaggaaattattgattctgcttcagttgatctttctcattttaaaagagtcaaatctcactatgataactttgaacataatagaaaacatcttgataccctcattgaaacagtatttttaaaccatattctgggatcttgaaataaaatagtctcttatttgcttaagactaccatattggtatctycatcgtaaatatggctaaagcagtggttctcatactttagtttctatctgaatcgcctagagagtttgttaaaatagattacggggccccgccccaagagtaaatctggggtgggtccaaatatttacatttctaacaaggtcttggtgggtccaaatatttacatttctgaca

SEQ ID NO: 299538 - DNA, 499 bp, Homo sapiens
ttccctgattatcataaatttcttatggtgtatttgtttgaatgtggrtcaaaataaggtccatacactgcaattggttggcattcctctaaagtctcttttaatatgtgggctccccatacctctcttttcatcttgaaattcttcaagaatctcagttatttgccccatagttttttctgaagtctgagttttcctaattgcattcttatagaatcctctgtccctgtatttcctaaattagttctagaagtttaatcagatttatattttgtcaagattaattcataagtggtggtatatacttccatcatataatgtctgtctctattttgtgatgttggaagcatggataatcattacctagacccattagcctattaattctattatcccttctcactcattagcgaaatacttctctaaagagagacttgcccttaccaactattcagctaccctgtggtacagtttgtataagaaagggagagacttagtt

SEQ ID NO: 299539 - DNA, 550 bp, Homo sapiens
ggggtgcatgtgcattcaggggtgtctgttccatggttatattgtgtaatgctgaggtttggggtatgaaggatcccatcaactaggtagtgggcatagtacccaataggcagtttttcagtccttgtcccttttcctctctccccctttagtagtccccagtgtctcttgtttccatctttatgtacacgtgtacccaatacttaactccaacttacaagtgagaacgtgtgctatttggctttcctgtgttaatttgcttaggataatggtctccagctgtattcatgttgctgcaaaggaaatgatacttttttatggctgcatagtattccatggtgtacctgtaccacattttctttatccaatccaccactgatggacacctaggttaattccatgtctttgctattgtgaacagtgctgwgatgaactttagttaactcttactttcccctagctctctctgcattcctgaattccacaggctttaaagcaaagtttcaagtaggttataagatcaggcagtataaggtcatggtctacaggg

SEQ ID NO: 299540 - DNA, 585 bp, Homo sapiens
catgataaaaagtgggtgcggttatgccaataggcaaatagtggtgaaaattagccagcaataatattccatggaatgctcaacgagttttggggagaatggggaaaacaaatgttataagagagtaaaaaatctatataaatgtgtagatttactgctgtagatgaagtcatctaggaagaatcgtagtggatttttaggagtgaatcacatctctgttctagatgcaggcagatggtatgcagagaaaaggttcagttgtgcctgtttctggcccactgatcaacagcatggctttagggaagagactcagtttccttactaaactctgtttaacattcattgtacatctatcatgtatcagggattatgctgtgtgccagatacatgcttaactttgcaaaatggctgttgaaacagtgctgcccagagcacgggacacatccattggcagtacacgagatgagtttaggtaacgcagggatgcrgcatccaataccagtgagtcacatagtgctgaattcattgttactgtctttggaaccttaggattttgtcacggagaaattttcagttttgtgcttg

SEQ ID NO: 299541 - DNA, 636 bp, Homo sapiens
tgctgcttggaattcagggaacaaagtacaaccaaagattgaggaaggggctcttttctccactcccacttgggtcccatagaaatatagcactttgaggatgtccttggtcaaagcataatcatggtaatcatgaacatgtaaagctctcgcaaatgaatttgtgaagagaggacagcttcaagaggcagctgggacagaaagagaatggggtgagtgggcaacatgcagcgcctaccactggtagacttgtgatttagctacaaatcccaaacgccatgactacaaaatatacttgaaggtggggattttgctggttgggtagaggacttgtgtaagcagaaaggagcaaaagcaggacatttgagctttcagtttttgtggccwcattataggtacatgctactgaagctttgaaagtgttttcattatacaagctatacaaacataggacattcatacgtggagaagtttccatgtaagatttccttcaaacctgaaggctgattcaagacctttccattcaacttctcattatttcattaggtctcattatcaggccattacaaacaaacaggcttctgggacctttatgatccagtttcatcattattcaaggtaactttataaaatgtg

SEQ ID NO: 299542 - DNA, 504 bp, Homo sapiens
aaatcccaaacgccatgactacaaaatatacttgaaggtggggattttgctggttgggtagaggacttgtgtaagcagaaaggagcaaaagcaggacatttgagctttcagtttttgtggccacattataggtacatgctactgaagctttgaaagtgttttcattatacaagctatacaaacataggacattcatacgtggagaagtttccatgtaagatttccttcaaacctgaaggctgattcaagacctttccattcaacttctcattatttcattaggtctcattatcaggccattacaaacaaacaggcttctgggacctttatgatccagtttcatcattattcaaggtaactttataaaatgtgttagctctagtacttaaacgttggtttcaaatgcyattctgtactaaagagatacagaggaggtcctcattccaagaatgaaaagtaaaagatgatcctcaagcaggttatttgccagagagaaagacaagg

SEQ ID NO: 299543 - DNA, 584 bp, Homo sapiens
ccttgccctgtgaggatcaagtgatatccagctatcaggatatactacttctaggatgcactgcctactgcccaccacgcagcaataaatagggtctattgtaaaagtatagcactatatacagaagcctatcttttgcaagactctttaggtactgttaaggtgtttactgtccaaaatcatcctgggggaagcccactagcatatttcttctaatttatttaaaaaattactgatcccaagatatgtagatttgatgtaagagagcttggctctctttttctacatggctgaacccataagccttaccctcartagtgaaaggaaacaggaagaaagtgaaggaagaagtttgagttttgttaaaatataatatcccagggctttccaaggggaggtgacaacaaagatgtttgtgctagctgtcatttcagtgagcagaacattaattcttctactagtcaaggtatcatttattctatgtgggtcaatttatatgcacatgaccaaaatttgtataggaaacacataaaagccaattttgcctttgcttcagaacttatttctcccctagaacaatttgt

SEQ ID NO: 299544 - DNA, 569 bp, Homo sapiens
ttaggtactgttaaggtgtttactgtccaaaatcatcctgggggaagcccactagcatatttcttctaatttatttaaaaaattactgatcccaagatatgtagatttgatgtaagagagcttggctctctttttctacatggctgaacccataagccttaccctcagtagtgaaaggaaacaggaagaaagtgaaggaagaagtttgagttttgttaaaatataatatcccagggctttccaaggggaggtgacaacaaagatgtttgtgctagctgtcatttcagtgagcagaacattaattcttctactagtcaaggtatcatttattctatgtgggtcaatttatatgcacatgaccaaartttgtataggaaacacataaaagccaattttgcctttgcttcagaacttatttctcccctagaacaatttgtatgccctagtcagtattcatggatacttgcttcctgtatgttcacccagttctggttctgtgcttcagttgctgcttcttgtctagcctcctgggtattgtaatctggttttagactgtatattctggcttc

SEQ ID NO: 299545 - DNA, 599 bp, Homo sapiens
gaaataaactataattataaaataataaataatgcatgttagaaaaagaaagaccagattcagggggaaggggagtgcaaataatgggaaatgaggctggaagatgatctgttatagatagtaggaactcatcgttctgtccttttaacgcatagcaccttgcacttcttatttgtagccacgtttgtatttttttctatcaaaatttttattgaaataatttaggatagtagctaagcatctgaatttggagtctgacytaagatctaatccttggcccactattcattagctatgaactttgggcaagttatttaacatctctaaaccttattttctatcaatttttcatagttttatgaggagtaaaagaaattttttaaaaaatggcacctaaaacaatgcctaggtatactaagaactaaataaatcgtagatagtattgccttctgcatacaagaaaattattttattataagcatttatctgttttgttgatgttgttgttccctagcggatctgcagagttcctaagaatagggctatatctacgcagcaatatctagcagtagaaatcctgaattaataaaagatggaac

SEQ ID NO: 299546 - DNA, 543 bp, Homo sapiens
taatcattaattttaaaagacacattttaaaacacaatgagttgtgatagtttcagaatcaaacattttaaagtagaaagtttccttaaaagattggaatagcacagatcaaaacacatctccatagctctcatctcggaatagttttgaagcagaacatgcaattagatgaaaaatccacttccatatatggcagggcataaagatcatccctccaccccgctctctgacagtgtttcattcagttataaacagatggtctcaactataccaattctattcaattctttagaaaatctttggccaaggacaaagcctaacaagagcctcttaagtgaacagataatcaattgtccccattgtggctgcacttggggaagagacaaaaacagtaggcttgtatttggttccaggatccttgaggtaaagccatggctggtggtgaaatgcataaaataaagagtggcaactccttgaatctttctgtatgttgattttaygtcaattaaataattcttaaaaggcaaagagacaaagaaaagc

SEQ ID NO: 299547 - DNA, 526 bp, Homo sapiens
tattcagcccagaagaagtcttttaataaagtttgtcatttcctgacatgctttggtctgtgccctgcaaatatagaagaacaaattgtaaacttctctggccatctttagtcaaaaggggacaatcaaaattttaaaggctgatttgctacagcatactgttataaaattaatgacagccttaatgaaatcctttaatctgatgattaaaaagatcctatgaaataaactgcaagcatrattttcaaacgtatttttaggtcgggcatggttgctcatgcctgtaatcccagcactttgggaggccaaggcaggtggattacctgaggtcaggagttcaagaccagcctggccaacatggtgaaactccatctctagtgaaactacaaaaattagccaggcatggtggtgcatgcctgtagtcccagctacgcaggaggctgaggtaggaaaatcgcttgagcctgggaggtggaggttgcaatgagcagagatcgcactattgcaccctagcctgggcgacaag

SEQ ID NO: 299548 - DNA, 616 bp, Homo sapiens
ctacagcatactgttataaaattaatgacagccttaatgaaatcctttaatctgatgattaaaaagatcctatgaaataaactgcaagcatgattttcaaacgtatttttaggtcgggcatggttgctcatgcctgtaatcccagcactttgggaggccaaggcaggtggattacctgargtcaggagttcaagaccagcctggccaacatggtgaaactccatctctagtgaaactacaaaaattagccaggcatggtggtgcatgcctgtagtcccagctacgcaggaggctgaggtaggaaaatcgcttgagcctgggaggtggaggttgcaatgagcagagatcgcactattgcaccctagcctgggcgacaagagtgaaacttctctaaaataataatagtaaataaataaaagcatttttagtcctggagaaatgaaggtaaggcaaattatctgagtctctaaaacttttcattaataatagcttacatttgtgtagggattttaacttttccaaagcacttttgtaacatccacctaattgtattcttacaccatctctgtaaagtagccatagagggaataacaattcccatttgccattgaggaaa

SEQ ID NO: 299549 - DNA, 616 bp, Homo sapiens
ctacagcatactgttataaaattaatgacagccttaatgaaatcctttaatctgatgattaaaaagatcctatgaaataaactgcaagcatgattttcaaacgtatttttaggtcgggcatggttgctcatgcctgtaatcccagcactttgggaggccaaggcaggtggattacctgaggtcaggagttcaagaccagcctggccaacatggtgaaactccatctctagtgaaactacaaaaattagccaggcatggtggtgcatgcctgtagtcccagctacgcrggaggctgaggtaggaaaatcgcttgagcctgggaggtggaggttgcaatgagcagagatcgcactattgcaccctagcctgggcgacaagagtgaaacttctctaaaataataatagtaaataaataaaagcatttttagtcctggagaaatgaaggtaaggcaaattatctgagtctctaaaacttttcattaataatagcttacatttgtgtagggattttaacttttccaaagcacttttgtaacatccacctaattgtattcttacaccatctctgtaaagtagccatagagggaataacaattcccatttgccattgaggaaa

SEQ ID NO: 299550 - DNA, 563 bp, Homo sapiens
gtgtaacaaacctgcatgttctgcacatgtaccccagaacctaaagtatgttttcaaaaaatcttgtgaaagtgatttttatttccatagggagcctatcatttgttcagaattctgtatcacaaaagtctcaaagaactggtctggcaatggcaaagccctccttggagactgagggagaagaagaacatgaaccagcaataccagaaatctttgctgtgaattaatgaacggaagaacgagaccacccatgcactcatacattttgtctgtcctatctttgtgacagctggtcttagggaggccatggtgattgtgataaataagacaagccattcactatttctcagagctcagcttccaggctgtaataattactaaatatggtgagttaatagcatgaaacattacctagtatctgttcgcatatggtggtggaagggaaggggctgtcaaggaaagctgttytgagtaagatttatgttgagattcaagagagaagttggaactggatggcgaggtgaaaaatattctagacagaggaaacaccatctgtaatgacc

SEQ ID NO: 299551 - DNA, 616 bp, Homo sapiens
aaactattgcttgtaggaaatgttccaacgatgaaacaatgtttagctagagaaaatttattgcaaacatttgttaaaggttaaagcacaaaccttgaggaaaataaggggggaaaatcacccaacataaattttgatgattattggtactgtagagagaaatgattcttatatttcattttcctagagtttactatgaaaaactatgagaaagaatcttcccagcagctttttctcgcatgtattttttttttaaataaactacatcactccttatattttagtctgacatatcwtgaggttcagattcccataataaggttctactcttttataacactcagatcagaggcacgtggttagctagcgaggcatagtaacgacaatgagctgtttgagtagacagacgggaatagaaatcacagcaccttcacttagtacctgtgcaacagatccatttacttaacagttgtgagcctcagtttcctgatctgtaaatgaagataataatatctatctcacagagttggggtgatttcatgacagaaaactgaaagcgctaattgtagtgtctatcagaaaagcagatgcttaataaatggtagtcacataggct

SEQ ID NO: 299552 - DNA, 587 bp, Homo sapiens
tggatccttgtacctaccagtgcagcctggggcaggggtcgggaggtatggagtggccacagccatttgcctccagcctggataagcccagtgggctgaataaatcatgtcatttcctttgtgtgccatgacatgagcaaggctgtggagcactagtctagttgtaaaggcctgtgtaggccaatgatggtagcaatgcaaagaaagaatgactggtggagatgccataagaagtgaatgccagcaattgactctccccacagaaggagaaaacaggcatccacattgtcatccaatggctggaataccagttctcaaacccaggaataagaagaggwaaaacagggatgatagctggaaacctgcaacttctcacaaaaaggagtccccaaaaagaggggatcaagtcaactttcagggttcaggaaaagactctaacatctgctcactgttggcaggtgaaatgcatctggataacacttctctttggctgtgaacacgtgacctctctcatgttacaatatccttcacacaatagccagcagttgcatctttctgtgtgggagatattactccatctctcttcc

SEQ ID NO: 299553 - DNA, 514 bp, Homo sapiens
aaccttcagctgtcaccctcctcaggaatgacctcattctgcccaaggtcatgcccactcctggggtacccatatacagattgatttgagagtataaaggcctggccatctcagccaaactcaggatgattctgataggcaattccaagtctgccttggagctgacaaatatcttaagatctttcatgttactaaaagatgaacagatggacggggccattcaytcctatgttaaaggtcactctctctggaatcgtaatacatgaagatagaaatgaagaaactagttgtattgcaacaatcataatgggacacttaaattaggtaaattgaacctgcactaagctatacccttgtgagataatagaaacctgttctatttcacagcatgctagtttcagagcaaggaaagagtttctgctcagtgttgttttgccttgtgtctgtgactggtctagggccagcttacatccatttcatttagagactctaatggactttggtgaactgacag

SEQ ID NO: 299554 - DNA, 514 bp, Homo sapiens
aaccttcagctgtcaccctcctcaggaatgacctcattctgcccaaggtcatgcccactcctggggtacccatatacagattgatttgagagtataaaggcctggccatctcagccaaactcaggatgattctgataggcaattccaagtctgccttggagctgacaaatatcttaagatctttcatgttactaaaagatgaacagatggacggggccattcattcctatgttaaaggtcactctctctggaatcgtaatacatgaagatagaaatgaagaaactagttgtattgcaacaatcataatgggacacttaaattaggtaaattgaacctgcactaagctatacccttgtgagataatagaaacctgttctatttcacagcatgctagtttcagagcaaggaaagagtttctgctcagtgttgttttgccttgtgtctgtgactggtctagggccagcttacatcyatttcatttagagactctaatggactttggtgaactgacag

SEQ ID NO: 299555 - DNA, 547 bp, Homo sapiens
agaagggctaatcatctctcctcctgccaccagctcatgtgaccaagtcccagtgttgtgtctgtactgggaagtttggtatcagagttgctgaggttactcaaggaccctgaagagctgggtgatatagagtgaactgatgagatgaagctgcctccccggaagccacagtcttcaggatctgcagcctctaaagttaccacacctataacacttatgtaggtttacccaatatctggcttgggccagcagtttctcacaggtatggatgaacaactccaggtgagaacttgctgctccccttgggctggacaaactcaagaaggcaggcttccctttctgggccaccaggcccacctgagacctgccttccctgagcacaggcaggacacctgggttccagcctctaactctgtacctcaagccagtccctgcccctctctgggctccagtcctccccaccccytcaatgaaatggggtaaggcacagttgagataagtctcaagggctcctcctgccctgcccatcaggcaaaggtgtgatggt

SEQ ID NO: 299556 - DNA, 588 bp, Homo sapiens
aagcattcttataggtgagtagcggtacaaatatgcatgtacttctgcaggctatgtatctggaagtggactgtctgaaccacaggtcatgagcatcttcaatgttactagataatgcctgctttctaaagtggttgaacaaatttacarcccctcctagccatcctccaccccctcctaagtgttccacagagccacactccgtatggctaatttggggaaatctcatgggtgggtcgtgatggctcattgttattttaagttgtatttccatggcatgtatttatcggccagttggatttcctcttttgaagtgcctattcaaatgcttttccagcttcttattgggtcatttggctctatagcagacacatctggggccagcatcactctgatttcagcctccatgtcatggagcctcccactgccagaaagccagtctttccacattctacccagggactcatccaaccatgtgggaaagcctggaatggtggagaaatgccccagcctcctgaccttcatggaaacaaccctggaactctcaggggtcttggaggtcccaaaggaacccagtcttcagtacct

SEQ ID NO: 299557 - DNA, 588 bp, Homo sapiens
aagcattcttataggtgagtagcggtacaaatatgcatgtacttctgcaggctatgtatctggaagtggactgtctgaaccacaggtcatgagcatcttcaatgttactagataatgcctgctttctaaagtggttgaacaaatttacaacccctcctagccatcctccaccccctcctaagtgttccacagagccacactccgtatggctaatttggggaaatctcatgggtgggtcgtgatggctcattgttattttaagttgtatttccatggcatgtatttatcggccagttggatttcctcttttgaagtgcctattcaaatgcttttccagcttcttattgggtcatttgrctctatagcagacacatctggggccagcatcactctgatttcagcctccatgtcatggagcctcccactgccagaaagccagtctttccacattctacccagggactcatccaaccatgtgggaaagcctggaatggtggagaaatgccccagcctcctgaccttcatggaaacaaccctggaactctcaggggtcttggaggtcccaaaggaacccagtcttcagtacct

SEQ ID NO: 299558 - DNA, 555 bp, Homo sapiens
ctgacccaccagcagattattgtccggctgaggcctggccagtgccaccaccaatcctgttacctggcaggccctgctgggcactgcattcctcggctaccagagctgcagttcgggccacactcaacctattgccagctgataagtcatttctacagggggcaataaaaacccccaggatccatatccctgacttcaaatctatccatcagatgtcagagtggaccacaggcatgagcccctctccccatctcagcagggtaggtagtrtcccccaagtgcctcagagggatgaaatcaggctgagaagagaggaaagcagggccccggggtagccacagggaccctgggctcacaaacaaggacaaaaataacaagctcagccaccaggaattgagcacctactatgtacaaggccctttacacacatcactcctaatcccttcagtgacccttcaggagatggatgctagccccattcaatttcccatgggggaaactgaagttcaaagtcggttaagtagtcacttgccccaaatcttggcctggctgact

SEQ ID NO: 299559 - DNA, 610 bp, Homo sapiens
ccgcgccgctcgcctcccggcgcgggggggtctccaccgggggcagcggtcgcgccttccgccctgcagctctctccggccgccgccgccgccgccgctcacagactggtctcagcgccgctgggcaagttcccggcttggaccaaccggccgtttccaggcccaccgcccggcccccgccygcacccgctctccctgctgggctctgcccctccgcacctgctgggacttcccggagccgcgggccacccggctgccgccgccgccttcgctcggccagcggagcccgaaggcggaacaggtgactgctgagcgctgggcgcggagcgggggcgggctctgcgggtagtgccggagctggccgggaggggcagggcccggggggcgcagggcgcgcgtccctctccactcctgctttctgcggccctgggcgccggcaccgagcgctctaaaggccctcctttttcttcccccgcttcccttagatcgctgtagtgccttggaagtggagaaaaagttactcaagacagctttccagcccgtgcccaggcggtaagaaaccccgaggttgaggggccagggggactggctggcggggaaaggagaggac

SEQ ID NO: 299560 - DNA, 592 bp, Homo sapiens
actatgcacatctaagatgaaagcctggtgtaggcaaatggtctctgccctcatgcgtcattatatacttaactaaggagaacattttgcaggatttgtaaaagtacttaacgcctttttagttcctcaccactaatccaaaactggctctgagcaatagcggctggaagccattactttgtaatagttacttcccattctgtagcctaggtaaaatgaatggatagttctagtttaattcctaataaacaggtgcctccatatgacagattgtgctaattgtcaccctgctgttagatttagtggatccctcagagaatgagcctcagaggctraaacaccctataggacagtcttgaatttaacaatttacaatacatgattctgccagtctcactgggtgttcataggccttgagtcactagtgagtagctttgccatggtttgtggaggggtggagacattactgcattttccagcatgcctgctgttctgccagtaaacggacttcaggaccattgaaccaacacctgtcatacagcaaacacagagatcgtgactttggaacaattttccttctttagtgtccgta

SEQ ID NO: 299561 - DNA, 563 bp, Homo sapiens
taatatccatttccagagttgttttaatggtgagagataatgtatctaaagcagctagcttagtgcctgacacatagatactcaatactcagtagcagcagtggcagcagcaactgctgttattatagtccttactccaagaaatttccctcattaaaaaagagaatgaactcctttggaaataaaacagagtcagtgtaccttctaaaggggcctgaggcaggagtgacaatgatgtgagcacagcagaaagactgaggtctagattctgctggttcagtgaggccttgcagatgctatggatgaggcatggggacagayacttcttcaggatcattttggctctctgcattataggacacccaggaaagactttcactcaggggccttttttttttttttaatgcatgcacagtattgaactcaatagctgatattctctgcccgcatcactggctactaccagaagagaaataggaatcaagttttcctcttggctttatcacagaaggaagccactgagtatttacttatgtccctggcttagattcatcattggcctg

SEQ ID NO: 299562 - DNA, 570 bp, Homo sapiens
aggcagagaaaatagcatttgcaaaggccctgtggttgagaaaggttggggaagttcaaaaaatatccagttgaatttaacacagagagcagcaaaaataaataaaaaataaataaagcaactgtatcagtgcttctcattgtttcatgtgcatgtgaaatacctgggaattttctttaaaatgcacaatctggttcagtaggtttggagaggaacctaagatttttcttttccaaaagacacctcccaaggaatgtcagtgtttctggtccacagccacattttgagaakcagagtcctagatggagtttactttctgtcactgtcaccaaaaaggaggactttcattttttttctttcaatattatctaggaatgggtagagatgatacatcaggcatactaaagcaactttatcattttcttggtttaccctcctttttctcctctcactctttttcagtttttactgctaagctctctccaaagaaaatatagagaaagaagtattttgctctatacagttagccaatttctacccaaagagaatggggcatgaatggcctgggta

SEQ ID NO: 299563 - DNA, 640 bp, Homo sapiens
tgtaactgtgtgcaattggatcagtatgtgtgtttgtttctatatatagatttgtgtgtttgccagtctgcatgtgtttaaatcagtgtgggtgcatgtgtacatgtttatatgtgtgtgtctctagtctatgtgtatatgtgcctctgtagatatctgtgtgtctccttgttcacatatgcctttatgtatctgtacctgtaagtatgaatttatgtgtatatttggrtgactgtgtgtaggtaactatgtgattgtgtgtctttacacatgcaccattagacatatttcctacattttaagtaagtgaaagtgttgtttgcagaaaaaataagctatttagaacctaatgttctggaaatattcatattaaaatacatctgcttttatcatattctatattgtctacatttagccacaggtgttaacaaaatgataagcacctggaaagtagacaatctaaaaattgtaatggtattcatattaatcttagctttctccatgaatcaaagtataaacaatgaggaaaaatcagtctaagattttcatagccggtgtaaacaggacttatttctcatagaaatatgctgacactaggcacattctgaaagcttatagtgtgatgaatccactttcttaa

SEQ ID NO: 299564 - DNA, 632 bp, Homo sapiens
tgtgcaattggatcagtatgtgtgtttgtttctatatatagatttgtgtgtttgccagtctgcatgtgtttaaatcagtgtgggtgcatgtgtacatgtttatatgtgtgtgtctctagtctatgtgtatatgtgcctctgtagatatctgtgtgtctccttgttcacatatgcctttatgtatctgtacctgtaagtatgaatttatgtgtatatttggatgactgtgtgtaggtaactatgtgattgtgtgtctttacacatgcaccattagacatatttcctacattttaagtaagtgaaagtgttgtttgcagaaaaaataagctatttaraacctaatgttctggaaatattcatattaaaatacatctgcttttatcatattctatattgtctacatttagccacaggtgttaacaaaatgataagcacctggaaagtagacaatctaaaaattgtaatggtattcatattaatcttagctttctccatgaatcaaagtataaacaatgaggaaaaatcagtctaagattttcatagccggtgtaaacaggacttatttctcatagaaatatgctgacactaggcacattctgaaagcttatagtgtgatgaatccactttcttaa

SEQ ID NO: 299565 - DNA, 573 bp, Homo sapiens
ctaaggatgattaatttagagttctagactggagggagttggccaacaggctaagggatgagacaggaggtgttgacgattctacagcttaacatgcagagtttgtgccagagtggtgacgatgtaggttcttaaaaagaaggaaaagagaccttacatcgattaattgatttttaggagcaagcactgtgctctgtgctcacatttattaattcacrtatccaggtttgaaacttagaattaaccacaaagcaacagtaagaaaagatggaataaagcactttactttataggctgtcatggattacacaggtagtagaaatagaaggcctggagtcccttcatttactggctacatttactggccctaaaaacctcagcagatcattttacctttatgggcatccacttttgcatctgtaaaatgtgggtaatactgctttggagacaatgagcaggacatttgcacacattagaatttataaagtaatttttcaggaattataacattataatttatcctgaatgtcttctgtttcatctttcccgatttccctcctaatggaactgata

SEQ ID NO: 299566 - DNA, 573 bp, Homo sapiens
ctaaggatgattaatttagagttctagactggagggagttggccaacaggctaagggatgagacaggaggtgttgacgattctacagcttaacatgcagagtttgtgccagagtggtgacgatgtaggttcttaaaaagaaggaaaagagaccttacatcgattaattgatttttaggagcaagcactgtgctctgtgctcacatttattaattcacgtatccaggtttgaaacttagaattaaccacaaagcaacagtaagaaaagatggaataaagcactttactttataggctgtcatggattacacaggtagtagaaatagaaggcctggagtcccttcatttrctggctacatttactggccctaaaaacctcagcagatcattttacctttatgggcatccacttttgcatctgtaaaatgtgggtaatactgctttggagacaatgagcaggacatttgcacacattagaatttataaagtaatttttcaggaattataacattataatttatcctgaatgtcttctgtttcatctttcccgatttccctcctaatggaactgata

SEQ ID NO: 299567 - DNA, 599 bp, Homo sapiens
aagtaacattggttctgacatctgtgaagacagaagaaatgagccattcagctgtcagggagaagggtacctcaagcagaagacatagcaatggtaaagactgtgagacaggaatgatcttgcaggtgaaagagtagttcagctgggatccttgcacaaagagaatagcaaggttgatggacagccatgtggagcccagaaagtacaacacctttgatgacagagaagcatggcaagtgactgcccctatcctcactacatctgagggcatagtatgtgaggtctcactgtagaacatctgggacttgacaatggcaagtttacaagatgaaagagggcacctaactcaaatgtccaaggaaagacaccaggtgatggaggggactatgagataaagaaggttgtgaaatgagaagagaggaacaaggaaatagaaaatgctcaataaatgsttgctcttattgttaaaaagacaggcaatctgctaaaatctttgaaataataaatgacccaactattttccttctatgtataatggggctagtaatgcattctttctaatagagtagtgagtttatacattgatatggtttggctgt

SEQ ID NO: 299568 - DNA, 599 bp, Homo sapiens
aagtaacattggttctgacatctgtgaagacagaagaaatgagccattcagctgtcagggagaagggtacctcaagcagaagacatagcaatggtaaagactgtgagacaggaatgatcttgcaggtgaaagagtagttcagctgggatccttgcacaaagagaatagcaaggttgatggacagccatgtggagcccagaaagtacaacacctttgatgacagagaagcatggcaagtgactgcccctatcctcactacatctgagggcatagtatgtgaggtctcactgtagaacatctgggacttgacaatggcaagtttacaagatgaaagagggcacctaactcaaatgtccaaggaaagacaccaggtgatggaggggactatgagataaagaaggttgtgaaatgagaagagaggaacaaggaaatagaaaatgctcaataaatggttgctcttattgttaaaaagacaggcaatstgctaaaatctttgaaataataaatgacccaactattttccttctatgtataatggggctagtaatgcattctttctaatagagtagtgagtttatacattgatatggtttggctgt

SEQ ID NO: 299569 - DNA, 614 bp, Homo sapiens
atatttgtcagtcactccaaagaatgtttcaaagatcccattgttagttgctaaagtagtccccagaaatatgtgggatggcagctacagaactcgtttgaaatagttgctgattatattctttattttttagtagcctccaattacatgtgaattccagggctaatatttgcctttgcctacatttgtgacaattatgcttagagttaagacatcaccactgtgttaaatttaaatctcataactactactatcctgaacaaatagaggagttcctctttgatttggtttcactaaatgaccataaaacagctaggtgtggtggcatgtgcctgtagttccatctacttgggagactaagaagggagtatcacttgagcccaggaggtcaaggctgcagtgaactgtaatcgtaccactgcactccagcytgagcaacagggcaaaactctgtttcttaaaaaataaaaataaaaaataaccataagacatgtcagttgaattgtctgtcccacccttcacgctttgctcatttattatgcaactaccatgtgctagacatgttcacacatagttttgggaacgttaaaggattcagttagaactagaaagcc

SEQ ID NO: 299570 - DNA, 618 bp, Homo sapiens
ttttctccttttctctccttggtgaagtccccactaactcaggaccttattcacgttttcctctgttttgtatgcctcctccagctctttgtttgcttaactgtgttcccccaagttacttccccaggaagattctgccattctaagtattccaatcttgccctttaccctttgatataatcttttattgcatctcttacttcacaaaagttatcataatttgaaattgggcatctggctgtttatatcagcactccttggcttcttcccaaattccaaaaggcagagatgttgactgtttctttatgaacaggcagcccatccaagcacactttgttaataaacatatagcccttcctagcagtgtgcttggtccgtaaaagtcaatcaatgtatatgtgcacattatgagaattaactttttaagggcagatttactattctcattttacagagggggaaacttgaaggtatcaagtagcamatgttagacacctagtcattagccaatccctttttgaaccagtctaccccactacaagcctttctatcagtctctcacaccctaaatgtactcacagattttcagaaagacatttctttggagaaggattccat

SEQ ID NO: 299571 - DNA, 554 bp, Homo sapiens
cacatacaaaacctgtacctttgtaatttttgacttttaatttcttagacaaaaatgcctgccatttcccccaaagcaatatgtacttgcagttattaattcacataaattcactccatcccttaaaattgattttgtgaaattaaatcacatacttttatatttagttaaattttgaaaaaggtaatatattaaactgtattatttgaattatttaatgatttgctgctaacgtgatttggccacaatatggtaacctcatctgaaaaatatattttttttggttttcaacatgcacccctatacttgacatccacaatcatccaaaatgaatatcaccatcatmtgaatcagatttcttctccagtataggtattatgcattaagaagccaagagcccaagagttcaattactattcttattttgcaacctctcagacttaaactcaatgtacgatgtacatatcttccaggcactgttacatcaagcaaacatcagttgtcacttgttgggaccattaactagacaagtccaaaacaaaactcagaacaga

SEQ ID NO: 299572 - DNA, 563 bp, Homo sapiens
ccagggaaccctggccagcaatgccccacctggatatcacttggccttgctggcatgccccagcttgcctgtgtcatagcttgtacctgtgttcagtggtgcccaatctcttatatcatgcccaagaagaataaggatatgctagacattgaagggtgattagggcaaagaagaattttattgagtgactgaacagctctcagcagagaggagacacagggagtggtctggtccccagcccctgcagttgggcagttctctctgtctcatcaactgagtctggggtctttataagcataggatggggagtgcatgctgattggtttgtgagtgtgcaaaaaagrttaaaacgaagccatcacccaaaggtgagcatgatactgcaaaaaagcaattaggaaagggtaggtatatgtaaaataagaagggtggggatcaatcaagggaaagtgcatcaaacaggaagacaagttctcaatctggtctgaggatttaacctgtagcttggctttcagactttaaactgtctttggcttggaggtggagattcactgggcacccat

SEQ ID NO: 299573 - DNA, 555 bp, Homo sapiens
ggatgagaaaatccattggtgtgaataaatgagaaaagcacattccaggcaaaagaacagaaagcactggcaaaggtgccaaggtagagatgagggtggcaactctaggaactgaggaaatgcctctgtttgtgaggctcagggcatgatgaagagaagcctatgatcaggttgggaagcgagagatttgccgatttgtagatcttggttagaatgccaattgtgtgaatccttaatgcaggayagtgctgtggaaataagacatatatttttaatatgatttgtactatttactataaatatggcaaacaagaagaaatgagagtgatttaccaatgaccagggccaccaatctcatttcctaacacaatagttttataacttctcttttacacatatgtgcaaccccaaatctctcccatctaattctttagaattactttggaatttaaaggggaggaaagtctttgtactcttaaatgaacaacttaccctatctatttgaaaaaaaccatcctagtcaacattttgagaagaggtttaacaataagcaga

SEQ ID NO: 299574 - DNA, 555 bp, Homo sapiens
ggatgagaaaatccattggtgtgaataaatgagaaaagcacattccaggcaaaagaacagaaagcactggcaaaggtgccaaggtagagatgagggtggcaactctaggaactgaggaaatgcctctgtttgtgaggctcagggcatgatgaagagaagcctatgatcaggttgggaagcgagagatttgccgatttgtagatcttggttagaatgccaattgtgtgaatccttaatgcaggatagtgctgtggaaataagacatatatttttaatatgatttgtactatttactataaatatggcaaacaagaagaaatgagagtgatttaccaatgaccagggccaccaatctcatttcctaacacaatagttttataacttctcttttacacatatrtgcaaccccaaatctctcccatctaattctttagaattactttggaatttaaaggggaggaaagtctttgtactcttaaatgaacaacttaccctatctatttgaaaaaaaccatcctagtcaacattttgagaagaggtttaacaataagcaga

SEQ ID NO: 299575 - DNA, 639 bp, Homo sapiens
ttttagggtatgtgcataacttttgcacatatggggccatattcatttcatgtggttatatttatttctctcatttctagtcacagactgttcagactgtcttaacttcacccagataaactcatttaatctttagaaaacattaatgagcaggtataattatcctcattctatggattaaataattggaatttacaaagtttaataactccttgaagctcatgcagaccagaccatatgcaatagaatgaaaactcaaatgcaggttgattttgaatttgtactctttcatttgtttactgagatatgattcctgtactataacattaaccttttaaagtatacaattcaatattttttttaaaaaaattctcaaggttgtgcatacatcaccactgtactttgacctcctcattcttattcctacacaagtaagggaatggtgggttattttggtttctttactcattttgttttgtcttttggagaaaagcttggtcatttagagaaagtgttaagtaagatgagtggaataaagcaaggcaaattgggcaaataattcccagctggagaaacatctaggtaaaarcaagagggcaccaaagaaagaggccctttttttttggcaactccaaattg

SEQ ID NO: 299576 - DNA, 620 bp, Homo sapiens
tcctttactctgagagagactcagtttttcaaactgacagaactaagaaagacagtatgagatggaattggtctttcctcttccttttctttttttttaattacgagtttattcaaaaggtgaacaaaaatcatttgctactgctgattaatactacctaaagttcttgttcaaagaagaaaatcaaattttattttatattagtgtattatcaatactaaacctaattttaataaaaccttataaacaaattcatccattcttagttagctttagaccacacaagacaagattttcataaackttttataacttcttacaagttgttttatatcttttctttccctagctttctatgttcattcagtttcagctatcattcttttaacttattcaatttaaaacaaccttaaaaatctctaaactagaaaaaatcgctttccctttagcagaatacacatactcatgtctttttttacaaccctcctttccaaaaatcaccttacttttttaatacattttgtatattgaattgtttctcttatatctagtagttttaattatatatatatataaaatattacaattttaactcttattaactctaatttccagtgaaa

SEQ ID NO: 299577 - DNA, 592 bp, Homo sapiens
actatgcacatctaagatgaaagcctggtgtaggcaaatggtctctgccctcatgcgtcattatatacttaactaakgagaacattttgcaggatttgtaaaagtacttaacgcctttttagttcctcaccactaatccaaaactggctctgagcaatagcggctggaagccattactttgtaatagttacttcccattctgtagcctaggtaaaatgaatggatagttctagtttaattcctaataaacaggtgcctccatatgacagattgtgctaattgtcaccctgctgttagatttagtggatccctcagagaatgagcctcagaggctgaaacaccctataggacagtcttgaatttaacaatttacaatacatgattctgccagtctcactgggtgttcataggccttgagtcactagtgagtagctttgccatggtttgtggaggggtggagacattactgcattttccagcatgcctgctgttctgccagtaaacggacttcaggaccattgaaccaacacctgtcatacagcaaacacagagatcgtgactttggaacaattttccttctttagtgtccgta

SEQ ID NO: 299578 - DNA, 516 bp, Homo sapiens
aacttaaaatagagctcctatatgatccagcaatctcagtgttgggtgtatcttcaaaattagagaaatcaggtatctaagagatatttgcacttacatgtttgttgcagcactgctcacaatagccaagatttggaagcaacctaggtgttcattaacagatgaatggataaagaaaatgtggtacttatacacaatgaagtactattcagccattaaaaaaagaatgagattctgtcatttgcaacaacatggatggaactggaagtcattatgttaagtcaaataagccaggcacagaaattcaaacattacatgttctcacttattttggggatgtaaaaatcaaaacaattgaacacatggagatagagattagaaggatggttaccagaggctaggaatggtattaaggggtggaagtaggggttggaggagaggtgaygatggtcaatgggtacaaaaaaaataatttgaatcaatgaaaaagatctagtattttacagcacaacaggg

SEQ ID NO: 299579 - DNA, 607 bp, Homo sapiens
aagcatcaccttgaatttgttataaaatcccccacaagctgtggtatgaagggcccaagagttgctcttctgcttcagaaccagccatccatgaactctcatgctcttgtagaaaagactacgctgaaakgctcaccccaggtgttcagagggtttcccatttggcctaacattccaggaagctcaagctgatgctattactggagattgaagattctttgagtagcacggtatacagcaggcttcgaggagtgtccaatatgtttttgtatttcaactctctccaaaggttgtgcaatcttgttcaatttacttaacttactgtcataattttttctttgtataatacaaaagacaacatttatcatctatagttttgtgatgattaagtatacattaattatttcatttaatggctacttcaaagtactttgaatagcacttttaaataaaatagaaaatagagccaaaaacaaactctgtgttcttctccatgtgttttagccttttaaattgcctcatttagtctcccagctttaaatgacaatactatactggtaactcttttaatctccagactaaatactcaagacttataatttctacc

SEQ ID NO: 299580 - DNA, 607 bp, Homo sapiens
aagcatcaccttgaatttgttataaaatcccccacaagctgtggtatgaagggcccaagagttgctcttctgcttcagaaccagccatccatgaactctcatgctcttgtagaaaagactacgctgaaatgctcaccccaggtgttcagagggtttcccatttggcctaacattccaggaagctcaagctgatgctattactggagattgaagattctttgagtagcacggtatacagcaggcttcgaggagtgtccaatatgtttttgtatttcaactctctccaaaggttgtgcaatcttgttcaatttacttaacttactgtcataattttttctttgtataatacaaaagacaacatttatcatctatagttttgtgatgattaagtatacattaattatttcatttaatggctacttcaaagtactttgaatagcacttttaaataaaatagaaaatagagccaaaaacaaactctgtgttcttctccatgtrttttagccttttaaattgcctcatttagtctcccagctttaaatgacaatactatactggtaactcttttaatctccagactaaatactcaagacttataatttctacc

SEQ ID NO: 299581 - DNA, 616 bp, Homo sapiens
caatattaaaaataattccctttggtaatttgctrgttcataaagttggaaacgtcttacttagagaaattgatggtataaagtcaaatatgaaacaatatggtttctggcatctgcagcaagcattgttaatatgggatctatgaatagaattgaggcgatctttgaatatggaaaataaaacaaaattgcatctttattttaattaacattaaactgaaacttgcattttcttcaaatacaaatttttgcaaaaatatgattaagctactgtttaatcaagcaagacatatgactttgtcactaataaaaaccacagatattgtaatatgtgtattttctcaaattatacttgtgtagatatctgcattattaatctcatcgctatcttgaaagtatgattgttattataataaaactacaccaggctgttaatattttaattaaaaagcacatagatgactacattgataaattgcatttttagtattttgatcactatgttttgacataattgttttcctttgtaatcctatgctttttattttatgcatttaaaaataattctgagagggtgtctttgtacttcatcagactactcatggggtccagggta

SEQ ID NO: 299582 - DNA, 578 bp, Homo sapiens
tttttgacaatttttctctcattcctcaaaacagaaaaaaaaactccctctctcattttttattttatttatctgagttttctctcttttcctagtctagcttattatagctgatagagtttgttgatttatcttttaagaaaacccactctgttttgttaattatttttttctctcgtctttctggtgtctatctttctgctcastttgggcttaatttcttctttttctacttccttgagattgtttatttgagatatttttgatgtcctttattgctatacatttttctgtttggactaattttgctgcataccataagttttggtaggttgtatttccattttcattgaccctgagatatttttatatttcctttttgatttcttctcttgcccatttttaaggagcatgttgtttcatttccacatatttgtgaattttccaagatttctcctgtcatttatttctagttttatgccattatttttggagaagatcttgatatgatttcaatcttttaaaatctgttacaacttgtttgatggcctaatatatgatacatcctggagactgtt

SEQ ID NO: 299583 - DNA, 619 bp, Homo sapiens
tgctgatcatctaccaaatatcaagtcctgaatgtacagataagtgagatgttttctgactatcctccccagcactaccaataggtttgttcttgtttgtttatttagcctctgaatacaattacctgtagtaagaaccttcctcaaacaattctaaccattaccaacaaatttatttccaccacaggcagtctttctatactattaggtcactcacgggagttctgatctctcttattatagtatatgccaaatattcwttccttggaatgaatgttctccatttgaaatatttccaggtcctgccatcattccttaattttcccttcatcatcttgattcttcatcactgaaaggattcaattttgccgttttttaaaaccttatagccagaactgaattcactgttttaggtctagcaatattattttagggtaggaaacttatttattaaaaacttttgtttcagccccaaatcacactagttttgcgtgttctgttgatagctccaaatgagattattgttattttgttcttaaaggtactgaaagcatcttaagtaatcatttcttttaagcttataagttatttaattagaaaacaaacgaaaagatcaccc

SEQ ID NO: 299584 - DNA, 619 bp, Homo sapiens
tgctgatcatctaccaaatatcaagtcctgaatgtacagataagtgagatgttttctgactatcctccccagcactaccaataggtttgttcttgtttgtttatttagcctctgaatacaattacctgtagtaagaaccttcctcaaacaattctaaccattaccaacaaatttatttccaccacaggcagtctttctatactattaggtcactcacgggagttctgatctctcttattatagtatatgccaaatattctttccttggaatgaawgttctccatttgaaatatttccaggtcctgccatcattccttaattttcccttcatcatcttgattcttcatcactgaaaggattcaattttgccgttttttaaaaccttatagccagaactgaattcactgttttaggtctagcaatattattttagggtaggaaacttatttattaaaaacttttgtttcagccccaaatcacactagttttgcgtgttctgttgatagctccaaatgagattattgttattttgttcttaaaggtactgaaagcatcttaagtaatcatttcttttaagcttataagttatttaattagaaaacaaacgaaaagatcaccc

SEQ ID NO: 299585 - DNA, 582 bp, Homo sapiens
ttaccagctactctggtgatcatgtgactagctcgtgtaatattctgttcctgtagtgagtagaattgatgctcactgcaactgggaatggttcacagaaagcttcatgaatccttgatgtcctttattcctttcctgagaaggataaaagataatacaatggtctcgtggaaagtggccaagccacaagaaacaaggggcctagattcctcaacttaccacttggagttgagttgcctgttgatctttatttcaggtgagcaaaaatagacttctcwtatgtttgaacagatatatccttctgaggcatttgttgctgtagccagtgttatcttaaataatgcataaattaaaataaataagtagtcaaaagttgtcattattaaaacacatactcaggggaagcaggcattctctccactttccagatagctaaacttctgggtgtacaatttttcgctaacctctccagcttcatcccatttcaatctttcctcaaatccactaaattccaagagaacactaaaaatatatgtctaatttgttcatctttatcttgtgtttcctaggcccagagtgttg

SEQ ID NO: 299586 - DNA, 582 bp, Homo sapiens
ttaccagctactctggtgatcatgtgactagctcgtgtaatattctgttcctgtagtgagtagaattgatgctcactgcaactgggaatggttcacagaaagcttcatgaatccttgatgtcctttattcctttcctgagaaggataaaagataatacaatggtctcgtggaaagtggccaagccacaagaaacaaggggcctagattcctcaacttaccacttggagttgagttgcctgttgatctttatttcaggtgagcaaaaatagacttctcatatgtttgaacagatatatccttctgaggcatttgttgctgtagccagtgttatcttaaataatgcataaattaaaataaataagtagtcaaaagttgtcattattaaaacrcatactcaggggaagcaggcattctctccactttccagatagctaaacttctgggtgtacaatttttcgctaacctctccagcttcatcccatttcaatctttcctcaaatccactaaattccaagagaacactaaaaatatatgtctaatttgttcatctttatcttgtgtttcctaggcccagagtgttg

SEQ ID NO: 299587 - DNA, 582 bp, Homo sapiens
ttaccagctactctggtgatcatgtgactagctcgtgtaatattctgttcctgtagtgagtagaattgatgctcactgcaactgggaatggttcacagaaagcttcatgaatccttgatgtcctttattcctttcctgagaaggataaaagataatacaatggtctcgtggaaagtggccaagccacaagaaacaaggggcctagattcctcaacttaccacttggagttgagttgcctgttgatctttatttcaggtgagcaaaaatagacttctcatatgtttgaacagatatatccttctgaggcatttgttgctgtagccagtgttatcttaaataatgcataaattaaaataaataagtagtcaaaagttgtcattattaaaacacatactcaggggaagcaggcattctctccactttccagatagctaaacttctgggtgtacaatttttcgctaacctctccagcttcatcccatttcaatctttyctcaaatccactaaattccaagagaacactaaaaatatatgtctaatttgttcatctttatcttgtgtttcctaggcccagagtgttg

SEQ ID NO: 299588 - DNA, 493 bp, Homo sapiens
acaattgtcacctttgaaaaatggaagtgaccaatggactgccctcagatattttgtttgtttgtttctggcatttggtcataacattgtagatcgtttcttttggaatcactgggtgatgagaatccccaggctggagagctgggcacggcggagtccctgtgggagaagtgttactggggtcgctgargtggcaggaaagcagcatctgagatactctctggcgcggcccgggtgctgggtgaggcagccagcccaacagcttattctgtgtgtggaagggccaccccaggcctggtcacggactccagcatccaggaaacaggcgcgggccagggagcgccttacacatttacctctgcagtgcgtggggcctccatctgccactgggtgccccacttcttcctgcagtgacgggtcctgttcccttccttctggaggcttcagaggacttttctctctgattcctggcatgttagcctggacgctgcag

SEQ ID NO: 299589 - DNA, 566 bp, Homo sapiens
caaaacttgtacacatagaagcttgagtctcacgctggtcatcagatcacagagaagcagcagaagtctacccatgcaaggttccagctgtttgatgactccctggaatgaaatacgtctgtaagaaagtgtgcatgagagacagatgtggggtggataggtatggaatgaatctgtcaggcactctgccaccatgggaggcaacaccgtctatgaaatgggtgggggcatattcagcaactgattttgagcatcagtggtgagaagaagagcaatgtgcaggtgccattatgaggcaggaaagaatattccctgcagaagagcccagaagcctaargaaaaagagtgagggcagtagcagatttggtgtccctgttttagaaaagaaagtcctgggcctgcctgggcacctggatcttagttccagttgcagggtctttgtataccactgaaactctgtggcttgtatctgcttcctcttgttttggggataccaccaaatccaggaggttcacctccataaactcttggacagagggagcagatccatgaggaaatactgaagt

SEQ ID NO: 299590 - DNA, 593 bp, Homo sapiens
agctctggcttcctaggccttggttccaccaaatccatcaggattgctgtaaaaacaaagtcctctaagatccaggggatacctgacaactccctcttcacctgggattatttccctttccacttccccaggtaagacagacacacacacacatgcacagtgacttcctaggtgggagccatagaggtaggattttttaaaaagtagacaccacggaagtgacaaaaggaagagaagaaagaggttgaaggagatctgccatggggcagtggcctccactcttttagccacatacccaggggcccagggcatgaacaggaggatctgcaaggatccaagggttctgtctgggttgaggctatacccagcacacccttgggaagtttgggctgggctcttgcagcccatttctgtgggtacctggaactaggatgaacttgcctgcaccagtgtagacaagagctacagcagagaaagccttcayctcctcctatataaactgaggtatttaagtgggtggccccaagagtttcacatagtcaaaagtttctgctggacttggtttccccattggtgacccactgtgctttgaa

SEQ ID NO: 299591 - DNA, 591 bp, Homo sapiens
gttattttattaaaattattttatcataaccagtttttttattttcttaggatgaatcactttccttgtagtttacaaaaaattaataaaaatttgtattaataattttttaacttttaaataatttagttttattattttttatttttaaataatcattaagctctaaattagaaaaaattatttttaataaaaactacatctatatgtcattctaacaagcttttattttactgaaaacacatcttaatttctaataccccttgtatgtagattttttatatccaataattttaattacacatattaactattattttaatgcttagcaatgctaatttttagtgagaaacctaaggttacttaatttaacataacaagattttaagattttaaatcactaaaaaaattaaaattatgacacaggtacttcctctaattattttttagaggggtgtttcaagcacctatgttatatattgaarcctacagtttctgtaagccctatccttaagtcaaaacaaccttgatgttattgtgaacaagtacttagcataaatcctacccttaggcaaatttatatagtgattt

SEQ ID NO: 299592 - DNA, 614 bp, Homo sapiens
ctcacaacaacagcataagggaagtggaataaatgcagtcaaagtcccctgtacaccgcccttctctcttctgaccatagaatgttgaactaaatcatttaaccatttgcttgggaatgaaagtatctgaacagtagcaaccatgaatgtttcatctgtttttctaatagtcgtgtgatagagtttaaaagtccccaccaaatctcatattaaattgtaatccctaatgttacaggtggggcctggtgggaggtggttgaatcatggggatggattcctcatggttctgtgctgttcttgtcatggcgagtactcacgagatctggtggtttacatgtgaggcatatccctcccccatttttcttgttcctgcttgtaccatgggagatgcctgcttctctttaatatttcactattattgtaagcttctttagatgttaatgttgctacaaatttaactcaacttccttataaattacctgacaaaatgttttgtgtttcataaatatgataaataaatatattacgacattacaatatattacatcatttgyattatgacatcacaatttattatgatataattcacatgtattatgacatcaccatgtagt

SEQ ID NO: 299593 - DNA, 584 bp, Homo sapiens
taccaccctatatttttgggggttccactatttgcacagccagcacacctgggaaaacacagactcacccagcacaggctcttccctgaatctttctcttcctcagggcatcacttcatcagtcaaccaagtcatttgacagtggagaccgagtactccctaacacaaaaggtctcattcctgcatgcttttctcagaagtcggggaaacaagaaggtgtttttcggggacactagctgggaaatacactaagccttctacagttygagggctctaaccagcagatacagacttctcagtaggaatggataaggcagctgtcccaaacgtggagctccaccataccttgtctcatctcgtttaggcaagtttgagaggctgctctggaatatatctcgatggtggatgttgggaaacaacacaggctttcatgggattcaggcggtgtctgttgtgtaaagacagaagctgaatgctaaggatccacgctgtttttcttgtggtcagttgggttacctgtgtaggaccaagtccttttttactagggagctgaataaattctacagaacaaggtagaactccca

SEQ ID NO: 299594 - DNA, 633 bp, Homo sapiens
gtactttattgttaaaaatgctgacacagatatacacacacacaaaggtcacatgatgttggaaaaatagtgttaatagagtcgctcaatgtagggttgcaaaaaaccttcaatttgtaagaaattcaatatctatgaagcacaataaagtgcaataagacatggtatgcctatgtaacaaactattcactagtgatatactcagaaatcatacataaatgatatttacataggtataaaagtaattaacaagttatagtatgggtgggagataaaaattacaaygtgatttataaagtaaattaaaagggggacaaagcccaaaacattcctgaggagacagaatcagacctcctcagtgacctcatcttgttgatttgcaaacaagcaaaacataatgtgagggatattttgtgaatgcttgtattaaaaaacaacaacaacagaacttaagctttagttatcagaagtacccaagacgtgaatagtaatataggtctataaggtaaaccaaaaaagacaattttataactgcaaccaatcaaataattttaatattttgttcctgcattatttcaataccctcttacctctgacactttgccatttaaatgctaaacctcttgtggtctc

SEQ ID NO: 299595 - DNA, 585 bp, Homo sapiens
aagtagtagagtcagggagattatgtatcaaaaactctaagggccacctctaaggggaggctgactccctctctcagaggcttcaagtgaaaaaaatatcaaggattccttggctgctggaagaactgagctatgtaaatctgcccacataattccagtgaattttaactggaaaacatgactaggggatgttggggattttatcagctactggcagagagatgttatcattctagacaggagcatgaaggcagatgcttctaaattggcagccaacagaacctcaccwacagagttgaactttttggacatcagagagtaaaggcactcatgataaattctgccctgctactgtggcaaatggcagggaaaattgtctcacttacacatttctacctgttcctcacccaatttagaataatcccctctggcacttacggggcaggcaaggacaaaagcatcaaacctgaaaattgctactacagattctgatgtagaaacacaacaggacattgattgagctccaagagctccacccccattttatgtgatctgcctgcttttactgtcaccctgcccaaacag

SEQ ID NO: 299596 - DNA, 604 bp, Homo sapiens
taatgaaggcctggctacagcaagggcaatggaaatggaaggctgaagggaaaactgtgagacaaaatgcacrgataaaactagcaagccttgaagtttaacaagagaaagtttccataatttagaatactgtttagataaagaatataaaatagagattagagagaaaacaagacttgttgtgtctatgtttttctttgaacgaatattttttagtgtcagctagtacaatgcccccaccccatggcactgggagacaataataaatgaggtaaagaaatccttgccttcatgtatcttgtattcaatgtcaggtgtcctcaaacacctattgtaaagggccagatagcagatgtttaggttttcatgggcataggtgtctacctttgtagcactaaatcagctgacaactcagcatgtagatttctcaattaaacttttgtttatgcacactaaaatttaattgtatataattttcatgaatataccatgaaatactattcctctgttgatttttttcctctcagccagttaaaaacacacagaaaaactgttaacccacaggccaccgaaaagcaggcagtgggatggatttagcagacag

SEQ ID NO: 299597 - DNA, 634 bp, Homo sapiens
ttaattagtttgtttttattgcattttgggttcttggtcatgaaatccttgcctaagccaatgtctagaagggtttttccagtgttatcttctagaacgtttatagtttcaggtcttaggtttaagtattcattgatggacactttggttgatttcataacttggctattgtgaacagtgctgcaattaacatgggagtgcaggtatgtctttgacatactgatttcaaatcttttggtaaaatacccagaaactgaattgctggatcttacagtaattctattttaatttttggaggaaattccrtattgttttcaataatggctgtcctaattttcattttgaccagcagtatacaaaggttcccttttttttacatcctcaccaaaacttgctatttttttaattttcttgataatagtcattctaataagtgtgaagtgatatctcactctgcttttaattcacctctccccaaagaatagcaatgttgagcattttgtatgtatattagccatttctatgtcttcttttgagaaatatctattcatttcttgcccattttaaaaatatttatttatttgtataaattttaggggtacaagtacagttttgttacatagatatattctgc

SEQ ID NO: 299598 - DNA, 557 bp, Homo sapiens
ttcccttttttttacatcctcaccaaaacttgctatttttttaattttcttgataatagtcattctaataagtgtgaagtgatatctcactctgcttttaattcrcctctccccaaagaatagcaatgttgagcattttgtatgtatattagccatttctatgtcttcttttgagaaatatctattcatttcttgcccattttaaaaatatttatttatttgtataaattttaggggtacaagtacagttttgttacatagatatattctgcagtggtgaagtctgggcttttagtgtaacaatcacccaaacagcatacattgtacccattaagtaatttctcatccctcaccttcctcccacccatacgccattccgaatctctaacaattattattccgcaccttatgttcatgtgtacacattacttggctaccacttataagtgacaatatgctgtatttgactttctgattctgtgtgatttcactgaagataatggccttcagttccatccatgttgctgcaaaagacattatttcattcttttttattg

SEQ ID NO: 299599 - DNA, 631 bp, Homo sapiens
taggcagttttaattaaagctattagaaaaaataagataatttagattacatttgggaatgcataattatcttttaattcaataataaattcttaattttttttttttagatggagtctcgcactgtcacccaggctgaagtgcaatggcacgatctcagctcactgcaacttccacttcccagattcaagcgactctcctgcctcagctcctgagtagcaggaccaggtggatcacctgaggtcaggagattgagaccagcctggccaacatggcgaaatcctgtgtctaccaaaaatataaaaaattaaaaaattcttaatgctttaatgagggaatgaaggatacyattctcaataacaaaactatttgctgagtgtatgcagtgggctaggcactgtaataagtgcttatgtaatttagctttttcaatattaatcaaacagcaactctattgtattatttttaactgtttttacagagaaattgaagagaattttacagagaagaaaacttgcctaagaaactcagttgactaatattagaactatggctacaggattgataaagtttcaagaactacagagaatccaattagaagatatttaaatatattaaaaggaattttaaa

SEQ ID NO: 299600 - DNA, 570 bp, Homo sapiens
aaggaagaattacaaaaatatcaataattrttttaaaaatctaaagtagccaaaatgcaaaatatacctttctgtatgaagtgctcttctcaattacccaaaaatttcttactaataaaccatggcatttacgcattgataatgattttaactcattatgaatgatgccaaggcctgtctcatatcttgtgcactcatctaccatacattttttctaataaacagattttaattttaaaaaataattttcctggttataggaactgttctttttcttctttgacagttgaaacttgtacatactttaatttaggcaacaatattttcaacatgaattttatacttttgcaaaaactctaatactaactctatctcagtataggtaattaaattttggggaattttcatttgcttttttgtgtgttgcttgctcttttcttcagcatttgaaataatggtcctaaaagtcattatctttattacactgagcattttcccaaaggaaaattttcttattcaaaggaattatgaaaacatgcatcccaaagctaactgatctcctgatgacag

SEQ ID NO: 299601 - DNA, 570 bp, Homo sapiens
aaggaagaattacaaaaatatcaataattattttaaaaatctaaagtagccaaaatgcaaaatatamctttctgtatgaagtgctcttctcaattacccaaaaatttcttactaataaaccatggcatttacgcattgataatgattttaactcattatgaatgatgccaaggcctgtctcatatcttgtgcactcatctaccatacattttttctaataaacagattttaattttaaaaaataattttcctggttataggaactgttctttttcttctttgacagttgaaacttgtacatactttaatttaggcaacaatattttcaacatgaattttatacttttgcaaaaactctaatactaactctatctcagtataggtaattaaattttggggaattttcatttgcttttttgtgtgttgcttgctcttttcttcagcatttgaaataatggtcctaaaagtcattatctttattacactgagcattttcccaaaggaaaattttcttattcaaaggaattatgaaaacatgcatcccaaagctaactgatctcctgatgacag

SEQ ID NO: 299602 - DNA, 570 bp, Homo sapiens
aaggaagaattacaaaaatatcaataattattttaaaaatctaaagtagccaaaatgcaaaatatacctttctgtatgaagtgctcttctcaattacccaaaaatttcttactaataaaccatggcatttacgcattgataatgattttaactcattatgaatgatgccaaggcctgtctcatatcttgtgcactcatctaccatacattttttctaataaacagattttaattttaaaaaataattttcctggttataggaactgttctttttcttctttgacagttgaaacttgtacatactttaatttaggcaacaatattttcaacatgaattttatacttttgcaaaaactctaatactaactctatctcagtatargtaattaaattttggggaattttcatttgcttttttgtgtgttgcttgctcttttcttcagcatttgaaataatggtcctaaaagtcattatctttattacactgagcattttcccaaaggaaaattttcttattcaaaggaattatgaaaacatgcatcccaaagctaactgatctcctgatgacag

SEQ ID NO: 299603 - DNA, 543 bp, Homo sapiens
ttcacaatctctgagaggagttaacaacgaattgctggtagcagaagagtggtaagattaaggagaggaaaaaaaatgagaccaaacaccatcatattactttcttttattaactccatgggccaacatattgatgattgctaatgagatatcacattcctttattctttagatttaatatccttattccagcctctcacatcctctaaaatccagaatcacttgatccctgtttcaagtttcagatacctgtggttacaatactctgaaaacctaccttactacttcctgataagtgtggaggaaacaaagggagaaaaattctcaatcttgctttcwaagtttaagtgaagtgtagaagtgagagtatatatttatatctgccattccaagatggaacttagtagttagtaggcaatgtatttattcaacaaaagtgtattgaataaacttttcttgaattagtatggaatattttgttgaataaatgtggaaagtgctgagaatacaatgtcgaacctagcctttaagcacacagaactg

SEQ ID NO: 299604 - DNA, 564 bp, Homo sapiens
cttttggcagtgattaggtcatgtgggttccaccttcttgagtgggatgagcagacttataaaagggcttgatgttgaaggtattgcccccatgcccttctgtccctcctgccatgtgagtgcacagtgtttgtcctctctgggggatgcagcaacaagacaccttctcagaaggagacacaagatccctcaccagattctgaatttactagtgccttgaatttggactatccaaagtccaaagttctccagaaytgtgagaaatgcattcttgttcattaaaatttacccaagtccaggcatggtgcctcacgcctataatcccagaatctcggaaggccaaagtgaaaggatcacttgagcccaggaggccgagaccaccccaggtaacatagtaagaccctatctctacaaaacgttaaaacattagccaggcatagtggtgtgtgcttattgtcccagctacttgggaacctgaagtggaaggatcacctaagcccaggaggtcaaggctacagtgagtcgcgatggcaccactgcactccagcctggatgacagagcaa

SEQ ID NO: 299605 - DNA, 564 bp, Homo sapiens
cttttggcagtgattaggtcatgtgggttccaccttcttgagtgggatgagcagacttataaaagggcttgatgttgaaggtattgcccccatgcccttctgtccctcctgccatgtgagtgcacagtgtttgtcctctctgggggatgcagcaacaagacaccttctcagaaggagacacaagatccctcaccagattctgaatttactagtgccttgaatttggactatccaaagtccaaagttctccagaactgtgagaaatgcattcttgttcattaaaatttacccaagtccaggcatggtgyctcacgcctataatcccagaatctcggaaggccaaagtgaaaggatcacttgagcccaggaggccgagaccaccccaggtaacatagtaagaccctatctctacaaaacgttaaaacattagccaggcatagtggtgtgtgcttattgtcccagctacttgggaacctgaagtggaaggatcacctaagcccaggaggtcaaggctacagtgagtcgcgatggcaccactgcactccagcctggatgacagagcaa

SEQ ID NO: 299606 - DNA, 517 bp, Homo sapiens
ctttctagcctcaggtgtctatcattctactctctacctccatataggatccactttttttgctcacatttrtgagtgagaatatgcaatatttgtctttctgtgcttggcttattccacttaatagaaagtccttcaggtacatccaggttgctgtgaatgacagaatttcattcttttatatgctgaatagtattacgttgcgtaaacagaatggaaattatataacacattttctttatacattaatccgttgatgaacacttaggttgattccatagcttagccattgtgaatagtgctgtgtttaacacggtggtgcaaatatcactttgatatactgatttctttttctttgtctaaatacccagtagtagaattgtcggatagtatagtagttctattttgatttttctgagacatttccataccgtttttatagtgtctgtactaatttacattcccacaaagagtgatatactatgaatgatttcttttaaacttgttaaatttttta

SEQ ID NO: 299607 - DNA, 587 bp, Homo sapiens
tatttgcctatagaacaacatacacaagcacaagtattcctctatcaccacaagggaaggaatgcttttttggttttctcactaattatatcgagctccaagaacagcatctggaacatatataaataaatagctccagaaatagttactgaatagttatttctgacatatcacttctctccaccaacctcttctttagagaaaaaattggatatagcatttgatgttgcaatatattgtgattaatacgtgatttggatgtatggaagaataatratatacagaagaacatcgtatagtatctatggaaaagtgaaatgtatgtcacataagttttgcataaatattttttaatatattcagctttgtcgcaagctaaaatacccactttcttgaggatttatattgagtactgaaatggggaggcgtgaggctttttcatattgttagagaatgagctttgtaagcaatattgccatgtttttgataaagtccatgaccgtaatcacatatttccttggactgaaaaattggctataaaaacaaaagagcagtttacaccaaataataactattccccaataaat

SEQ ID NO: 299608 - DNA, 636 bp, Homo sapiens
tctctcatcactttgttgttgktttttaataggccattttaaggacttaatctaccatcactttgtctacatcttagtatgtagaaaattattactttctattgtgtaattccttttgtttgcctgttttctccactcccaacatataacatatatcctataatttattctgattgttgacaattgtgacagcagataaggtatccttactttctgctgattctcagccacaattgtatcattatataatgagaggactatgttggaaatcatatagctctctagagtttgagaccaattaacaccacaaccagttttccagtgtgtgtatggggtgattcaaaaacagcaattggaatctcttcactaggcagaagattgtctaatcagggttcttgcttccttttgtggagatcttgtaatcaatcatagatacattatttcaatttagtaatgaaataattttgtatgtgctccaaggatgggatagagaccataaaatgctcaatttataattgattatattgggaaaaactaactaaattgaacctgatgttcaatttttgaacttacaaaagtccagtagaagttgcagtcattgtttaaaatttaaaatattcaaggccattaaaattt

SEQ ID NO: 299609 - DNA, 523 bp, Homo sapiens
aatctgcattacaggtggtcctgaaaaatagtagtaaatagaaatattttcatcagctaatttggagccatatcctggagcattcactttgagtggaggaaaaagttgttaatgcaatggtgtatagggccttcggggcagccacaaatggcttggaaagataattacagtcttggaaggtgcaagggtagaagaaaaaactcaagaaattctgaaagatgyatttatggatggatctctgctagtgggttcaaaggaagcaggtctttgtgtcccatattaactcagctattgaatgtctgacttgtcatcagcaggaaccagtgttgaagccacattagagacacattcgccctattatataccatgttactcagaagttacagaccttagagaatactggagtggcctcttagacatgtaaatatgacaacaacactgggataacaccctataggaggttgttgtatactcccagatgacatacatacattgaactaatagccattacaagatgctatgt

SEQ ID NO: 299610 - DNA, 590 bp, Homo sapiens
gtgagtgtgtgtgtgtgtgtgtgtgtgtgtgtgtgtacagaactaacgttttctgggaaagtatcccgtgccagacactactcctatgtagaatgtgcttttattttatcttttrttttaccatgtaaccctcatagtcacctctctaagaagtgtgattaaaagaagcagatcctcaaagaaaatgtgcacttagacctggaggcagaatgtgtgggatgggaagatatttactctttgtaggtataaagcagctataacgtctttcctattgtctttcagaacctagaacagactaacacagaggagaggaaggtctttgtagagacttgatgacaaccaaatgtaaacatgtatgttgtttatttctttttgccttgataaaacagaaaacagagacatcctgtttctgggtcaccaagctcagagctattaggacaaaagaagcaattctgtatctctcttgctgaaatcattttctgcatttagtctcagattgctaatggccagagaggcgaattgtttgtgcagcttttagaaataaagaattgcttctctattgtcagttttcccactagatactgcctaag

SEQ ID NO: 299611 - DNA, 600 bp, Homo sapiens
gcctagaacagttttcagaatacagaagatgctaaatacctgattactgaatgaacaaatgaagaatagaacrcacaagcaggtgccaagaaacagtccatttccaaagaactgagttcctaagctgattccaaggacattctttggtccttttactcacctaacaaatccttaccctctaggattcacaaaatgctataggatataccaatatattttgggaatatcttttcttcattgcctctttctaaatatgggtgttttttagttgtcttcttttttcttccattttgtatgtctttttcttttttgctgtcattttaagatcacaggcagtatttcattccctcatgtgtgaatacagcttcaaagaccctctcaatctccttattttgactgagtctgtttctataggacatcagattccattttttggaagaatatacgaagttcaatagactcatcatgtactaagcaattattgggccatgtattcaaaacaatgatgcattagctttgaaaacacttacatggattagaataaagttgtggcttccacaatcaacagtaattcctataattttaaaaaattctaaatat

SEQ ID NO: 299612 - DNA, 626 bp, Homo sapiens
gttgtgatgataatgtctctactcttacacccttgcggaaattcttcttcattacttttcttagtgtaacatttaatcatacctgacaagtaaaactcttgcagcatcaaagacaccaggataaactgaaagctcagtgaaggcagatgtttgtctaattttgttcactgaaaaatactcaatgcctagaacagttttcagaatacagaagatgctaaatacctgattactgaatgaacaaatgaagaatagaacgcacaagcaggtgccaagaaacagtccatttccaaagaactgagttcctaagctgattccaaggacattctttggtccttttactcacctaacaaatccttaccctctaggattcacaaaatgctataggatataccartatattttgggaatatcttttcttcattgcctctttctaaatatgggtgttttttagttgtcttcttttttcttccattttgtatgtctttttcttttttgctgtcattttaagatcacaggcagtatttcattccctcatgtgtgaatacagcttcaaagaccctctcaatctccttattttgactgagtctgtttctataggacatcagattccattttttggaagaata

SEQ ID NO: 299613 - DNA, 616 bp, Homo sapiens
ttcacctaagtgtctggacatgtcggacagggtcactttagagtgaggataagtttttttgttagagataaagtcatttctacaggtaaagtcagcatgtgagaattaggagtgtagggacagagatgcaaaattttttaaagcgtcaactaatgtaaaactagttttaacaatgtttttaaagcagaactatgaagttgaaggagtagtaattagaaacagaaggggcagagaaaatggagaagaagaaagaccttaacatttaaaataaataaataaattgaatttgaaatatctttctggtttgcaggtactcttcatgagggttcagtagcgataaccaaaccactctacatatttcaaccacaaaaaaattaactcatgtaatttggtgtttaagaattcattgtaatttgtcagagagagagagagagttcttgtagtatggtcttctttggtctccccagaagggtccccggaatcttttaaaacagacccagcagagaggggaacacctggggcaccactaagawggtatcagaaagctaccacaggactttccaagtttaaaaattcaccactgaatttttgattctacaatatgaaatgattgcag

SEQ ID NO: 299614 - DNA, 542 bp, Homo sapiens
agttgtgcacttttaggtatttgttacagcggcactccatttctcagtaccaaattctgtttaatcagctcaaactgccacaacaaaataccatagactgggtgacttaaacaagatacatttatttcctcacaggctggaaggttctggcaagagctatcttcctggcttgtagacaatggcyttctcactgtgtcctcatttgacacagacacagagagagagagagagagcaccctcaagctctactgatgtcttttatgagagtaggattctcagctaaacataattatctcctatagagataattattccccatctccaaataccatcacattgggggttaggtcttcaatatatgaattttggtgtgagacaattcggtccatagcaccgataactgagtaatgaaaaataattagactttttgggagttatatattttctgtatatctacactaattttggaagaccaaaacactaccttggtgtacttgtcagagaaggggcagatgacatttaagagatcaattgagttttag

SEQ ID NO: 299615 - DNA, 549 bp, Homo sapiens
acacacatattttctaccctaaattcttacattttatatatatatatgttgcatatatatatgtggcatatacatatgttgcatatttgtatacatacgcactacatattttctactcggaacttacattttatatatatatatatgttgcatatatatatacacacatacgtttctacacaaaagctttaaataacattgcattgaatgcttttaactttattttgcttcagcatccattttgagtgcgggtttagctttctcaccactgcctttaataggaccattcaggcatttgtccacaaatttaaagtgactcacgctgtacttcacagcatatgctgagagtggcctcttctctctctytctgagaagcaaggctctatgaactccgcatttgtggcctccaggaatgctatgcaccctccatggtctgtatgtactaacaactcttaaacattcaccctatggtagtgccattgaagccttgtctccagtttgactccagttggtgaggctaccataagggcacccaggcaggtggatgcc

SEQ ID NO: 299616 - DNA, 524 bp, Homo sapiens
ctaacacccactcccaggataaaaatagctattatctaaagctgtgtaaacaagtgccttaaaacatagtgacttaaaatagaaaacacgatttttgcatattggcaagttgagagccaaatcacaaatgaaatcccattcacaactgctgtaaaaagaataaagtacctaggcagaaagctaaatagggaggtgaaagatctctataaggagactacaaaccactgctgcaagatatcagaaatgacaaaaacaaatggaaaaacattcaatgctcatggatagaagaatcaatatcattaaaatggccatcctgctcaaagcaatgtatagattcaatgctattcctctgaaactatcactgacattcttcacagaaatggagaaaactactctaaaattcatatggaacaaaaaaagagcccsaatggccaaggccattttatctacaattttactaagccaaaagaacaaagctggaggcatcatgctaccagacttcatgtagtatggtagctactata

SEQ ID NO: 299617 - DNA, 542 bp, Homo sapiens
agttgtgcacttttaggtatttgttacagcggcactccatttctcagtaccaaattctgtttaatcagctcaaactgccacaacaaaataccatagactgggtgacttaaacaagatacatttatttcctcacaggctggaaggttctggcaagagctatcttcctggcttgtagacaatggctttctcactgtgtcctcatttgacacagacacagagagagagagagagagcaccctcaagctctactgatgtcttttatgagagtaggattctcagctaaacataattatctyctatagagataattattccccatctccaaataccatcacattgggggttaggtcttcaatatatgaattttggtgtgagacaattcggtccatagcaccgataactgagtaatgaaaaataattagactttttgggagttatatattttctgtatatctacactaattttggaagaccaaaacactaccttggtgtacttgtcagagaaggggcagatgacatttaagagatcaattgagttttag

SEQ ID NO: 299618 - DNA, 576 bp, Homo sapiens
aaaatagaaatctatatcaagaagatttcttgaaactacaaaaatacattgaaattaaacaacttgttcctgaatgactcctgtgtgaacatcaaaatgaaggcagaaattcaaaaaattctttgaaattaataaaaatagggacacaaaatacaaaaatctctgggatacagttaaagcagtgttaagagtgtatagccataaacaccatcatcaaaaagtttgaaaaaatctcaatttcaamatcgaactttgcacctaaaagaactaggaaataaaaaagaaccacccaacccccaagtcagcagaagaaaaaaaataactaaaatgaacgaagaactaagtgaaatcgagatgcaaaaatccataaaaagatcaatgaattgaagcactggttctttgaaagtataaacaagattgattgactgctagctagtttaacaaagaaaaagagagagaatattcaaagaagtacaatcagaaatgacaaagatgtcattacaactgatcccacagaaatataaaagaccctcagataatactatgaataactctatgaacacaaattggaaaatc

SEQ ID NO: 299619 - DNA, 441 bp, Homo sapiens
aaaagactccctattcaaataaatgtgctgggataactggttagacatatgcagacaaatgaaatgggacttttgcaatatacaaaaattaacttaagatggatgaaagatttaatataagaccttaaccgctaaaaatcctgaaagacaacctagtaaatactcttctcagtattggccttggcaaagaatttttggctgtccccaaagcaatttcaataaaaacaaaaatagagaagtgggatctaattaaactaaagagcttctgcacagcaaaaaataaacagactattattattgacagaataaacaggcaacctacagaatggaagaggttgttcacaaactacgcattctacaaactcctaatattcattaatatagtttgaatttgtgtccctacccaartctcatgtcaaattggaggagggacctggtaga

SEQ ID NO: 299620 - DNA, 583 bp, Homo sapiens
tagtttgaatttgtgtccctacccaagtctcatgtcaaattggaggagggacctggtagaaggtgattggataatgggatggattgcctccttgctgtactcatgatatygagtgagctcttacgagatctgacgatttaaaagtatgtaactcttctccctttattctctctttcctgttctgccatggtcaggcatatttgtttcctctttgccttccacctcgcttgtaagtttcctaaggtctcctagccatgcttcctgtatgtcctgcagaactatgagtcaatttcttcataatttacccagtctcatgtagttctttaaagcagtgtgagaacacattaatacattcagaatctataggaatcttaaacaaataaacaagcaaaaaacaaataaccttattaaaaatgagcaaaagacttgaacagacacttctcaaaagaagacatataagaagccaacaaacatatgaaataatgctcagtgtcaccatatcagagaaatgtaagtcaaaaccacaatgagatatcagcttacacaagtctgaatggctactattaaaaagttaaaaaaaaca

SEQ ID NO: 299621 - DNA, 592 bp, Homo sapiens
aaagtgcttaggggacctcagaggaaaagaacagaggaaacaccagctaacaaacaaatgaaaaaacattttctaaaagacaatgtgttactttgtaaagcagggcagtgccacttgaggggcattgccccttgaagaaatggcgggaactcatagttggcagtagaacttcttaaacctggtaagttcatagaagcataagagatatgacctctcagatatgccaagtattaatgaaagaatatgaaagagtaaaacagaagggttggcctagacctggagagaacaacccttggcatgaagactaatctggctcaattccacttcaaacagagactcttaagaatagttagtcaacaaaatccgattcttacaaatatgcatagcagaaagaatttgcataacatccatacaaagacactaaaagagtgaaaagagtctgtgtgagagagagtaagaaaactagagataatagctaaaagcttagtatmtatccaggagaatgattctgaacagtgaaaatcgagatgtgttctagtaatattattggacatcagggagacttctttttttctatttgtaaagaagtgca

SEQ ID NO: 299622 - DNA, 552 bp, Homo sapiens
tcaaaagaaaataagcaagtaaccaacaaacataagaaataatgctcagcatcaccggtcatcagagacatgcaaatcaaaactacaatgagatactatctcacaccagacaggatggctattatgaaaaaygtcaaaaacgacagatgctgatgaagctgcagagaaaaggaaatgcttacacattgttggtgggaatataaattagttcagccactgtgggaaacagtctggagatttctcaaagaacttcaaagagagctaccatttgattcagcagttgcattactcagtatatactcaaagaaaaataaatcattctcccaaaaaaacacatgcacttgtttgttcatcactgtgctcctcacagtagcaaagagatggaatcaacctaagtgcccatcaactgtggactggataaagaaagtgtggtaaatatacactatggaatactatgtagccataaacaaaatgaaatcatgtcctttgcagccacatggttgcaactggaggccataatcctaaacatataacaaagaaacagaaaaccaa

SEQ ID NO: 299623 - DNA, 497 bp, Homo sapiens
catgaataaaatagttcaacacagagcaaggggcacttcaaaattactggctaaaagagaaatgtgaaaaggaaagtctaaacaaaagaaatagatggcatggacagatttttctatcctataatgaacaagttggttaatgatcctccctggttcttgggaagaaagcctctaaatctttggggttttaaaattattagtactgtctttgttagtcataatgtgacctaatagtttatgctaataaagtggctcctggtgggcccgtaggtagtttatgctaatgagattcaggattggggctgaccatgtcagaaagacaarccaaatgattagacagttggggctttcagacatgaaattatcagcctaaactcccgggagtgaagaaggctggagactgagttaaatcttgtggccaataactcattcagtcatgcctacatgatgaaaccccacaaaatctctggacactgaaacttgggtgaggtttgctg

SEQ ID NO: 299624 - DNA, 481 bp, Homo sapiens
agctagcatcgatgtatttcttaatatatactagtgcttgtgcttagtccatcattccatcctatttaatttttacaaccattctgtgargtacttttatctcccttttaaagttaaagaagcaaaagattctaaaagcttgttaaaggacattgtataagaccacgtaactagtaaggggtagaatctgaattcaaatctaggtcttttatattttaaacttgtactattactatggtcaccattatcttattctaagtccactataaatgctgtctattggaattgtattataaacaatactatactgtatttttatgtattttattctactctgtaggcatgtattgtagctacaagccaagtaagtgattgaagacagtagccatggtaattaaagggctttttagtgtattttattttgctgtgccttggtattcaagaatatgtggcaaagctaatgcctgtattttctttcaag

SEQ ID NO: 299625 - DNA, 481 bp, Homo sapiens
agctagcatcgatgtatttcttaatatatactagtgcttgtgcttagtccatcattccatcctatttaatttttacaaccattctgtgaggtacttttatctcccttttaaagttaaagaagcaaaagattctaaaagcttgttaaaggacattgtwtaagaccacgtaactagtaaggggtagaatctgaattcaaatctaggtcttttatattttaaacttgtactattactatggtcaccattatcttattctaagtccactataaatgctgtctattggaattgtattataaacaatactatactgtatttttatgtattttattctactctgtaggcatgtattgtagctacaagccaagtaagtgattgaagacagtagccatggtaattaaagggctttttagtgtattttattttgctgtgccttggtattcaagaatatgtggcaaagctaatgcctgtattttctttcaag

SEQ ID NO: 299626 - DNA, 603 bp, Homo sapiens
tttgctcacacaccccttgccactctgctcctggctcgtccttggcaggtgtcgatctgggccaacagtgggagccgagtgcagcctgccaggctgagtgggtggaatgagcccagtgatccagagcaaaattcaggcaaaggtgccactggccacagaggtttctgactggtgaaatgacaccttaaacatccagtaacattgacatgcattctccattgttttagatattaatggagtattaaactaaaaaatggtttgaaatgaatacctgcttccaatagcatgggaagttaaakgttgttggggagggaaagctacatccaaataaaatagaaattaacttgggctcagttgtatgattaatgattataattttaatcagaattcagaggacagaaagatcagtgtagaatagagtgttgaaacaaggattcatgcagaaagcaaggttttatcttaggacctttgatcttgtgatctaatagtccagcatgaagtatatgataaattctaactgatatactgaatgaaaatattttccagtacatcaattacatgagtgaatatctagacaggaacttgaataattgcatgtctgaa

SEQ ID NO: 299627 - DNA, 505 bp, Homo sapiens
ttggttttcctttccatttggtgactaatgttaataattcatttatttttaatttgtacagctttttccctttggctctgacatttttagttactaattaggaattaatgtaaggtgtgtggggacttaataaggactttcataatgttgatgaatacatatttgctagggaattagttaatattattctagccacagtgtgaatacaatctgcgtaatccacacattgccctcatgtagacacagtcctgatacttgtttccattgtttctttaaaactcagtgaatctgtgttatcaaagataatttattttcaagttacacacaataccacacttcagaaattaaatagatgagtgagcatcactgttcaggtagttcttcagatggcaattttaaaaawtttttgtgggtacagagtaggtgtatgtattttgtgggtacatgagatgttttgatacagtcatgaaatatgaaataagaacatcatggagaatgggttatc

SEQ ID NO: 299628 - DNA, 589 bp, Homo sapiens
ttgcatctcttcctctgtgtctctctgtttaccacggaggtggttaaccaataaaataaatttttagacaaaatgmacaagaaaataaaaacaaataatttacactgagatgaacaaaagtttaataacatataaaaaggaaagtttatacaatttaggagatggctttctgcaaaccagaaagagagccctcaccgggaaccaattacccagcaccctcatcttggactttccagcctccaaaattgtgagtaataagtgtttgttttctaagccacctaatttacggtaatttgttattgtagccccagatcactaagacattcattaatttaaataattttcctgatataaccaattgtttaatttgttttgtttataaatcattattgaaatatcagctctaaaattatttataaatctacagattttcttttaacttaattcagcacttaaaaatatatatacagtcaacaccactttcttcctggttcacttaattttattgtattgtattccttttctaatctatttaaatattttagtttgtttaaatgacttaaatgcttaaccagtataagttccaagt

SEQ ID NO: 299629 - DNA, 429 bp, Homo sapiens
ttcttttcagtttttccacatcagatcttaaaatctttcactgtagatttacagtggtctggaaagacttgctttgtattactctgaatactgtaaaatattcatgaatcagcatttttcatgttaaaccraagttgtaaaattgtctgaactatggcaataattaatatcttactacaaaagatatttgtctctaaccctttaagtgtgattacttttatgtctcagccatatgttagtaagcaaagatggcacatatttccaggtaaaggaccataatcagtattcgttaatatctttagcttgtcacataataactaaatgagattaattttaatgattaaaattttaagtcactttatattgtgttaaaatgtttacaaaatgacctcacaattctatgttctccttcagagtcctcatgagcaa

SEQ ID NO: 299630 - DNA, 580 bp, Homo sapiens
ttacatacttaatttgcaagatattttacatcatgtgttttaggttaaagatcagagataacgttgtaagtacattattctagaaaacaaagactgatacatctaagtaatcttaaattaatgtaaaaaatgaggtgactatagagaacaatgaatttaatttaataaatacagttgtcaaaggtgaataatttagaacttccaactcactttttctcttaattagtaacaaaaatataaaagactgttgaacatttcctacatactgtacttaatgctcagaatagatttaaaaaaagacagaaactttccatttcttattaaactgtagaaaacagatataaaaacagaagtttacatataattattcacatactttcaattgggcaatgatgaartgactttttaatcttaaaccagaagaataaactgggatttaatgaagaaagatttggcataggaagaaggcagatgctttctagagagaggatataacataaaggaatattgggaacaggatgaaactattgattcaaagactagaaatagattttaaaaaggtgaatcctacagagaaaaa

SEQ ID NO: 299631 - DNA, 580 bp, Homo sapiens
ttacatacttaatttgcaagatattttacatcatgtgttttaggttaaagatcagagataacgttgtaagtacattattctagaaaacaaagactgatacatctaagtaatcttaaattaatgtaaaaaatgaggtgactatagagaacaatgaatttaatttaataaatacagttgtcaaaggtgaataatttagaacttccaactcactttttctcttaattagtaacaaaaatataaaagactgttgaacatttcctacatactgtacttaatgctcagaatagatttaaaaaaagacagaaactttccatttcttattaaactgtagaaaacagatataaaaacagaagtttacatataattattcacatactttcaattgggcaatgatgaaatgactttttaatcttaaaccagaagaataaactgggatttaatgaagaaagatttggcataggaagraggcagatgctttctagagagaggatataacataaaggaatattgggaacaggatgaaactattgattcaaagactagaaatagattttaaaaaggtgaatcctacagagaaaaa

SEQ ID NO: 299632 - DNA, 589 bp, Homo sapiens
tactctttactgaatcaaagaacacaagaagaaggaaatgtatgtgtgtgcatgaaggaaaaggtcttggactcaattttagaacatggctattcaaagaagccaatgaaatactcaaaaagagatttaataaataatatatttaatgattggttattgaatttttgagtttttaagacaaaaaacatacaaaataactctcatgaagtttatattgaagtgaaggtaaaaaaacaatgaataacaaagtgaatatgtagagtgaaatggttgacttcagaataatgctgatttgacatttattggctcatctctgcaaggtaagtcctgagatcagacaatatgactcactcaaggatgaagccttaatactgagctctgtacatttttctatttaatatcataatcagtctcttaagatgttaaagttcttcaggataaaaattttaaccactgctttatttagggtcttggaaggaaatgctgacacagtttgggggcaaaaagaaccttttagaatattccagggtasgttattagaacccacttttcccaagtcaggtcatgataagactcaatgttaattatt

SEQ ID NO: 299633 - DNA, 637 bp, Homo sapiens
ctctaacttcctgggcatttgactgggctgcctcctgccactctcaattactgtatcctttatattcagagcttgggttctttctttagtcatatcttccctgaaaccctaataaatttgactcttctccaaaattgccatttactaagtttctcggattttcctatctgagagtaaaactttggcaggattctaccaccatctcaaaatccagctataggattcaggttagggaacaagacacagatataaaagtactgtgtatgtgcrtgctcctttccctttcaaaatctttctctcctcctgagtagttcagatggtataattttgggaggcagcaggaatgttgtgcaggcaacaattcagatgatatcatatactttaaaatcttcttaaatattggcccctgcttttaaaatttggattaaaataaaagagaatgttatggaataattatatgactttttttgctccctctttattatcttctttaactgttccctagagtaagtcagttataagtgtggcacatgggattttagtttttccaagagtgttgttgtcacaaaatccagcaagcaaaatggcacatattttagattctgagatcaaaagtaaccatctgtgtttgaaacag

SEQ ID NO: 299634 - DNA, 578 bp, Homo sapiens
gattccaggtgaggccaggatatgcaagaagtatgtagcaaatgctccctaaatatgatggtagagcaacctatattaaaatggtggtataatgtgaaaacatggagaatagtggaggtcagttatgagaaaactcatcattttcaagttatgctctagttgtatcaggcttcagagtgccataatagaacatccagaatttcctgtgactcaaactggagtaaaaaaaaaaaagttcagaattttaaaggatgtcttgttaagtatgctgggggtcctgaagataggaggagaagatcctcrgtgaatcaaataaactgttctcctcaggagatctacagcactacaaagctaggaggggctgagttcctgtctgcagataatccatttgtattaatccattttctgttgcctataacagaatacttaagatagggaaatttataaagaaaatgaatttatttcttacagttagggaggataggaagtccagggttgaggggcacttctggtagaggccttcttcttggtggggactctgaagagttccaaagttggcacagagcatcacatggcaa

SEQ ID NO: 299635 - DNA, 589 bp, Homo sapiens
ctgtctgcagataatccatttgtattaatccattttctgttgcctataacagaatacttaagatagggaaatttataaagaaaatgaatttatttcttacagttagggaggataggaagtccagggttgaggggcacttctggtagaggccttcttcttggtggggactctgaagagttccaaagttggcacagagcatcacatggcaaggaacctgaatatgctagctcaggtttgtcttcctcttgttataaagctccaagttccactcccgtaataacccattaatccattaatccaagaaagaattmattcattcatgagggcagatccctcatgatccaatcatcttttgaagttcccacctttcaatactgccacattggggattaagtttccaacacttgaagtttgggggacacatttaaaccataacaccattttatttatttcaaatataataattcatacttatctatactaggttagaggagagcatagaaccttgacaaaataggacagaaagtaggcattcccattttaatcaccaatatttcgtatttttcattgtctttcagaaaagagaaac

SEQ ID NO: 299636 - DNA, 547 bp, Homo sapiens
atgaaatattaaaagtttaaaagaaactgataaaatattagatacttcaaattttttaatatttttctatggtcgaataattgttttaatgttattttatacaaaaactaatttcaaaaatatatattctaaaataaaaattgtatttatctctatataaagataagaataatgttattatctgagcattaaggtgacactgaagtggtagtacacattattgccaacacttagaaaactgtgtctactatgttccactgaagtttacgttcattttttcatcacgaaataaatactttgtttaatgttaaatgttttgtaagrccttaaaataaaaactagaagattatatttaaagttccaattttcaaatgaacaaatcttctgaaattgttattttgaatgcatagattgaaaaaataagattaacagttattctgtttgaaaatctgatgaggctgatatgcagttgctagcctctaattttaactaggatgttccttctcataaagcaaactcaataaaatctactgcttcatttttttgt

SEQ ID NO: 299637 - DNA, 529 bp, Homo sapiens
acaatgccccttgtgatatgatgttcctttttctagaagattatatctagatctagatatgcagtccaactttagcatgagttacaagtctggtgtgttgtagtagcatctcctcagaaacayagcatcaggcacatacatcagtttggtttcaggttgtcgcactaaataaaaagaccttcctgtggacatctacaggagtggctcacacaaatgagtctccaatggtgatttgcttccataattcagagccctagaaagggtggctttaacctacccatctacagtgttcaaattgacaggccaaacagtctattcaaaaagcccaggaaattgagtcctgtacactaagtgtagcaactatgtccatttttgtttctatgtagttgtctctgagccctaacagctacagcagctcagtagacattgggttcagcttaacctcacaagggggcagaaggatttagaagaacctctgttcctatgtaaacgtaattaaataaatggtgcttaacagaagctcacaaca

SEQ ID NO: 299638 - DNA, 529 bp, Homo sapiens
acaatgccccttgtgatatgatgttcctttttctagaagattatatctagatctagatatgcagtccaactttagcatgagttacaagtctggtgtgttgtagtagcatctcctcagaaacatagcatcaggcacatacatcagtttggtttcaggttgtcgcactaaataaaaagaccttcctgtggacatctacaggagtggctcacacaaatgagtctccaatggtgatttgcttccataattcagagccctagaaagggtggctttaacctacccatctacagtgttcaaattgacaggccaaacagtctattcaaaaagcccaggaaattgagtcctgtacactaagtgtagcaactatgtccatttttgtttctatgtagttgtctctgagccctaacagctacagcagctcagtagacattgggttcagcttaacctcacaagrgggcagaaggatttagaagaacctctgttcctatgtaaacgtaattaaataaatggtgcttaacagaagctcacaaca

SEQ ID NO: 299639 - DNA, 617 bp, Homo sapiens
ctaaattttacataaagcttaatgcattctttatttttttatgtatttcttggaaaattatctttaaaatgaccatataatataaaaatgtattttcattatgtttatgttgttttacaytgtaaaataattgaacaattttttaaaagttttagtcagagacctcctagaactgtttatgtcatgctaatttccatgaacatgtatatcaaaattacctaggcacatgatttaaagctatatctatattatttttgtgtgtataaaattagagaatataggataaagtgttactataaccttcccatgccattcaagcatatatgaatctcactttctaaatattatataaaaataatagtaactgtattttaattgatgtcaatataaatgagaaataactttaatacaggttattatatgtttttaaaagtattcactatgagccttaatgtctcatagaagagggaaattagtctatcattatttgcacatcatgtttcagaaattaagttagataattagtatctactagctccttgatccatcacataggtatttgatctcatcacatgggaagagaaataattatcttgcataattatcttgaatatata

SEQ ID NO: 299640 - DNA, 616 bp, Homo sapiens
catatacaccatggaataatatatgcagccataaaaaataatgagttcatgtcctttgcagggacatggatgaagctggaaactatcattctcagcaaactaacacaggaaaggaaaaccaaataccacatgttctcattcgtaagtgggagctgaaaaatgagtacacatggacacagggaggtgaacatcacacaccagggcctgtcagggggtaggagaaaaggggagggagaacattaggacaaacaactaattcatgtggagcctaaaacctaaatgatgggttgatggggtgcagcaaaccaccatgacacatgtatacctatgtaacaaacctgcatgttcagyacatgtatcccagaacttaaagtaaaaacataaaaaataaaaataaaaaaatatgctcatgatattctttgtagtttttaaaaaaataatacatgtataaatattcatagaaaaataggaaggatataaaataaaatgttaatattttaaaaaagaaaacagtcttaatttactctagacaaccccaacgaatcaccataaaattgaacaaatttaacctatatccccttcattaatattctcatcttcttccataaatcatgtt

SEQ ID NO: 299641 - DNA, 622 bp, Homo sapiens
agtagcatccacattactggttcttactaattttctcacaaagctaacccatttttacaaagaaaagctgaaaatggaaagaaagaagaaattaaaatgatctcactcataattatttttgctaatctcttgacaataccaccaacaatagtcattgcacatctaaatgatgaaaagcaatagacttaaaatgcttgtcttcgtgcaatgcagcatgatgaactagtggtttagtatattcacttcgatgtgaccatgtttctaragtcccatgacacctgcaaaacaagtaaaaactttctgtatatatagctcattatttgtgttatgtttgtggtgtttggacacttttcacaagttccttgtaaatgtcatagtctagggtaggtatgaagtcaggggaaaggggaagtagaaaggaaaattaggcccaaagggacattggttccaacatttcacattgattctacaacttgtagggttctgtaattcttatggtcactacatgtaagaaaagttactgtcatttatacacctacgtgatggagtaacaatagaaagatctcaatgcacttaaatttatgacaagtttaattactacctttgtatttccctgaagttg

SEQ ID NO: 299642 - DNA, 622 bp, Homo sapiens
agtagcatccacattactggttcttactaattttctcacaaagctaacccatttttacaaagaaaagctgaaaatggaaagaaagaagaaattaaaatgatctcactcataattatttttgctaatctcttgacaataccaccaacaatagtcattgcacatctaaatgatgaaaagcaatagacttaaaatgcttgtcttcgtgcaatgcagcatgatgaactagtggtttagtatattcacttcgatgtgaccatgtttctaaagtcccatgacacctgcaaaacaagtaaaaactttctgtatatatagctcattatttgtgttatgtttgtggtrtttggacacttttcacaagttccttgtaaatgtcatagtctagggtaggtatgaagtcaggggaaaggggaagtagaaaggaaaattaggcccaaagggacattggttccaacatttcacattgattctacaacttgtagggttctgtaattcttatggtcactacatgtaagaaaagttactgtcatttatacacctacgtgatggagtaacaatagaaagatctcaatgcacttaaatttatgacaagtttaattactacctttgtatttccctgaagttg

SEQ ID NO: 299643 - DNA, 567 bp, Homo sapiens
aaacaagtaatattataaaatatattagaaatctggaagataataaaatgtcctataaagagttcaaacatttatgtcttatagattttaagacaaagaagcagaaattttaaaaacacacaaatatagttctatgttcttaagttaaatagtttgaatagttaaaattatgtgatggcagaagacattaatagaatactaatataaataactattatgacattttgtaaacatgccattttagaagaaagaaatacttatctattttagaaaatgtataggttttgaaaatattgctaagagatattaggatttggaaattatatgctagtacatataaatatttctaacactgtctacatattatttagtttttaaaatgtaaaccaattagaaatagatggttttattgtttcatttaatgagaagcaacaaaaaawtcttatttattatataaacactatttagttaaagcatcatgtaagccaaatattgatattactgattacattcaacatatgaaaaagactaaaataatagtaaaaacgtatgtattaaataggtttt

SEQ ID NO: 299644 - DNA, 607 bp, Homo sapiens
ggacttctgcaactttaaatgataaacctattgaccgttttatctttagagtgtatttctttgcatcattttactttcctcccttcttcccccaacaaatacactgaaaattataattaagtaaataatgttcctttcagaatcatcaagtagtgtgattgaatgtgtaaagaaagagatgtaatcctatcacaaaatctttgccaggatctcctcctctcyagctttctgtcttaccattttgttgtcaattgcagtgctctttctgttgtttattttattgttattcataccaatcatcactttatcatgtaccttaatttacttatttgttgtgaatattgcttatttcctgcctgtatcaatgtgagtgtaagtgtcaaggggttgcaatgccttagttgctttattcatttgtctagcatacagattgtgttttatgctcaatatttattgaattaataaaagcattagtgctccttaaaccttcatcaactatgcctctgatgatcaaccccataatgtgcctgtcatacctattcacgtatgaatttaaaaatgagcaatattcagtctcaagctagggatctattaaacaatacagaat

SEQ ID NO: 299645 - DNA, 581 bp, Homo sapiens
cagtttgatatgttgggtttttattttcatccaattcaaaatattttctaatttgccttagaaatgttcctttttgaactgttaataatttagaagtgggttatataattccaagtaattagcttattttcatctttcctgaatgtcatttatgaataagtttgtgtctctcaccaaatatagggtgtttttagcccttaattgcttaacctttttttttgcaacacatttctttctcctttccttcttggagttcagtgaaactaaagttagatattttgttattgccccacatgtctctaatgctctaattatttttcaatcttttgtctctctacttgttgaaattttttcttttaaatacttttaagcaactattacctaattatctcaattctgtgttacgcaacctgttagatatttttatacttattatattttcagttctattttatataygtatatctttgtgctgagattattttcctctgtatttacttcaagagtcttctccagtaatattttgacatttttataaatagctatgtttaagctatttataaaattccaacatcagcgtt

SEQ ID NO: 299646 - DNA, 630 bp, Homo sapiens
gggagtattgagacataatacaatatagttttaaaatagaatagtatagtttttaaaaagctacatcttcaaagctgaatataaccacaaatcaattactcgcagtttagaaacaatactagattactactatagtaaaatatttacatatgttgtcatttatttatcacgataatcaataaagaatattttttacaaatgaggccaaagaaaaattaaagtcagtttttagagataatgaacaacctagaacttaaagtcaggtaagcttaagtagaaaatccttcccttttcactctgtagcatggcattccttattttcaggatttggtaatagacctaaatgtcattcagaagttcaattgaacacaattaatttaaaatattacttaaaattttcaattttggtgtattaaataagttacaaataggaagtctaattgtctcagtgtgattttttttgtcactttgtattacaattaatataaagtatgtgcccttgaggctaattttggtccaaaatacttttcagactgtggctaattcacccacgtcagctctgtcagaacrtttttgtccgttattttgttttaatggtggcaccagcatagcggcacttaatttcaacta

SEQ ID NO: 299647 - DNA, 588 bp, Homo sapiens
atgctactttaaaacatatttttatgaagaagatataactacatgatttacttttaaaactgaactgattttttatcatacagaatataatttcagatcatgacaataatagggctatttgacttacttttttttgtactagcattacatgtsttatactttgtgaatactatttataatttttaggttttgttttctttttgttgtgtgtttgtgtttacattacttaaaatggctgagtgcctcacatgtgattgagccacagtaaatatttgtcaaattttttctaatactttatatacattttactgtgaatacttttttttactgtagagttttacaactaatgtatttcaaatcaaagcgtttttatatttaaaaaaaggcaaaaattcttaacatttttccccactcatggcaaaaactgtagttgtcatttaaaaaaggacataatgaatggaatttcccaggtcacaggttgttgcagagattaaatcaactgagagtaacaacctttcatagctagaacacattctgtccctcacaaaatagcactggaatgcatttgagtgaaagggatgtctttat

SEQ ID NO: 299648 - DNA, 578 bp, Homo sapiens
ttgcttcgaaatgtgtcagtagctagcaaatgccaccaatctagggccttctcatttaaaacctagcctggaatatcaagctgggctgaaattttactatataaataaataatccagtatttaatgatagtgttgcaaaattctatcatctgaacaatacagatacttaaagtagatgaaatttaattttacatcttttcacagttttttcgtatcctttttttttagagtattttccagtattttatgacaaaagaaaagcctcaaagatgtgtcatatccaaaaatctagatttattcttttagtcaggttgacccttagagcatttatcttccataatgakagaggaaaaaaccctcattgatatatctcaagtcaattattggctaccttattattcaatttttattaactacaaggaataataactaggaagagtatgttgtcatgtaaaaacatttttataatgcaaaaatagggatatgtttgttaatttatgttatgtatctattccataacattactttttaaaatttgttctgaacataaatttattaactttcagtttggaagtgga

SEQ ID NO: 299649 - DNA, 615 bp, Homo sapiens
tgccaaatgactattgttaaaaatcaaaatacacctgtgtcattcaagaaagtaaattttaacaaacactttaaatatgcttccctgcagtctcgatacccacattaatctttttgtaaaagaagctgkctcatatgctttatgcagtttcctaaagtggatgaatgctaaaggataaataaagctagaaattacaaaaggtaatattacaaatctaggaacagaaaaaagcttaaagaaatttacaaggaaggactggtttaaataagttaataacttggaatacttctataatgtaaaataccttcctttatatcatccaaatttccagatgtgtcatgataaataattatactacagcagtatgattgttattataagtacaccatttattcaaccaaatcatcaggcaaatctttcataaagtaattaagtgctgtttttgattatttctctttgaaaggtaaggaatggtgaaaacatatgaacacatttgaagagagcaaaagaatacctcttcagaagagaacagtgtttccgattgttatatttagatataataagaaacagaagcaatagagcaaattagactccagcccacgctactggtggaac

SEQ ID NO: 299650 - DNA, 586 bp, Homo sapiens
ggctgctttggtcactcacactcattcctggycatcaatcgttgcctgtcaggtgctgcactctgccaccatgacaaatactcctcctaacactctgattcgtccaaacaatgtaattgtcctccagtctccttttggtaatggagataatgaatgactgcacaaacaagaaggattgctcatcactgacgccagtgtggcttcaaactggaaaaggcctggagtacaaattttaatggactgaaaacactggttggggtgggaggggcggtggcaaaaaaaatgtaaaaatcctttctattatggcattttcctgccaaattcaggggagttgcaccctttgactttttgaccctccaagatttttagagcctaggtttataggttatttacccaacagaaatatattttgcaaatagcacaaattaaaatgaaaataaggatgcatcacaagagtatctagatctgcattggtaatgtcttccagtgtgctgtttctttatgcagtgtttttgatcttttttgtgtgtttagtcttgctcactgttcactgttgtgatgcatttgtccaaggcagttttgacaa

SEQ ID NO: 299651 - DNA, 608 bp, Homo sapiens
attcatgattccatgccccttttatacatggggtggactgtttacctcaaagtgctctggcaatcagccactatatttctaaaattaaaaaggggattgaaaacaatcagctttcagaggaattggaaccatgacaatgtgttttggattaatttacaaatatatgtatacatttaaggccacactgtggagctagagtatttctactacatgatctatcatatgcattgttctgctttattagaacagacatcmtattgaaataataaacatgggaagccttcacttcttctttgatgtatattactaaatgtctgactggctcaaatttaaaataaactttggtatgcttgcacttgaaaactggaagtagaccacaagcaataatttgttgtcagtttccatattcttggactaaagctatagtttagtctgttcactgttgggggccaacccactctagtccagtggcccagaggtggctcaacttactcataagagcacacgtcattgtaacctgatagcaatgattaggattcccctcatcaagaaagagccagcataggttaaactttttcacatctcgaaagaattctaaagccactgtt

SEQ ID NO: 299652 - DNA, 519 bp, Homo sapiens
ctcactaccaacaacatctgatgtttgacgagacacatattcaaaggggtctctccaaaggagttaaataattaggtcacaaaacttgtaggcatctaattctcacgcgagtttaccccgctccccaaacaccaaacaaaccaaccaaccaaacccatctgaaagaaaacaaaggcagcatctgggcgacaccccccttcctgcgttccccccagttatttactgggtgaccccgtcctttctcttcacctcctcacccagcgcctcggattatgagataatggattttgcgattgttcttgtcagggaaaaaaatctccacagaaccccacgttttcatctttcaactgttttatttaagccaatgggaargtattgagggcagtaattgattcataatgatccataaatcgatgtcggaaagcggggggagagggtggaggtgtactaagagtatgggggggtggcgatgctgtttatttctaaagcttcaactaaagtagctttgacactgttggg

SEQ ID NO: 299653 - DNA, 589 bp, Homo sapiens
ttcacatattatcattctgtgacacccccactgaatctttctcaagcttcaacatatctatcttaccaaggcacaacgatggcactgcaagaaagtgttcctggttcagatgaattatgacatcatgctgtggttcagagaaaggataatgtcttactttttcctgataatacttattattgtgcagatctcattttctgtgattccctattactgataactgatgctgagcatatgagagctcaaagctsattaaggtacttatcagtgggaattccactgactgcaacaggtggctgtggtgagatgttgggaaagaggaaagatagaggcaggcattagtttcctcatttactctgaacctgtcatcaaattatattaggttaagaagctagaaaatggttagcaacagttgatgaaatcagctttgccttgtattgactctaattgaaacaagttgtagaaccaacattatgacaggaatgtcagaaatataaagaggaaaaaaatactatgtcttcatgttaccaagtgaactttttttattttttattttcccattcctattcatatttattatatcatttgt

SEQ ID NO: 299654 - DNA, 589 bp, Homo sapiens
ttcacatattatcattctgtgacacccccactgaatctttctcaagcttcaacatatctatcttaccaaggcacaacgatggcactgcaagaaagtgttcctggttcagatgaattatgacatcatgctgtggttcagagaaaggataatgtcttactttttcctgataatacttattattgtgcagatctcattttctgtgattccctattactgataactgatgctgagcatatgagagctcaaagctcattaaggtacttatcagtgggaattccactgactgcaacaggtggctgtggtgagatgttgggaaagaggaaagatagaggcaggcattagtttcctcatttactctgaacctgtcatcaaattatattaggttaagaagctagaaaatggttagcaacagttgatgaaatcagctttgccttgtattgactctaattgaaacaagttgtagaaccaacattatgacaggaatgtcagaaatataaagaggaaaaaaatactatgtcttcatgttaccaagtgaacwttttttattttttattttcccattcctattcatatttattatatcatttgt

SEQ ID NO: 299655 - DNA, 556 bp, Homo sapiens
tcttaaaggaaaagctgggccagtaaaatgtttttgtgaagactgttaacagaggctatctctcaggcatggataggagaatggtagatttctatctttttttccaaataattctgtactgttggagtttttaataaatataattatttttatacataaaagaatttttaaaggagatcaagaaaatttgttatcttatttgactaaggtttatatgggtaactgtagggaccttttaattaaaatatttgagaaatttcmcctcagatagggaattatcttttatttcctttacaatattgagcaacagtaaacactattccatgaatacaatcacacttgatggcatgtaacaaaacatcccagcaggttacgattttgaagcactgttactcttacagaatgccatcagattattcatatgtagctatttatcatgcactataaaagtgatctttcaaagctatttgaaagcaagggaggagaaaacactcaaacttccttagctattcacatctaggatctatcctcttaaagataaaatcctaagtcaata

SEQ ID NO: 299656 - DNA, 569 bp, Homo sapiens
agaatgaagattttgttaaaagacaaataattattcctaggaagtagttagcctcatggattttcaacatagggaaagaaattgagaactcgaagcttaagttcttgcatttaattctgcctggatcacaaacaagtaataagtcacaaatgcttcctgcgttcggttctttacctttatcaagtgagatgagacaatggatatgagccatgtgcacttagaacttcagcagctaatattagaaaaatgctttgaaaatgacagatggaaagagctataaatgcaattgctaatggatttatgtgttctctctccctccttccaacctatttctgccagtattttccaaaaaatttcccagagctccacctgaagtgtgacctgatgacaccatagcacatgtgtttcctgagttggttgagtgtttccaaaatgtatctacactctaaattcaaatgtttatccactagggtattaaattatggaaagtgttactgccttggaatgacagtcatrtacttctgcccagactattatgacaagttctatggggctttctacaggttttt

SEQ ID NO: 299657 - DNA, 450 bp, Homo sapiens
gcctccaattctttgctggaatgataagagaagttgtccaaattattcctaaagtccaccattcagctctgaaactcatgacaagtaaatattctattttgaattttcattaggttaaggatttaacaataagctgaaacaggatgactaacccataacatgttccagaaaaataygaaatgacatgttgaagagcatttaaattgaacaaaacagatttgtgtgtgtgccactattgatatacaaatgttgaatgtgttttactgtatctactgaatgtgattgataggagaggcatcaatttcaaggtttgtgaatttaagtaaattgttgtcagtggtatagcttcttaaaaaaattatatctttacagtgaacagacaaattgagacaggatatacataaagcatcaatttagcacaaatatccacttacaattgtgaaatatata

SEQ ID NO: 299658 - DNA, 595 bp, Homo sapiens
attgttaaaaaaaaaaaaaaaaaaaaaggagaagcatgaggaggaaaaggaggaggaagaagaaaaaggaaaagaataaaaaagaaatgattcattttgctttaatttctatagcaatacagattctggtcaaatagcaaaaactttagaattgaagattttttaaaagtttatcagagtagtgatcccaatagattttttaaatcataaaatttgaaagatagaggctttaagcatgcaatgtayatgaaagtgtgaacattttgtatctaaattcgaaaagcaaatgacaaggtggaattttaacaatgtttcttaaaatgaccatagagagtaaattttagcatgttttttgtgtaaagttgaaactctaaagtgaaatgaatataaatttgataatcaaaatacctgaaaaacacatttagactcaataaccttacagcaaccaaaggctgtgataatgaaaaataatacaaaaactattgcaatcatctggctaatttagggttatttgaattcagtaaaattcccttacccggctgctgaaggagagtatatttcaaatggtgtgggatcaaaacattcccctccattt

SEQ ID NO: 299659 - DNA, 550 bp, Homo sapiens
tcaatgggtttgttggttattaggtaatgggaagaccactatgctgagagccaggaaaactggattctaaatattgtttcccacttattagctctgtaattgggcctcagtttcctcacctgcaaaataggttggagtagaaaatatccaaggtccattctggctttaatagtcaggaattctatgactcacataggaaacttttcctagaagaatctttttgcttcctttcaagtacacattgagaaatattatgtgcctggccctgtgctaggccctgagactcaatgagatataagtagagttctgtgttcaagacatttacagtctagcagggtgactaacattacattacagtgtaataactgctattttacagatatctttggggaattataagacctgatagaagcaacatctaatgaatgggaggcaactacgtgaccaggggaagagaaggaaaagctttgtagaggaaytggcacctgaactgtcttgaggaataaataagaattaaggcagaggtgaggagaaaggcatgacaggagga

SEQ ID NO: 299660 - DNA, 618 bp, Homo sapiens
tggtatcaaatccaataaatttccaaggcctaataattatgcccctaaatgcatctttaacccatatgtttctctctgtttcagctgccaccaccctagttttatttggacttcaccattgggggttctggagccaaatctgatctcttcatattcctattcaaaatcctttgatggaaacccaccaccattcttaagataaagtccacatttcttaaaatgttctaaggccttgactgatttcacttctgtcccccgatcttcagccccatctggaatccccttattctctttaatccagtcatgttgtccaccattacattgytcaaatagtatagcctcgtcctacctcagagcttttgcacattctgtttcctcggtctggaaggttcttctttcctccactgtcccccatctgtaacttagctaactgctattcatttctcagatctcagtttaaatgccacttctgcaggagaatttttcttgaccatttcccctctagattaagctacattctctattctcataataacatttaaattttctttgcatcattatcacagttatacttcattaatagttaattatgtcatgattggtttaatgtctgtttcc

SEQ ID NO: 299661 - DNA, 488 bp, Homo sapiens
gcatggctggcaaagggagtagggagtggaaagaatgatggtgctgatagcacctggcagttctgcatgctccaaccygcgctgtgctccaggacttactccctgaatcctcgcagacagacaggggcccacagaggtgagggcatgcaaatagcaggggcagaattggcgctggcctctggtctgtggggccccacaactcccctgccactctgtgcctggccttgtgctgggcatcaggaactgactgacctgttcctatgtgtgcctgctctcatggggcacatagactgatggggggaagcaggccattaggagaagggggaagcacaggagaccttcctggggaggagggaatgaaggcttcctggaagagggggcatttaggacttggccttgtaggataaggcagaggttggggactgaagtcccagggctgtggggattctctccttaacccctacacatttcctagggaatctgggaaa

SEQ ID NO: 299662 - DNA, 610 bp, Homo sapiens
  misc_feature (1)...(610): n = A,T,C or G
nnnnnnnnnnnccaacggctagaggcctagggcaaacatgtctgcagcaggcattcagcccagcaccatgggcccgtgtgcccagtggtgaaaggcgaggaaggaaggggatatgtccaggctggacatggtccccaagcacagagaagacaaacggggctctggtcacatgccctgaacgcactakgttctgatcctacttctatacctttatttgagctgttccttctacgctgcatgcccttactgatttccaaatgctaacccgatgccaccagctggaatgacctcgccctctgcgcgtgtctctgtgatggcatttaccaccgtctgccctgagtcccagctactttgggtctatctccgtttgggaccacaaactggaggacacaagggtttacagttctctgaaaacatcagaggctgcagacatgtacgcacagagcactcccagagccacggcgcctggcccacatggggcctaagagaggagaaggaagaggcatcactgagcaccaacccgggcgatgtgcaggccaggtgccgggtatgagccctcacccagtcctctggccccacggtcagaggggaggaaaggcaggctcagaga

SEQ ID NO: 299663 - DNA, 610 bp, Homo sapiens
  misc_feature (1)...(610): n = A,T,C or G
nnnnnnnnnnnccaacggctagaggcctagggcaaacatgtctgcagcaggcattcagcccagcaccatgggcccgtgtgcccagtggtgaaaggcgaggaaggaaggggatatgtccaggctggacatggtccccaagcacagagaagacaaacggggctctggtcacatgccctgaacgcactaggttctgatcctacttctatacctttatttgagctgttccttctacrctgcatgcccttactgatttccaaatgctaacccgatgccaccagctggaatgacctcgccctctgcgcgtgtctctgtgatggcatttaccaccgtctgccctgagtcccagctactttgggtctatctccgtttgggaccacaaactggaggacacaagggtttacagttctctgaaaacatcagaggctgcagacatgtacgcacagagcactcccagagccacggcgcctggcccacatggggcctaagagaggagaaggaagaggcatcactgagcaccaacccgggcgatgtgcaggccaggtgccgggtatgagccctcacccagtcctctggccccacggtcagaggggaggaaaggcaggctcagaga

SEQ ID NO: 299664 - DNA, 579 bp, Homo sapiens
tcttgtgctcaacacgtttggaactcacttgattatttccaatgcagcagagttgagcagcgctcctccgcagagcaggtgcctctctgaatgcccattgcaacctggaccccagctttcactgccagggcttccagaggagggagggggtcctggggatgcgcagacatgggctaggctgcatgascagcacaggcagaggggcctcacagggctgggcccaaaggaggcctgccccagaaaagatgcagctcttacatcttcagggccctgggagatggggggcggggcccagagaacccagcaccacctggacctgagagctgcccccagcatcggagaggaaggcctgccggtcactgccacgtcatgtaccctgggcaagtctactgtcctctctgggctcgtaggacggtgtttgtccacatcagaacagtctcggctggggatggacacgggctttcagcttctgggagggatgtgggtattcacccaggcagacttgactctgttctcccccagacacccaccagggtctcatctctgagccagaactgccatacttcctagactctgcat

SEQ ID NO: 299665 - DNA, 593 bp, Homo sapiens
tttacctgtcacaaagcttttcccaaattcagccctacaaccatccagtgcaatgaattatgggcattattcccattattcccattttagagatgaagaaactgaggctcaagggttagaaagacttgctcagcatcacttggcccaggttgggaatctggagcctgtttgattccaagcccgtctttcactctcagcaccaccaaaacacgttctcaataaagggccwagtgcaccagggagggggctccttcagcaacttttttatttttatttatttttttattttttttattttttttgagacagatccttgttctgtcgcccaggctggagtacagtggcacgatctcggctcactgcaagctctacctcccaggtccacgccattcttctgcctcagcctcccgagtagctgggactataggcgcccaccactgcctataaatataaaaaattttttgtatttttagtagagatggggtttcaccgtgttagccagggtggtctccatctcctgacctcgtgatccgcccacctcggcctcccaaagtgttgggattacaggtgtgaaccactgtgcctcgccttcc

SEQ ID NO: 299666 - DNA, 593 bp, Homo sapiens
tttacctgtcacaaagcttttcccaaattcagccctacaaccatccagtgcaatgaattatgggcattattcccattattcccattttagagatgaagaaactgaggctcaagggttagaaagacttgctcagcatcacttggcccaggttgggaatctggagcctgtttgattccaagcccgtctttcactctcagcaccaccaaaacacgttctcaataaagggcctagtgcaccagggagggggctccttcagcaacttttttatttttatttatttttttattttttttattttttttgagacagatccttgttcygtcgcccaggctggagtacagtggcacgatctcggctcactgcaagctctacctcccaggtccacgccattcttctgcctcagcctcccgagtagctgggactataggcgcccaccactgcctataaatataaaaaattttttgtatttttagtagagatggggtttcaccgtgttagccagggtggtctccatctcctgacctcgtgatccgcccacctcggcctcccaaagtgttgggattacaggtgtgaaccactgtgcctcgccttcc

SEQ ID NO: 299667 - DNA, 634 bp, Homo sapiens
ctccttccctcctctccaggcccagcgatctaggtgccagctcttcttggttcctggggacatccaggaactccatggggcrttgtgcacactcatttgggcctctgcccttgcccttcccttgcaagtgtgccttattcccctctcctagctgatgcacccaccctggatcctgcataggggatgaggtggagcagaaggccggccttggacaagcaggaggcctgctggagctcgaggttgttggctggatggggctgggtcatcttcagaaaatccagttcactgtgcatggttcatgaacgtggaggtgaacactgcagaatggcaggggctgtgctgacagagacttgaactgtggggtggagaggggatctggaggcctggttctgctatcaactccttatctgcttcaacttctctggcctcagtttcctcatctgtaaattgaagggtcagatatgaattggctaaattgtgttgtgtagagccccaggtggctcccaggcccttgggagcggtggaggcaggtgcagatggacaccccactccctcccaggtgggatccactttgacctggcctgttgatcacagtgccaggcaagccgtctgttaagcaaagggttctgtggct

SEQ ID NO: 299668 - DNA, 588 bp, Homo sapiens
gggagctgggctccatggtgcccctgcccttcctcctctcactgggcatccacaggttcaggagaaagggaccagggaggtgtaaagatcacacatacacggctcagccccaggctgtgattcctgcatgtccagctacttgactgaatctggcttgctggagtcccccttttgttcacattgggtgagcagccccaagtatctgacccatatctgagattccttcagtagggcctcacccctttggaacatgaagactttttcaaggtccccaactaagatccaagtgcccctccctgggatgggctctcgtcacagctggggacaggaaactagtacacatatagaatatcaactccgtgaggcagaacmtcagctgtccagctcactgctggcacatagtaggaacttaccaaatgtatgttgaaatgaatcaatcgatagcaaaggggacttggtgagaaaatgcaaatggctccatgcaaatccttgctcaactgcaagagtgaaaattaatcagctgactcagagcatacgtcctattcaggatagtcacatagtgtcagctcatctgcaaaggccaagtac

SEQ ID NO: 299669 - DNA, 588 bp, Homo sapiens
gggagctgggctccatggtgcccctgcccttcctcctctcactgggcatccacaggttcaggagaaagggaccagggaggtgtaaagatcacacatacacggctcagccccaggctgtgattcctgcatgtccagctacttgactgaatctggcttgctggagtcccccttttgttcacattgggtgagcagccccaagtatctgacccatatctgagattccttcagtagggcctcacccctttggaacatgaagactttttcaaggtccccaactaagatccaagtgcccctccctgggatgggctctcgtcacagctggggacaggaaactagtacacatatagaatatcaactccgtgaggcagaacctcagctgtccagctcactgctggcacatagtaggaacttaccaaatgtatgttgaaatgaatcaatcgatagcaaaggggacttggtgagaaaatgcaaatggctccatgcaaatccttgctcaactgcaagagtgaaaattaatcagctgactcagagcatacgtcctattmaggatagtcacatagtgtcagctcatctgcaaaggccaagtac

SEQ ID NO: 299670 - DNA, 566 bp, Homo sapiens
gaatctggcaagctcatcacattaattataaatggtgaatgaaggattaacttgttggccatggtagcttacattttcaacagagaagcctcttgccagataaatgaagctctcatagtaggatctcaggcataaaygataggtcaataaagctagtaaattttgttgggggtacctcctttcttcctattctcacaatggaacttttacccctattgcttaaagttccaagtgtcatatgttttcagacccctccatccctttatgatgcactcagaaaataataaattcattgataaccacagatgtgtgtcagaaaagcttcactgggtcaccccttccagaagcatttgcttttgacttgggccaatacctgtatttggcttaagcaaatgatatgaagctctagtgtagaatgtcaatcagagacagatttagggaacacagaacttccctgcttccttctgaacccacactgtgcaggaggtagcctatgtttctaaactgtaaagccagcctatatgacacgccttttaagtttgggtatatttccccagaaatagatg

SEQ ID NO: 299671 - DNA, 566 bp, Homo sapiens
gaatctggcaagctcatcacattaattataaatggtgaatgaaggattaacttgttggccatggtagcttacattttcaacagagaagcctcttgccagataaatgaagctctcatagtaggatctcaggcataaatgataggtcaataaagctagtaaattttgttgggggtacctcctttcttcctattctcacaatggaacttttacccctattgcttaaagttccaagtgtcatatgttttcagacccctccatccctttatgatgcactcagaaaataataaattcattgataaccacagatgtgtgtcagmaaagcttcactgggtcaccccttccagaagcatttgcttttgacttgggccaatacctgtatttggcttaagcaaatgatatgaagctctagtgtagaatgtcaatcagagacagatttagggaacacagaacttccctgcttccttctgaacccacactgtgcaggaggtagcctatgtttctaaactgtaaagccagcctatatgacacgccttttaagtttgggtatatttccccagaaatagatg

SEQ ID NO: 299672 - DNA, 610 bp, Homo sapiens
cttggggcaggggcaggggcaagaggagctgtccgtggttctgactccttctctggcttctctcaactctggactccacaggctgatccaggttctttccttggtgcctattttcaacctggcctgctacaaacatccagatgcttgacaagatggtccagattactatgcattccaaccccaattcacatcaataaaaggtagagagttgcggatccaagatcagagctcatctctgcttcctgcctgcaactccatcttatccaaatctgaactccacctaattaacccctttcttccctgratggcttcccctgttgctcccataccttctgtctcagcctgtttctcgggatgaaccttccagagtcctttcagccattcctgcctccatactgtacccttccttccaaaccatctaggaaagtaaaggctcatatatttgagaagaagattcaaaaagtaaaatcccaagatgtggtatgtcaattccctactccatagtttcctggacataaatttaatagaagaaacatgaggcctcatttgcttctcaatagcaaagcaattcaaaatatttaaaatgtttatttctctctagcaaatttct

SEQ ID NO: 299673 - DNA, 607 bp, Homo sapiens
ccctactccatagtttcctggacataaatttaatagaagaaacatgaggcctcatttgcttctcaatagcaaagcaattcaaaatatttaaaatgtttatttctctctagcaaatttctagaatcccttgcttaaaaatgtccttatacagccaaatatttaagccactgtatgtaacagggagaaagaaaggggagatgaaaaagtcatgtaatcacatttcaggagtcaggaataatgattgtctttagtgacatgcaagtttccccctttcttgttttcatcctcctacctgatgtgtcctcttcagagacaaaatgagcagtccaggtcctttgcaggcctaacartcccctcagttttaatgtttatttctgttaacaaatcaattacagctggctctcactattcacggtagttatgccctataatgttgctgtgaactctgaattcgcaaacactgaaccattgctcctaagggaagcacagggttaggttcctgtgagcctctggttacaacattttcaccaactgtatcaatagataaccttgttttatgtgtgtttctgtttaaagacatcttacttagtatttactgtttgttcat

SEQ ID NO: 299674 - DNA, 615 bp, Homo sapiens
tgtaaattgctttgggcagtataatcatttttatgatatcaattcttccaattttccatttatttgtatcatctctaatttctttcagcaatgttttgtagtttccctggcagagatctttcacctccttacttagctatatacctaggtatttcattttctttgtggccattgtgaatgggattgtgtccttgatttgattctcagccttgatgttattggtgtacagaaatgcaactgatttttgtaaatggattttgtattgtgaaacctcactaaagtcatttatcagttttagtcacctttaggtggggtctttagtgttttcaaggtatggaatcatatcatctatgaagagacatagtttgacttcttcttttcctatttggatgcctttatttctttctcttcctgattgctctgcccagcacccccagtactatattgaagaggaatggtgagaatgggcatctttgtcttgttcagtttctcaagaggaatgcttccagctttyatcctttcagtatgatactggctgtgggtttgtcatacattgctcttattatttggaggtatgttccttcagtgcctaagctgttgagggtttttatcatg

SEQ ID NO: 299675 - DNA, 623 bp, Homo sapiens
tttacttctccttcacttatgaagtttaggagaaattcttgattggaatttctttcctttaaggatgctgaaaataggccctcaatctcttctgacttatacaagttctgcttagatgtctgctgctagcctgatgaggttatctctttatgtgacttgacccttctgtctagatgcctttaagcttttttcttttgtattgaccttggtgaatcttgtgaacacgtgccttagggctggccatcttgtatagtatctagctggggttctctgcatttcttggatttgcctgtcaatgtgcctagtgagattaaggaagttttcatggactatatcctcraatatagtttccaagttgcttattctttcttctctctcaggaatgctaatgaattgtagatttgttctctttacgtaatcccatatttctcagaggttttattcatttttaaaaaattcttttttctttattttcatctgactgaattgatttaaagaaccagtcttcaggctctgggattcttacctcagcttggtctattccactggtaatacttttaattgtattatgaaattcttgcagtgaggttttcaaacctcaaaaatagctattttaagaaaga

SEQ ID NO: 299676 - DNA, 578 bp, Homo sapiens
gtaatcccatatttctcagaggttttattcatttttaaaaaattcttttttctttattttcatctgactgaattgatttaaagaaccagtcttcaggctctgggattcttacctcagcttggtctattccactggtaatacttttaattgtattatgaaattcttgcagtgaggttttcaaacctcaaaaatagctattttaagaaagaaccaaagtaaactaaaagttttttttctttcagctcttggatcattttactggattccttggattgggttttaactgtctcctgaattttgatgggcttccttgccatcgaatctgaactttatgtcaatcattctagtcattttagactggttaagaactattgctggggagctagtgtacttatttggaagtaaggggacattytggctttttgaattgccagaactcttttcttctcatctggtggtcgggggggtggggttggtgttcttttaattgtggtgaaagttgagtatagtcagttggcttcatttatgaatgcttttagagggccagggctctgtacagtatctttatgtgtgggtga

SEQ ID NO: 299677 - DNA, 507 bp, Homo sapiens
ctgtgcaccacagtcctggggcaccaggatgccttgtggctcgcagtcaggttctagctgcactaggggatccattgtgctcctgggtcactgggaaagtactcaggtgcagcactgcactcaggctgggctttaggggctgtgctgtgcactcacttctacagggcagctaggcatgggccctgggaggagctgccaggcagaagacgtcaccragcagatgtcccagtcccccagcgaagctggctccactctctcctggcttggaggacagttaggtcatgtgcctactggagggggatgaggagccctgggtgatgggtgtctatggccactctctgctggagctgcccaatgcacaaaagctcccaggccccacactgtctgaagacctatttctgcctgtaccccagggagatttcccctgccagctcatacatccatgggggatgtggggtccccttatagctaggatcccagaggtccacggtaaaagtgagcagtccc

SEQ ID NO: 299678 - DNA, 580 bp, Homo sapiens
ttacgtattctacagtccatggatcatggagtaatttcaactttcaagtcttattatttacgaaatacattttgtaagactatagctgccataggtagtgattcttctgatggatctgagccaaagcaaattgaaaaccttctggaaagtatataccattctagatrtcattaagaatattcagattcataggaggaggtcaaaatgtcaacattaataagagtttagacgaagttgattccaaccctcgtggataatttgaggagttcaagacttcaatgaaggaagtaactgtagatgtggtgggaatagcaaaataactagaattagaagtgaaggctaaagatgtgactggattgctgcaaccttatgataaaactttaatgaagggagaatttcttcttatgaatgagcaaagaaagcagtttcttgaggtggaatctcttcttgaagaagaagctttgaacattgttgaaataacaacaaaggatttagcatattacataaacttagttgataaagcagtggcagggtttgagaggattgattccaattttgaaagaagttctactgtattatg

SEQ ID NO: 299679 - DNA, 547 bp, Homo sapiens
agcttgtttcttctgcttgagaatgttctagaaacagagatacttcttattgaatcctttgccttttttagcagagcaaaatatagtaaatctaaaataaaaatagaaaagatctgttgctattcattttcttctctcaaataaatataaacctaaatattttcaaaaatttcaggtacttattttcctttttccttaggtatgatagtcaaaacagtacatttaaagaaatccctttgttctttagcagtttatagtctgttaagggagataatactgcaataatacatgctagatgaatggtactgtcaggaaatgacaagtattccaccagttgacagcttctcttayggggataataggatgtttcctcttccacagagatgcacaatctcagccaagaggagatgtttggggtctctcagtggacacaagatactaggaagggttaaaacatatcaagtagttattaatttccacatttcattaaaacggaatttcactgggaaataaagaggaatgaaaactgtaattgtagcagattttt

SEQ ID NO: 299680 - DNA, 586 bp, Homo sapiens
cttcccagctagagtccaagggctatttagttagtaatggcaataacaggaatggcttcatgtcaagatagagccacaagtactaggcagaaagggagcaacaaatattaaaagaagtcaactgccagcacgagttgattgcaacttgtggcactggggaaaatggagcatgccaggagcattagcagtgagaaccagccatcgaaaaacctcggaggccaataacaactcaaatcccttgaaccctgacttgctgaggaaagagacaaagaataatttatgagcactggaggcctgatctgttaacacattattatttttgtcagtcagagtaattactgacctgaaaatactacggatatgcattaagaacaacattcctggagtgactgcatgaagtacaaatgcagcaacaaatcctcaatrttccctaatatcagattccattctcaatattatttagtagctcccacttactgagcacttactatgtgtgggtgttacaaaagatttgcatgttttatctcattcagtgctcaccatgaccttatgaggtaggcactgttattagcttcattttacagat

SEQ ID NO: 299681 - DNA, 576 bp, Homo sapiens
aacattcctggagtgactgcatgaagtacaaatgcagcaacaaatcctcaatattccctaatatcagattccattctcaatattatttagtagctcccacttactgagcacttactatgtgtgggtgttacaaaagatttgcatgttttatctcattcagtgctcaccatgaccttatgaggtaggcactgttattagcttcattttrcagatgagtaagtaaaataagcacaagagactatgccacttagccaaggaaacaaacaaaattggtaaatgtagattcaggagtcagacccaattctgtctgacttcggagcttgagcctgaataactatctcatattgtctcatgtaataaaaaaaaaaaacaaataattatagcatcctcagctgacatgttttacatgcttaatatacactaaacattgggctaaatgtttgtttgttttttgtttttgagatggagtcttgctttgtcacccaggctggagtgcagtggcaccatctcggctcactgtaacctctgcctcctggttcaagtgattctcctacctcagcctcctgagtagctggg

SEQ ID NO: 299682 - DNA, 564 bp, Homo sapiens
tgtgccttgctttatggcaataatcactttattgtgtttggtctgtaatcaaacccacactgtcttcagggtatgcctgaatataattaattgctaagtgacactccaccacaaccccatctctgtatcatgcatctaggattgttatgttgcattctgctatgtttatcctttgaaaatagactaaaaggatgccagatgcctgtggttaggagtcttgctaggtaagaaaaatggcttcaaaagggaaacaaggtctggtgaggctgactcatggagattggggaaagaccaatcctggygcctccacatttggtcctggaattttatttatttatttattttttgagatggagtttcgctcttgtcacccaggctggagtgtagagacatgatctcagctcactgcaacctccacctcccaggttcaagaaattcttctgcctcagcctcccaagtagctgggattacaggtgcctgtcaccatgcccagctaatttttgtatttttagtagagacagggtttcaccatgttggccaggctggtcttgaactcctgacccc

SEQ ID NO: 299683 - DNA, 564 bp, Homo sapiens
tgtgccttgctttatggcaataatcactttattgtgtttggtctgtaatcaaacccacactgtcttcagggtatgcctgaatataattaattgctaagtgacactccaccacaaccccatctctgtatcatgcatctaggattgttatgttgcattctgctatgtttatcctttgaaaatagactaaaaggatgccagatgcctgtggttaggagtcttgctaggtaagaaaaatggcttcaaaagggaaacaaggtctggtgaggctgactcatggagattggggaaagaccaatcctggcgcctccacatttggtyctggaattttatttatttatttattttttgagatggagtttcgctcttgtcacccaggctggagtgtagagacatgatctcagctcactgcaacctccacctcccaggttcaagaaattcttctgcctcagcctcccaagtagctgggattacaggtgcctgtcaccatgcccagctaatttttgtatttttagtagagacagggtttcaccatgttggccaggctggtcttgaactcctgacccc

SEQ ID NO: 299684 - DNA, 564 bp, Homo sapiens
tgtgccttgctttatggcaataatcactttattgtgtttggtctgtaatcaaacccacactgtcttcagggtatgcctgaatataattaattgctaagtgacactccaccacaaccccatctctgtatcatgcatctaggattgttatgttgcattctgctatgtttatcctttgaaaatagactaaaaggatgccagatgcctgtggttaggagtcttgctaggtaagaaaaatggcttcaaaagggaaacaaggtctggtgaggctgactcatggagattggggaaagaccaatcctggcgcctccacatttggtcctggaattttatttatttatttatttwttgagatggagtttcgctcttgtcacccaggctggagtgtagagacatgatctcagctcactgcaacctccacctcccaggttcaagaaattcttctgcctcagcctcccaagtagctgggattacaggtgcctgtcaccatgcccagctaatttttgtatttttagtagagacagggtttcaccatgttggccaggctggtcttgaactcctgacccc

SEQ ID NO: 299685 - DNA, 570 bp, Homo sapiens
agtttcagcgcttttatttacctgtttaaacaactgatgaatttagaaacaaactttcatggggtacctgaatatggggaaagtttctgaaaatttagggtgggagagatgccatcaagatggctgactaaaggcacccaacatttgtctcccccacaaagaaggaccaaaacaacaagaagataacaatacattgaatagagtgccaaaggagaatgctagaattcagcaggaaagtgacaggaaccctctgacatataaaaactcaaaatgacagtataaagaggaaagaaaagccagggcaaggattggctcagagccaggagtgactctctagtgcaaggaaaagaaaagcaagagatccccaacagttcacatttccaccaccaatgcctgcaatattagctacaggacaacacctcagccctcacttgccctaagctggtacagggaacttcttagtctacaccactacaytgtctcagaaagagaattcattctacgtcccacccacatcctctgagacccaagaagctgtataatgacaccattttgaggtctgagccaaca

SEQ ID NO: 299686 - DNA, 585 bp, Homo sapiens
gtggtcaagtcatatgttgtaattaagattatttaatctgtatcatcccacattgatgagcattggagtagmaccacaaaggcaaaagctgtggctattttgctcaccaataaacctctaatcctaactcaatgcctggcataaagaagcaccccataaatgtttgttaaatgataagtgaaagaattttttcccatagcatcactcaaatcttatttaagcagtataaccttgtctagttgtgccatggagacaaagaaaaagaatttgaactcaatgtttgtctagagcattaaggagcagcagtatctgcttcccacaccacagccctgaagcccgttagagtgaccagcacagcagtcaggagcaacatactcccaaaaatagataaattcatggagaaaaggtgagaatcctatagtccagtcatttccttccaccagaacattctccttctatggtcaattttaaagattctaatttctttactaatataggaaagtcattcattaagtatttactacatcagtgtattgaaaaattaccactgttttcttttatctgctgcaaattcatcaaaactaa

SEQ ID NO: 299687 - DNA, 500 bp, Homo sapiens
tggcacctgtccatatcacccaagagcccaaaaaggggtccacatggcccaytgctaccactacaaccatatggcccagctggagcccctggacacatctgcccaaggcctgctgctgctaccaccaatgcctgcatgcatttcccgggaacctgaagactgtgcatttggggcttctaccaccactgcacatgcctatatacaacaagaagtggcttagggatctcatccagggcccacgaccaccacagccagtacccaaccatgccacccaggggcctaaggtctggcccacccagtgatccattccccagcagatcctcaccacagcctccagaaacaattgcaacctaactcactgaggaacttccagaaaccgatgacattgattacagtagaaaaaaaataataacacagagactacactgcaggacccatccagaaccaaagccaaaataccctacccaactgacactatagatacatctacaggaaaagat

SEQ ID NO: 299688 - DNA, 500 bp, Homo sapiens
tggcacctgtccatatcacccaagagcccaaaaaggggtccacatggcccattgctaccactacaaccatatggcccagctggagcccctggacacatctgcccaaggcctgctgctgctaccaccaatgcctgcatgcatttcccgggaacctgaagactgtgcatttggggcttctrccaccactgcacatgcctatatacaacaagaagtggcttagggatctcatccagggcccacgaccaccacagccagtacccaaccatgccacccaggggcctaaggtctggcccacccagtgatccattccccagcagatcctcaccacagcctccagaaacaattgcaacctaactcactgaggaacttccagaaaccgatgacattgattacagtagaaaaaaaataataacacagagactacactgcaggacccatccagaaccaaagccaaaataccctacccaactgacactatagatacatctacaggaaaagat

SEQ ID NO: 299689 - DNA, 585 bp, Homo sapiens
gtggtcaagtcatatgttgtaattaagattatttaatctgtatcatcccacattgatgagcattggagtagcaccacaaaggcaaaagctgtggctattttgctcaccaataaacctctaatcctaactcaatgcctggcataaagaagcaccccataaatgtttgttaaatgataagtgaaagaattttttcccatagcatcactcaaatcttatttaagcagtataaccttgtctagttgtgccatggagacaaagaaaaagaatttgaactcaatgtttgtctagagcattaaggagcagcagtatctgcttcccacaccacagccctgaagccmgttagagtgaccagcacagcagtcaggagcaacatactcccaaaaatagataaattcatggagaaaaggtgagaatcctatagtccagtcatttccttccaccagaacattctccttctatggtcaattttaaagattctaatttctttactaatataggaaagtcattcattaagtatttactacatcagtgtattgaaaaattaccactgttttcttttatctgctgcaaattcatcaaaactaa

SEQ ID NO: 299690 - DNA, 645 bp, Homo sapiens
caacagaatactggaagttttaaccaaagcaattaggcaagagaataaaattaagggaatccaaattgataaaaacggactcaaactgttctttgcacacaacatgatcttatatgcagaaaaacctaaagacttcatgaaaaaattcttaaaactaataagcaaattcagtgaggttgtagaatacaaaaacaacatacaaaagtcagtcgcatttttatacaccaataatgaactagctgaaacagaaatcaagaaagtgattccatttataatagctacaaaaattaatatacctgggaataaatgtaaccaaagaggtaaaagatatctacaatgaaaactacactaatttaagaaattaaagaggacacacacaaaaatgtaaagacattccatactcatgaattgaaataattaatattgttaaaatgattacactacccamagcaatctacaaatttagtgcaatttctatcaaaacatcagtgtcagaaatagaaaaagcattcctaatgtttgtatagaaccacaagaaaaaaaaacatgaatagacaaaggaatgctaaacaaaaagaacaaaactgaagacattatactacctgacaaagtgtgaaattaccttacaaagtcatatcaaccaaa

SEQ ID NO: 299691 - DNA, 489 bp, Homo sapiens
ttgtgggaggtgattgaatcatgggggcagactccctccttgctgttctcataatagagttctcatgagatctgtttgtttgaaagtgtgtagcacttcccgctttgttctctctctctcctgctgcccatgtgaagatgtgtctgcttccccttcatcttccgccatgattgtargttttctgagacctccccagaagcagaagcctgtatgagcccatggaaccatgggccaattaaacctctttcctttaaaattacccagtctcaggtatgtctttatagcagtgcaagaacagactaatacagatattataaggcaaggtatgtgtgaagaagcatggagatcccatgcctttcctggatacaccactctgtggtaatcttcatgtgttcagttatcagaaagctccccaaatcctgtcttcttttaccttttatggagatgtcattggataggcatgattgacaaccacgtagaaatgtgact

SEQ ID NO: 299692 - DNA, 489 bp, Homo sapiens
ttgtgggaggtgattgaatcatgggggcagactccctccttgctgttctcataatagagttctcatgagatctgtttgtttgaaagtgtgtagcacttcccgctttgttctctctctctcctgctgcccatgtgaagatgtgtctgcttccccttcatcttccgccatgattgtaagttttctgagacctccccagaagcagaagcctgtatgagcccatggaaccatgggccaattaaacctctttcctttaaaattacccagtctcaggtatgtctttatagcagtgcaagaacagactaatacagatattataaggcaaggtatgtgtgaagaagcatggagatcccatgcctttcctggatacaccactctgtggtaatsttcatgtgttcagttatcagaaagctccccaaatcctgtcttcttttaccttttatggagatgtcattggataggcatgattgacaaccacgtagaaatgtgact

SEQ ID NO: 299693 - DNA, 580 bp, Homo sapiens
tatagcagtgcaagaacagactaatacagatattataaggcaaggtatgtgtgaagaagcatggagatcccatgcctttcctggatacaccactctgtggtaatcttcatgtgttcagttatcagaaagctccccaaatcctgtcttcttttaccttttatggagatgtcattggataggcatgattgacaaccacgtagaaatgtgactggacgtaaaaggtatgttctaaacccagcaaagcctgtctttacagattcttcttggcctctctgagcagcatttcttactccagcgtttggggcaggaccctgtcttaaatgagggtcttatcacccacaattaaatacagtcctaagattctgcttcattacaacaaaaaatggtaacaagggatatgggagttataagccaaaaaccatggacaaatatayttgtcctccagaacttctcttgaactgggtttaagttggggttcccatgatcccctctttgggtttgattaatttgctagagtagctcacaaaactcagggaaacactttacttacatttaccaatatatttatatctaaacatat

SEQ ID NO: 299694 - DNA, 588 bp, Homo sapiens
ttttttccttattactttaccacattatgtattattaattaaaaaaactgatttgaagtcatttatagcatagtcaagtgtttgtctaaggatatttccatgcaatgggaattttttgagtttggtctacagagcagaaacatcagtatcacctagaagaaatgcacaatctcaggattcatcccagatctgcagaataagaatcttcattttcacaagatcccacagtgatttatgtacactttaaagttagagaagtagaaggttttacaaggtcaatgactgtagtgaggagcccccatctagccccactactcctaggattctgagtctgccatgccttaagagattgttctctacagattcggtggtggatctgccagagatatttctcctgtgttttctctagtgggaagagtaccagggtatcatttagcattctgtcactctgtccagggcaagacccatagacagtaacattctgaagagaacyaactaactcttctctaccattatatctctactgctagaaagcagtgactggcatataatagctgttcgcaaataaaatgcaattggaatcctaga

SEQ ID NO: 299695 - DNA, 649 bp, Homo sapiens
tttttcttctctcaagaatcattgtcttacattgcctgacgttcaatgtcttaaaatttttgttttatgtattttgtctgtttttttattgtttcaggtaggagggtaagtcagttctctaatactctatcrcagctgatagccaaaatctctgttaatcatgttttatttaaaacttatcagcctaccaaagtacatttctagactcaaaaaagtttgcctgtctttgcaagaagtatgttgaatctgattaaaatttcccattatctgggctcccatctgttaatctctcatctgtttacaagaacatggcagcaagttctccaccaatttattactcaatttttctataaggaaaattggtacaataacattagccttcaatttttatagaagtgttctaaatatatataaacaacattcataaatggtttgaaatgtttgtaaatagaacactcaatgcaagctatattagtatacattttaatggctaaaaaacaaagtaaaactagattcttccgtttctataattctaaaatttagtttttatgatgttgtcatggtgggacaatccaatttagaactattttaaaaaatatttgttaagaagaactctttaaaagaagcctactatgatagcataaatgga

SEQ ID NO: 299696 - DNA, 495 bp, Homo sapiens
tctctcccactcaaaaaaaagcatattggaattcaagtcacatgaattcatagagataacccaaaatatgatctaatttacttgtaaagcattttgctaaattaaaaatttaaacaataattaataaattatttgtagtacattttagaayactaggaatatcattgattttactacagttacagttaaaaataaaataaaatttaggggagaaacaaaggggagggcgtaactcactactagtttagacataaattttatttcattcatcatttaaatatcaaaataatattttaaatgaaaaataaaatattcatttcattgtttcaattctccatgcccttgaaaaacacaagctatttggtttagttcacagttctctttagtatcaatttctaatacctttttaaccctaggcaaaaatcagtctgcatgcaaacataccactgagttctaaaggggctgaataatgttaaattcacaagtcagatatca

SEQ ID NO: 299697 - DNA, 465 bp, Homo sapiens
catatcttactgactatgttactggtttatactatactttgttattttagagtatattatcaagtatgtactgtatataattgtatgcaatatactttcctatacctggcaacacaagtttgtttacaccagcatcaccacaaacacatgagtcatgccacgatattacaatggctatgatgtcactaggcaatacarattttcacccccattgtaatcttatgggaccagccttatttatgcagtctatcattgacagaaataactttatgcagtacataactgtattgaagttcaggagatcaaatcacttgtcctagaatcacacaaatagaaagtggtgaaatcaatagaattctaagtctgtctgactataaaatacatgctctttccttcctaccttaatgcttccagccagacagtccacccaagaatgagtcttggtggtttctgcaaggtggtgat

SEQ ID NO: 299698 - DNA, 592 bp, Homo sapiens
gtaaaaataagaccaccccaaggtatataataatcaaactctcaaaggtcaaagacaaagagaatactaaaagcagcaagagaaaagaagcaaataacataaaaaggagctctgatttatctggcaacagacttcttatgtagacttggaaaaagtagaatggcatattcaaactgctgaagaaaaaaaaactgccaacagaaaataccatacccagaaaaaaaagcttttyttcaaaatgaagacaagagaaactctttctcaaactaaatttgagagaattcctcaccagcagattcatcttacaagaaatgctaaagagaattcttcaacctgaaaaaaaaaagaatgctaatgtgcaaaaagaaaacatttgaaaatgtagagtttgctggtaaaagtcagtatacagtcaaatttagaataatctaatacagtaattgttgtgtgtaatccactcacatctctagtatgaaaactaaaagacaaatctaccaaaaataataaaaactacaccaatttgttaagagatagccaatataaacagataattgagacaacaaaaagtcaaaatgtgaagagaaaggaatta

SEQ ID NO: 299699 - DNA, 631 bp, Homo sapiens
ggtagaaatagcagcatgtttgtgtgttggatggaataattcatcaggaaataaaaaattgatgatgtagaaaatgggaagaatygctggagcaatgcccttgagtaattgagaggggatgcaatgtattccccaagtgaaggaattgactttagatagacacgtaaattgttcatctatgattctgttgtaacaggtaggacagcagagcatgtggcatagatactggtagtgaattaatgtggtggtagaaatgtgtagaagttttcttctaacttcttttgctttctctataaagcaggaagcaaggcactgagtcaacaggacttgctggtagactgtgtgtggaatacgcacacaagaaaaggactgaaggatgactccaagttttttgttgtgaacaatgggaaaaatagagttgccatatgccagtggagtactggagcagacttatactggctcaaagccaaacattaaatttccaagaattcttcgagccagttgttaaacacagccattattaaaaattaaattacacaccttctcaattaaataatttatattaaaaacaaaaatagtaaatactcaacactgattagtttactgcattttgccatattgatgttcttga

SEQ ID NO: 299700 - DNA, 631 bp, Homo sapiens
ggtagaaatagcagcatgtttgtgtgttggatggaataattcatcaggaaataaaaaattgatgatgtagaaaatgggaagaattgctggagcaatgcccttgagtaattgagaggggatgcaatgtattccccaagtgaaggaattgactttagatagacacgtaaattgttcatctatgattctgttgtaacaggtaggacagcagagyatgtggcatagatactggtagtgaattaatgtggtggtagaaatgtgtagaagttttcttctaacttcttttgctttctctataaagcaggaagcaaggcactgagtcaacaggacttgctggtagactgtgtgtggaatacgcacacaagaaaaggactgaaggatgactccaagttttttgttgtgaacaatgggaaaaatagagttgccatatgccagtggagtactggagcagacttatactggctcaaagccaaacattaaatttccaagaattcttcgagccagttgttaaacacagccattattaaaaattaaattacacaccttctcaattaaataatttatattaaaaacaaaaatagtaaatactcaacactgattagtttactgcattttgccatattgatgttcttga

SEQ ID NO: 299701 - DNA, 631 bp, Homo sapiens
ggtagaaatagcagcatgtttgtgtgttggatggaataattcatcaggaaataaaaaattgatgatgtagaaaatgggaagaattgctggagcaatgcccttgagtaattgagaggggatgcaatgtattccccaagtgaaggaattgactttagatagacacgtaaattgttcatctatgattctgttgtaacaggtaggacagcagagcatgtggcatagatactggtagtgaattaatgtggtggtagaaatgtgtagaagttttcttctaacttcttttgctttctctataaagcaggaagcaaggcactgartcaacaggacttgctggtagactgtgtgtggaatacgcacacaagaaaaggactgaaggatgactccaagttttttgttgtgaacaatgggaaaaatagagttgccatatgccagtggagtactggagcagacttatactggctcaaagccaaacattaaatttccaagaattcttcgagccagttgttaaacacagccattattaaaaattaaattacacaccttctcaattaaataatttatattaaaaacaaaaatagtaaatactcaacactgattagtttactgcattttgccatattgatgttcttga

SEQ ID NO: 299702 - DNA, 558 bp, Homo sapiens
gtggtggtagaaatgtgtagaagttttcttctaacttcttttgctttctctataaagcaggaagcaaggcactgagtcaacaggacttgctggtagactgtgtgtggaatacgcacacaagaaaaggactgaaggatgactccaagttttttgttgtgaacaatgggaaaaatagagttgccatatgccagtggagtactggagcagacttatactggctcaaagccaaacattaaatttccaagaattcttcgagccagttgttaaacacagccattattaaaaattaaattacacaccttctcaattaaataatttatattaaaaacaaaaatagtaaatactcaacactgattagtttactgcattttgccatattgatgttcttgaggttatttatacctattatttctgtgtggtgtaaataccktataatagtgtgctactatgcatctcttcccaactgtgcattcagttacataaaactagtagtttgaaatcagtcatgattagagtatttacaccacagaaattggaaaatgctaaaaataagagctt

SEQ ID NO: 299703 - DNA, 603 bp, Homo sapiens
agctacaagtcctttattggatatgtggtcttgcaaacattttctcctagtgttcgtattgttaatccataaaatggtgttttaaagaactgctgaaggtctcacaaattcaaatgcgtttgaaagaaaatattgaaaaataacaaataccttaaaagactataaataatagtcatttcccaagtttttctgaaacaatgagaaattagtattacattttaggtagcagatgtatgaaggtcattgagacccatggggaaaagttacattttagtgtacctacaccagactgatttattctctttaccttaaattgaagacagggggatgagaacattgaagtgatttactaagaagtttatcaagcatatgccaatataattatttttttaatcctgcaagaaaatagatgtcaataaataagtcatttataagctaatgggacttatttccagtgtattgaaattgaaagagaagcttatttaaagattaagaaagacattaaggaatgcatttcagacacattaaatggtactaataatgtgctaagtatttacctctaaatgaargaaaggtctagaatttaaaaaacaactaagtgaa

SEQ ID NO: 299704 - DNA, 636 bp, Homo sapiens
taactttttttccacagaaggtaacatcgcttgttcaggaattaggacatggctatttttgggggatcacttttctacctaccacagaagggacaggtgaggggcattctaggaagtaaatgaggtgtgcacaaaggctcagaaatgtgagagagggttggggaatttggggagagtagagagtttaatatggcttgkgtgtcggttgcgagttaagagtggagagaaagaaagctgcagaggtaagaagcatctacaatataaaaagttttatggtttattctcttgcaatcttaaggagaaatgcccaagaaagcaacactgcctgaacacccttgtgcatcactgagcattagaagctgttctggagacatggaccgagcaggagaacaggtgccattgcaaggattagtgttgtcatgcatcaaaggagtacatgggcctcttctgcagggaaccacatgcaccccaggggaatgggtccctttgggggagcttaaaaataagagttaactgctaaaccccagctgcttctcaccagagctcctcagccattcctctctgaaacatttcaaggtggaatctgtagtttgggtaacgtagcttatgtaagctgtatttctctaggatctcttg

SEQ ID NO: 299705 - DNA, 636 bp, Homo sapiens
taactttttttccacagaaggtaacatcgcttgttcaggaattaggacatggctatttttgggggatcacttttctacctaccacagaagggacaggtgaggggcattctaggaagtaaatgaggtgtgcacaaaggctcagaaatgtgagagagggttggggaatttggggagagtagagagtttaatatggcttgggtgtcggttgcgagttaagagtggagagaaagaaagctgcagaggtaagaagcatctacaatataaaaagttttatggtttattctcttgcaaycttaaggagaaatgcccaagaaagcaacactgcctgaacacccttgtgcatcactgagcattagaagctgttctggagacatggaccgagcaggagaacaggtgccattgcaaggattagtgttgtcatgcatcaaaggagtacatgggcctcttctgcagggaaccacatgcaccccaggggaatgggtccctttgggggagcttaaaaataagagttaactgctaaaccccagctgcttctcaccagagctcctcagccattcctctctgaaacatttcaaggtggaatctgtagtttgggtaacgtagcttatgtaagctgtatttctctaggatctcttg

SEQ ID NO: 299706 - DNA, 636 bp, Homo sapiens
taactttttttccacagaaggtaacatcgcttgttcaggaattaggacatggctatttttgggggatcacttttctacctaccacagaagggacaggtgaggggcattctaggaagtaaatgaggtgtgcacaaaggctcagaaatgtgagagagggttggggaatttggggagagtagagagtttaatatggcttgggtgtcggttgcgagttaagagtggagagaaagaaagctgcagaggtaagaagcatctacaatataaaaagttttatggtttattctcttgcaatcttaaggagaaatgcccaagaaagcaacactgcctgaacacccttgtgcatcactgagcattagaagctgttctggagacatggaccgagcaggagaacaggtgccattgcaaggattagtgttgtcatgcatcaaaggagtacatrggcctcttctgcagggaaccacatgcaccccaggggaatgggtccctttgggggagcttaaaaataagagttaactgctaaaccccagctgcttctcaccagagctcctcagccattcctctctgaaacatttcaaggtggaatctgtagtttgggtaacgtagcttatgtaagctgtatttctctaggatctcttg

SEQ ID NO: 299707 - DNA, 461 bp, Homo sapiens
aaccaaactcaactggaactcagaggacttgggagttttctgatgtcatccataaataagctgccctggagcagtgaccaaaatggagaaaagaggagagtggttctggaggggcaaatggaagacatctggcacaaggataggctagctttttattcatcgaaggcacartgaaagatcccttaagcctcactgctgtgggtgggaagcccagtgctagttggttttcatagctctttattttgggttacataaagcaacttctgcagtcctgcaggatgtcttctggccatcactcctagctccacgtgatgccttgtgcaaggctggtcctctatcacctctctggaattgctgctcagggcaggctgctgcaaagtctgctggcagtgtcccttctcacagttcacaggtctgtctctttggaaaccatgaactgtctcctatttccattcttcagg

SEQ ID NO: 299708 - DNA, 528 bp, Homo sapiens
agagacttacacagaaaatatcctttttatagtaggyagtaggttcttttgacaagcatgtacagttggtcacatctcagactttcttgtgaaacttgtgaccactgaggaggttagataagcatctttatgagtgtttatctatgctgcagtttaaagatcttgctgcagaacaccttggtatggaggcatcaaatattgatcatcatggtagttttgcttcaagacggcatcactctgccattcaacagactgctttcctacaaagagactaccctttcctcattgtgtattcttggcacccttgttgaaagttagttgatcacctatgcctgagttcatttctgggctctatattctgttcgtttggccaatttgtctgtttttattccagtaccataatgttttaattattataactttgtaatataatttgaaatcaggaagtgtaatgcctcatattttgttctcctttcttaagattgctttggctgtttggggtcatttgtggttccacgcaaattttat

SEQ ID NO: 299709 - DNA, 585 bp, Homo sapiens
gggatatatggggttctggtgtctaaagcaagcctcaacctacaagacagaatgtcaaatggcttcagcagtcagtagtagtggtccagggagacaggtaggtcattacactgacaatacaattctgctgaatgaacaagagggtacagcttccacaggagccatttgcttggtacgcttattaatttccaatgtgccattctgggatctttcccagaaatgtcatccatgactcctgggaggaatttttccaagcaggtgtcactgctttsctgcgaatagacggagcttctgaaagcaacaggagttacctttcatgtaccaggtatcccaggcagaagcaaaagtgcccagcatatgagaggttgtagaaaatttaactagggtttccgtttagttttgcttataaacggaagatgatttaagtggttgtttcattgttttgtgaaagtaatccgagctactagcaggggccacagagtcaaatttactgggcctaatactttagaacagcaccttttgtacgttttgctgctattggatcttttgttccagtggatttttaaggggaactcatgacatgaa

SEQ ID NO: 299710 - DNA, 585 bp, Homo sapiens
gggatatatggggttctggtgtctaaagcaagcctcaacctacaagacagaatgtcaaatggcttcagcagtcagtagtagtggtccagggagacaggtaggtcattacactgacaatacaattctgctgaatgaacaagagggtacagcttccacaggagccatttgcttggtacgcttattaatttccaatgtgccattctgggatctttcccagaaatgtcatccatgactcctgggaggaatttttccaagcaggtgtcactgctttgctgcgaatagacggagcttctgaaagcaacaggagttacctttcatgtaccaggtatcccaggcagaagcaaaagtgcccagcatatgagaggttgtagaaaatttaactagggtttccgtttagttttgcttataaayggaagatgatttaagtggttgtttcattgttttgtgaaagtaatccgagctactagcaggggccacagagtcaaatttactgggcctaatactttagaacagcaccttttgtacgttttgctgctattggatcttttgttccagtggatttttaaggggaactcatgacatgaa

SEQ ID NO: 299711 - DNA, 577 bp, Homo sapiens
aatataaactgatacacagtgatgccacagtaattttgtaaactaaaggttataatgtttgaggaggtgggaaaagtgtttctcttggttcagccaaaagcacatccaggaaatgtgcatgaagttgatttctcttccccatcactaaaagcctacatagaaccttagcaggaacttagagataatttacatgaggaaacttactatagtggcagtacactaacacgttggactttcatttttttaaaaaggtattttaacttgttaccaaaaacattgcagttgagataaggtcttttgaatttctgtggatttgcttggctccttttttgccatgttctcatatgaaacacggtagggtattttctgctccacattttaattattctttcaactctatttatctgttagaaagcagagattcttaattgctttaaagagaagacaacattaaaacccagagtaggtcagaagaatcctggtaagtgactgtttcacttcgaatgggattgtttggaattytaaagtcctctaacttctcatccttaaataccttttgaagatgaattacaggcat

SEQ ID NO: 299712 - DNA, 594 bp, Homo sapiens
tgaacacagtttgaacactcagcagtgtatgagtggttgaagtatggccactgggattggccaagactcagctatagttatacgcacatactagtaagttcggttttcaatcttatctacctatttagctaggttgcaatttgtccacaaggactcaaatatagaagtatggtgtccttctcgggccatatttagtttgctttaacaacatgcaagtgtgcattcatctaaagacgcaagtgattgattcaatrtaatctataactaaggtctgggtcctggcaatcattttctagagcctcagtaaatttacttaatttagatgggtcctggtaccaaaggtgatcacccttatcttgtctccagctaaggtaaggaggtcaggggagtttctttagatccccagtaaaacttgtttaatcgtagatgggtcctggtatgaggagtgtaagaattccttcattatctcgacatgcttcaaggcccaggaaaggcctgagcaagactcttggtgggcttctgttacattccagcctttgtgtaaggctctttcagcctttaatatttaacttaaccattcagtcagtgctgaaa

SEQ ID NO: 299713 - DNA, 565 bp, Homo sapiens
cctccttggtactgaatagtgagtgagttctcatgggatctggttgtttaaaagtgggtagtacctacccccaccgccgcttcctcctgctccagcaatgtgaagtgctagcttcccctttgccttccaccatgattgtaattttcctgaggccaccccaaaagatgaccagatgccagcaccatgcttcctgtatagcctatggaaccatgagccaattaaacctcttttctttataaattacccagtctcaggtatttatttatagcagcatgataacagagtgatacagcagatcaaggactcatacatcaaagggaagagatgaggaactttatcaaatatcaagcatgatcagatatgaaagacaggaggattattgctaaactgattcagcaggattctagctaaaactrgggtatgcagacctggcaaggatggggccatggtcaaggcctagttgagaagagggctcagaggatcctgactaagccttggccaaagagacaatcattgtcagtctacacaaaaacttgtacatgaatgttcatagcagcattattca

SEQ ID NO: 299714 - DNA, 556 bp, Homo sapiens
attgctaaactgattcagcaggattctagctaaaactggggtatgcagacctggcaaggatggggccatggtcaaggcctagttgagaagagggctcagaggatcctgactaagccttggccaaagagacaatcattgtcagtcyacacaaaaacttgtacatgaatgttcatagcagcattattcataatagccaaaaagtagaaacaacccaaatgtctattaactgataaataggcaaacaaaatgagatttatccatacaatggaatattgttccacaattaaaatgttctggtccatcctacaaaatgagtgaacattgtaaacaatatgctaagtaaaagaagccagtcataaaagaccacatattattttatgaatccatttatatgagatatgcagaacaggcaaacccactgagacagaagctaaattaccaattgccagggacagagagaacaatattccattctatggattgtatggagattggggaattgactggtaatgggtacatggcttcctttgagagtaatgaaaatgttctaaaatta

SEQ ID NO: 299715 - DNA, 556 bp, Homo sapiens
attgctaaactgattcagcaggattctagctaaaactggggtatgcagacctggcaaggatggggccatggtcaaggcctagttgagaagagggctcagaggatcctgactaagccttggccaaagagacaatcattgtcagtctacacaaaaacttgtacatgaatgttcatagcagcattaytcataatagccaaaaagtagaaacaacccaaatgtctattaactgataaataggcaaacaaaatgagatttatccatacaatggaatattgttccacaattaaaatgttctggtccatcctacaaaatgagtgaacattgtaaacaatatgctaagtaaaagaagccagtcataaaagaccacatattattttatgaatccatttatatgagatatgcagaacaggcaaacccactgagacagaagctaaattaccaattgccagggacagagagaacaatattccattctatggattgtatggagattggggaattgactggtaatgggtacatggcttcctttgagagtaatgaaaatgttctaaaatta

SEQ ID NO: 299716 - DNA, 559 bp, Homo sapiens
agtgaacattgtaaacaatatgctaagtaaaagaagccagtcataaaagaccacatattattttatgaatccatttatatgagatatgcagaacaggcaaacccactgagacagaagctaaattaccaattgccagggacagagagaacaatattccattctatggattgtatggagattggggaattgactggtaatgggtacatggcttcctttgagagtaatgaaaatgttctaaaattaaacagcagtgatggttgcaycaaactgtaaatatactaaaaacactgaattgtatgtttttaaagggtgaattttttggtatgtgagttatatctcaataaagctgttattaaaatattttcagacatttccaaaggctacactccagacatacactaatttgctcaatcctcattttttcccttttttcttcccccatgacagcagaaaaataattatccttactttattatgaagagcaaatccactttctctagtttctgctccctgcgtcagtcccaggttctcttcctctacgtgttctgctaacaaaatg

SEQ ID NO: 299717 - DNA, 559 bp, Homo sapiens
agtgaacattgtaaacaatatgctaagtaaaagaagccagtcataaaagaccacatattattttatgaatccatttatatgagatatgcagaacaggcaaacccactgagacagaagctaaattaccaattgccagggacagagagaacaatattccattctatggattgtatggagattggggaattgactggtaatgggtacatggcttcctttgagagtaatgaaaatgttctaaaattaaacagcagtgatggttgcaccaaactgtaaatatactaaaaacactgaattgtatgtttttaaagggtgaattttttggtatgtgagttatatctcaataaagctgttattaaaatattttcagacatttccaaaggctacactccagayatacactaatttgctcaatcctcattttttcccttttttcttcccccatgacagcagaaaaataattatccttactttattatgaagagcaaatccactttctctagtttctgctccctgcgtcagtcccaggttctcttcctctacgtgttctgctaacaaaatg

SEQ ID NO: 299718 - DNA, 559 bp, Homo sapiens
agtgaacattgtaaacaatatgctaagtaaaagaagccagtcataaaagaccacatattattttatgaatccatttatatgagatatgcagaacaggcaaacccactgagacagaagctaaattaccaattgccagggacagagagaacaatattccattctatggattgtatggagattggggaattgactggtaatgggtacatggcttcctttgagagtaatgaaaatgttctaaaattaaacagcagtgatggttgcaccaaactgtaaatatactaaaaacactgaattgtatgtttttaaagggtgaattttttggtatgtgagttatatctcaataaagctgttattaaaatattttcagacatttccaaaggctacactccagacatacactaatttgctcaatcctcattttttcccttttttcttcccccatgacagcrgaaaaataattatccttactttattatgaagagcaaatccactttctctagtttctgctccctgcgtcagtcccaggttctcttcctctacgtgttctgctaacaaaatg

SEQ ID NO: 299719 - DNA, 598 bp, Homo sapiens
agtgggggccagctgggaccctccagggcacctttgcctccatctataaccaaatttgaccatgtctacagttttacttctgcattccaattttttgtacaagttcctttattttttttggctaacactaacaactaacctggagtcacacagagatgatattttggattgtatagtttccgtctttaattaacttgacattcacaatacagcaaaaaaaattatataagaaaacacacatacacacacacacacacaattagcctgttattatctattataaaattttctgaaatggcttcataaataggtttacacatatgctgtgatttccatkttgttatttctctcttcagtaataacttattttaaagtaatgctaaataggattttttagagcaaccaaaaagtttaatagtttttgtctctcttgggtgcatcctatttggcagaaaatcttcctcatcacaagtgcttaaaatagcatgtgaaaccctgcgacagatactgtacgatttcctccagttcagaggctgtggatgtcaacagacgtcccatcagctagaaactcttatacatcacaagttcttgttgtctt

SEQ ID NO: 299720 - DNA, 598 bp, Homo sapiens
agtgggggccagctgggaccctccagggcacctttgcctccatctataaccaaatttgaccatgtctacagttttacttctgcattccaattttttgtacaagttcctttattttttttggctaacactaacaactaacctggagtcacacagagatgatattttggattgtatagtttccgtctttaattaacttgacattcacaatacagcaaaaaaaattatataagaaaacacacatacacacacacacacacaattagcctgttattatctattataaaattttctgaaatggcttcataaataggtttacacatatgctgtgatttccattttgttatttctctcttcagtaataacttattttaaagtartgctaaataggattttttagagcaaccaaaaagtttaatagtttttgtctctcttgggtgcatcctatttggcagaaaatcttcctcatcacaagtgcttaaaatagcatgtgaaaccctgcgacagatactgtacgatttcctccagttcagaggctgtggatgtcaacagacgtcccatcagctagaaactcttatacatcacaagttcttgttgtctt

SEQ ID NO: 299721 - DNA, 598 bp, Homo sapiens
agtgggggccagctgggaccctccagggcacctttgcctccatctataaccaaatttgaccatgtctacagttttacttctgcattccaattttttgtacaagttcctttattttttttggctaacactaacaactaacctggagtcacacagagatgatattttggattgtatagtttccgtctttaattaacttgacattcacaatacagcaaaaaaaattatataagaaaacacacatacacacacacacacacaattagcctgttattatctattataaaattttctgaaatggcttcataaataggtttacacatatgctgtgatttccattttgttatttctctcttcagtaataacttattttaaagtaatgctaaataggattttttagagcaaccaaaaagtttaatagtttttgtctctcttgggtgcatcctatttggcagaaaatcttcctcatcacaagtgcttaaaatagcatgtgaaaccctgygacagatactgtacgatttcctccagttcagaggctgtggatgtcaacagacgtcccatcagctagaaactcttatacatcacaagttcttgttgtctt

SEQ ID NO: 299722 - DNA, 612 bp, Homo sapiens
aaacacggaccagaagagtgtgcagttgcaggattttaatagagtgaaaacagagctcctgtacaaagggaggggacccaaagcgggtaaccattgctggctctaatgcctgggtttatatcctgatcattgtccctccccctgtgctctcagttgatagatgattagctatttctttacctcctttttttgcctaattagcattttagtaagctctctttactacctgattggtggggtgtgagctaagttgcaagccctgtgtttaaaggtggatgcagtcaccttcccagctaggcttagggattcttagtcagactaggaaatccagctagtcctgtctctcaggcccccgtctcaacaagaaaacccaagkactgccagggaggttagccgatgacgactctaactgcttcctgctgaattggggtgtagtaggggttgtgcagttgggatttccttgggaggagtgacttcgatgtcattaacattggagcatgggctagcaggccagtccaggggtccatggtagatcttagtcatggactgcatctgggactccatttgaagaacatttgtagctttacagctttgattctggaagagacaaac

SEQ ID NO: 299723 - DNA, 612 bp, Homo sapiens
aaacacggaccagaagagtgtgcagttgcaggattttaatagagtgaaaacagagctcctgtacaaagggaggggacccaaagcgggtaaccattgctggctctaatgcctgggtttatatcctgatcattgtccctccccctgtgctctcagttgatagatgattagctatttctttacctcctttttttgcctaattagcattttagtaagctctctttactacctgattggtggggtgtgagctaagttgcaagccctgtgtttaaaggtggatgcagtcaccttcccagctaggcttagggattcttagtcagactaggaaatccagctagtcctgtctctcaggcccccgtctcaacaagaaaacccaaggrctgccagggaggttagccgatgacgactctaactgcttcctgctgaattggggtgtagtaggggttgtgcagttgggatttccttgggaggagtgacttcgatgtcattaacattggagcatgggctagcaggccagtccaggggtccatggtagatcttagtcatggactgcatctgggactccatttgaagaacatttgtagctttacagctttgattctggaagagacaaac

SEQ ID NO: 299724 - DNA, 612 bp, Homo sapiens
aaacacggaccagaagagtgtgcagttgcaggattttaatagagtgaaaacagagctcctgtacaaagggaggggacccaaagcgggtaaccattgctggctctaatgcctgggtttatatcctgatcattgtccctccccctgtgctctcagttgatagatgattagctatttctttacctcctttttttgcctaattagcattttagtaagctctctttactacctgattggtggggtgtgagctaagttgcaagccctgtgtttaaaggtggatgcagtcaccttcccagctaggcttagggattcttagtcagactaggaaatccagctagtcctgtctctcaggcccccgtctcaacaagaaaacccaaggactgccagggaggttagccgatgacsactctaactgcttcctgctgaattggggtgtagtaggggttgtgcagttgggatttccttgggaggagtgacttcgatgtcattaacattggagcatgggctagcaggccagtccaggggtccatggtagatcttagtcatggactgcatctgggactccatttgaagaacatttgtagctttacagctttgattctggaagagacaaac

SEQ ID NO: 299725 - DNA, 547 bp, Homo sapiens
catccagattaactaaacattttggatcctgctgcagcaactttctcatttggacctgttctataaacttagaattgttctatgtccttctgaacttcagcttcgctaacacyacatttgcagatgctcagcattcttttcctttaggtccttggttaattaaccctcctttcatcttttgtcctgtccctttggaaaaaaaaaaaaaaggatccaccttatactcccttccagttctgtcagtctatatttctaagactccagcagatttcattcatactttttgctaaacctaaaatggtatattaacaaacatgtaccaagcaccttcctctaccagttttcccaactactacaaatttcacttcctgcaagtattagcacatgctgaaaatctgctctgacgtaagcactgcagaatttctcaccctgctcaagcaggtgcctgacctgagaatctggagaaaatcatgttctaaacaacttgttctaggtcgtttccttcatctaaacttagagcccctccttgaccctgaactgtacttca

SEQ ID NO: 299726 - DNA, 547 bp, Homo sapiens
catccagattaactaaacattttggatcctgctgcagcaactttctcatttggacctgttctataaacttagaattgttctatgtccttctgaacttcagcttcgctaacactacatttgcagatgctcagcattcttttcctttaggtccttggttaattaaccctcctttcatcttttgtcctgtccctttggaaaaaaaaaaaaaaggawccaccttatactcccttccagttctgtcagtctatatttctaagactccagcagatttcattcatactttttgctaaacctaaaatggtatattaacaaacatgtaccaagcaccttcctctaccagttttcccaactactacaaatttcacttcctgcaagtattagcacatgctgaaaatctgctctgacgtaagcactgcagaatttctcaccctgctcaagcaggtgcctgacctgagaatctggagaaaatcatgttctaaacaacttgttctaggtcgtttccttcatctaaacttagagcccctccttgaccctgaactgtacttca

SEQ ID NO: 299727 - DNA, 625 bp, Homo sapiens
acttcagtcttgaaggtaccacgcagttacctccatttactacccacaagggactgaactaaatgttcctgaaggtcctttccagcagtaaaatttatgactctatataagaaccagtttcactatctgccagagattacacataaatgcttttcttttatctgagcttatgtcaggtgggtcatcctctaaatctaaaagcaaaaccattttatttaggctccttttagaacaaacagaacaaaaacaaaacaagtcgctggaatataacttttgttttttggttttttggtttttgttattyttttttctttgctgtaagaatggagaaagggagtctttgtgtccttaaatcgatcatttttactgttggaaacattacttgatatgatttatttcattacaaaatagattctaataagcattcagagtaacacatgatggttaacattaacagcgaaataatgaaatctcaactgagtgagaccttggttagtacagctaacgccaaaaccttgtatcttttattgggcctgaatcccactggtaaaataaatcaataatgtaacacctggtcctgcactgaaggaaatttggaaatatcttgttccacacctagaaaaac

SEQ ID NO: 299728 - DNA, 542 bp, Homo sapiens
gtttctaaaatggctggctggaacaagaggagtagccaggggccagaaaacagctcttccacatataaagctaagtgacttaaagagatatgtaattgttcattaattcaacacttattgaatgcatactctctacagagtcctgtattacatgctaaaatttgcaacagtgaataataaactgctcctacccttgtttaccccaggtactaggaaactgctcagcagctaaaaagattctcatacctaaaaagattctcaagctaggttttctacatatatgcaaataatatgcaagacatatgattattatcctacgacacttaggatatttcatctggtagtgctgtcttaggaactgagcttccactgagcgaaatactcaacttttgtggtagaaatagtacatgatgctatctcttccctccatatttattcagattttatgtgtgtattaggtgttctagaaattcatgctttataagttggrccccaactagctggtgcttaaaaatactttatttattcccaattgattgttt

SEQ ID NO: 299729 - DNA, 577 bp, Homo sapiens
ttggtttggttgatttttctccattgaagattttactgactatattttatgctaaaataacatcaatgttttcctttttttttgtctttagctacttggaggtgggttctctccttccatctccaaccagtgactagagtaatctgagatttggagataaagatgatagaaaactcatctctctttcatgtttattttcctatgttaagaacaggcgacgaaaatacgtgaatggtttcatcagtaatgggtcctagtgacaagaaactacaacttagtcatttatatctcagaagttttgttttaaccaatccacattatatttctttctttttaaaaatttcagcttttacttttgatacaaggggtacgtgtgcaggattgttacatgggtatattgcacctaggtactaagtatagtacccaataggtagcttttcaacacatccccttttaatagtccacagggtctattgttcccatgtttatccatgtatgctcaatgtgtaggtcctacttatragtgagaacataaagtatttggttttctgttcctgcataaattcacttaggattg

SEQ ID NO: 299730 - DNA, 501 bp, Homo sapiens
gtatgttatcttttgacaagtgtctgttcatgtcctttgcccattgttaaaatgcggttatttgctttttgcttgttgatttgtttaaattccttatagattctggatactagacctctgttggatgcatagtttcaaatattttcttccattgtgtaggttgactgtttactctgttgatggtttcttttgctgtgcagaagctctttagtttaattaggccccacttgtcaattttcatttttgttgtaattgtttttagggacttagccaaaaattctttgccaaagccaatgtcaagaagggtatttcctaggttttcttttagaatttgtatagtttgaggtcttacatttaaatatttaatctttcttggttaatttttgtatatggtgaaaagtaagtgtctggttatattcttctgcatatgcctaataaattttcccagsaccattttttgaatagggagtcctttccccattccttttttttgttggtctt

SEQ ID NO: 299731 - DNA, 499 bp, Homo sapiens
tggttttatattcaattattacaaaagccctctggttctctgataactgaagacaaatatgtttcaggttattattattttttttctatcaatcaggcttttagtctaccatggtgcttggaatcagtcatcaataaccaaggcacaattaaaagagttcgacagtatgtataaatactgacagtatggtaaaataattaattaatatacagtcataattcaagtcttccctaaaaacaaggcccactcaagtacatacgtttaaatgcaataactagagcttgctttagacatatcaatgaaaaagattcctccaaaagcaaatctgaaagtaaggaacaatgtattttgaataatttcttgtttgtcaagacagtgcaatattttctagaataagtaaatcaggtgcatggtagtacyttaatatcaatttttttgattttgttatttattttttaaagactggatttaaactcctgatataaagcagacttttaat

SEQ ID NO: 299732 - DNA, 299 bp, Homo sapiens
ctcaagtgtgtaatcccagcacttcaggaggccaacgccgccggaggatcccttaagcccaggagttcaagatcaacctgggagacatagctagaccctgtcaaaaaaaaaaaaaaaaaaaaatctgcttaggaactatgttccaagggtttcctgcagaaacaggaatcgtttccatggtgtgtgtgtgtagtctgtaattttgtcaaacttttgtgtgtgcttttaatggtttatgagaacatcaattaagaacatcaaatggtttccragaaaagaccctagagtagaaaattacc

SEQ ID NO: 299733 - DNA, 550 bp, Homo sapiens
tgctctcttccttgttaagtttatgattctgaactctggctgattgaccctaccttgtctcagagttggcactggagttatttttcagcaagttagtctttatccttctcatgagaaaaagttattttttatttgtaataaaaaatataataygtgctgtttctcagataagatttttctggataggttttgataagacacctatttagagttttacaagagaatgtcctataagagtttgttttgtttttaaggattcctctggatttgactgctctcccatggcccacattgtaaatttttgtcagtattttactcaagttatataaaacatagtacatcctagttcctatagcaatagagaataaaggtggtttttatttttctaaaattttgcatgcattccttcatgtcctgggaattcctgagatttgtggtaaatagaatccttatattttttcatcaaatgtatctctggtaaataaagcttataaaattttaatttcatcctggaatatatctgatgggggattcatttcacagtctgaag

SEQ ID NO: 299734 - DNA, 550 bp, Homo sapiens
tgctctcttccttgttaagtttatgattctgaactctggctgattgaccctaccttgtctcagagttggcactggagttatttttcagcaagttagtctttatccttctcatgagaaaaagttattttttatttgtaataaaaaatataatacgtgctgtttctcagataagatttttctggataggttttgataagacacctatttagagttttacaagagaatgtcctataagagtttgttttgtttttaaggattcctctggatttgactgctctcccatggcccacattgtaaatttttgtcagtattttactcaagttatataaaacatagtacatcctagttcctatagcaatagagaataaaggtggtttttatttttctaaaattttgcatgcattccttcatgtcctgggaattcctgagatttgtggtaaatagaatccttatattttttcatcaaatgtatctctggtaaataaagcttataaaattttaatttcaycctggaatatatctgatgggggattcatttcacagtctgaag

SEQ ID NO: 299735 - DNA, 456 bp, Homo sapiens
agcatcctaagttcagagtccttctagagttgtgattttccccttttataattgttttgcctcatataatttggctatttcttttatagacttatcgttgagacttttcaaaacattcaattgattttcttagaaacaattgaatttttcttactcagctgtctttattttatttgaaatgtagttcaattatatgattaaagtaacttgtccccagtgttttaaacaggtgtaggaatgaatgcgtgggactgtgggaagcatgcctgacagttaggtggtaggaacagaawgtgtgggcaaacaagaagacagcagcttcctaattgagaagacttcaggtggggcatcattcagtagattttgtggtatgcagagtgtcagttaagtttaggacctaattaaggggaggtcagttaaaagagcttctgatgtaaataaagcaaatttgcaata

SEQ ID NO: 299736 - DNA, 576 bp, Homo sapiens
tgcttcccaagctcacatcacaagaaaaagtagcaactttttctgtttatgttcttttttgttgattcttttctccacaatatcagatttgtgtcatgagatggttcaaacattactagctctgcttgagcccctcagagaaagatatgtgtatacatacacatatatgttagtaatttgtgattgatattctttgcttatagacttgatttttttgtttaatatagtattctgtttttaggaatcatactaaactgtttcctccctgtatggctgattataagctatgactagcaaaccagattttatttgcagttgtttgaaacttcatttttcttatatgacctgattaatgcactctgaacatgaatcagtgtatcctgccctgttctttgttttgaatacrtctgtcattttctgcctcacattattttccttgatttcaagtcacttgcttcttattttcaaataaaataatttttaagaatattattctgcttcagtcaatttttgctcagaagaccgctccaacgaacaaccctaaactcttagtggtttatagcaacagaggtttat

SEQ ID NO: 299737 - DNA, 549 bp, Homo sapiens
tcgttttaaattcattaactagactcccctaaagatgagtttatttcacttgtgattgagtctagctctagaagggatgagattataaagtccaactctatcattttacagataaaataagagtactgatgataagaggcttccccaaggtgacagagcctcagagcggccaagccaaagccagaagatagtcttgataaagtgttcttcctgtcatataccacatataaggaactactctaagaatatattaatatcagatgtagctaggtaatggaatgtaagcttctcctgtgcctgagactgaggccagaaagttaactgtatgttttgagcccagtgcttgaccaaaaaagaataattttgtaagtcactgaagtaaagagaaagaataaaaaattatatggggccaaattcccttcagcccataaatgcattggattattttaggctcatttggaaaatattttatctagtgaagttaaaattatagttgcataatttgmtaactaattctacttcattcctgacctgattattctagttctc

SEQ ID NO: 299738 - DNA, 467 bp, Homo sapiens
tgcctaggccgcaggcagggctgcattgctagggcagctcccggctctcactgctctcactggcgcattggggtaatgagtagtgaggatttttatagtcttgccatagctctgccactaatcagtcttgtaacgttgggcaagttgctgactttctgagactttactttctcatctgcatataggaaaaggtgagagtggaggtgaggtacacaagagagcctgctggatcygaaggggattgattcctcttgtttgggatcttttgggaacctgcagcttcttggcatctctttctgttctgatcacagaagcctggaggattgctaggttgccctagtgtggttaccaaaaactttcagtgaccgtaggtcagaccttcctcagtcaatactgcagccacttgcttgttaactgccagggaataatcaattattattggccttgtttctattatgttgtgtttt

SEQ ID NO: 299739 - DNA, 512 bp, Homo sapiens
ggtagtgcatcacctcaccctggaagcacaaggggttggggaacttcctcctctagccaagggaagctgtgagggactgtaccgtgaggaacagtgcattctggctcagatamtatgcttttcccacagtcttcgcaacccacagaccaggagattccctctggtgcctacaccaccagggccctgggtttcaagcacaaaactgggcggctgtttgagcagacaccgagctaggtgcaggagttttttttttataccccagtggtgcctggaatgtcagcaaggcagaaccgttcactcctctggaaagggggctgaaaccatggagccaagtggtctagctcagtggatcccacccccatgaagcctagcaaactaagatccactagcttgaaattctcactgccagcacagcagtctgaagtcaacctgggatgataaagcttggtgggggagaggcatcagccattaatgaggcttgagtaggtggttttcccctcacagtgtaaaca

SEQ ID NO: 299740 - DNA, 512 bp, Homo sapiens
ggtagtgcatcacctcaccctggaagcacaaggggttggggaacttcctcctctagccaagggaagctgtgagggactgtaccgtgaggaacagtgcattctggctcagatactatgcttttcccacagtcttcgcaacccacagaccaggagattccctctggtgcctacaccaccagggccctgggtttcaagcacaaaactggkcggctgtttgagcagacaccgagctaggtgcaggagttttttttttataccccagtggtgcctggaatgtcagcaaggcagaaccgttcactcctctggaaagggggctgaaaccatggagccaagtggtctagctcagtggatcccacccccatgaagcctagcaaactaagatccactagcttgaaattctcactgccagcacagcagtctgaagtcaacctgggatgataaagcttggtgggggagaggcatcagccattaatgaggcttgagtaggtggttttcccctcacagtgtaaaca

SEQ ID NO: 299741 - DNA, 512 bp, Homo sapiens
ggtagtgcatcacctcaccctggaagcacaaggggttggggaacttcctcctctagccaagggaagctgtgagggactgtaccgtgaggaacagtgcattctggctcagatactatgcttttcccacagtcttcgcaacccacagaccaggagattccctctggtgcctacaccaccagggccctgggtttcaagcacaaaactgggcggctgtttgagcagacaccgagctaggtgcaggagttttttttttataccccagtggtgcctggaatgtcagcaaggcagaaccgttcactcctctggaaagggggctgaaaccatggagccaartggtctagctcagtggatcccacccccatgaagcctagcaaactaagatccactagcttgaaattctcactgccagcacagcagtctgaagtcaacctgggatgataaagcttggtgggggagaggcatcagccattaatgaggcttgagtaggtggttttcccctcacagtgtaaaca

SEQ ID NO: 299742 - DNA, 632 bp, Homo sapiens
tcttttactgactgctatcctcttgcctgcacctgcacttctgttgtgcttggatgacaaagcagacagctctaactcaaatcrtggagagctctgtgaagcttggtgttctcttgttttcttttctatcagttttgtttggcctcagtgacccagatgtaggctaatgccaagcttatatactttaataatatttagtacaactgaaaaataacccacctaggtttgattcttacagacctatttagagtctggatgatctctgattattgctcattattctcgaagttgttcactgggggactattatagcctctgttatagcactagctgtcaaatctagtttttaaaatgctatcctttcatccatccattcatcatacatgtgttgggcacttctatatttaagccattgcatgttagttgttatggattttatcataatatagaagatcactaaggcagtatgattcttagttcccaaattcaggtaagcaaaatcaaaaattgtatttctctattttctttaaggtcaagctgggagataattcagcttcagtcttcactaggattccctgagcaaagctattcaaaggccctagactttcatataagttcagacatatcagaga

SEQ ID NO: 299743 - DNA, 632 bp, Homo sapiens
tcttttactgactgctatcctcttgcctgcacctgcacttctgttgtgcttggatgacaaagcagacagctctaactcaaatcatggagagctctgtgaagcttggtgttctcttgttttcttttctatcagttttgtttggcctcagtgacccagatgtaggctaatgccaagcttatatactttaataatatttagtacaactgaaaaataacccacctaggtttgattcttacagacctatttagagtctggatgatctctgattattgctcattattctcgaagttgttcactgggggactattatagcctctgttatagcactagctgtcaaatctagtttttaaaatgctatcctttcatccatccattcatcatacatgtgttgggcacttctatatttaagccattgcatgttagttgttatrgattttatcataatatagaagatcactaaggcagtatgattcttagttcccaaattcaggtaagcaaaatcaaaaattgtatttctctattttctttaaggtcaagctgggagataattcagcttcagtcttcactaggattccctgagcaaagctattcaaaggccctagactttcatataagttcagacatatcagaga

SEQ ID NO: 299744 - DNA, 632 bp, Homo sapiens
tcttttactgactgctatcctcttgcctgcacctgcacttctgttgtgcttggatgacaaagcagacagctctaactcaaatcatggagagctctgtgaagcttggtgttctcttgttttcttttctatcagttttgtttggcctcagtgacccagatgtaggctaatgccaagcttatatactttaataatatttagtacaactgaaaaataacccacctaggtttgattcttacagacctatttagagtctggatgatctctgattattgctcattattctcgaagttgttcactgggggactattatagcctctgttatagcactagctgtcaaatctagtttttaaaatgctatcctttcatccatccattcatcatacatgtgttgggcacttctatatttaagccattgcatgttagttgttatggattttatcataatatagragatcactaaggcagtatgattcttagttcccaaattcaggtaagcaaaatcaaaaattgtatttctctattttctttaaggtcaagctgggagataattcagcttcagtcttcactaggattccctgagcaaagctattcaaaggccctagactttcatataagttcagacatatcagaga

SEQ ID NO: 299745 - DNA, 632 bp, Homo sapiens
tcttttactgactgctatcctcttgcctgcacctgcacttctgttgtgcttggatgacaaagcagacagctctaactcaaatcatggagagctctgtgaagcttggtgttctcttgttttcttttctatcagttttgtttggcctcagtgacccagatgtaggctaatgccaagcttatatactttaataatatttagtacaactgaaaaataacccacctaggtttgattcttacagacctatttagagtctggatgatctctgattattgctcattattctcgaagttgttcactgggggactattatagcctctgttatagcactagctgtcaaatctagtttttaaaatgctatcctttcatccatccattcatcatacatgtgttgggcacttctatatttaagccattgcatgttagttgttatggattttatcataatatagaagatcactaaggcagtrtgattcttagttcccaaattcaggtaagcaaaatcaaaaattgtatttctctattttctttaaggtcaagctgggagataattcagcttcagtcttcactaggattccctgagcaaagctattcaaaggccctagactttcatataagttcagacatatcagaga

SEQ ID NO: 299746 - DNA, 582 bp, Homo sapiens
ttgttatggattttatcataatatagaagatcactaaggcagtatgattcttagttcccaaattcaggtaagcaaaatcaaaaattgtatttctctattttctttaaggtcaagctgggagataattcagcttcagtcttcactaggattccctgagcaaagctattcaaaggccctagactttcatataagttcagacatatcagagaggtcctatgggtcactgctggttcatttttctatactagttactgatgatacacacagggttgtagtgtaaaaggatccaacaggatggatcattctgatcctgctgtgccacccttggtattgacrtttttttcggtcaaattctagtggctcagactggcctctctcagtgtactgtgcagccattccttccagaggctctttagagagcaaagcgtagttcccctgtgccccacagatcacctttcccgtcccagtctaaaaggatcactttctctcctgtccttttttccaggatactgtttactggcttaagttttaggaaaatggagccacaaaaggaagcatcaagcaggcaagttgtgattgttg

SEQ ID NO: 299747 - DNA, 582 bp, Homo sapiens
ttgttatggattttatcataatatagaagatcactaaggcagtatgattcttagttcccaaattcaggtaagcaaaatcaaaaattgtatttctctattttctttaaggtcaagctgggagataattcagcttcagtcttcactaggattccctgagcaaagctattcaaaggccctagactttcatataagttcagacatatcagagaggtcctatgggtcactgctggttcatttttctatactagttactgatgatacacacagggttgtagtgtaaaaggatccaacaggatggatcattctgatcctgctgtgccacccttggtattgacgtttttttcrgtcaaattctagtggctcagactggcctctctcagtgtactgtgcagccattccttccagaggctctttagagagcaaagcgtagttcccctgtgccccacagatcacctttcccgtcccagtctaaaaggatcactttctctcctgtccttttttccaggatactgtttactggcttaagttttaggaaaatggagccacaaaaggaagcatcaagcaggcaagttgtgattgttg

SEQ ID NO: 299748 - DNA, 633 bp, Homo sapiens
tggcagatgtggactttataataaccatgactgttatactctagcacatggaagaaaagatgagacaaaaagaggaagagatggagaattttactaacaaattgaaatgtataaatggcaaatttatacatttagagcaaatttatattttagagcagagaactcagtgtgcaaattacatagtaggtatgacaaagcaaaagacagaatgaatgaaaaggaaaagaagtcagtagaaaatattgaaaatgaattacagagattaaactgatatgtgagacagtgaaaatatctaatacatctgtaatgttaggaccttttagcttagcaggagaggakgtagaaaatgggacagaagcagttttgatgaggtaatggctaagaattttccaggactttttaaaaacattatctgatgaattgaggaagctgtatgagcctgaaacagtgtcagtagaaagacggttacacctacagatatcttagtaaaactacttaaaccaagacaatcctaaaagcagctagaaaaaaaaggagacattaaaaaagaaacaataagagtgagagttgatttttaacagaaaaattaagatagtagacaactgaataatatttttaagatgcaaaaagaaa

SEQ ID NO: 299749 - DNA, 626 bp, Homo sapiens
tagccagtttcccaaaaattgttagtaagagcttgtaggaaacgttgtttttttttttcttttctgggcttatagatcacttgtatctccaaaagatgtgaaaaataagtttaatagtagttaaattgtgttaaacatattttgtcattttaaagttcttgattatactccaaatttacttaaaactgtgtaagaagttcttcattttttaattcaaattatgtggtatctggccagacatggtggctcatgcctgtaatcccagctctttgggaggccaaggtggaaggatcacttgaggaaaggagtctgagaccagtctgggcaatacagtgagatcctgtctctacagttttctttttttaaaaaacagccaggtatgatagtgcactgtagtcccagctagtggggaagctaaggcaaggagctcacttgagcccagaagttcaaggctgtagtgagccataatcacaccactgcactctagcctgggcaatagagcaagaacctatctcaaaataaataaaataaaacatggtatctgtacaaaaataaacatttaagacaataatgtattcctgaaaagtwcatatagaattcctaattgtgcaccaagcacaaagaat

SEQ ID NO: 299750 - DNA, 633 bp, Homo sapiens
tggcagatgtggactttataataaccatgactgttatactctagcacatggaagaaaagatgagacaaaaagaggaagagatggagaattttactaacaaattgaaatgtataaatggcaaatttatacatttagagcaaatttatattttagagcagagaactcagtgtgcaaattacatagtaggtatgacaaagcaaaagacagaatgaatgaaaaggaaaagaagtcagtagaaaatattgaaaatgaattacagagattaaactgatatgtgagacagtgaaaatatctaatacatctgtaatgttaggaccttttagcttagcaggagaggaggtagaaaatgggacagaagcagttttgatgaggtaatggctaagaattttccaggactttttaaaaacattatctgatgaattgaggaagctgtatgagcctgaaacagtgtcagtagaaagacggttacacctacagatatcttagtaaaactacttaaaccaagacaatcctaaaagcagctagaaaaaaaaggagacattaaaaaagaaacartaagagtgagagttgatttttaacagaaaaattaagatagtagacaactgaataatatttttaagatgcaaaaagaaa

SEQ ID NO: 299751 - DNA, 583 bp, Homo sapiens
tgtaattgatctcctgaatttcaaatttagaggtactgttaatcaactatgtgcaagtgacttccctgcttgaaatgcgaatgaagagatgctgtgctatctctttagaatgaaagtgacagaatttaaagatattaaatgatattatagaatagatttttattttgctgaaaaaccttattttaaaataaagttcctcgcaacaaatttcatctcaagtagagtggtggcccatcttcagtgttgactaaagttaaatgggaatctgagaaggacttgattaaatgatcatgtcagaagtaaaataaagctgtctagaagaggaagcatgaaaaatctcaggccttcttcacttgattcaccaatgattctgatgcasgtgcacgtgaattaaaagagctcatcaaagttgctctttgggactgtgcatggtggcttatacaaataattgcaccactttgaaaagctgaggtgggaggatatctcgaaaccataatttgttttttgtatagacactgtcttgccacacagcaagatatttattttgctgaaaaaccttattttaaaataaaattctcaccaa

SEQ ID NO: 299752 - DNA, 583 bp, Homo sapiens
tgtaattgatctcctgaatttcaaatttagaggtactgttaatcaactatgtgcaagtgacttccctgcttgaaatgcgaatgaagagatgctgtgctatctctttagaatgaaagtgacagaatttaaagatattaaatgatattatagaatagatttttattttgctgaaaaaccttattttaaaataaagttcctcgcaacaaatttcatctcaagtagagtggtggcccatcttcagtgttgactaaagttaaatgggaatctgagaaggacttgattaaatgatcatgtcagaagtaaaataaagctgtctagaagaggaagcatgaaaaatctcaggccttcttcacttgattcaccaatgattctgatgcacgtgcasgtgaattaaaagagctcatcaaagttgctctttgggactgtgcatggtggcttatacaaataattgcaccactttgaaaagctgaggtgggaggatatctcgaaaccataatttgttttttgtatagacactgtcttgccacacagcaagatatttattttgctgaaaaaccttattttaaaataaaattctcaccaa

SEQ ID NO: 299753 - DNA, 544 bp, Homo sapiens
aattagccaggcatggtggtacatgcctgttgtcctagctactcatgaggttgacgtgagaggattgtttgagtcaaggaggttgaggtgtcagtgagctatgatggtgccagcctgggctatagaacaagaccctgtctcaaaatgaaacaaaacaaaaacctgctattaaagcgcagattggcttcttatatgatagataaagaaggggaaggagaagaagctgatgttcataatgatgatgaagaagacttgaaacatattttgatgaagaagatgagggcagaggggaagaagatgaagatggtgttgatgtggaagagggaggaaggttgaagaggaagatgactagtggaatactaatagattctgaccctctttttacttttagaaattttgcattctttgggagccagttgccatctcctattttttccccttttgtactcagttgccttgttctaataaggtctctttctctctctctccctgatctggtycttcacttactttgtgggagactcttgagcaaaatacagtggaa

SEQ ID NO: 299754 - DNA, 560 bp, Homo sapiens
atggatttccgatgttttggtgtttagtgttacaaggagaggagagaaagaatggagcrgaagcagaaatgataatggctttaagtgggtattttggtgacatggcttcttcttgtgcatgggtaattgaagttgaacttatatttttaaaacagaattctcttctagtgatgacttgagctctactaattgcaaaatcatccaaaatatataagatccttgaaattgacattctctgttttaattttgtcccttttcatttgtaaattctacttttcttttatgggaaaggaaagaagattctcagttttaaaccctgaaaatacatatatgtttcttttgtttttacaataaagttaaatgtatacacaaaagatttgatactgttttcctcagaacagataaacttgagatcttccaaatttcatttataagtagtgttgtcaaactttaaaggcaaataaagatgttttcaaacaagcaaaaactgagactttatcactagctgacttgcgccagaagaaatattaaagtaaagggagctcttcatggagaaggaa

SEQ ID NO: 299755 - DNA, 459 bp, Homo sapiens
gaccactagttagactaataaggaaaaaaggagaagatttaaattagcacaatcagaaatgacaaaggagacattaccaccaaccccacagaaacacaaaaaacctcagagacaattatgaacacctatatgcacacaaattggagagcatagaagaaatggataaattgctggagacatataatcttccaagattgamccaggaagaaatggaatctttgcacagattcaataatgagtttagaaagtgaatcagtaataaaaagcctaaaacccagaaaaagcccgagaccagatggattcacaatcaaattctgccagatgtatacagaagagctggtgccattcctactgaaactattacaaaaaattttaggaaatttcattgtggacataggccctgtcaaagactttatgatgaagatgtgataaccaattgcatcaaaaacaaaaattgac

SEQ ID NO: 299756 - DNA, 459 bp, Homo sapiens
gaccactagttagactaataaggaaaaaaggagaagatttaaattagcacaatcagaaatgacaaaggagacattaccaccaaccccacagaaacacaaaaaacctcagagacaattatgaacacctatatgcacacaaattggagagcatagaagaaatggataaattgctggagacatataatcttccaagattgacccaggaagaaatggaatctttgcacagattcaataatgagtttagaaagtgaatcagtaataaaaagcctaaaacccagaaaaagcccgagaccagatggattcacaatcaaattctgccagatgtatacagaagagctggtgccattcctactgaaactattacaaaaaattttaggaaatttcattstggacataggccctgtcaaagactttatgatgaagatgtgataaccaattgcatcaaaaacaaaaattgac

SEQ ID NO: 299757 - DNA, 548 bp, Homo sapiens
agcaataaacctttcaaagaaattttctaagagaatacttttatgaacgtaaagacaggtttcttaaataagcacaataaacactaaccttaagtggaaaaatgataaattgktgaacactaaaattaagaactctttatcagaagatactacaaagagaatgaaagagcaagtcacagaggatgataagatatttgtaatacatttctgaaaaaaggatttgtatccagaatatagtaagaactataaaaatcaatttaaaaaaaagaaaaatgggcaaaatacttgaacaaggatgtcatacaagaagatgtccagatggccaatgaacatgaaaagatatttaactttattagttatctgggaaatgcgaatcaaaagcacaagatgccaccatatgttcaccaaaatgactaaaattaaaaagacaatgtcaaatgtttgcaaacatcatctgaaactctcatatagtgcttgtgggttttttaatgggtcacatcactttggatatctatatagtggtatctactagagctgaatatatgcat

SEQ ID NO: 299758 - DNA, 560 bp, Homo sapiens
tagtgctagcttggtaatggcaaattctctcagcatttgtttgtatgaaaatactttatgtctcctccatttacgaaggttaatttcacttgatacaatattattggctgatagttattytgtttaaggaagctaaaaataggaccccaatcccttctggctttcagggtttctgctgaaaaatctgctgttaatctgatagattttccttcataggttacctgatgcttttgccctgcagctcttaagattctttcctttgtcttgactttagatggcctgataactgtgtacctaggtgatctttttgtgatgaatttcccagctgtttgttcctataaaggaatgttttctagagatctctgaaatctgccctcaccagaaatgtaacactgtcctgaggcacgatttcctgcctctgattggagccacacttcttactcatcgtctgcagttttggagttgtatacattttctagtgttacataaaatgttgtttgtggggatttttttttgttgtcatatttccacattatttctttgtatagtattcaagagaa

SEQ ID NO: 299759 - DNA, 522 bp, Homo sapiens
tctgcctccctacttacacttcgactcagaacactcactgcccactgggaaattccaaaaatgtccagcaacactgatatggtaaagagaatgtacactctacacctctgcctcaatgggcatgtcagttcacatttttttggcagagtaaacaaataattttaaatatttggatataaagtccttcctttcaggtaccctcacagcaatagcaccaaaactgtttatattgacaaaaagccaaattaagcacagcaggtggcaatgccacctaatacttgaaagaaaaattttctcagtagaattgaaactgaaaatctataactgttactgaaatccacacaagctaactaactttgtgtartgaaacacaaatgggtttgcccaggcatatctcagtttgagaggacagcactacttagagaaattagtttatggcctttcttaatcacacatttgtcactcagtagtaagcacaatatatatcagatgtgtttaacatctggaattctttcttcaaag

SEQ ID NO: 299760 - DNA, 522 bp, Homo sapiens
tctgcctccctacttacacttcgactcagaacactcactgcccactgggaaattccaaaaatgtccagcaacactgatatggtaaagagaatgtacactctacacctctgcctcaatgggcatgtcagttcacatttttttggcagagtaaacaaataattttaaatatttggatataaagtccttcctttcaggtaccctcacagcaatagcaccaaaactgtttatattgacaaaaagccaaattaagcacagcaggtggcaatgccacctaatacttgaaagaaaaattttctcagtagaattgaaactgaaaatctataactgttactgaaatccacacaagctaactaactttgtgtagtgaaacacaaatgggtttgcccaggcatatctcagtttgagaggacagcactacttagagaaattagtttatggccyttcttaatcacacatttgtcactcagtagtaagcacaatatatatcagatgtgtttaacatctggaattctttcttcaaag

SEQ ID NO: 299761 - DNA, 522 bp, Homo sapiens
tctgcctccctacttacacttcgactcagaacactcactgcccactgggaaattccaaaaatgtccagcaacactgatatggtaaagagaatgtacactctacacctctgcctcaatgggcatgtcagttcacatttttttggcagagtaaacaaataattttaaatatttggatataaagtccttcctttcaggtaccctcacagcaatagcaccaaaactgtttatattgacaaaaagccaaattaagcacagcaggtggcaatgccacctaatacttgaaagaaaaattttctcagtagaattgaaactgaaaatctataactgttactgaaatccacacaagctaactaactttgtgtagtgaaacacaaatgggtttgcccaggcatatctcagtttgagaggacagcactacttagagaaattagtttatggcctttcttaatcayacatttgtcactcagtagtaagcacaatatatatcagatgtgtttaacatctggaattctttcttcaaag

SEQ ID NO: 299762 - DNA, 601 bp, Homo sapiens
aaaacctgtttgatttgcacaggcttcctacagtagttacacaaaaaggttagctaaagtaggaaacatgccaggaaggtggctcacacctgtaatcccagcacttcaggaggacaaggtgggcagatcacctgagggtaggagtttgagaccagcctggccaatatatagtaaaaccccatctctattaaaaaatacraaaattagctggtgtggtggcacatgcctatagtcccagctatttgggaagctgaggcaggagaatcacttgaacccgggaggcagaagttgctgtgaaccgagatcacgccactgcactccagcctgggaaacagagcaagactctatctctcaaagtaaaataaaataaagtaggaaagggaaagataccttcttgtgaaaatgaaaacttttatgcttcaatataattgttcatgtctgtatgactttgctgcttcacatttaatgaaattattcccttatgggaacttggcagggtctagcctctgttgaatgctactgacgtcacttttcaagtatctgagagaaataatgtgctggtcattgctaccgtgtatctgtaccttttttcagcctaaaa

SEQ ID NO: 299763 - DNA, 561 bp, Homo sapiens
ttaagccccaccttgatcatcccagaaaagtggcctttgcatatcctgaatttcagatacaytcatctatcttgtccattttatttatagtcatccttgtgtttggttattggtactttctcttcaagtaataaaaagcaactaagagaaaaggaccggtaacgggaacctgtcttattcaaataatactttatgtgtactacagagatcgctctataattcagttcctcaggtgcaggaaaaaaagaattggatgagtacatctctaagatctctttaaatttaaaaaattcataactttggcttggcgtggtggcttatgtctgtaatcccagcactttgggaggctgaggcgggtggatcatgccttcgagaccagcctggccaatatggtgaaaccttgtctctactaaaaatacaacacttagccgggtgtggtggcacgcacctgtagtcccagctactcgggaggctgaggcagaagaaatgcttgcacctgggaggcggaggttgcactcagcaaagatcatgacactgcactccagcttgggtgacagagac

SEQ ID NO: 299764 - DNA, 554 bp, Homo sapiens
ctgtcttattcaaataatactttatgtgtactacagagatcgctctataattcagttcctcaggtgcaggaaaaaaagaattggatgagtacatctctaagatctctttaaatttaaaaaattcataactttggcttggcgtggtggcttatgtctgtaatcccagcactttgggaggctgaggcgggtggatcatgccttcgagaccagcctggccaatatggtgaaacyttgtctctactaaaaatacaacacttagccgggtgtggtggcacgcacctgtagtcccagctactcgggaggctgaggcagaagaaatgcttgcacctgggaggcggaggttgcactcagcaaagatcatgacactgcactccagcttgggtgacagagactctgtctcaaaaaaaaaaaaaaaaaagaaaagaaaaacaaattcataactttaacatgttgctggaatcagtaggttctcatttcttaattttatattttttactaattgtattcatttgctagggatgcacttatgaagtaccacaaactaggagcttaaa

SEQ ID NO: 299765 - DNA, 612 bp, Homo sapiens
acactctcctggcaccattgctgtgcttttctgcartgcaactttattagcagcttgtcacagggcctggcttacttaggaccccgctgagcgagggagagaaggaaggaggcaaggaatctgggagaatgccctctggggctgtgcatgtggtccaagaggcccacaataaatatttttcatatgatttcaacaggatctgtagatttggtcagcttggttcctgcctcaagaaagagccatttttggtcagagggattgtaaaagaaattatttcagttatcaaaattttgttgcagaagtatgaggaaaagcctaaaagtgaacattagacaatagaatacatggcctttccaacaataaggaagatcaattgagtcaaagtttgaaaaattgcaagtaggttttttattttttggctttaggtgagtcatattacatgagacaccacccagttaatactttccatacagttattttcaaaggttttcaagatgtacaaagaaatgtcaattcatggcctaaataaatgaacttgtggtgtagagttttaaaaaattctttatatggttagttttctcatagagaatggtgctctagctatggtaagtc

SEQ ID NO: 299766 - DNA, 541 bp, Homo sapiens
tgttgtgttgtgaaagaaatgtacttatctgagaatccttgcctttgtttcaagaatatgaatcaaatactccttgtcagatttcttatttatacatttatttatttatttactttgagacagagtttccctctgttgcctagctggagtgaactggtgtgatctcagctcactgcaacctctgtctcccaggttaaagcgattcttctgcctcagcctccctagtagctgggattacaggtgcctgccaccacrcctggctaattttttttttttttttttggatttttagtagagatgggggtttcaccatgttggacgggctggtcttgaactcctgacctcaggcaatccacctgcctcggcctcccaaagtgctgggattacaggtatgagccactgtgcctggccccagattttcttgtcagcattgttccaggcactaaaataaaaggaaagcataagtgagggaaaaaagtgggatgtctcttaagacttcttatagttcttgttattgaaccccttgtctctggagtatagt

SEQ ID NO: 299767 - DNA, 541 bp, Homo sapiens
tgttgtgttgtgaaagaaatgtacttatctgagaatccttgcctttgtttcaagaatatgaatcaaatactccttgtcagatttcttatttatacatttatttatttatttactttgagacagagtttccctctgttgcctagctggagtgaactggtgtgatctcagctcactgcaacctctgtctcccaggttaaagcgattcttctgcctcagcctccctagtagctgggattacaggtgcctgccaccacacctggctaattttttttttttttttttgkatttttagtagagatgggggtttcaccatgttggacgggctggtcttgaactcctgacctcaggcaatccacctgcctcggcctcccaaagtgctgggattacaggtatgagccactgtgcctggccccagattttcttgtcagcattgttccaggcactaaaataaaaggaaagcataagtgagggaaaaaagtgggatgtctcttaagacttcttatagttcttgttattgaaccccttgtctctggagtatagt

SEQ ID NO: 299768 - DNA, 541 bp, Homo sapiens
tgttgtgttgtgaaagaaatgtacttatctgagaatccttgcctttgtttcaagaatatgaatcaaatactccttgtcagatttcttatttatacatttatttatttatttactttgagacagagtttccctctgttgcctagctggagtgaactggtgtgatctcagctcactgcaacctctgtctcccaggttaaagcgattcttctgcctcagcctccctagtagctgggattacaggtgcctgccaccacacctggctaattttttttttttttttttggatttttagtagagatgggggtttcaccatgktggacgggctggtcttgaactcctgacctcaggcaatccacctgcctcggcctcccaaagtgctgggattacaggtatgagccactgtgcctggccccagattttcttgtcagcattgttccaggcactaaaataaaaggaaagcataagtgagggaaaaaagtgggatgtctcttaagacttcttatagttcttgttattgaaccccttgtctctggagtatagt

SEQ ID NO: 299769 - DNA, 588 bp, Homo sapiens
agaagggtgtaaagtaacatacaatgccaagtcctgaggatggaccaagatgaaaagtaagagagcagagaagagtgcattatgaaaagcttccartagagaggtacgtctctagaataaacctagcaggcctgagactgccaaaaagtcctgcctgtaagtttggcctttggtgggcatgggagaacttggctctcagagtgttccctgtcaatagttaacatatcaaggtgttttactgtgcctagactacttgtgtaaacaatatgggttatgttgaacacctgtcttccttccagaagtctggaattttggtatatcctagggagaaggcatctatgagtttctaataaaaatcttgggctttgaatgtttaatgggtttccttgtacagaaacgtcacacatgtatggctgcatttttatttgtgggcaaagagtatgctctggccaagtgcagtagctcacgcctgtaatctccgcactttgagaggccaaggagggtgactcgcttgagcccaggagttcgagaccagcctgtacaacatggcaaaaccctgtctctactaaaaatacaaaaattagctgg

SEQ ID NO: 299770 - DNA, 533 bp, Homo sapiens
aatgtactgatcactataaaggacatacaaatgaactgcattcatttccaaaatgaattggtacagaagggtgtaaagtaacatacaatgccaagtcctgaggatggaccaagatgaaaagtaagagagcagagaagagtgcattatgaaaagcttccaatagagaggtacgtctctagaataaacctagcaggcctgagactgccaaaaagtcctgcctgtaagtttggcctttggtgggcatgggagaacttggctctcagagtgttccctgtcaatagttaacatatcaaggtgttttactgtgcctagactacttgtgtaaacaatatgggttatgttgaacacctgtcttccttccagaagtctggaattttggtatatcctagggagaaggcatctatgagtttctaataaaaatcttgggcwttgaatgtttaatgggtttccttgtacagaaacgtcacacatgtatggctgcatttttatttgtgggcaaagagtatgctctggccaagtgcagtagctcacgc

SEQ ID NO: 299771 - DNA, 588 bp, Homo sapiens
agaagggtgtaaagtaacatacaatgccaagtcctgaggatggaccaagatgaaaagtaagagagcagagaagagtgcattatgaaaagcttccaatagagaggtacgtctctagaataaacctagcaggcctgagactgccaaaaagtcctgcctgtaagtttggcctttggtgggcatgggagaacttggctctcagagtgttccctgtcaatagttaacatatcaaggtgttttactgtgcctagactacttgtgtaaacaatatgggttatgttgaacacctgtcttccttccagaagtctggaattttggtatatcctagggagaaggcatctatgagtttctaataaaaatcttgggctttgaatgtttaatgggyttccttgtacagaaacgtcacacatgtatggctgcatttttatttgtgggcaaagagtatgctctggccaagtgcagtagctcacgcctgtaatctccgcactttgagaggccaaggagggtgactcgcttgagcccaggagttcgagaccagcctgtacaacatggcaaaaccctgtctctactaaaaatacaaaaattagctgg

SEQ ID NO: 299772 - DNA, 588 bp, Homo sapiens
agaagggtgtaaagtaacatacaatgccaagtcctgaggatggaccaagatgaaaagtaagagagcagagaagagtgcattatgaaaagcttccaatagagaggtacgtctctagaataaacctagcaggcctgagactgccaaaaagtcctgcctgtaagtttggcctttggtgggcatgggagaacttggctctcagagtgttccctgtcaatagttaacatatcaaggtgttttactgtgcctagactacttgtgtaaacaatatgggttatgttgaacacctgtcttccttccagaagtctggaattttggtatatcctagggagaaggcatctatgagtttctaataaaaatcttgggctttgaatgtttaatgggtttccttgtacagaaacgtcacacatgtatggctgcatttttatttgygggcaaagagtatgctctggccaagtgcagtagctcacgcctgtaatctccgcactttgagaggccaaggagggtgactcgcttgagcccaggagttcgagaccagcctgtacaacatggcaaaaccctgtctctactaaaaatacaaaaattagctgg

SEQ ID NO: 299773 - DNA, 576 bp, Homo sapiens
ggcatcaggagactggcacagatacagaaaaactagaaagacaagtaaataaaaaggcaaatgtgtagaaattgaacaaggtgtctttgatcctcctttgccatgttgaaaaaaaacctcatgtcaacacacagaggtctggaatctctgttagcactcatgcatctgagatcttgtgaaatactcagcctcaattaacccatgcatgaactacagaatttttaaagtctgccaaagtctacatgagagcactgtgtaaggagactgcacagttcaaaaaagaacaaagaaaaaaaaagaggaggaagtagaggagagaggaaggaggaagaataggagaggaggacataggaggaagaagcagagagaaggactcggaggagaaggggagaaacagcragataaaggacgaggaaggaagggaagacggaggagacagaggaagggagggagaggcaggaaagaggaggaaagtggaggcctgctggtctcaaactctgattcaccaggcacatcccaaccacattaaggtttctgagagccatatgatgattttatgacctcgagtgaaagaaa

SEQ ID NO: 299774 - DNA, 575 bp, Homo sapiens
acactcttaaattgctggtgagagtgtaaaatgttactacttctatggagaacatttatcagaatttaccgaaatcgtatcctttaaaccagtcatgctacttctggaaatgtagaatacaaatttacctacaatcacagaaaatggcatggtgtataagatcattaatagtaatttgtaaaagcaaaagtttagaaacttccctggagtacatcaataggatattggtaaaataaactatggttcagccacaaaatgaaacactatgtagtcacaccaaaagaaaagaaagagagaaaaaaggaaataaggcaggagtgagggagaggaagagagggaaaaagagaaaagaagtagatcctttctttttactgatatggaaagatttctaagatatattgttaartgaaaagaacaagttagagaacagagttatcagtgtgctattctttatataagaatagggcacataagaatatatatgtgcataaatattagaagtatatatgataaactaatgagaaggtattagcaccaaggaacaatgtgaactaagaggatgagagagatttttc

SEQ ID NO: 299775 - DNA, 537 bp, Homo sapiens
aacatggtaaaaccctgtctattaaaaatacaaaaattagccaggtgtggtggtgggcacctataatcacagctactcaggaggctgaggcaggagaatagctggaacctgggaggcaaaggttgcagtgagctgagatcgcacctctgcactttagcctggacgacagagcaagactgtatctcataaataaataaataaataaataaataaataaataaatagctaaatgtaatggtaaaaagtagaggtacataacaaagacaatttgtcttcattttaattgctctaaaagatcactgatgatctaaagaaacaagagtaaaaacgtactgtaagatttataacataaaacataaaatgtgtgacattttaaagaatgggaaggaggaactgcattatacaattgtatctcactgacactttgacatatcyccttgctgtctaacagacatctcaaaaacaacatgccttaaactgaacccgtgatctgccctcttcaaacctcctccacccacaaccttccccatctcagtt

SEQ ID NO: 299776 - DNA, 537 bp, Homo sapiens
aacatggtaaaaccctgtctattaaaaatacaaaaattagccaggtgtggtggtgggcacctataatcacagctactcaggaggctgaggcaggagaatagctggaacctgggaggcaaaggttgcagtgagctgagatcgcacctctgcactttagcctggacgacagagcaagactgtatctcataaataaataaataaataaataaataaataaataaatagctaaatgtaatggtaaaaagtagaggtacataacaaagacaatttgtcttcattttaattgctctaaaagatcactgatgatctaaagaaacaagagtaaaaacgtactgtaagatttataacataaaacataaaatgtgtgacattttaaagaatgggaaggaggaactgcattatacaattgtatctcactgacactttgacatatccccttgctgtctaacagacatctcaaaaacaacatgccttaaactgaacccgtgatctgccctcttcaaacctcctccacccmcaaccttccccatctcagtt

SEQ ID NO: 299777 - DNA, 584 bp, Homo sapiens
tggtaatttctatagttgtgtagtccacaacctgtacaaccatrtgttgtatagtcctgtctcaaggaccacccaccatccaactaactattaatctcaatggccaaattccaaatttctggaggaaaacatttggtggtccattttgggccagttgtcctctcttctccaatcagatatgctcagattggaaacatcatgttgtaggcacatatgtccagagcctcaatgcctttggagagcccatctgggggaaatgggaaactgttctcagagaaggggttgtatgagaaaggcagacatttcaaaacacggcattaccaagggccagtgattaaaaaaatgaatagtccaaaggtatatcgaatataatctaagctgatgtttttcaaactatgaggtatgacccattaatgggctatgaaatcaatgtagtgagtcatatttctaaataacatagaaatgaaataaaagagattagagattaggaaatattagcatgcaacctacctagtaaaggtaaactagtatataaagtgtggattgtggtgcaacatgatcaaaaaccaaaccaaagcccaaac

SEQ ID NO: 299778 - DNA, 616 bp, Homo sapiens
aggaggtgatatttgagaggagcctcaaagaataagtcgactttcagtcgaagagcttgctggcgaagtgagcagcatcacgagaaaatgggaagcatgctgtgtttggagaacatcaggtgatctggtgtggctggttcatagggcggataattggtagggggaatgggtgggagataygagaatgactgtgcattatgctaagggaaattggccaatgttttttgtttgtttatacttttttattgacagaatagacatagagaatagtgacccaaacataagagtacagctggatggatttgcataaactgaacctatctgtttttctagtactcagatcatgaaatgggacattaacaacctatcagaaaccccttttgtgctccctaccaatcactactgttccacatccctgccaagtggaatcactatcctgacttctaaccccatagatcggttttctaaccattatgaactaaacatattgtttaatccttgaacaactctgagatagaatttatatccattttacagctttaacgtgtgtactttttttgtatctggcttctttcactcatgtttataagtgaaatggaatgtccttgcccatggt

SEQ ID NO: 299779 - DNA, 595 bp, Homo sapiens
aataatcataattctacatgctttattcagtcaggtaacgatttcctaattcttagagaatcttctccaaattcttccaacggatcatacacactcactttccacctccatgggcaaaacagaacttgcttcacattttattattttgtttagtcatctgtcatctggtagaaaaagagagagcacgagcagcagggaagaggamtggaaaggatgggaagaggaatgaaattttgggggagtgacaaacttcacatggatattcacaatatttattggtccatgcaccttcagaattttttcattgaatatcaaacattctagtaaatgcctaaagctactcactctaatatcagttgtatggtgattaagaaggagcaaaaaactgggggatcatggggaccgagtgttaaattttaaccttgctacttagtgaatctgccttaagacctgcggtctgttacttactcccatttgacttcaattatgcctcaactattgaacagagacaatagtatcaactttcagcgttattactagaattagaaataatataataagcacctatagtaagtggctggaacatgttaggcac

SEQ ID NO: 299780 - DNA, 595 bp, Homo sapiens
aataatcataattctacatgctttattcagtcaggtaacgatttcctaattcttagagaatcttctccaaattcttccaacggatcatacacactcactttccacctccatgggcaaaacagaacttgcttcacattttattattttgtttagtcatctgtcatctggtagaaaaagagagagcacgagcagcagggaagaggaatggaaaggatgggaagaggaatgaaattttgggggagtgacaaacttcacatggatattcacaatatttattggtccatgcaccttcagaattttttcattgaatatcaaacattctagtaaatgcctaaagctactcactctaatatcagttgtatggtgattaagaaggagcaaaaaactgggggatcatggggacygagtgttaaattttaaccttgctacttagtgaatctgccttaagacctgcggtctgttacttactcccatttgacttcaattatgcctcaactattgaacagagacaatagtatcaactttcagcgttattactagaattagaaataatataataagcacctatagtaagtggctggaacatgttaggcac

SEQ ID NO: 299781 - DNA, 611 bp, Homo sapiens
ggcacattctaaatgtaatttacaatctatgtttttgaaactgaaaaacactttctcaaaaagaaaactttaacacagatcrtacaaatgaccaatgagcacataaagagatgcttaataccattaaccattagggaaatgcaaatcaaaaccacagtgagatacttcacacacacttagataactaccaaaataatggacaatagcaagtgttggaagggatgtggagaaattggaaccctaggaaactgctagcaggaacgtgaaatggtccagccaccatggaaagcaatttgatggctcctcaatgagcccagtagagaatttccatatgacctaggaactccactcctgggtatattccccaaggaactggaaactggtgttcaaataaaaacattcacaaaaatgctcatgttagcactattcacagtagcaaaataatgaaaacaactcagatgttcatcaactcatgaaggaattttttaacatgtgacatattcatggaatggaatactattcaaccataaaaaggaatgaaattttgatacatgctacaaggtgaatgaacttcgattgaaaacatttattgtaagtagaagcagtgagac

SEQ ID NO: 299782 - DNA, 611 bp, Homo sapiens
ggcacattctaaatgtaatttacaatctatgtttttgaaactgaaaaacactttctcaaaaagaaaactttaacacagatcgtacaaatgaccaaygagcacataaagagatgcttaataccattaaccattagggaaatgcaaatcaaaaccacagtgagatacttcacacacacttagataactaccaaaataatggacaatagcaagtgttggaagggatgtggagaaattggaaccctaggaaactgctagcaggaacgtgaaatggtccagccaccatggaaagcaatttgatggctcctcaatgagcccagtagagaatttccatatgacctaggaactccactcctgggtatattccccaaggaactggaaactggtgttcaaataaaaacattcacaaaaatgctcatgttagcactattcacagtagcaaaataatgaaaacaactcagatgttcatcaactcatgaaggaattttttaacatgtgacatattcatggaatggaatactattcaaccataaaaaggaatgaaattttgatacatgctacaaggtgaatgaacttcgattgaaaacatttattgtaagtagaagcagtgagac

SEQ ID NO: 299783 - DNA, 611 bp, Homo sapiens
ggcacattctaaatgtaatttacaatctatgtttttgaaactgaaaaacactttctcaaaaagaaaactttaacacagatcgtacaaatgaccaatgagcacataaagagatgcttaataccattaaccattagggaaatgcaaatcaaaaccacagtgagatacttcacacacacttagataactaccaaaataatggacaatagcaagtgttggaagggatgtggagaaattggaaccctaggaaactgctagcaggaacgtgaaatggtccagccaccatggaaagcaatttgatggctcctcaatgagcccagtagagaatttccatatgacctaggaactccactcctgggtatattccccaaggaactggaaactggtgttcaaataaaaacattcacaaaaatgctcatgttagcactattcacagtagcaaaataatgaaaacaactcagatgttcatcaactcatgaaggaattttttaacatgtgacatattcatggaatggaatactattcaaccataaaaaggaatgaawttttgatacatgctacaaggtgaatgaacttcgattgaaaacatttattgtaagtagaagcagtgagac

SEQ ID NO: 299784 - DNA, 557 bp, Homo sapiens
aatgaaaagatatgagtagttacagcttgtggggctgcactgttggtgagcattattcttctccaggaaaaataaatgagaaccaactcacagctttatacacagttgtcctcatacagtcctaacctcagattactctgtctttttgcttacgtgtagagaaactttcctattttatcttattatttaaaaataaaaatatgattaaaaccatgatagaatctacagtacaaaaatagtcaaattagttcaaagttgtgtgatctgggaatcaagaagaaaatatcacttaggagatatttaggcgatacgtatcataaaacacatatkagatatatatatatgtatatatatatttccctatttatttgcaacaactgaacataggaaagtgagaggttgaactgagaaagaaaataattatttaagtgggtttgtgtttcaaaacccctaaaaagtgttgcaggggtatctgaggattattgtttttctgagatctctgtttgatatgaggacagctatgccttaacaggggaacaactaggtaaggcaacctc

SEQ ID NO: 299785 - DNA, 590 bp, Homo sapiens
gtgtaatttttatccctacctatctgtgacaggtaagtaaacaggcaaggagcaggcagttatagaaagaggaacattaaaaccaacatatccactctttatccactgtgtagggaggggggatggtttccttgtaaagtgaagtatattgaggcatttgagtcatactggtggataggatatgttttatgtcaaatatgtgaatgttaaaatcctggtctcaccactcataaagtgataagacttttattgtagtaagaggttagataagttacttatcctctttgtttgctatttctttatctataataagacatttaattcacaaaaagtatagaaaatatttggcataataactaaaacatgtaagcactcattacacatacacacactgtacatatacacatattgcaaagtcagtacagcactctatatagcatccactccatagcataccasgtcaaactcattattacatcctgaatatttcccatttcagttaagattgttttaatagcaatatatttttctttcctacaatttcaccatagttaatttaatttaaccattctttattgttacacatttaa

SEQ ID NO: 299786 - DNA, 575 bp, Homo sapiens
ttctgttttttgagaacctctcattaattcagtgtaagacacatcaaaagcctggtaattattaaggaagagcagggtcaatttgtaacacagagtgtcaaaaagagagtcaggatagtgccctcccttggtcatcacctggcttgaccagggttgattgtccactgtccacattacacaactgtaagcacaagtcctgccattcctgaattggaaacaattatactcttttgatccctacttgcttgcttttgtatataataacacttggtttaaaatgactaggtctagtctccaaattccttttgtaaatacaacaggatttttcagaagagctttcaagaaaggaagtgagagaaatctacaacagctcagccaagtttctcctaaattaaacatcaattttagaaatcaggaaccaagtgtgttgtccaagacttgaaccataatttgaaaaatattttttaaaaaacagaatattagtttttcagcctagaaataataaacccatcttcaygaatagaaataattgtgcaatatgtcaattgatcaaggcagagagtctataaaagcaa

SEQ ID NO: 299787 - DNA, 610 bp, Homo sapiens
agtgtcaaaaagagagtcaggatagtgccctcccttggtcatcacctggcttgaccagggttgattgtccactgtccacattacacaactgtaagcacaagtcctgccattcctgaattggaaacaattatactcttttgatccctacttgcttgcttttgtatataataacacttggtttaaaatgactaggtctagtctccaaattccttttgtaaatacaacaggatttttcagaagagctttcaagaaaggaagtgagagaaatctacaacagctcagccaagtttctcctaaattaaacatcaattttagaaatcaggaaccaagtgtgttgtccaagacttgaaccataatttgaaaaatattttttaaaaaacagaatattagtttttcagcctagaaataataaacccatcttcatgaatagarataattgtgcaatatgtcaattgatcaaggcagagagtctataaaagcaaaagccccttttgggatgtaactctcaacttgttcactgaatgcttatattccaattcactggcatgagcattcacaaaatcaaaactttgagaagaaattaacttcctttgagagactccatgaccca

SEQ ID NO: 299788 - DNA, 593 bp, Homo sapiens
ccagctttctttcaattcattctccaaagggaagctggagagagagagatccttccaaactttagtcatactggatcatgtaactcctctgctaaaataatttaaatggactcccattgctcttggaatacaatcctacctctctgccatcacctacaggatcctttcagctctagctctgcccatcatttcrtttccaccttctacttctcctgcaggtgggcacttttcttgctttggttgtttcccaaaggttcttgctcttttctgccctggggctttttcatgggtggtttcctatctctgcacttctccctcagatgactgttattcaactacctcatctcatttccatcattttccgcagagatcttccctgacctcctgtgatatcatgatatggtaagaaatatgtatgtcattcttccctcagtttcctggttcacagctccgaaagcccttggaatctctgaagtgataaatttttgtgtgtgtgtgtgtgtgtgctcatgagatgatggatggctggggcacctggatagcctcaagatagaggctggctgccaggggacccaaccatgtgattggagttg

SEQ ID NO: 299789 - DNA, 604 bp, Homo sapiens
gcaacccactgcaggagatgacggctcacgatgttctctgaacatctcatttttaatgtttattgtgttttttggttgggccaggtggctatcattttattttattattattattttgagacggagtctcgctctgtcaccaggctccagtgcagtggcgtgatctgggctcactgtaacctccgcctctcaggttgatgccattctcccgcctcagcctcccaagtagctgggactacaggtgcctgccaccatgcctggctgattttttgtattttttagtagagcccaggtttcactgtgttagccaggatgatctcttatctcctgacctcatgatccacctgctccggcctcccaaagtgctgggattacaggcatgagccactgcacccggcccagctatcattttatagtctttggtctaatacatgtgcattgtgaagaccaggttcatagactggcaaaccaaattctctcttctgttttctttkatttggttggtacagtaattttaaactttgaaactaaatgcatttaggaggtgggagtatgagcattccaatttggcattagtctgccctcttctttattatcttatact

SEQ ID NO: 299790 - DNA, 604 bp, Homo sapiens
gcaacccactgcaggagatgacggctcacgatgttctctgaacatctcatttttaatgtttattgtgttttttggttgggccaggtggctatcattttattttattattattattttgagacggagtctcgctctgtcaccaggctccagtgcagtggcgtgatctgggctcactgtaacctccgcctctcaggttgatgccattctcccgcctcagcctcccaagtagctgggactacaggtgcctgccaccatgcctggctgattttttgtattttttagtagagcccaggtttcactgtgttagccaggatgatctcttatctcctgacctcatgatccacctgctccggcctcccaaagtgctgggattacaggcatgagccactgcacccggcccagctatcattttatagtctttggtctaatacatgtgcattgtgaagaccaggttcatagactggcaaaccaaattctctcttctgttttctttgatttggttggtacagtaattttaaactttgraactaaatgcatttaggaggtgggagtatgagcattccaatttggcattagtctgccctcttctttattatcttatact

SEQ ID NO: 299791 - DNA, 604 bp, Homo sapiens
gcaacccactgcaggagatgacggctcacgatgttctctgaacatctcatttttaatgtttattgtgttttttggttgggccaggtggctatcattttattttattattattattttgagacggagtctcgctctgtcaccaggctccagtgcagtggcgtgatctgggctcactgtaacctccgcctctcaggttgatgccattctcccgcctcagcctcccaagtagctgggactacaggtgcctgccaccatgcctggctgattttttgtattttttagtagagcccaggtttcactgtgttagccaggatgatctcttatctcctgacctcatgatccacctgctccggcctcccaaagtgctgggattacaggcatgagccactgcacccggcccagctatcattttatagtctttggtctaatacatgtgcattgtgaagaccaggttcatagactggcaaaccaaattctctcttctgttttctttgatttggttggtacagtaattttaaactttgaaactaaatgcatttaggaggtgggagtatgagcattccaatttkgcattagtctgccctcttctttattatcttatact

SEQ ID NO: 299792 - DNA, 605 bp, Homo sapiens
aaattaatagaacctcacagctcatatatgcaaaattcttgggggaatggcaaatcttcaaggatgggtaaattattcctccagaagggaaaaaagacacaaaggaaaagcaattgggaatggggggaagggaagacaagaggcagagaggtgaaggcaatgagagaatgaagctaattaattaatttaggctattaatctagaagaaatgtcctttgatgatctcacaatcagtggtgcatcccaagtgaatattgacagggacattgaaatatgtttggaaaggaagacatatacgatttttcatttcttctacagtcttttaataatcgaggtgaaagaatccaagaaaagttggcactatgaagacaatatgcccaagatagatttctcaagacttcctttgtttttttcctctgaatgacaaagctgcccacgcgtgggacctgctcattctgttgcctggatgtcttctccaacagcaccagaatccctaaggtagctggtatcaagccatgaattctccttattgagtttmtgcttttccaagagtctttgaaatgcaagttgtaagaaaagtgaaagcacatgatgacttggttaaa

SEQ ID NO: 299793 - DNA, 546 bp, Homo sapiens
tagctatgtttttctttgttgataagatggggaaaagaatacctaagaaacttgttcaaggtccctgaaataagggacagagttttctgttattaacattttttcccttcaacatttctaatggagcatgttcagaaatacaaaatatgaaatccttaaagcagatccttaaggagataagcatacataccacatcttctggtraacaactcagcctatctgtttttgaagctgctcctactagagtttgagtctgatgtgaaactctggccatcttgtcattgcttcatgtttctgctattggaaataaacagaatgaggagcccaaaggggtgtgtgtgtgtgtgtgtgtgtgtacgtgtacgtgtgcattgggtataagagaccaagaaacagaatgttgtgttagaatggtaggctaagggaaaaaggcatgttttggaatggatagaacttggtgtagtgattagaaacaggggaagctgaaggcaatatcttaaaacacacaaaggttattttcaagatcctatgaagccctttacaaaa

SEQ ID NO: 299794 - DNA, 616 bp, Homo sapiens
gatggtaggggttgtggtcttgaagaaaacaggagcagtgtcttgtcagkgaagtttcattcccctgaggcttcctgcttcctgtgacttcttttccttggatacctgaatccacgtaaactgggaatgtgaatcctgaaccagttgttggtaactttaaatgttaactcttgtctgggtacaatggctcacacctgtaattccagcacattggagggctgaggcaggcagatagcttgagcccaggggtacaagaccagcctgggcaacatggtgaaacctcatctctgcaacaaacacaaaaagtagctaggcatggtggtgcacacctgtagtcccagctactccggaggctgaggtgggagaatcacctcagttcaggaagtctaggctgcagtgagccacaggccactgtactccatcctgggtgacagagtgagactctgtctcaaaaacaaaaacaaaaatacattaaatcttagactctggaaatttaggttctaatgtacattgaatcaaccagtatcctttgatgaatgtttaactttcattaattcaaacacatagaagggtgattatctttaagggtaatacaaagttgcagaaggtatacact

SEQ ID NO: 299795 - DNA, 636 bp, Homo sapiens
acatcttttcttagatgtaccccagtttctgctttttaatagatatgataatgagcttctgggtcttcatttcccagtgtgcagagagctcaaataaatctttgattgttcacaacccaggagaagtttccggagcagtgggatccattgaggtctctctaaacaactattattttaaggatattttttaaacgttggactttcctggagccattgagtttttcttttccaatgttgttagtggcacctgcttatagtgaacttagacaaaatgaaattccttttacagtgaatcagcwtgaatgaaagttcccaactgtttcagagcagcataatatgctaacttagtaaaggtttccttgtaggtaaaaggaaaagtaagctttactgtagatttccacaaaaacacgtctgtgtggggagtccaggtttttcctagatttcaaaattctggaaggtgttttacatttctgcaggcaaaagtatgccaatgtgaaaatatgtttgaccactttgaagactcttgtttttggagattatgacttatttatatctagcataatatagtttctccttaatgaaatgctttccaaaaagtgaattcaaaagtctgtctaacaaacttagaaatgtaca

SEQ ID NO: 299796 - DNA, 592 bp, Homo sapiens
ttttttcaaatttatagacaaaatgtaaaaacaatttgataagttctcatttcagaaagtttatgtcagtgacatgaaaacatatcagtaaatgcattgttaacaacttaatcgagtaatttgcctgtcatcatgactcctgggtaatgtcaagctgtttacagctaatgtaatttttggtagaaaaaaatctatccattggacatttttcatttcaccttatgggaaatattttattatagtagacaagtttccaaaaagagattattatgaaagtagttattctagcagtaacttctcagataaatgatctgtataaatatttttctcaatctctgaatagaatcccaatcaggagtattggtattacatgtaatccaacttctagctctatcgttatgtatttgtgtcatgtcagacattattttttactggttggccctcaattttctcacctyttgtccttagctttgaaccaatcaagttatggtaattgtgtttattgctcgtcagtaaaggcaactataataagatattttgcataaggttagaatgtattacagttgtttaataaaattaactgattaaaatg

SEQ ID NO: 299797 - DNA, 544 bp, Homo sapiens
tttaagtacacgcatgcttactacactttaaaaaacttttatgccttgacattattgaaatattctgcagatactttgcatagaatcacagggccagaataatttttagttttatttacttggtctagattttgtcatcacaaatctgagaatggagctaaaaatcacagcctgtaggaktcctccattctatttttggagccaatgaagtttcttacatttggccagccctctctcaaatgcttgcaattgggtaacattgttcctgtgagggaaggtcgaatatcacagaggttatcttataaaacctcatcatttttacaatgccaagatatatagacacttagatggggagtttggaagagtaaaataaaggtcaattagaaaactatgcacatgttcatgtaagagatgatggtgacattgactgaggttataatcatggggatgaaaaggctattttttgaaaatgtcattctcctaatcaaaaaacttcagtactatcccattcacattttttaaaggccaaacttctaaattgaac

SEQ ID NO: 299798 - DNA, 544 bp, Homo sapiens
tttaagtacacgcatgcttactacactttaaaaaacttttatgccttgacattattgaaatattctgcagatactttgcatagaatcacagggccagaataatttttagttttatttacttggtctagattttgtcatcacaaatctgagaatggagctaaaaatcacagcctgtaggattcctccattctatttttggagccaatgaagtttcttacatttggccagccctctctcaaatgcttgcaattgggtaacattgttcctgtgagggraggtcgaatatcacagaggttatcttataaaacctcatcatttttacaatgccaagatatatagacacttagatggggagtttggaagagtaaaataaaggtcaattagaaaactatgcacatgttcatgtaagagatgatggtgacattgactgaggttataatcatggggatgaaaaggctattttttgaaaatgtcattctcctaatcaaaaaacttcagtactatcccattcacattttttaaaggccaaacttctaaattgaac

SEQ ID NO: 299799 - DNA, 514 bp, Homo sapiens
aggtattccaaaatatgcttcttttatattgtttctccacaggccctgaaattcaattgttttatgcagtttagtgtgttttcttctacagagcaggatatatgttgtgtgcatcttttaaatattaattacaatcttgcacatgataggtgtgggatagattatttctgcctgagtaaagctttatagtgtggctacattgtttagcatttctgatgtagaagatatacaacttttagattcattaacaaaaattttttacattagttctaattttgaatgcccratgtcattattctcttacatcaaccatatatttgagagttggtggattgttgggttgtctatctaatttcatgagtatattcaatctcagttattcctcatgctgaaactgtcttatcattattgttactgctaatgcatgtcagaagatcacgtgattctggtggtgctgtgactatgaaaatttcataattcaagatatttataaaatcacattatgggaggattc

SEQ ID NO: 299800 - DNA, 592 bp, Homo sapiens
tatgtgtgtttttgttattatatatgttttgtttttgttctttgtttttttcctcaaagaaaaaaaccagttgttagacttagcatacagtgttcctgtatttgttgactacagggacattgaatttcttccttgtatttattgatatctgggagtatttagataatatattatagcatattaggtttgcaatcctttgatatttgttaatatttttgtttgcttttttgattgctgtttttttctagagaatcattctctgctaaatcttttgtgcatttttggcagtcttttaagatgcttaaacttggcccataataatggcatatatttatggggtacctagtagtgttgtgtgatacatrtaatgtatagtgattatatacactaatgtatagatcagggtgattagcatatccatcatttcaaaactttattatttgtttatgttgggaacattcaatatcctctctctcgttatttgaaactatataatatatagtttcaaactatatatatcctacagtgctatagtacacaagaatttgttcctatctagctctaattttgtgtctgtgtacccttactaccc

SEQ ID NO: 299801 - DNA, 558 bp, Homo sapiens
ggtttgcctgcattatttatattttcactattactttattaaacctagacaaacaacaaaacaataaatcaagctctgatttgtagtgtttgctgatttccataagtgtgtaaatattgacactatggccaatttcatttgagctatcagtgtgattttactgagtgcagagttaaaagatgtgcagtgacacatcattatatagtattgtatagtatttccaccatactaatacagatacagacaaaatatgatcgagagcatagctaatartaaaataattaggaagatgagaatttttattttatcatctttgtccttaatataattgagagtttatataatttaattattaataatgcctatgtttaacaattgcttaccacatttctaaggatacaacaatcagctctcattagccagcaggagaaggtgcctgtttccttctggtgtccatgatcacggagcagctcccacttattttctccagagagcattctcctcttatgtggcatgggagagggaaaaagatgacagcagtaaaagattaagaagggc

SEQ ID NO: 299802 - DNA, 566 bp, Homo sapiens
atgtttgcattacaaaaaaaatcctgcccaactttgttacagttawtatggtatctgccttttcttctgccaaattctatttaaatttttaatgaggcaaatgttttatttgactaaattaattttgcattcattatcttcagtttaaatacatcatcacaataaaaaataaggtagactagtttcttagtttaggctgctacatcaaaatacctcaggctaagtaatttataagtaacataaatttattgcttacagttctggagaccagcaaatccaagatcaagggcccagcagattaggtgtcttgtgagagatcttcttctgcttcacagacggtgccttcttgctgagtcctcgaatggcagaaggggcaggcaagttcccttgggcctgttttataagggcactaatcctatccatgaggacagagccctcatgacctaatcatctcctgaaggccccacctcttaataccaccagaatgggaattcagtttcaacctatgcagcggggtaggaggggacacaaacattcagaccttcccaattatcaaccaatagttt

SEQ ID NO: 299803 - DNA, 615 bp, Homo sapiens
caataccagctaagggaagcgatgagtgattgtgtgatcccaggaaaccacacttctaccacagagctttgcaaaccatggatcaggaggtcccatcatgggcccatgccaccagtgtctgacacactaagctgggcaaagtctcaggagaccagatgctcaggcacatgcagagatccaggagctttacatactccagccccaggaaccctggcaaggttgtctgcagctcaagcaaggcagaaggtccttcctaggagatgyccctaggaagggggctgaatccagggagccgagcagtgccagtcttcaggcccaacttccatagcatctcacaggataagacccactggtttggaatccagagcagccaccagcaacagagtggagcctgcctgagaggagatggagccctctgggggagggaccaggccaccatatctgctgtttagtccaatcagctattccagcttgtgggttttggagagtccaaatggtccggacaaggaaggattccaacagtgcagcacagctgctttgccagaacatggctggagtgcttccataagcaggaccctggtccattccttctcagtggatgggacctcccagctg

SEQ ID NO: 299804 - DNA, 566 bp, Homo sapiens
ttaacatttttcttcttgtaacaatttactctacctttttagtattaccttcaacttccacaaaaaaaatgtgagaattggcctatactactataagtaaaatcatatgccaaagaaatatctgtatgaaaccataatgtgaatgtgatcctcttagaagggtcaaactcattttgcacacaaataatatagtgtaggctgtcttctacagagtaaaaattctaattttatgtttaagacaaaaatttactctactttgagatgaaaaatcattttacctatctgaatgggccaaaataaataagtttcttgtaattgagcattttaaaacttctgtaaamtactgttttagttctaaagtaacagattgcagcctgtagaatatttcaggtaggaaaatggtactcttccaatataaatctcaaacttcataatttattaactctgaactcatttgtaatttttttcttcttctttattacatgaatgtacatttaactagcaacaatgaagattttacagatatccactgattatttttccaatatgtcctataaaatatacag

SEQ ID NO: 299805 - DNA, 499 bp, Homo sapiens
aggtagtatgaatcatggaaatttgaatttatgagtatgccaaatcatgtaggaaatgagacaagaacttatttaggtaaaaaaaaaaaaaaaaacaagttagaagaactgtgaccataatattgtccaattttgtgacctgaataaaaagaaaattagatttcttaaaatcaaatctagggacaatcttaatataagtatttaatagttgtcttacttttatacagatgcatagtttgaggaaataagatacattgtagatatgtatactacctgttttctttacatttttccttttttcttatttttatttgatgaagttattkattacatttcagagctttatatttatcatttgttcctttccttatattaataatcaaacatgtatctcctgtaatatttgaaagaaagagagaaagtatatcctgccctaccaaaactttgattctccagcagtttatatttgatctttggcaagatttctttagaatgttgt

SEQ ID NO: 299806 - DNA, 580 bp, Homo sapiens
tgctttaactaaattaatattttggggtcctaggtaggtagaggtatacactatgattaataataaagcatatttattgtctattcaaagttctgtttcattgcttggtgcctacaccttagttctgtgtgttttcagaatctaccttaatagatattttagcttatatctcaactggcaaatcatatcctgttagaagtaagaatgggatagttttatttgtataaccactaaagattgaccctgagaacgtaattatatagttattctttttactctgcctcttttttagttggctgtaatatttttgaaaaagtatcattttaatagatgtgtattgtggttgagtcttaaagttttaacttactttgaattgagtgagacattgagtgaacacacatttgtgaatatatyataaaacataagtacaagattaacatatagaatggctcctagagaatactttagcaaatagtgtaaacagcacatttgcaagatttttatagcaatgacaaccttcctaaactggtgtgtactgtattcgtgtatatggatttgtatcattgttaattgctgtgat

SEQ ID NO: 299807 - DNA, 580 bp, Homo sapiens
aattggcttttattcatgactttagaatcaggcagccctccgaaccagaacaggttcaaatcactccagtctgtcatgagtttggatagcatttatggacagaaaatggaaatgaggtataggaaatggaaatgaggtacagaaaatgaaagtgtgggaaagagacagcttgattggctacagctcagcatttgccttattcgaacatagtttgaacagttggctgcccgcaattgactgaagtttggccactgtgattgggggagactcagctatttgttgcaaaagtatacccttaagctaggcttccagtaaacttatgtcygagtcaggttgcaatcttcgtgaggactcgtgtacagaggcatcttcaggtcaaatttagtttaatttaacaaaggtgacagcaatttaccagtatatctttaagtgtttcctgtcgttttagtctaccagttgagaagtttccgtggaaaagcttttctctgaaatccattctacatagtaatatttccttaacacattggctggattttattttattttatttttcttttaacttttattttaggttgagggg

SEQ ID NO: 299808 - DNA, 580 bp, Homo sapiens
aattggcttttattcatgactttagaatcaggcagccctccgaaccagaacaggttcaaatcactccagtctgtcatgagtttggatagcatttatggacagaaaatggaaatgaggtataggaaatggaaatgaggtacagaaaatgaaagtgtgggaaagagacagcttgattggctacagctcagcatttgccttattcgaacatagtttgaacagttggctgcccgcaattgactgaagtttggccactgtgattgggggagactcagctatttgttgcaaaagtatacccttaagctaggcttccagtaaacttatgtctgagtcaggttgcaatcttcrtgaggactcgtgtacagaggcatcttcaggtcaaatttagtttaatttaacaaaggtgacagcaatttaccagtatatctttaagtgtttcctgtcgttttagtctaccagttgagaagtttccgtggaaaagcttttctctgaaatccattctacatagtaatatttccttaacacattggctggattttattttattttatttttcttttaacttttattttaggttgagggg

SEQ ID NO: 299809 - DNA, 580 bp, Homo sapiens
aattggcttttattcatgactttagaatcaggcagccctccgaaccagaacaggttcaaatcactccagtctgtcatgagtttggatagcatttatggacagaaaatggaaatgaggtataggaaatggaaatgaggtacagaaaatgaaagtgtgggaaagagacagcttgattggctacagctcagcatttgccttattcgaacatagtttgaacagttggctgcccgcaattgactgaagtttggccactgtgattgggggagactcagctatttgttgcaaaagtatacccttaagctaggcttccagtaaacttatgtctgagtcaggttgcaatcttcgtgaggactcgtgtacagaggcatcttcaggtcaaatttagtttaatttaacaaaggtgacagcaatttaccagtatatctttaagtgtttcctgtcgttttagtctaccagttgagaagtttccgtggaaaagcttttctctgaaatccattctacatagtaatatttccttaacmcattggctggattttattttattttatttttcttttaacttttattttaggttgagggg

SEQ ID NO: 299810 - DNA, 620 bp, Homo sapiens
aatgctaacatttcctgagtgactacagtgggccgagtactgcattaactgctttatacgtattatttcatttaatcctcaccacaaccctctgtcgttcctactattattgccattttatagataagaaaacggaggcacagaaagacccagccatttgtccayggttacacagctgaaataaggccatagtagactaaaacccattgtcattccatccccagggctttgtgttgtctttctgagcaaacttgggtgaattgtgactatgggttcctcggcatgtgctgcattcttctgatctcctgtctctggttgcaaagttctggtccaggaatcaagtgttcaactttccatgcagctcccatagtacagaacagttctgagcaaacagcgagtgtttagtgaacagggttgacttttactacatgaaacactaatgttcagttatgtacttgtgaaggcagagggaagtagcatattccaagtgtcgtgttgatcctcagagtatattaaaagggaaaccagactttgtctcagagaaactaaactaacattaaataatgttatgggctacattgtgatttccccctccctcatatagatctgttgaaattcta

SEQ ID NO: 299811 - DNA, 527 bp, Homo sapiens
ggtgatattcaccaaatgtgtcaataggatggtgctgtgtttaattaataaaygtttccatttagggattaaacaaattctagctgtgaaggaagccatcttcataaagccaagtatttctgaattaggttggtggattgggtttattatctcgctaaaagcttcatttaatctgaaactatacatcagaggtctcagattgacagcctggatccagcccacaaacatgttttatttggcctgcacagtgttctaacaaactctcttgttatcatttaaaaatcagagatcttgtgcagcaatatagattttctaatttgaagatctcacaacacagctttgcttccctgaggcaacagttggccatcagccctttagaaggtcctggagctctgctctccagctcacctcagtccttgcctagccccacctgattcgctttttaatgaccacctggccctgtagacatttgatttcaaaattttttgggactgtgaatttctctaaggccaggtggctaccagggg

SEQ ID NO: 299812 - DNA, 527 bp, Homo sapiens
ggtgatattcaccaaatgtgtcaataggatggtgctgtgtttaattaataaacgtttccatttagggattaaacaaattctagctgtgaaggaagccatcttcataaagccargtatttctgaattaggttggtggattgggtttattatctcgctaaaagcttcatttaatctgaaactatacatcagaggtctcagattgacagcctggatccagcccacaaacatgttttatttggcctgcacagtgttctaacaaactctcttgttatcatttaaaaatcagagatcttgtgcagcaatatagattttctaatttgaagatctcacaacacagctttgcttccctgaggcaacagttggccatcagccctttagaaggtcctggagctctgctctccagctcacctcagtccttgcctagccccacctgattcgctttttaatgaccacctggccctgtagacatttgatttcaaaattttttgggactgtgaatttctctaaggccaggtggctaccagggg

SEQ ID NO: 299813 - DNA, 564 bp, Homo sapiens
cttgctgctattcctccttaataagatccattgtgcaccataaaatagtaactgggacgcagtttgtattccacatgcatcacatttctttttagcaggttcttccatatccataatctcatcattattactattaccctcagaagacaattgacttgcattaatcagtcctgctgccattcccttgccagattttctgtagttttattgtgcttttggacattttaattaacttgaaaaattaattttaaaatcttaccttattaatgytctgctcccttggaaatccctccttcttgtttattatcactgaccatttgaagatgaggtcattagtgattaaagctacagacaacttccacgcccatcctgctgcagattttgtgctatttttaaacaggatgtgaataataactccaacttttaagcaggtggggagggaggtctgttgcttagggagttaaaagacataatttcaattatgccataacatttaccccacaactactgctctctacagaagctcaacaacatttgtttattaataccatatacagaggtaag

SEQ ID NO: 299814 - DNA, 564 bp, Homo sapiens
cttgctgctattcctccttaataagatccattgtgcaccataaaatagtaactgggacgcagtttgtattccacatgcatcacatttctttttagcaggttcttccatatccataatctcatcattattactattaccctcagaagacaattgacttgcattaatcagtcctgctgccattcccttgccagattttctgtagttttattgtgcttttggacattttaattaacttgaaaaattaattttaaaatcttaccttattaatgttctgctcccttggaaatccctccttcttgtttattatcactgaccatttgaagatgaggtcattagtgattaaagctacagacaacttccacgcccatcctgctgcagattttgtgctatttttaaacaggatgtgaataataactccaacttttaagcaggtggggagggaggtctgttgcttagggagttaaaagacataatttcaattatgccataacatttacyccacaactactgctctctacagaagctcaacaacatttgtttattaataccatatacagaggtaag

SEQ ID NO: 299815 - DNA, 553 bp, Homo sapiens
atattcccaggccatgttgaacaagggaatattcaaaggctgcttcttcctttggcctaaagttctcatcatattcctgaaacttgctcctatccacgatcactcctcctcagccagaactctcaaatctctcctggggaggaagttctgaaatcctggttactttgttgtacagaamatttaaattcttctcttaatcctatcttttcagaccatgcgcagggtgcctttctttccatatccgaaggaagtctcagaaacgtgttatcttaaaagatcagttctgtccctaggaagacttccctaccaactgacagatgtgtagatggatgcttagatgaagagatggtgatgctcttcattttctttattggtttttgcgtgtctctggtgtttgcattttcactgatggcagaaagataacaaacttggcctgaaacactgtttgggggctatgttatgccaaatgtcaggttccagcccaagctgaggactaaggagagtggatggatgaatggcaggtagctggaaaaaacctcgaggaatcgtagtt

SEQ ID NO: 299816 - DNA, 616 bp, Homo sapiens
gtgtgtgtgtgtatatatatatatatatatatatatatatttgttctgtttccctggaggaccctgactaatacagtgtgctrctcaaagtttttgagaaacatcttcagtggcttcctataagctcaaatgcctacaaacaaatgtaaatgaatgtcacagcaagagagggtatgccgtgtcctcaggtcccagccaatctccactccaattgtcttttgctgtgtcaaattgtgggtaccaccattgccatatttttccagtttttaaaaggaatcaaaagtctggatatttttgtccatgttggcaactactgcaaaaaatgtttaaaaccttgtgtgagccaacaattctagtctgtgagctagatctgggccctggctgccagggtgcactctctgctctaaggaggtagtgggaaatctttttggatggtaggaaaggacatgtttagaaatatttccctatttctaaacttggagtggctgctacaactgctgcatgacagcattaattcttgcattggttgtttgtctgaggcttctatacaaagcaactccacagcatgtttacattatcccatgagaccatggagaggagcaaaagagaataaata

SEQ ID NO: 299817 - DNA, 616 bp, Homo sapiens
gtgtgtgtgtgtatatatatatatatatatatatatatatttgttctgtttccctggaggaccctgactaatacagtgtgctactcaaagtttttgagaaacatcttcagtggcttcctataarctcaaatgcctacaaacaaatgtaaatgaatgtcacagcaagagagggtatgccgtgtcctcaggtcccagccaatctccactccaattgtcttttgctgtgtcaaattgtgggtaccaccattgccatatttttccagtttttaaaaggaatcaaaagtctggatatttttgtccatgttggcaactactgcaaaaaatgtttaaaaccttgtgtgagccaacaattctagtctgtgagctagatctgggccctggctgccagggtgcactctctgctctaaggaggtagtgggaaatctttttggatggtaggaaaggacatgtttagaaatatttccctatttctaaacttggagtggctgctacaactgctgcatgacagcattaattcttgcattggttgtttgtctgaggcttctatacaaagcaactccacagcatgtttacattatcccatgagaccatggagaggagcaaaagagaataaata

SEQ ID NO: 299818 - DNA, 616 bp, Homo sapiens
gtgtgtgtgtgtatatatatatatatatatatatatatatttgttctgtttccctggaggaccctgactaatacagtgtgctactcaaagtttttgagaaacatcttcagtggcttcctataagctcaaatgcctacaaacaaatgtaaatgaatgtcacagcaagagagggtatgccgtgtcctcaggtcccagccaatctccactccaattgtcttttgctgtgtcaaattgtgggtaccaccattgccatatttttccagtttttaaaaggaatcaaaagtctggatatttttgtccatgttggcaactactgcaaaaaatgtttaaaaccttgtgtgagccaacaattctagtctgtgagctagatctgggccctggctgccagggtgcactctctgctytaaggaggtagtgggaaatctttttggatggtaggaaaggacatgtttagaaatatttccctatttctaaacttggagtggctgctacaactgctgcatgacagcattaattcttgcattggttgtttgtctgaggcttctatacaaagcaactccacagcatgtttacattatcccatgagaccatggagaggagcaaaagagaataaata

SEQ ID NO: 299819 - DNA, 620 bp, Homo sapiens
ggctgacctgcaacgtgtctcctctctaaacttgtccttccttcttgccagtgcccagcttttggctcctgctcccaccatctctagcttttcttcagggactggagtagggcatggccacatagagggtcatttcagggttaaaaattgaggcaaacgttacaaaaaattaaagtggtgacgaccttggaaactgggattggcttcttaatcmtgggacatctggtggccttagctcaagctccacaaagcctccctgtggcttttcctggaaaaaaagaaaaaaaaatccagcaggcaattaaattcaatcccccaccccttctcgtgttccgtaccaaaccacattgccagcctgtcatagagttcttttcttgactgccttgtgactcaaatgacaaaatatttccactcaaagttttgggagcttcacctccctcctatttttttttcctataaatggaaccccaaaagtttgggctagatatatttttttcccttttttaaaatggactttttccttccagaagcaatgattcagggcagacaattcaacttatttgtctacccatccatccctttatttatttatttgttgtataaggtaatagcttatggta

SEQ ID NO: 299820 - DNA, 568 bp, Homo sapiens
tcacctaaaatgtttgaggaattcatgctttacgagygtattttattgactaaatatgcagtactgagagagctttatgtgtgcagtttgatgatgctgacagatatcccggagataaacattttttaatttaaagatgttctgtttatgtttaacatacagaagttaatgttaaacatgatgcctattttgtttaacatacagaagtgactgtattaaagccatttcttctaaatgtgcaataaactatgaattctttgcctggttctaatgttctgtctcatcaaacctcataaaactaattagcatcataacccctcagtttgcctgtgaattttgaagatgatatgaatttctcttccatgtgaaatagaatttggtgggtatccctttgctgggaataactcctttgaaaaatagaaaaaatactgagcagaaagaaagtacattttctgggaaaagaaaaagaacccggagagatggagtgagaattgtaccacagagtcccagcagcagatgttttgggtgttgaaactcccaccagaacagctgcagaaatgtagaatca

SEQ ID NO: 299821 - DNA, 568 bp, Homo sapiens
tcacctaaaatgtttgaggaattcatgctttacgagtgtattttattgactaaatatgcagtactgagagagctttatgtgtgcagtttgatgatgctgacagatatcccggagataaacattttttaatttaaagatgttctgtttatgtttaacatacagaagttaatgttaaacatgatgcctattttgtttaacatacagaagtgactgtattaaagccatttcttctaaatgtgcaataaactatgaattctttgcctggttctaatgttctgtctcatcaaacctcataaaactaattagcatcataacccctyagtttgcctgtgaattttgaagatgatatgaatttctcttccatgtgaaatagaatttggtgggtatccctttgctgggaataactcctttgaaaaatagaaaaaatactgagcagaaagaaagtacattttctgggaaaagaaaaagaacccggagagatggagtgagaattgtaccacagagtcccagcagcagatgttttgggtgttgaaactcccaccagaacagctgcagaaatgtagaatca

SEQ ID NO: 299822 - DNA, 568 bp, Homo sapiens
tcacctaaaatgtttgaggaattcatgctttacgagtgtattttattgactaaatatgcagtactgagagagctttatgtgtgcagtttgatgatgctgacagatatcccggagataaacattttttaatttaaagatgttctgtttatgtttaacatacagaagttaatgttaaacatgatgcctattttgtttaacatacagaagtgactgtattaaagccatttcttctaaatgtgcaataaactatgaattctttgcctggttctaatgttctgtctcatcaaacctcataaaactaattagcatcataacccctcagtttgcctgtgaattttgaagatgatatgaatttctcttccatgtgaaatagaatttggtgggtatccctttgctgggaataactcctttgaaaaatagaaaaaatactgagcagaaagaaagtacattttctgggaaaagaawaagaacccggagagatggagtgagaattgtaccacagagtcccagcagcagatgttttgggtgttgaaactcccaccagaacagctgcagaaatgtagaatca

SEQ ID NO: 299823 - DNA, 571 bp, Homo sapiens
tcctgcaggaacttcatgtttgttattagaagtatttttattatgctaaacaaccaaaaccattcatacagagcttgcaaatagggaggccaaggaagttctctcatcagcccaactgaggcttggatccatctcttcaattgttactcagagtcttgtgcagagctctctcttgaaggaagaattgtaaaatgtaacrgaatcataaaagaggttaagattcaccaaacagttatttttggggagagaggataattttacagaggaaggaataaaagccgaaagaggtgaaataacttgcccaaagtttcaaagtggagtctggccccagatcccaggttgttgagccccaagctccattgtgtgttctttgtcctgctgcctctttgttggccaataccacaccagggtcaagtaggatgcagttaactctagaactctgggcttctgggcttctggtagtgaaggtcattaaacttgagtgacaagttgtgttgagtaaaaatgatcctagagttgaagaaatggacatgttattcatgttcattgtgacctgtgagaggtgtctgct

SEQ ID NO: 299824 - DNA, 624 bp, Homo sapiens
ccatatagggtaacttcctgatgttgccatggcatctgtaaactgtcatggcgctggtgggagtgtagcagtgaggatgaccagaggtcactctcgtcaccatcttggttttggtaggatttagtggcttctttactgcaagctgtttcatcagctaggtctttatgaccagcattttgtgctgacctcctgtctcatcctgtgacttagaatgtcttaactatccggaaatgcagcccagtgggtttcagcctcattttacccagcttctattcargatggagctgctctggttcacatgcctctgacactggaattacaggtgtgagtcaccttgctggcctcttttccctttagtaacagccaaggggctgtttctgtgtcttcacatgtgacagattcacgtgtgacacatcactgggctccgggcttgcgcccagcctcatctttcggcccagtcacaggaataaggtgctccgggggttgtgagcagcctcctggcacagagcaggacagggtgttggggggccagggaggctggcagtggggactggaaggagggtcccatgctttacccccccacacacccagggctaagaagagtgctgccctggagtcctgggg

SEQ ID NO: 299825 - DNA, 624 bp, Homo sapiens
ccatatagggtaacttcctgatgttgccatggcatctgtaaactgtcatggcgctggtgggagtgtagcagtgaggatgaccagaggtcactctcgtcaccatcttggttttggtaggatttagtggcttctttactgcaagctgtttcatcagctaggtctttatgaccagcattttgtgctgacctcctgtctcatcctgtgacttagaatgtcttaactatccggaaatgcagcccagtgggtttcagcctcattttacccagcttctattcaggatggagctgctctggttcacatgcctctgacactggaattacaggtgtgagtcaccttgctggcctcttttccctttagtaacagccaaggggctgtttctgtgtcttcacatgtgacagattcacgtgtgacacatcactgggctccgggcttgcgcccagcctcrtctttcggcccagtcacaggaataaggtgctccgggggttgtgagcagcctcctggcacagagcaggacagggtgttggggggccagggaggctggcagtggggactggaaggagggtcccatgctttacccccccacacacccagggctaagaagagtgctgccctggagtcctgggg

SEQ ID NO: 299826 - DNA, 585 bp, Homo sapiens
cttcttaaaaatcagattttgttcagattataacagtgtggtatatcttcagttaagacaatacaggtgcataaaaatatggttcctctcataacaatgatctgataagagaaaaaggtattttgcttttaaaaatgtattatgcctgtgctatttatggaacaattatgaataataataaaaatttaatatgcatttagttttctgtgatagaattagtggaacattacatttttacatatattttattttcattttatcttcactccctcctgtaaaggatttataattcatgaataaaaattaactgctggcttaaacktgacttgtgggtttttaggaaagaaactgatgtttatatattatgttctgtctatcagtattcagggaaaatctgtgttgctatctatttagatgctaaaagctatttgcattttgaaatttcataaagaactctgtcatttatttttcattttgaaaagccagtttttctagtaatatatctgcactaaaagaaaaaagaagaaaatgctatgcttctatgataatgaagtcagacaagtcattaaacaggagaatttcatc

SEQ ID NO: 299827 - DNA, 585 bp, Homo sapiens
cttcttaaaaatcagattttgttcagattataacagtgtggtatatcttcagttaagacaatacaggtgcataaaaatatggttcctctcataacaatgatctgataagagaaaaaggtattttgcttttaaaaatgtattatgcctgtgctatttatggaacaattatgaataataataaaaatttaatatgcatttagttttctgtgatagaattagtggaacattacatttttacatatattttattttcattttatcttcactccctcctgtaaaggatttataattcatgaataaaaattaactgctggcttaaacgtgacttgtgggtttttaggaaagaaactgatgtttatatattatgttctgtctatcagtattcagggaaaatctgtrttgctatctatttagatgctaaaagctatttgcattttgaaatttcataaagaactctgtcatttatttttcattttgaaaagccagtttttctagtaatatatctgcactaaaagaaaaaagaagaaaatgctatgcttctatgataatgaagtcagacaagtcattaaacaggagaatttcatc

SEQ ID NO: 299828 - DNA, 585 bp, Homo sapiens
cttcttaaaaatcagattttgttcagattataacagtgtggtatatcttcagttaagacaatacaggtgcataaaaatatggttcctctcataacaatgatctgataagagaaaaaggtattttgcttttaaaaatgtattatgcctgtgctatttatggaacaattatgaataataataaaaatttaatatgcatttagttttctgtgatagaattagtggaacattacatttttacatatattttattttcattttatcttcactccctcctgtaaaggatttataattcatgaataaaaattaactgctggcttaaacgtgacttgtgggtttttaggaaagaaactgatgtttatatattatgttctgtctatcagtattcagggaaaatctgtgttgctatctatttagatgctaaaagctattygcattttgaaatttcataaagaactctgtcatttatttttcattttgaaaagccagtttttctagtaatatatctgcactaaaagaaaaaagaagaaaatgctatgcttctatgataatgaagtcagacaagtcattaaacaggagaatttcatc

SEQ ID NO: 299829 - DNA, 496 bp, Homo sapiens
gttgagtgaatggcactgggacctggatacaaacacacacatcattcttcactctccagctcctctgcctcatcactgcagcacctggctggcaactaatgttcagacctgggcctgaggaactctcaggtctttctcagctggatcaggagattggcaaccccgatggtgcctgacctcccatttctattctatgtccagccagccagaccaccctactcttgttttgggtgtcactttccctccaaaactcacacactcccacattacccctttgttgcgggaagtcagggaccccaaacggagggaccggctgatgccatggtggaaraacataaattgtgaagatttcatggacatttattagatccccaaattaatacttttataatttcttacacctgtctttactgcaatctctgaacataaattgtgaagatttcatggacacttatcacttccccagtcaatacccttgtgatttcctatgcctgtc

SEQ ID NO: 299830 - DNA, 482 bp, Homo sapiens
aggaactggttttcttgtcttgaaatatataatgaggtttctcaaccctgacacaactgacattttggattggattattctttgttgtggctgctgccctgtgcattgtagcatgtttagcagcatatctgtctcttacccactagatgccagtagcaaacctcccccaattatgacaatcacaaatgtctccagatactgctaaattcctcctgggagacaaaaattaccctgctgagaactacagaaatagaatatatgttgtggatattttaggggaaaaggctgttagataaaatgcatgcatctttgtaaaagcagccttaggtcttacagctcctgacatcagttctgtgccagccctgacccttacccaaccttggcctccctttagaaatcactgttgggagracagcagtggaagcaagccctgatgccaacacctcagaggaaagcattacaactgggctaccgcagcctgg

SEQ ID NO: 299831 - DNA, 593 bp, Homo sapiens
ctctccctggagcaacatgtcccctttggcttaatcatactgtgtaatcagctgtaggggaagctcgttgtttgacttcacctctctggacctataaaattcatcagtggtcttcagacttttatttttaataagtgatttttttttcaaaccaaattttctggagaccataaaaaagatataaaagttggggggtgcagttaaataatctctttcattacttcaatattttcattttctttttcttctcaactctcaagttacttaacttctgtttcaaagtgtttttctttatttgttgtattgctcaattatatttaataaattcaagtgactaataggctctgctaaattccatacagtgtggaaaacagaagaataagatagtatctctgacctcaaggaatttaacgatctatttagttaaggtgggactaktacaaataaaacaactagtgaacagtgcaaacaattctaagactccctgactctcaaactgtgcccagcacatagaagactcccaactaatatttgtggaatgagtgaatgaactactcactttttacatgaaagttggccctgtgaaaggttag

SEQ ID NO: 299832 - DNA, 573 bp, Homo sapiens
ccacctgcaccatttaccacagagggaaggtgctaattcccagtgtaatgctatgtctgcagatgtaagatttttttgttttgttttgttttgttttgttttgttttgttttgagacagggtctcagtctgttgcccaggctggagtgcagtggcaagatctcggctcactacaacctctacttcccaggctcaagcgatcctcccacctcagccccccaagtagctgggattacaggtgcacaccactcatgcccgkctaatttttatattttttgtacagacttggtttcaccatgttggccaggctggtctcgaactcctgacctcaaatgatccacccactttggcctcccaaagtgctgggattacaggcatgagccaccgtgcctggtctgcacatgtaagattttaagattttattaaacatacaattaattcaaatagattgttgggttacctgtttggatccacatcctaaagataacatatgcttagaagcataaagcaggaggtaaccaacagcctgcagcttgagtccctaagacccatatgtacaagaaaatcaaagtct

SEQ ID NO: 299833 - DNA, 527 bp, Homo sapiens
tgacttgttcactgctgggagtaggatgttgaagttcccaaattttattttattargccttatcactctctctagctctgataatatttgctttgcatatctggctgctctggtgttgagtgcatatatctttataattatatcctcttgctgaattgatttttaaatcattatataataatatttttgtcattttttgtgttttttaaattaaatcattttatgataatatttttgccactttttgtcttttttaaatttattttttaaagtttttatttttatgaaaaatagagagggggtctcactctgttgcccagggtggccttgaactcctgggcttaagagatctatccacctcagccacccaaaatgctagattacaggcataagttaccatgcctagcctatttttatgttatttgacataagatatattttgtttaccatgagtaacactacttctgctcacctttgctcttcatttgcatggaatatctgtttgtatttctttactttctatttct

SEQ ID NO: 299834 - DNA, 482 bp, Homo sapiens
cttctttttcaggtcatgaaaatgttgtagacttagatagtgatgatggttgcacaaccctgtgaatgtacttaaaaccactgagatgcttctctaacctccccgaatcctcccaccaagtcatcaaataaatttaaagtacagatcactagatgagatgaagactgggacagaactatccatgaaagaccatggttttacttccagttgccactctgtttccatgggcttcttttcctgttgtttaatcttgacatctgaattgtcttgttgccttatyttcttacttcttactttcattctggatttgctcttttcatccctaatagcaaccctgacctgaaagtttaatttgacagaaattaaaataataccttcacaacgaatgccaaattctccacagcaaaatgtcactacgctagagttgctatgaattttcataatacataagggagaaagatgttttgctggaggtgagtgac

SEQ ID NO: 299835 - DNA, 420 bp, Homo sapiens
tgctatgaattttcataatacataagggagaaagatgttttgctggaggtgagtgacaactcacccagtggaaatataaaatgatggggcggcttcttctccatctcattatacagctattcatcatacctgaagagtcttactccaagtgattcaagataagaaaactagttagggaagatggttgctaaatcaaaagccttcaatgaagcaataaatctctcagcaaggacaggcaaagtaagtttgttctgagcagagacacggtcacgtgtcaaaacgcaaagtaaaatggttggatcatcaaaattgcggccactttcaactyaatctgtagttcaaatatagagagttctgtcattatcattaatatctctctttctcataaattggaatttttttctttttaaactaatctct

SEQ ID NO: 299836 - DNA, 583 bp, Homo sapiens
acttattctgagggaaaaaaaaggataactataagattattaatggggctttccttataccagccagaaggaaagtgagattcgttcctttattgataaatgtattccagtaatttattcaagatcttaggtttaaccatgatatggtccagttatgtaggtacctggaacaacctctaactccaggtaaccaattcatttactgatgcatcactgagcataagagtgcaacataatgcccagcaatagatgaatggacaagcaaaatgtcgtatacatataatggaatattgccttaaaaaggaaggaaattctgacataggctgtaacaatggtccctaacctttttggcacaaggaacctgtttcatggaagacaatgtttccrcagacagggaggtggggaggggaggaatggtttcaggatgaaactgttctacctcagaccatcaggcattagttagagtctcataaggagtatgcattctagatccctcacatgcgcagttcacaatagggtttgcactccaatgataatcgaatgctgatgatgatctgatgatgggaggcagagttccagtgat

SEQ ID NO: 299837 - DNA, 539 bp, Homo sapiens
ggcatagctacttgctgttagaacatgtaaactccattaacatatgacaattccctcaaatacccttcaaattctactgaatgttaggaagagttctactctgggggagtagtagtatctttagggcataaaaaataaataaatagtgttaatataacaaggtttaaaagaaataagcargggttaatctgcaccttatgaaagcaaaccaaaaaaaagtaaataaaatttgcctcaaatttctgtttatactttcaaatatcctcatggattactcattttatttcttttttcccctctgaaaatgagatcaataaaagaggataagagttgctaagccaggatattacctaatacaattaagtggagcctcactcttttctcttaactctgttgactttccattgtcttctttgtcttgcccaaatagatatagctacaccaaaatggatgttgtatgtaataataatgtaatatagaaataatgtttttaaaagactgctttagaataaatgatgcagaaaatcttttgttaaact

SEQ ID NO: 299838 - DNA, 617 bp, Homo sapiens
gggaagaaggggtaacatcccagtgacaaaatggaaggaatgtgaatagccagaagagaagttactaaaagatggcaataaagaaaggcagaatggggttcggggttcagcaggaaccatatgatgagtactttgtaaatgacatttcatttaattttcaaaagaaccctatgaagtcaatattattcctactttataattgggaaaaccaagtatactgatacagctaattgtctcagactacagaactgattagtagaaagagctaggacttgaatccagagctgtttttcttcaaagtccatattcttttcaccatggtcaggtttggaagctttagaaaaactcacattttatccttgaattttcatctgctaaaagtaagattactctcagcaaatrcatgaaagattgggtagctgactatgggtcattttaagtggattctcccatcaactcctttcttcttcctgatattgtagactccagagacatcccaaaaaaacctaaacacagttttacaaagtggacccattcctttcccaataatatctgtctccaaacatctcaggttacctaggggaatacacactagtgatgattacttttgaaagttt

SEQ ID NO: 299839 - DNA, 537 bp, Homo sapiens
tgagaccctgtctccaaaataaaaataaaaataaaagtgttgacctatagtttgtgatctagttaagtttcgagaatgttctatagttgtatggaaaacatgttaatatgtattctccgtttggaggtgctaagatattcataaagatgttcctgtgtgtggttataatacgtgtatgttatttaagattatttttaatggtctgaatacatctgccagctgtgccagtttcccccaacctccagttggagtagttgcaaggtctcatatccatttcacaaacctttgccaagaaggtctatttctatatttccacaaatgtgcaatcacagtatggagggtggagtgtcacaactaagtgggggtaaatagataatkaaaaataagatttaccagtgtaaatagaattggcctcaccaacatggccttggtagtccccgccaagtcctttcttagggtttctatttcctgatctacatgccctgagtggtcatatctaccctgccaatattgcaaggtgtgtcgcgagaagccaaa

SEQ ID NO: 299840 - DNA, 537 bp, Homo sapiens
tgagaccctgtctccaaaataaaaataaaaataaaagtgttgacctatagtttgtgatctagttaagtttcgagaatgttctatagttgtatggaaaacatgttaatatgtattctccgtttggaggtgctaagatattcataaagatgttcctgtgtgtggttataatacgtgtatgttatttaagattatttttaatggtctgaatacatctgccagctgtgccagtttcccccaacctccagttggagtagttgcaaggtctcatatccatttcacaaacctttgccaagaaggtctatttctatatttccacaaatgtgcaatcacagtatggagggtggagtgtcacaactaagtgggggtaaatagataatgaaaaataagatttaccagtgtaaatagaattggcctcaccaamatggccttggtagtccccgccaagtcctttcttagggtttctatttcctgatctacatgccctgagtggtcatatctaccctgccaatattgcaaggtgtgtcgcgagaagccaaa

SEQ ID NO: 299841 - DNA, 585 bp, Homo sapiens
gataaacaaaatgtgttacatccatacaatgggatgctatttaaccattaaaaggaatgaagtacagatacatgctacaatatggacaaacataaaaacattatagtaagtaaaagaagacatatttcaagattctgtttatatggattttcagaataaacaaatccacagagagaaaaagtagattagtggttgccaaaaactggtaggagggaggaatggtgaattactgctaataactatggagcttctttttggagtgatgaaaaatgttttgaaattaagtagttgttaaataaaatttatacaggaccattggtttggactgagctcctgcactaggcccaacagacctaaccaaaatggaatcacttgtattgaagtttcatctgtgctgaagctaagttgttcatctgaccttcaagaaatcagaagacagggataacagtcaaatccccacacaggccactttcagctgggatggtaagaaagtcctctctgctttaacctytacagggaaagtgactttgaaatgaccaatccgtctttagatccctggtcttactttcttcagccctttctgtc

SEQ ID NO: 299842 - DNA, 570 bp, Homo sapiens
tcatgtgtttgatctttttctaagaatagtaaactgcttctcctttattaattcacccattgaagagcaattttaagtaaaattgatttaggttcactttattgatagaaaaattaggcatagaaacatacataactgagcccaatagttcagttactaacccttcttactcctagaggctgcagatatcatgtctactctgcgatggagagcttgggccttaaaattttagtaggttgttttattgcctaaaactttgaacaaagaaaaaataaatcaatcaggttggcctagttctggttttgatgggcaggaaaatcaggttataatttagaacaacaacaaagaaaagctgttccacaagttacctctatttaggaggaaacaagcatcaatgcaaatacaaaacagtaactctgtgatctgctaacttccttcggggtgaattcttcctacgaggctcatgggagttatcatttcacccacttatatcayatgtccctgaaggattcagtagaatcacctaaaaggaatctgttagataagaggaaataaaatgcatgtagaaaa

SEQ ID NO: 299843 - DNA, 604 bp, Homo sapiens
agaggagaactaacccacacaggatcatttcgygaaggagcaaggctgaagaaccagacctggactttcttaggcaagtaaattctgattatatcacggagacttgctttgagaaatctgccccttttcactgtgagatggcgtcattaacacatctagttctctcctaagcagccagcaaacatttattatacactagatattatattggcatttgagatgatacaaaggaataaaatggggcaattagctctagtaatttggaggtctcaacttacggatattccaagttcctttgaaacgtgtgcagaaaaatgtttatgcaaaatttgcctacattgcaaggggtccataggaccctccccccaagtccttgacctccaggttaagaactcctagcctagaagaggccaatcccagcacaagtgccagtgttagaattgcatagcactagctactgtcttatttatgggtctactggttaaaggctgcttgtgtttcgacatccttcatcttttatttaaatggagcagcatcttacccttgaagacctttggtacaagagaggaatatatgttttaataagcatttaattaaccagatc

SEQ ID NO: 299844 - DNA, 604 bp, Homo sapiens
agaggagaactaacccacacaggatcatttcgtgaaggagcaaggctgaagaaccagacctggactttcttaggcaagtaaattctgattatatcacggagacttgctttgagaaatctgccccttttcactgtgagatggcgtcattaacacatctagttctctcctaagcagccagcaaacatttattatacactagatattatattggcatttgagatgatacaaaggaataaaatggggcaattagctctagtaatttggaggtctcaacttacggatattccaagttcctttgaaacgtgtgcagaaaaatgtttatgcaaaatttgcctacattgcaaggggtccataggaccctccccccaagtccttgacctccaggttaagaaytcctagcctagaagaggccaatcccagcacaagtgccagtgttagaattgcatagcactagctactgtcttatttatgggtctactggttaaaggctgcttgtgtttcgacatccttcatcttttatttaaatggagcagcatcttacccttgaagacctttggtacaagagaggaatatatgttttaataagcatttaattaaccagatc

SEQ ID NO: 299845 - DNA, 524 bp, Homo sapiens
ctctgcctgctccttttaacttgtttcatctttgcctattgtcatctctttcctctgaagtttcttaattaaaagagagcaccccacattcagaggcacattcattcttctttcctcctacaagtgacygatctcatacattaaaaagctgagccagcaaagtagcggtgtttcaatgccaattatgaaaatccataaataaagtacatcattcagtttcctgcatgaatacttttcaaccactctgatgtcctgactgttggaattgtttttcctctctaaggacaaccattaagtatttacaagcatgtccttttcttgggaaacattaaaggcaaatgatatgaagcaaagctgttttgcagtgcagcatataccccttgaatcattttataccagcttttttcaatattggttgaaaaagctcagtgaagtcattagtctttgaaatttcctttagaagtttttatgaaccaagctgatcatccaactctaggttcttctaagactcctgccaatttttg

SEQ ID NO: 299846 - DNA, 338 bp, Homo sapiens
ataatcactggggtagcagacatgaaaacagactaccttctctttcagtgcaattaccacacagtgcaccaactttaaaaaaattattagcaaataattaagaaggaagagcaatttttaaaacgtttgaacataaatgagatttcttttgtttattaactcattcagaaaggaactacaacctgtcagaatgactttagaatctctctaacaattttgtattaagggtttggtttcttgaaaccactgagacaaaggtttcagaacctttttgagaatttgctgctaacrtttataaggcaaatatataaatatatcacatttatatttgatcatca

SEQ ID NO: 299847 - DNA, 604 bp, Homo sapiens
atatatcacatttatatttgatcatcagttaccaaaaaaaaaaatttagcactttccaattgccaaacactgygccaggtactaagacaaaaggtaactaagatagacaaaatccttgccctcatgaaaattatatttcagtgggataagccaacaggaagcaagaaaaggaatacataaatgaaataattacaggttttgagatattctggaaaggagataaacagggacttcaacagaggcaaaggtttaagcagataaacaggtcaagattcactctctgaagttacaacattagaatcctcataatgggtaaaaaggaaccagttctgcaaaaagctgaagtaggagtgttcccagcagagcaaatggcctgagcaagacttcaggtcaggaaagttctaggaattgacagaaagcctacatgactgcagcctggtgtgtgagaagagactgatgttacattcaagtcaaaatgcacttgacaccatttcctttaaagaatcatttgtttccatttagaaaatattaacagatattgatcatgagtagcagacgaaatttcgatatatctaaaatttctaggaaaactatggttgtgcat

SEQ ID NO: 299848 - DNA, 458 bp, Homo sapiens
ggtttgagacaccaccctggacaaaatagcaagacgcatctctaaaaaataaaaaaaaattaataaaatttaaaaataagatacaacccacaatgggaaaaatatttgcatattatatatttgctaagggcctagtatctagaatatataattttattttaacctctctgaagtttcaatgaatatttataattgccaagtgratactgttttactctgatctctaatgcaatgaatcttaattgtttcttttaatggtaccattgttgatcaattgattaaggctgaaagtcattgtctaactttgatttctttctctctccatagccaataatttactaaatcttcttgcctatttattatatatattatatattttaaaatatttttaatagctgttaattaagccacatccattccatttttacatttttacagtaaatccaaaccgtttttac

SEQ ID NO: 299849 - DNA, 458 bp, Homo sapiens
ggtttgagacaccaccctggacaaaatagcaagacgcatctctaaaaaataaaaaaaaattaataaaatttaaaaataagatacaacccacaatgggaaaaatatttgcatattatatatttgctaagggcctagtatctagaatatataattttattttaacctctctgaagtttcaatgaatatttataattgccaagtgaatactgttttactctgatctctaatgcaatgaatcttaattgtttcttttaatggtaccattgttgatcaattgattaaggctgaaagtcrttgtctaactttgatttctttctctctccatagccaataatttactaaatcttcttgcctatttattatatatattatatattttaaaatatttttaatagctgttaattaagccacatccattccatttttacatttttacagtaaatccaaaccgtttttac

SEQ ID NO: 299850 - DNA, 458 bp, Homo sapiens
ggtttgagacaccaccctggacaaaatagcaagacgcatctctaaaaaataaaaaaaaattaataaaatttaaaaataagatacaacccacaatgggaaaaatatttgcatattatatatttgctaagggcctagtatctagaatatataattttattttaacctctctgaagtttcaatgaatatttataattgccaagtgaatactgttttactctgatctctaatgcaatgaatcttaattgtttcttttaatggtaccattgttgatcaattgattaaggctgaaagtcattgtctaactttgatttctttctctctccatagccaataatttactaaatcttcttgcctatttattatatayattatatattttaaaatatttttaatagctgttaattaagccacatccattccatttttacatttttacagtaaatccaaaccgtttttac

SEQ ID NO: 299851 - DNA, 495 bp, Homo sapiens
ggttttattacaaaattaataaactactctgatttgaatgataagtcattgaaattgctatacctgcttttggcaaatgcagaaaaaatattagggttcagatagagtttgttgcccaaatttcacttccattctctcctttattgtagagttctggcagaaggcaatacacaaagattgggagctagaaagaaaacaacatgactatttattaaatgattataattaccaatgtacctgttattgtctgggagtactcargcctatacctgtcttgtaccactggggcagaactcctgagaaccacctttcccagacccccttgacagctggtttccagtttggttcttctaatgggatggactcctgtgtgatgagagggagcgggtagaagtcacttgaaggccctagacttctggttccagctgcattgctgacatgcacctgtgaatgcttgcaaggtgccagtggcaggagtagtggcagcagcagcag

SEQ ID NO: 299852 - DNA, 576 bp, Homo sapiens
ccattatcactaaagttatttctaacaattgtcatgtttagatagatgttactgttactaatagtattattgctgccaattttagtagtgattattagtagtggtgacaatattattaatttttatagttaatatagtatgtattattttacagaatattcatatattaataatatattcaatgatctttaacaaatctttgaaagattttaacatgctgagatcatgaaattttaaagwgattctatgtttggttcctcatcctctaatctgttacattctttaacaggacaaacttactgcagcttgaaggagccaaccatggatttgaggcgtgtgaaggaatatttctcctggctctactatcaataccaaatcattagctgctgtgctgttttagagccctgggagcgatctatgtttaacaccatcttactaaccattattgctatggtggtatacactgcctatgtctttattccaatccacattcgcctggcttgggaatttttctcaaaaatatgtggatatcacagtacaatttctaattgatcctgttcacattcagtgaaatgg

SEQ ID NO: 299853 - DNA, 513 bp, Homo sapiens
ttcagtaaaagtactcaacactcccatagaagcttgaagtgcttaatagttagcatcacactccccagtgcattttgttccacataatgatgtcttcaatcatttcatcatgcatcatttaagagcagtaaaatatcacaaattatgcttatgggcatgaagctctaaaggacactcagtctgctgctgaggagcttggtggagcgctttcatttgcaacctgagtacaagatcgtgtcacaataatttggttaagccagatagatagtaccatcagcactactgcagagcatgcaaagctttatgcatttcacaataatatcacaatagggcacctcatggatcaatgaatgtaccttgcttccttttgtttttaattacttgcagttatatgtattcaatgtgatatatctatacacacatacataatttaatatatacatacatatatacatacacatatrtatttgtgtatacgtatatatgcttccaccatctaagcctgtaccaata

SEQ ID NO: 299854 - DNA, 311 bp, Homo sapiens
acatgtccacataaaccatcactataccacacctttttctgcattctatcattcactgattctgtgtgattataggacatcaatcaatgtggtaagcactttgagatttagacagagcattatataggatgaccgtagatcctggtttgcctacctagtgcttttggrtggggatgaggaaattcagagaattcttcctacatgaagcgatgcctgagttacatcttagaggatgaacagcaattagccacattaaaattagcaattaaaatcagtttattctctaatatattctcccttgccaattggtt

SEQ ID NO: 299855 - DNA, 311 bp, Homo sapiens
acatgtccacataaaccatcactataccacacctttttctgcattctatcattcactgattctgtgtgattataggacatcaatcaatgtggtaagcactttgagatttagacagagcattatataggatgaccgtagatcctggtttgcctacctagtgcttttggatggggatgaggaaattcagagaaktcttcctacatgaagcgatgcctgagttacatcttagaggatgaacagcaattagccacattaaaattagcaattaaaatcagtttattctctaatatattctcccttgccaattggtt

SEQ ID NO: 299856 - DNA, 595 bp, Homo sapiens
tgaatcagaatcatagaagtgtttattaagaataaggcaagaaacaaataaaaataaagaaagtggcagcttctgtctcacctcagactagaaccagaatccatggatatgggagccagaagccatgatttatacaagcaccttcagtggttttcacagttaaagctggagaaccactggactaggtggccctaagatgcctactgtctctaaaaatgtactcaaatgcttagctaccaaccacttccatgtgcaagacactgtattaagagctgtacgcatgtttcctgttgaactataactttcatagtccagaacctggggtggtttgcaactaaacccagattccagtccagacmtatatctactaaaatatatgagggctcatggacacagtgcttccctcccaagtaagctgtgccccagaagagtcttctttcaccccccagttacatcccacccctgtgatcatcctcccaatgagttctgtccccctaattaatgttgcctcctgcaggggtgtgatcagcagcatgctgctctgactctggtttttctcttattttttcctctgttattatcgaatcagcctgaa

SEQ ID NO: 299857 - DNA, 610 bp, Homo sapiens
tatttactaaacaggagagttgtttgttgctatggtgccatgaccttaatgtattaaaatgaaagatagtcctataaaccaatggcaatggtggacaaagtcaggccattgaagagctaagscttcaatattcccaagacatttgcatttcatcagatttcagagcttttctttagagtttgaaaaggttaccactccccttatcacaaggcactcacttcttattgggtaggggcaaaccttgaaagaaataaaacagactactgtgtaatggtaaatgagattgaattttccaatgtgccacctgggagaggaattgctgacaaggaaagatccataaggtaggagatgattacaaacactgatttattttatcttccaacccagcttttgcaataagatcccaggctgaaaaaggtcctgttgacataatttgcctctaggaaataagaatatgaatagaaatgataaaactatgcaattgataaaaggtagtttttcctttctggtattaaatctgtttttgtttgatttttggagtatggaagtttgtggcatggagcatagaatcattcttcattttaaagttactaaatttgtgaatatctgt

SEQ ID NO: 299858 - DNA, 581 bp, Homo sapiens
agccaaccacttccaatgctagcgctctgattccttgccctacaatttcaaatacttgcagcttaacttcagaggtacacgttgttgtagacatttgtagatatcctgactgacaagcttttctctttttgtttggcagatttttaagcttactagtccctcatcctcaaggtagaactcaggaaacagcctcccttgcaactaggacttaggcaagtgacccaggctctaccaataagatgtactcaatgagacttcaatttggaagtgagcatcttgaggaaggaagctctgcactcaatttatcatgttggtgatgcttacagtagaactgtctggctttctcagagacttaacctatgcaagggtctatrgcaaagcaaaagatataactcgcttcttagtgtttgcttttgtttgcaggattccaaagcattcctggggggtcctcaatgttttacaaactttccctgaaacagttcttcctgttttctatagctttcctgaatgatgtgggactcaaacagaagtccaataacaactacactctattgtgagtatgccatccttactgatgacta

SEQ ID NO: 299859 - DNA, 616 bp, Homo sapiens
aatcataatgttcaattttaacattgtagagtaccaaaaaagtttatcgctatcactgtaattccaagcccctttctacagttgcaaaaagatgccgtctttttctcatggctcttccctggagatattcccaaggacctccagcatagtttaattaatctaaaatgttaatttctaatgactactgtctgagcctcctcagacagccaaccacccctttggtttctgccaatggccatcagagccatccagaccaatttgctatgacagttcttctcctggtgctgggccagggaactcaagcaagagayacattctgtgccccaaaccagccttccttatgaattgctctaaacctggctgaactatacccctttgacttcccaaaggcacaactacaagcaagcactatagccctgacaagaccatctcaaattcttaatcattcaatcttaaacaaacccagtacagggcactaatagtccctattgaatatctttgaggaaaactacctctgtttcctcttttagaagtaaaatatgtatacctaattgacattattaaacagaacacaatgcatccattttgattcaaagtaacctcatacttttatcca

SEQ ID NO: 299860 - DNA, 600 bp, Homo sapiens
tggatccaggtagaaaaaaatgagacttctggatcagagacggagagttgactgctcagagcaatgcctatagccagaacatcaacattcatgcctgttccccaaggctcaatttctataatgtaaaacaaagagggccaaatgatacctgctgtgtagtatagtatattacagaggaggaatcctcagcataacgtcccaaatcttctataataggagggaaacttttctgacttttgctcctaaagaagatatacttatcatattggatagtaagcaagccttgccactgttctggaggagacgytatctctatcttccaagccagtttactacacaaacatgttagaagagacagttcataacaagggaatcaatttctctgctcaccagatatgcagaaatgtaagaaacaaatggataattgtctccaaacacagagtgcctaccatgtgctagacactggtaagaattctaattcctccattcagcaagcttttattgcatacctactttgtttccaggactgtaacaagtatcctttaaaggagataatgtatgtgaagaaattttttaaactccggaaaaacaagtgttagc

SEQ ID NO: 299861 - DNA, 600 bp, Homo sapiens
tggatccaggtagaaaaaaatgagacttctggatcagagacggagagttgactgctcagagcaatgcctatagccagaacatcaacattcatgcctgttccccaaggctcaatttctataatgtaaaacaaagagggccaaatgatacctgctgtgtagtatagtatattacagaggaggaatcctcagcataacgtcccaaatcttctataataggagggaaacttttctgacttttgctcctaaagaagatatacttatcatattggatagtaagcaagccttgccactgttctggaggagacgctatctctatcttccaagccagtttactacacaaacatgttagaagagacagttcataacaagggaatcaatttctctgctcaccagatatgcagaaatgtaagaaacaaatggataattgtctccaaacacagrgtgcctaccatgtgctagacactggtaagaattctaattcctccattcagcaagcttttattgcatacctactttgtttccaggactgtaacaagtatcctttaaaggagataatgtatgtgaagaaattttttaaactccggaaaaacaagtgttagc

SEQ ID NO: 299862 - DNA, 600 bp, Homo sapiens
tggatccaggtagaaaaaaatgagacttctggatcagagacggagagttgactgctcagagcaatgcctatagccagaacatcaacattcatgcctgttccccaaggctcaatttctataatgtaaaacaaagagggccaaatgatacctgctgtgtagtatagtatattacagaggaggaatcctcagcataacgtcccaaatcttctataataggagggaaacttttctgacttttgctcctaaagaagatatacttatcatattggatagtaagcaagccttgccactgttctggaggagacgctatctctatcttccaagccagtttactacacaaacatgttagaagagacagttcataacaagggaatcaatttctctgctcaccagatatgcagaaatgtaagaaacaaatggataattgtctccaaacacagagtgcctaccatgtgctagacactggtaagaattctaattcctccattcagcaagcttttattgcatacctactttgtttccrggactgtaacaagtatcctttaaaggagataatgtatgtgaagaaattttttaaactccggaaaaacaagtgttagc

SEQ ID NO: 299863 - DNA, 589 bp, Homo sapiens
cccataaccagccatcctgggccttcaatcctctccttccaggaagggatgaaggctggaacttaaaaatgcaaaattctcagttgtgaaatcaaacaatattcaagcacattaaaaaacattgcccatgtaaatcagtagtgggatcatgcctgtgaatagtcactgcactttagcctgggagccatagtgagacccccatctctaaaaaaagaaaaaaaaatggacagaaaaaatgtttcagctgggcatggtagttacacctataatgccaacactttaggaggccaaggagagaggactgcttgagcccaagaagtttgaagccagcctggacaacatttatagggactctgcctctacaaaaaaaaaawattttaaaacttaagcaggcatggtggtgcacacctgtagtcccagttgcttgggagattgaggtgggaaaatcactggagactaagaggtcgaggctgcagtaagctgtgatcacaccacttcactctagcctgggtgaccgagtgcgaccctgcctcataaaaaaaaagtttcatcaagaatttttgggttggattgctttctaatttgaact

SEQ ID NO: 299864 - DNA, 640 bp, Homo sapiens
cagcttctttcactagcataatatcttttgaaatttactcatgttaatatctttattaatagttcattactttttttgctaagtagtattccaatgtatgtatataycacaatttatttattctttcacctattgatggacatagggttggttgcagtttgcagctttaacaaacaaagctattctaaatattcatatacaagattttatgtgaacatatactatcaattctcttgggcaattaataatagtagattggttgaggcatacagcagttatgcccacttaactttttaataaactacaaatatgttttccaaagtatttgtaccattttacattcttatagcagagtatgagcattctagttacttcacatccttatcaatacttaatatagttgtacattttaattttaatcatctagttggtgtgtagtggtatatcattatagtttcaacttactttcctttaatgactaaggatactaaacatcttttcacaggcttattgatcatttgtgtatcttctttggtgaggtgtctattcaaatattttgctcattttttcattgtgaactcagttgattgtaaacattttagatatatatattctagacacaacgtatttgtcacatatg

SEQ ID NO: 299865 - DNA, 558 bp, Homo sapiens
tgcatgtataaacaaaacctagatgttttcagggaaagagactccataatcctccctagtaaaaatatgaatctataatagaagtatcactttgtctttgttttagttgtctgcttctaagtcttcattatagtgtccatactgtctgctaattgatagccttatcacagggaaggatcttcttctaaattcaaatatagtatttataaaaacaaaatgatggcattcaaaaagaatgagaagtgacttcccgatttatggaaaataactgaagatatcctggaggtagaagatatttaatataaaaatgctgatggatttacaaattcctatcttttttgtcagttcatcctaaacatttcctaattatggaaamaattcttcatttttttagacaaaatttaagtacattgagtggaagagtttcttgacgtaggactacagagatgcttttcagcataaaaagaatataaaagaacaaattataataaataaaaggaatatatcatttactatactattgataataccaataaatctgaatttccatttcatctt

SEQ ID NO: 299866 - DNA, 628 bp, Homo sapiens
gtttgtttttgactacttgggaggaattttcccttacyatttcaaagtatctaatgacataattgagaactattcctttgtaagaatgggaagggagtagaaaatcattttaagaaacgctattcagactatgatttttttatgcctaagaaaccagagccaagaatctcaggatctggcagatgataaaatgtatttctttaatgaggcactagcattttcaactaacaccactatttctatgctaccacttaaagaggagaaactttcttgcccttaaattttctctctattatgactaggtctatgaacacaaaacttggattttttttagagaatatgtcgattttatttttagtccagagtcaggtgaatattgccaaagcttatttttttttaatgttaggccttagaaggtcaacacatattccaggtttctgtaaagaaaatacatgttttcattttatgtcctgggattggctcccccacactttgatattagggtctgtacacaagtcttaaagaaattactcccctaatgggactttgccttgtgaccaaagtcttctatcctgttcctttttgagagctcccttaagaccagagtaggactttatttatcttataa

SEQ ID NO: 299867 - DNA, 608 bp, Homo sapiens
agtgttagaaattttaagtgaaaggacatgggacataatttggcctactgttgagtaaggagtatttctgcagggcaggatatttttaagagattcatttccattctgagtctgttggatataaatccaaggaatagtttagctttcatacatttacagagagtcttctgctttggcttcgcctctcccagtgcactttccttccaaataaaatcctacaaattaatgtttgtttttgactacttgggaggaattttcccttaccatttcaaagtatctaatgacataattgagaactattcctttgtaagaatgggaagggagtagaaaatcattttaagaaaygctattcagactatgatttttttatgcctaagaaaccagagccaagaatctcaggatctggcagatgataaaatgtatttctttaatgaggcactagcattttcaactaacaccactatttctatgctaccacttaaagaggagaaactttcttgcccttaaattttctctctattatgactaggtctatgaacacaaaacttggattttttttagagaatatgtcgattttatttttagtccagagtcaggtgaatattgcc

SEQ ID NO: 299868 - DNA, 299 bp, Homo sapiens
gaatattcaaaatgaaactatgtatttgtcagttgcatactatctatcatattatgaattaaaatggtatgtgcatttacttaataaacatgattgattgcaaaatttayctctctgacatctaatttttaggatttttttgtttttatgaaactcagtaacctcaacataccaagacctagcatattgcatgtttaattatacttaataagtactatattttataagataatgagaataaacaaaacctttcttacatctattcagtacctgccattcaaaagtttctaagcctatta

SEQ ID NO: 299869 - DNA, 538 bp, Homo sapiens
acagtccttatgtgcatcttttcttaccaccaacccagtgaatttggtcaatacaggaacatcgtctttggtttaactttgtgtaacttttttttttcaaaatgcccagcaccatttagacacatgttgttttgatgttatagtgacgaagatattgaacacaaaatgctgtgtgaactgcaaagcatgattcttttcattataaaccaaatattagtgctcaactaagagattacaagtaaaaaaacattgaaaaagtgattttgctcttttataacagtttctggtgtgcaggtaaaacaaaagaggtaactattgaggkgcagctctattaggaggaaatttttcaatgcagtttcatgacagctatattaataactccattatgcaaagaatgtgggccaagataagagaaaaagcacacagttaaagggagcaagctctgtgtagagtaagacaagcggaaggaatggcacaaagaggagggaagagagagcagaggaagcaactgaggacagaaaaatttgatagcatactg

SEQ ID NO: 299870 - DNA, 603 bp, Homo sapiens
ttaactttgtgtaacttttttttttcaaaatgcccagcaccatttagacacatgttgttttgatgttatagtgacgaagatattgaacacaaaatgctgtgtgaactgcaaagcatgattcttttcattataaaccaaatattagtgctcaactaagagattacaagtaaaaaaacattgaaaaagtgattttgctcttttataacagtttctggtgtgcaggtaaaacaaaagaggtaactattgaggtgcagctctattaggaggaaatttttcaatgcagtttcatgacagctatattaataactccattatgcaaagaatgtgggccaagataagagaaaaagcacacagttaaagggagcaagctctgtgtagagtaagacaagcggaaggaatggcacaaagaggagggaagagagagcagaggaagcaactgaggacagaaaaatttgatagcatactggagatggaacaggagaaggaaaaggagtaagcaayaaaatgataaacaggagaaccaaaacaatttcataaagacatggggcaagaatggtaacacctggtgaaaataagaaacttttttttttttgcaacagggtc

SEQ ID NO: 299871 - DNA, 615 bp, Homo sapiens
tttgtcaaatcacctggagatcttatttaaatgtgtatgctgagcagtagatctagagtgagacatgaaattctgcatatgtaaccaggcctcaagggatactaatgctgctggttcaatgatcacacttagagtagcaagattatagatcagtaattatcaactggacttgcacataaaaattgcacatagggaaattgttgaaaatatctgtgtggaatccaaacaaactaaatcaaaatctstaggagagggacctaggaaatcagtatctttcaagagaatccagatgattctaatgtctgagcagtgttaaggattactggtgtagactcatccaactagtcaatttagggagtttttactataaatctcaatcctagataatcccactcagtaatgcacaggttgctataagaatcagaccaaaattattccagatgcttcttaaattttaaataatttgcttatgaatatgactgcaaaaagagtaataaaagtaacagaagtggaaaaatggagaagaagagggagatggagaggcagaatgagagagaaaagcagaaagagagaggaagagagaaaaagagaaaaatgaaattcacatttactgta

SEQ ID NO: 299872 - DNA, 606 bp, Homo sapiens
caactggacttgcacataaaaattgcacatagggaaattgttgaaaatatctgtgtggaatccaaacaaactaaatcaaaatctctaggagagggacctaggaaatcagtatctttcaagagaatccagatgattctaatgtctgagcagtgttaaggattactggtgtagactcatccaactagtcaatttagggagtttttactataaatctcaatcctagataatcccactcagtaatgcacaggttgctataagaatcagaccaaaattattccagatgcttcttaaattttaaataatttgcttatgaatatgactgcaaaaagagtaataaaagtaacagaagtggaaaaatggagaagaagagggagatggagaggcagaatgagagagaaaagcagaaagagagaggaagagagaaaaagagaaaaatgaaattcacatttactgtaagactagagaytgagccttattaaatatacctgtacttgtaccttgggacaaaatatttgttgaggtatatcgtattttattcttttcagataacttttctctttaggggtcaattaagtaaaagtttttgacagctatgctaaatgaaac

SEQ ID NO: 299873 - DNA, 555 bp, Homo sapiens
ggactacaacaaactaacaaacttctgtacagtagaggaaacactcaacagaatgaaaggcagcctatggaatgcgagaaaatatgcaaattgtatcagataaggagtcactattcaagatacataatgaatttccacagctcaatggcagaaaaacaaataacccaattaaaaactgggcaaaggatttgaataggcatttctccaaaaaagatatataaatggccaataggtatatgaatagatccttaacatcactaattatcagaaaaatgcaaatcaaaactgcaatgcaacatcacctcacatctgctaggattgtcattaccaaaaacaaacaaatataaacaaaaacagraaataacaagtgttggcaaggatgtagagaaactggaaactgttgctgggaatgtaaatgtgcagactccacagaaaacagcatagaggttcctcaaaaaattgaaaataaaactaccatatgctccagttatcccacttgtgtgtatttttccatcacaattgaaataagaatctcaaagagatttttgtgctccc

SEQ ID NO: 299874 - DNA, 555 bp, Homo sapiens
ggactacaacaaactaacaaacttctgtacagtagaggaaacactcaacagaatgaaaggcagcctatggaatgcgagaaaatatgcaaattgtatcagataaggagtcactattcaagatacataatgaatttccacagctcaatggcagaaaaacaaataacccaattaaaaactgggcaaaggatttgaataggcatttctccaaaaaagatatataaatggccaataggtatatgaatagatccttaacatcactaattatcagaaaaatgcaaatcaaaactgcaatgcaacatcacctcacatctgctaggattgtcattaccaaaaacaaacaaatataaacaaaaacaggaaataacaagtgttggcaaggatgtagagaaactggaaactgttgctgggaatgtaaatgtgcagactcyacagaaaacagcatagaggttcctcaaaaaattgaaaataaaactaccatatgctccagttatcccacttgtgtgtatttttccatcacaattgaaataagaatctcaaagagatttttgtgctccc

SEQ ID NO: 299875 - DNA, 555 bp, Homo sapiens
ggactacaacaaactaacaaacttctgtacagtagaggaaacactcaacagaatgaaaggcagcctatggaatgcgagaaaatatgcaaattgtatcagataaggagtcactattcaagatacataatgaatttccacagctcaatggcagaaaaacaaataacccaattaaaaactgggcaaaggatttgaataggcatttctccaaaaaagatatataaatggccaataggtatatgaatagatccttaacatcactaattatcagaaaaatgcaaatcaaaactgcaatgcaacatcacctcacatctgctaggattgtcattaccaaaaacaaacaaatataaacaaaaacaggaaataacaagtgttggcaaggatgtagagaaactggaaactgttgctgggaatgtaaatgtgcagactccacagaaaacagyatagaggttcctcaaaaaattgaaaataaaactaccatatgctccagttatcccacttgtgtgtatttttccatcacaattgaaataagaatctcaaagagatttttgtgctccc

SEQ ID NO: 299876 - DNA, 574 bp, Homo sapiens
tcccaactgaaatggttacagaacatccctaactagaggaaacagaaccaaccttgccctaaattgtagctattatagaaacgccaaaatgctagaaatcttactttcaagttttgccattaactttttatggagaggcagtttgaaaaattaaaagacaaaatagttacccaataatgtagaccatgatttatttacattgcctcaacttttcagtaggtcatgtgatgctgctgaaataaagaagtaaattgtgtgaaagatttctggctttttagccagtttttactgttagtataaataaaaatgcccaacagagaaaaatacatgattattattattatcttcaaaccactatagaacaatagtgctatctggtcattagagtttttgagckctgaaggaagtagaaagctcatggtgctgctctaaaacaagcagttgagaatttgtcaggataatagttaggacgatgggctgtgacgccaagtagcctggttcaaatgttgattctgtcacttattgtaacatcggacatgagcctacatctctcagggtcccatttccttgtctg

SEQ ID NO: 299877 - DNA, 574 bp, Homo sapiens
tcccaactgaaatggttacagaacatccctaactagaggaaacagaaccaaccttgccctaaattgtagctattatagaaacgccaaaatgctagaaatcttactttcaagttttgccattaactttttatggagaggcagtttgaaaaattaaaagacaaaatagttacccaataatgtagaccatgatttatttacattgcctcaacttttcagtaggtcatgtgatgctgctgaaataaagaagtaaattgtgtgaaagatttctggctttttagccagtttttactgttagtataaataaaaatgcccaacagagaaaaatacatgattattattattatcttcaaaccactatagaacaatagtgctatctggtcattagagtttttgagctctgaaggaagtagaaagctcatggtgctgctctaaaacaagcagttgagaatttgtcaggataatakttaggacgatgggctgtgacgccaagtagcctggttcaaatgttgattctgtcacttattgtaacatcggacatgagcctacatctctcagggtcccatttccttgtctg

SEQ ID NO: 299878 - DNA, 582 bp, Homo sapiens
tattcagctgttatgaaacatatcaatacatctttcaaccacaaaaatataagacttctctccagaatcagtggaagtggagtgtacacaacagcaagagaaataagattttttaggtaatggagataacataaactccrctgtcaattaagacaccaaaacaagatttcacatggactttttaaaaaggtagacacttaatcgtaactaaaggaaatagcaaaataagttaaaagttgaattctatttcctgaatagtaaactgtagaaaaaaattatatttttaaatgagccctttgtaaaattattttaagcaactgatcaagggcttaaagagtatttgtgaagtttcacattgacatgaaaagacaaaaagagatgtattgtaatgccaaagaattaaaatttattacaacaatccttcaacattcattgtggaaaagaacattaaaatatcagtgcatatgaatgtatggtagattaaaaaaagagaattaaatgaactttcatggcacatcaaaaattttgttattatactctgagttgcatccaaagaattcaactctgtcactagggaaaaga

SEQ ID NO: 299879 - DNA, 582 bp, Homo sapiens
tattcagctgttatgaaacatatcaatacatctttcaaccacaaaaatataagacttctctccagaatcagtggaagtggagtgtacacaacagcaagagaaataagattttttaggtaatggagataacataaactccactgtcaattaagacaccaaaacaagatttcacatggactttttaaaaaggtagacacttaatcgtaactaaaggaaatagcaaaataagttaaaagttgaattctatttcctgaatagtaaactgtagaaaaaaattwtatttttaaatgagccctttgtaaaattattttaagcaactgatcaagggcttaaagagtatttgtgaagtttcacattgacatgaaaagacaaaaagagatgtattgtaatgccaaagaattaaaatttattacaacaatccttcaacattcattgtggaaaagaacattaaaatatcagtgcatatgaatgtatggtagattaaaaaaagagaattaaatgaactttcatggcacatcaaaaattttgttattatactctgagttgcatccaaagaattcaactctgtcactagggaaaaga

SEQ ID NO: 299880 - DNA, 451 bp, Homo sapiens
atgcaacatattaaaatctgttatgaaatatgtatttcatatacatagtatgtagaaaattacacatacacatacatatttcataaatattcacctatatttggtgtgtgtaattgtatacatattaaaatctatacttgaatctatatctatatatctagccaatatcataaaatttagaagtacatacacacagtgcatatagaaaatagccatactggttgattatagtcaaggtccattctaatttgtcactttcctgctttggttgtttagtgcccatggcatactgattactatacattttgaatatcacccatgaatacaacagtatactacatttcagtagtaatttttygcatttgcatttttaaatgcatacattaaaaaactacaatatgaaaatcatgtatgtaagtttattactggtacaaaaatagactaatgaaac

SEQ ID NO: 299881 - DNA, 634 bp, Homo sapiens
ttaatttataaatcctattatctttaaagttatttattaaataaagtgcaagcagaaagtaatgagtttagtagcttttatgtcagtctattaatttcttccataataaacaaagtcattttttagttcagaaccattaagccaagcaaatattgccagcaagtttaatttttacttactaatgtcaagaaagaaraatggcttaatacatgacaagcactcacaaacatgaagacacattttttcagcctcatacataaatacatttttactcacccagaatgtataattaatattaagaggatagaaaaatctcatttatttcacctgaagtttattaatacagaagatgatgacaaactacaggacagtttaatatttatttgcaaagctattgccacaaattatctccatgtatgctatctgcaaagcattcaaagtcagaagcataaataatgcctggatatcagcaaaattcctaataaaccccttggaacaaatttgtatatctaaagtccaagattattttaaataaagaagaaatattataaaccacagaacagaatctaggcaactacaccaaatcacatgaaggataacataaggattttatttatcctgaagaaactgcagt

SEQ ID NO: 299882 - DNA, 610 bp, Homo sapiens
tattgccacaaattatctccatgtatgctatctgcaaagcattcaaagtcagaagcataaataatgcytggatatcagcaaaattcctaataaaccccttggaacaaatttgtatatctaaagtccaagattattttaaataaagaagaaatattataaaccacagaacagaatctaggcaactacaccaaatcacatgaaggataacataaggattttatttatcctgaagaaactgcagttttgtaaaacatggaagaaggaaacagtttctttggaattttcaataaatttcttttatttttactgataaatatacttttgcttttcaacaatcctttatatttttcatatttctcttctgtttcctgtataaatggataaatgaatcaatatgttaaaaatatttctctattctctatttacctttcgaaacacaatagtcagaaaactataataatgagagaactcctttaatcagcctgagtgtcttaactctttccaacaactgccatatattactgtctggttttttttaggttatgctgctgatggtgaacatactgaaatgactgaagagccaaaactctttttacactgtgctcacatg

SEQ ID NO: 299883 - DNA, 618 bp, Homo sapiens
aatacccaaaagtaaggggttgattaaacaaaatatggcgtatcaatacacatagacaaaaggactggattaaaatacgacagaacttcaacattagtcttttagtaacatgattgtatcaattttcctatttctttctgtcagttttccaaattttttctacaacgaaaacatacttctataatctaaaamaataaatattattttcaattgaaataaatacatttaaagccctgcctataactttaataaatctacctcacaggaagagtaagaaaggatttgcctgacagcaaaccacctgatgaaggtcaggtatttcagttgcccatatctttaaaatgtttcagttgcttaaaaaaacattaaactattttaagaagtattaggtggaaaaagtttgcagattgcaagaagtctgtgctggtcagagtgtgtacagttaaggtgttcgaccctgggaaccaatacaaacactgaccatctaggactcacagttgagggaaacagacccattgaaatgctgcctgacaagcctcaggaggagcagatggagggccctagcaccagttagcacagagacaggagcagtaagaaaggaggtagcagtggccatca

SEQ ID NO: 299884 - DNA, 520 bp, Homo sapiens
taggaaccttcctcactaagtcagccttgctatattttgttctccacatagattttcttacgtttgctctttagtatttagtaaagatgtgcaaagtcccagactgcctcatctgcgataagagaaaccaaataaagagatttatacccatgcttggacaggatcattaaagtttttatataggtaaagcattttatatgtataaattctttaatcctcacaacaacttatgaagcagtactattatcctcaatttacagatgaggaaattgagatacagatcttaggtgacttccccaatgtccacagatagtaagtggtggacyttcccagaactgtggttattctttccagaaggaataatcttaaactatttggtattacttcatagcaatttatgtatatgtcaagtatcatgaatgactttcttcttcttcctcctttccccccatccagagctcctaatcctgtctcacatatgacaaaggctggaagatagtagacaccatttttatacaat

SEQ ID NO: 299885 - DNA, 487 bp, Homo sapiens
atctttcaaaaaactttatcaagtttatcagtagcagctgataaatactgagtttcagactcttggtaaattatttttcaaaaagactttatgctatatataataacacaggacaataaaatcacacatgaattactgaacttakgtttcaggaatcttttttcaaaaatgtcacctttgaagcaaaaaatcaaaaaaccttacttggggacgtatactcccaagttttctctacacaattcctatattctagataacacagcaacatcagtgtcaacaatgaacaaaaagatgtgcttcctagaataggacctaaacaaccacactagaactatttagcttttctgacacctcatgacagaaaactggatttaaatctatgtgccaccctccacattggtttcttcagccagaaggtttgctataaatagatttttaaaagatcatttaaattagtcactctcagccttctgtgcagtggaagagg

SEQ ID NO: 299886 - DNA, 528 bp, Homo sapiens
atcccagcactttgggaggctgaagcagatggatcatttaagatcaggagttggaggccagcctggccaacatggtgaaaccccgtctgtactaaaaatataaaaattatctgggcatggtggcaggtgcctgtaatcccagttactctggaggctgaggcaggaaaattgcttcaacccgggaggcagaggttgcagtgagccaagatcgcgcygctgcactccagcctgggcaaaagagtaggactccatcaaaaaaaaaaaaaaaaaaggactaaaaaagtatatttcatgtatcttagaataatctgatcaacctataagcaagaaaagacttttacttgcgaaaatcatatagatggaagtactatattggttcatcttatctgtaatcaaattggtgttcattcgattagaattccagagttaaaacatactccctattaatgcaactatgatgtatagtaaaatattattggtacaacttaataacccttaagaagagtaatgttccaaaaatgtaataat

SEQ ID NO: 299887 - DNA, 517 bp, Homo sapiens
actgcattttttcctctttctcaaagcataataaaggattagcctcctaaatctaataataatgatttaggcaaacaaacaaacaaacaaacaaaaggctcttggtttgtgttttcttacaaataatgctacagtaaattacaatatcctaaaactggttaaaaaggcttgaataggttaaacaaagaccaagagaatatccagggccatctgcaaacacttgcttttagcatcatgagatatatttgtgcgggctcactaactccttgtaaatcaccatctttaaaataacttcaagaatcaagtggtacagagcacaattctacgaggaaggattaatgggagaatttttacaaaggaggaaagagaagttaagcttatggaaaatgcattatcctaaatttttctaatgctgtattgcttttattaatcttcttatccttacaagatttacaataaaaaaaacaaagacttcawcgtatttggagtactaatagttaacaagttggaagagaac

SEQ ID NO: 299888 - DNA, 597 bp, Homo sapiens
cacattaaaagtcatctggagggaaacacaaaaaccagaagtttggaggagaaagaatagggaggtgtttatgtttcattttatatctgtttgcatggtttgcagatttattatatgcatgcattatttttaattaaagcattaaaaatactgtactaggattgggaagaaagaatggtagagttaaactacttacactacccaggactagcatacaggacacagcagctaagtcactgtgacattgtaatcactctgtgattctgccctacatttccctggcattscagctctgctatgagctgactaattaacagtagatttatatttttctaaagatcattaaaatatatcacatgctgtctcacagccttaatctgaaggctgcattgttaattattctagtttattaatatattgccaattcggtatttttccactgattggacatcattttttataatgtttaaaaggtagcagcatgccaagtgcctttttaaagggttttttttttaattaagataaaattaatgacagtacagtatttaggaagcctacaggattatcttgatgaaatctctctttaaaaatttagct

SEQ ID NO: 299889 - DNA, 532 bp, Homo sapiens
ggtttcaaccttgattaagatacgcccacaatattgaggaagagagtggtctagagggaaatcaggacacaatttgagagaaaaaaattaccgtgcattacatactatttgatcttagtaatgtcacaatctacctggcttcattattcttctataaaatgggaataatgaaaccatacctcccaaaagcaaatggctatttcaaagaactcttgaggtcctacgtagctttaaaatctaaagctaatgaactaatgagatcatttcactactttgtatttttatcaataaaaacatgagtgactcttttaataaaaacagtaataacagttaacattgttctaagcactttacatttattacctattcagtgcttacacagccyctataaagtagatacaattgttatttccattatacatatgaggcaactgagtccatgagaggttaagcaatttgaccaaagtctcacagctaataagttgtggagtcagaattcagacccagaaaatccgacttgtaactcacagaa

SEQ ID NO: 299890 - DNA, 514 bp, Homo sapiens
aggctgcggcaggagaatggcgtgaacctggaaggcggagcttgcagtgagcggaaatcacgccactgcactccagcctgggcgacagagcgaggctccgtctcaagaaaaaaaaaraagaagttaaggcaaaaagtatgattccttgctattgtattatgaatatgaagccatatatgtatatatggtccttcttccttcctctttctaaccacctacaaacaaaactatatattgccacaagcctccttttattaagagaagtcctagaaaaatgcagattatttctcaccaaggaaattagctagtgacatgtaagaaaaattgtattcaatccttcctagttccactgaatcgacttgactaggctaatacagtcttatgagacggactggcttcaatgtaaagcctaatagaattaaatataaatgccttcctgagggaattaaatcaacggactatgaagcaacttcttgatttttctctgatagcttgtcaccctcaccagcagtag

SEQ ID NO: 299891 - DNA, 580 bp, Homo sapiens
tgataatcttattttatactagagttagttcttctttttgaaagctaatggatagaggaagagaaagcaaaaggaatgctaagagttatgtttcactccaagcaagcagttgttaattgacttcaggactttcaacaaatataaccagaacatgtgagttgtatttcttagaagaaaagataaagttggtatttataatttaatctctatgcatacctgaccttaaacttaatgaagttgcaaaaagactttttaaatcaattagattttttaaagctgttaatcatgtggtgtcttwtatgttacttcaaatggattcctttccagggaggcaatttattatttttaataatttgcatttctgtaatgaaaaatgataataaatggctgcatcacataagatacctgcaactaatttgtttaaaatgaattgcttaattctaagcaatttctctctaatattaataaacaacttcatgcaatgtaattatcaagtattttaacctgctatttatttacagaaaaataacatgaatccccatagtaaaatttaaagacttgtcatataattttcaaaatg

SEQ ID NO: 299892 - DNA, 580 bp, Homo sapiens
tgataatcttattttatactagagttagttcttctttttgaaagctaatggatagaggaagagaaagcaaaaggaatgctaagagttatgtttcactccaagcaagcagttgttaattgacttcaggactttcaacaaatataaccagaacatgtgagttgtatttcttagaagaaaagataaagttggtatttataatttaatctctatgcatacctgaccttaaacttaatgaagttgcaaaaagactttttaaatcaattagattttttaaagctgttaatcatgtggtgtcttatatgttacttcaaatggattcctttccagggaggcaatttattatttttaataatttgcatttctgtaatgaaaaatgataataaatggctgcatcacataagatacctgcaactaatttgtttaaaatgaattgcttaattctaagcaatttmtctctaatattaataaacaacttcatgcaatgtaattatcaagtattttaacctgctatttatttacagaaaaataacatgaatccccatagtaaaatttaaagacttgtcatataattttcaaaatg

SEQ ID NO: 299893 - DNA, 629 bp, Homo sapiens
tcataactttcagattttatagatgtaaaaatattttatatgtcrttattttttaatccttctaattaatatgtatgaataaaatgttaaggatatataatagaaatcttaccttcatcttgttttcttctttttatgctaatcattttactagagccatgtcaaaacagtaacacatacgtggttagaataataaccagttttttgaaagaacatttttttcctattagggactatatgaatatttgatcagatctcaaagaaaataaaagaaagccttgtgattcagctttcattttagaaactttaacttataaacatttctcttttgcacttaatggttactatcttaatagatgaacactttgcaaacgctaagtatatgtgtgtttaagaaataaccaggtactatctatggggtaattttaaaatgagaaaaattacctaattattaaatatataaactttaatgctaaggagaatactttgttaatttaagcactacttcatacagtaatgactggtgtcagtatacgaaggtgcagttgaaacttttcatgtactcttaaagataagaccagtgaaagctcaaggttttttcttttctttaaagaaattcaaacatttca

SEQ ID NO: 299894 - DNA, 359 bp, Homo sapiens
tctttggggagttcttcctctgcagacagggcgtgagaaatcaaaaaaggcaagcggcaattagatctacagagttatggtggtattttttgctatttttacttcgctctgtctcacaacactactccaagtaataggctgacactttagatctcttggtcatgaatcttatatgtctatgagatccaaatcattgagttcgtaaaaggtttcatattcaatagyctttttgtttttgctttatgatcctacgtggagttttctctgaccctatgatagcttaaaagggaaacatctataaaagaagattggacaagtcactgtctcctaagcctctgggatgtagacccaacactgaa

SEQ ID NO: 299895 - DNA, 550 bp, Homo sapiens
ttactagagccatgtcaaaacagtaacacatacgtggttagaataataaccagttttttgaaagaacatttttttcctattagggactatatgaatatttgatcagatctcaaagaaaataaaagaaagccttgtgattcagctttcattttagaaactttaacttataaacatttctcttttgcacttaatggttactatcttaatagatgaacactttgcaaacgctaagtatatgtgtgtttaagaaataaccaggtactatctatggggtaattttaaaatgagaaaaattacctaattattaaatatataaactttaatgctaaggagaatactttgttaatttaagcactacttcatacagtaatgactggtgtcagtatacgaaggtgcagttgaaacttttcatgtactcttaaagataagaccagtgaaagctcaaggtttyttcttttctttaaagaaattcaaacatttcatttgttcaagtttcagtagctttcatcaaggcagatacatattctataaattatgatggttcatgttc

SEQ ID NO: 299896 - DNA, 551 bp, Homo sapiens
aattgcaattttataagaaaaacaataaaaaatttcagaataaagtagtaattaaatgagttataatatgtaactgatttactagaaattatgtttatagagttttttatgacatggggatcaagaactacaataaaatgccaactgaacaaaatgtatgatttcaactctgtaaatgtgttcttgtatatgtgtatgtatttcctcaattctaaggttgtttttttttatatttcagtgattccaaaatkaggataaatcatacacttaatataaatattttttacaacccaaaaagctatatttaaattaatagattatcttacaataaattacatcttacagtcaaggaaatactgtgtccacgtacttaaaaaatatggcttatataataaaaaattaaattattctttaaaaaggaaagaaagtcctgcatggcatacctttaacaactgcatttcaagtttctaagggggctatcttacagttcttctgtgccatggttatggcatgtgcccacatctgctcatctatttaccttactaaaaaga

SEQ ID NO: 299897 - DNA, 573 bp, Homo sapiens
ataattttttggttatttgggagtgggagggtcacatactggcaggtggtgaacccagtgacccaagagacctcttttatttgtgagtcccctatggttaaataacaaactgcttttcacagtttggtaattcagtggttcctttccataacaggaaaaaaaaatgaaagtaactaaccatcaactaagaccttgaattccctcagctgagagaagagactaatgcayataggtcataaaaaaaattaaagttctgctgcagcaaagagggagagacaaggctgtgctaacgatctatctcatgctttcttgttgtatgaagaaggccatgatgacagctaactttcaagacctccagtatgaatcagtggcatgaccactgtgcttccctaggtagaccctgaaagaagcacagagaagagagtctggtggggaaatcctacctccaggatttaaccctcctccatttctcatagcgtagttgagtaaccccagcaacatcctctagcccagggtttcccaaaccaaagttatttctttataatggtcacaatttttgtcttatccaagtac

SEQ ID NO: 299898 - DNA, 573 bp, Homo sapiens
ataattttttggttatttgggagtgggagggtcacatactggcaggtggtgaacccagtgacccaagagacctcttttatttgtgagtcccctatggttaaataacaaactgcttttcacagtttggtaattcagtggttcctttccataacaggaaaaaaaaatgaaagtaactaaccatcaactaagaccttgaattccctcagctgagagaagagactaatgcacataggtcataaaaaaaattaaagttctgctgcagcaaagagggagagacaaggctgtgctaacgatctatctcatgctttcttgttgtatgaagaaggccatgaygacagctaactttcaagacctccagtatgaatcagtggcatgaccactgtgcttccctaggtagaccctgaaagaagcacagagaagagagtctggtggggaaatcctacctccaggatttaaccctcctccatttctcatagcgtagttgagtaaccccagcaacatcctctagcccagggtttcccaaaccaaagttatttctttataatggtcacaatttttgtcttatccaagtac

SEQ ID NO: 299899 - DNA, 573 bp, Homo sapiens
ataattttttggttatttgggagtgggagggtcacatactggcaggtggtgaacccagtgacccaagagacctcttttatttgtgagtcccctatggttaaataacaaactgcttttcacagtttggtaattcagtggttcctttccataacaggaaaaaaaaatgaaagtaactaaccatcaactaagaccttgaattccctcagctgagagaagagactaatgcacataggtcataaaaaaaattaaagttctgctgcagcaaagagggagagacaaggctgtgctaacgatctatctcatgctttcttgttgtatgaagaaggccatgatgacagctaactttcaagacctccagtatgaatcagtggcatgaccactgtgcttccctaggtagaccmtgaaagaagcacagagaagagagtctggtggggaaatcctacctccaggatttaaccctcctccatttctcatagcgtagttgagtaaccccagcaacatcctctagcccagggtttcccaaaccaaagttatttctttataatggtcacaatttttgtcttatccaagtac

SEQ ID NO: 299900 - DNA, 557 bp, Homo sapiens
aggaaggagaatgggagtgggggaaacaagagttctaagtaatatatttttctgcttttggaatacataaaggttctacacagacctctaagtaacaacagttttcaggaatgttgaagaggggacataattgttgacacagaggatgccagaccagggatcaaagagttgcctctggctataagaaacttagaagctgctgggttgtgcttccttaaccctcayactgctattcacaccaaacttgggcacttaccagaatctcctctctctatcccttttctttgctttctaattccctttgaatcttaatccctatagttatttatgctttgcaaaatgcattcataaattatgatgaaaatgaaatttcatctgaaattgctgatagtagcctgttttgccctacaaatgggtatttagtacaatttaatatactgcctcattttatcaccttgataccctttttgcagacacagcctgttaactgtggtgagactcagccccagagatcatataacaaaagaagtggctgacctagaacttgaacctgggtg

SEQ ID NO: 299901 - DNA, 603 bp, Homo sapiens
ggagttttaagagcctcctgggttttaggagctaggaaatggtaagaaacacacagagacaagactcaggagtttatttcaccatttcggatttcctcagtcagattttttttgttccattttataattatcaatcacatgaacttgaaaatgtgaaaatagaagaaagaaaatcaytggggagaggaggattttttaaaggaaatttttttttgaaacttgacttagaataatgggatttcttcaatttgctgtatgcaaagtaacagagagcttagtgtatcccagagatggattagacagatgtagcacttaactattaacatttgtgaggttcattcccaccagtgagatttgtgagcaacttccatgagattctacgcaaaatcagcttagtactttcctcatttgtcactgcgccgtgaaactggtaaaatatagaggaaacagaaaattgggcacatctgtgaatttggttgtgccctgattatagcaatgcagttccacagatgtgcatgttttcacaggagaacaggtttctatttgactccaagctccatcaatgctcagctgatattttatagccccctgtgggtttagcat

SEQ ID NO: 299902 - DNA, 603 bp, Homo sapiens
ggagttttaagagcctcctgggttttaggagctaggaaatggtaagaaacacacagagacaagactcaggagtttatttcaccatttcggatttcctcagtcagattttttttgttccattttataattatcaatcacatgaacttgaaaatgtgaaaatagaagaaagaaaatcattggggagaggaggattttttaaaggaaatttttttttgaaacttgacttagaataatgggatttcttcaatttgctgtatgcaaagtaacagagagcttagtgtatcccagagatggattagacagatgtagcacttaactattaacatttgtgaggttcattcccaccagtgagatttgtgagcaacttccatgagattctaygcaaaatcagcttagtactttcctcatttgtcactgcgccgtgaaactggtaaaatatagaggaaacagaaaattgggcacatctgtgaatttggttgtgccctgattatagcaatgcagttccacagatgtgcatgttttcacaggagaacaggtttctatttgactccaagctccatcaatgctcagctgatattttatagccccctgtgggtttagcat

SEQ ID NO: 299903 - DNA, 603 bp, Homo sapiens
ggagttttaagagcctcctgggttttaggagctaggaaatggtaagaaacacacagagacaagactcaggagtttatttcaccatttcggatttcctcagtcagattttttttgttccattttataattatcaatcacatgaacttgaaaatgtgaaaatagaagaaagaaaatcattggggagaggaggattttttaaaggaaatttttttttgaaacttgacttagaataatgggatttcttcaatttgctgtatgcaaagtaacagagagcttagtgtatcccagagatggattagacagatgtagcacttaactattaacatttgtgaggttcattcccaccagtgagatttgtgagcaacttccatgagattctacgcaaaatcagcttagtactttcctcatttgtcactgcgccgtgaaactggtaaaatatagaggaaacagaaaattgggcacatctgtgaatttggttgtgccctgattatagcaatgcarttccacagatgtgcatgttttcacaggagaacaggtttctatttgactccaagctccatcaatgctcagctgatattttatagccccctgtgggtttagcat

SEQ ID NO: 299904 - DNA, 584 bp, Homo sapiens
tataagtatgatctgcaagagaggcaccattgtgacatgaaccatgacaaaggggtctatactacctacttgtgccccatcccagatgtgccacttccatttttacaatggattgctgcagggctcacttaattaatatgatttgatgattctgaaagaatccagctccttgataggtggttctggctgcatgctcacttatactgtgggcagactttttatgcctaatattacackggtagccgttttgtgaaaagtatatagttctccactacagacagtgtggctctggtcagctgccgatgttgcgattccccttttggagcctgtcacaacctctacacaatatctttttccaccacacttacctctaataccaatggtctagtagatcatatgtttcaagaagcagggctgcttgtactgtcatatgagccttctgcaaagccatttctttttcatcgctagaagacttccctatcactcagtaaatgagttagagcaatattctcaaatgcaaaagatgcttccttcaaaattcaaagaaccctaccaggcattatggtccttttttaataatcaga

SEQ ID NO: 299905 - DNA, 616 bp, Homo sapiens
cttccaaaaattagagacttcactaaggatacttgtaggaacaatatgtatgggggagggtgtataaggaacaagattaagcagtgggaaaggttgaactgcaacagagtcttcagtccatcctctggggaatctctggagctgggacagccctgcacaggtgttttgaattgaggtgagaggggcctcgtctttgtcgcctccttcttgacaaagacctcattggataygggctgcccttgtggcagggacatacactagtgtgaggcagcacctttcaggctcagggcaattcctggggaagaactcactgtcagccatcaacaggcaagaatcctggcagctgggagaacaggaacctcagtcctgaaggtgaaggtggagagagaaatctggggtgtacctcaccactgcatttaccaatgctgttctaaaaatttaatcagaacatgaatgtggaaggacttcagtttattttcaacactttataaatccaagggtttgttttgtttttttgagacagagtctccctctgttacccaggctggagtgcagtggcacactcacgactcagtgaagctcaactgcctgggcttatgtgatcctcccacctcag

SEQ ID NO: 299906 - DNA, 592 bp, Homo sapiens
ttctgtgtggggtcctaaagctccttgtcgatgtgggaggcgattttgaggcgatggaagcctccttggcccttgcactccccgctcccgggggcagtggagttcggcggagagcaagattttacacatattaagtgcctctragtcctgtagagaacctccagccccagacttccgcatgaaacaagggcgcacagactggagctgtgggggtttgaggagagccgtttatttggagagcctagcacaggaggcggccctgtctctatggctctgaagaaaccacctttagactgctaagtgctgccctggtctctttaggaacggttcaatgtcagcaagctcgaagccaagcagaagaaaaacagccagaaaggaagaaggctcagggggagtgactccaccaggccagccgagagggaacagggtctctccccttgactaacagccagtggggcatgcaggcaccccggcaagtgctactgagcaacagctcccaggagccaggccttactcaaagacaaaggatgagcacaggacacaacccattcaaaggcttcccagccttagccatggcctcctgcacctctca

SEQ ID NO: 299907 - DNA, 578 bp, Homo sapiens
tgggagctttttcctctttggcttcgtgaaagagatgttgataccaaatgtatagaaaggggacaggagaaagagacattaaacattcgcctgtcgggagaaggagcagaaacagtagcagctggctgtgcctgagaacagagaaaggaaatggagtaagaggggaaagtgaaactcaccatttgagctcccttttcctaagctgacawacaccaaaaaggggcaaagtggcggggggtggggaacaatggatggaattaaatgtgaatgcgtgaattctaggggatttagtgatctgagaggtgtcattcgtttggtaccgtgatcattctttttaaaaatatacttctttggctaatgtgtgctttttaagacaccgatcttagcttcttttccgttatgcaaagctaccaaaccatctcatttgtcaaataattcccattgaaacagatgaaagaataatggaggaggaaaacaaaacatctttgatgtgctgctttatcagaaatgtgtgtcaaaggtcaaaaaagcagtgctccagagtctcttaaacatgtcattgtcataatataaaaact

SEQ ID NO: 299908 - DNA, 611 bp, Homo sapiens
tctgtacattgcaagtccatgtcaaaattttcactgatccacagcaaaatgagaatagtaaggacatgaaatgggtttttattcactttaaatgtctatcttcataagaccttctatattttatatgttataaagttatttattttatgaaataatgtcataataaatagttatcaagttttatttttgaagccattatttggtaaaataaaagtttggcaaaatctttgttgagcctccaacttttacatgtccatgaaatgtaaaggtttggtaactcggagaagccagaagttataaagatgtcagaatagaatgacaatggaaaaaaagactttttgtccactggctgctttttattataatagtttttttctatctattgttcattgtaagacgttattttaaggtatattaaaataagcattaataaatgtacattttcaacatgatttgtttttwaaaacaattatttaatacttgcacctcaaaaaaggtttttaacttggaaatagtaactctttcctagaaatgatttttaagaagattgaaaatgaacccaaaggtagtaagctaaagtgccataaggaaagattttacttttcattaaa

SEQ ID NO: 299909 - DNA, 600 bp, Homo sapiens
ttgctcacaatttgcccagaatttatgtatgtatgcagttagccataatgtataatactaaatctatgttctcctagaaacaaagtattatggaaagaaacgaggtgtggggatgggtaattctactgggtcagggaagcttttgaaaacttctaagagatagctgcttttaaactggactttgaagkatcgatggtgaaaaaagacattctttactgtgatagcaattattacaaagttgaaatgatctattaaggagtttttttccccattaaagtgtgagccttaaaaataaggcctctgccttactcagttttgtgtcttactagcccttaacaccacggctgttacataacaagggctcagtacatgaatgaaggaattggctaggcaacacaatacattttaaaaggcatatttgtaaaacatgagattacagtccctcaacctttaacatacaagatgaagaaggacaactgaagaaactctagtatgtaacacatacgcatgattcctcaactacctgcaaaagcactggataaacagttttgaaacatgctttctactctgagtttagcattgaaatttatttatcatctt

SEQ ID NO: 299910 - DNA, 562 bp, Homo sapiens
cttacttatgttgtaatttcttgtatctgtctcccccattagactgtaagattcataagggaaaggaataaatctatttcatttgttggtgtatagccaataatagttgttgaattataagtttcttcctttttttttagagacagaatcttgctctgtcatccaggctggaatgcattggtgcactaatggcacactgcagctttgacctcccaggccaagtgatcctcctacctcagccttctcagtaactgtgaccacaggcgtatgccaccatggccagctaatttttaaatgtttttgtagagatggggtctcactatgttgccaggcttgtcttcaactcctgggctcaagtgattcttccctctcagcctcccgaagtgttaggattattgcatgagccaccgtgctcagccaaataatgtttctattttaaaatttgtctcaaaatttgtcctcctatgtctaggacacaaatctgagttgcaaagcagtagctttcatctataaaatgtccatcwcagactgaagacaagctatgataaggctgcagtcaggc

SEQ ID NO: 299911 - DNA, 519 bp, Homo sapiens
aatgattttctgaaatttatttttaggtattgcatgagtaagggccaaaattttttttcacagttttctaccatttgtctccaaacaatttatgatctgaaataccacttttttcataaattcccacatattctgtagtatgtttctaractgctctgtgtcgttgagctatctgcctatttctatattggtgccttaccatattaattatcacagctttagagaaaattttattatgtggaagggaagttttatctcattaatttttttcaaaaatttccttgactatttccatgtatttgtcctctatataaattttataatgaatttattaagtaaccccccctccaaaattactttagcattgttgactatttaatcttgagaagcaaaaggatttgtaagtccaggcattattcttatgggtcaaaactcacatgaaatctggatactgtgtttcaataaaagctcatgaattctatacaactgttatggtaaaacatattcaacaaatattta

SEQ ID NO: 299912 - DNA, 476 bp, Homo sapiens
tcttacatgaatgtttcctatattcagaacatatgttgttgattttcatttagactccagatccttaaagtacttcagagaggaaagtttgcctcctccccctccccctatttgttcttttccagggtaaaggtggagatgactgtagttttttagttgtaaattggattcattccataaaaagatgatgatttaatctccgattactcattgagctttcaattcacttagaggtcttcatgatgaataattttctttaaagaacatcataaatttatatcctaatggacttgccatgtgaagtctatgattacaatatagataagagatattcatctcttctgtttaagggctggaccctagtgatatgagctyttaaagcttatcctttttcctttttcttttgtgttccatttaaagttatctttaatgtcacagacagtacaagaaagaaacaaaatttgtctcttttctcc

SEQ ID NO: 299913 - DNA, 455 bp, Homo sapiens
cttgataaatatttgttgaatggaagaaggaactgtatttttagattaggattgtattgacctgctaatattcatttaccaaaaactgagatgcacatttgggagactatttattgagtatgctgagggtctgccactctggtattttttattcttaggcgctggtttggaataaagttgaattattcctacaaaggtcgcaagagttgcatmgggaggcgagggtcttctggggtttcttttttcccacctttgttaccatgtgatgactcgaattctggtttaagactttggtggaaatattattattgttttctttccaacttttattttaggttcaagggtacatgtgcaggtttgttacatgggtaaattgaatgtcacgggggtttgatgtacagattatttcatctccaaggtaataaacatagtactcagtagtgttcaatcctcac

SEQ ID NO: 299914 - DNA, 608 bp, Homo sapiens
ttgacttgctttggccaatggaatatgggtggaaacgttagtgtgtgcattctgggccagtgctgtaagcctctgccattttatatgaaaagggcatttcctgggtagtcactaatccaagcaagatagaagatatgtgaaacagatctataccaaacctgcagctagatcccagagactggagttcagcctcgtctggccaagttgcagctggctgtagaccttactgagaaataaatgcttgctgttttaagtcaatgaatattttttaattaattaattttttttgagacagggtcttactctgtcacccaggctggagtgtagtggtgcaatcacagctcactgcagcctcaacctcctgggttcaagcaatcctcctgcctcaacctcctgagtaactgggactacaagcacatgccacaatgcccagctagttttttaattttttatttttttgcagagatgggttctcactatgttgcccaggctgatctcagactcctggactcatgcartcctcttgcctcagccttccaaagtgcttggattacaggtgtgagtctctgtgcatggctagtcaatgaattttgggacaggtttattat

SEQ ID NO: 299915 - DNA, 604 bp, Homo sapiens
ggctcagcaattgcaaagtgacagccggtgagagaggaagcaggtctgagagtacaatagaggggagtgaatggaacgggcctaggccttgaggatgcaggggctaggcagaagctaagctctactctcaggtgtcatgttcaggacttcgattttaatgtagtggggatctcctgaggaacttacaaaatcagatttgtgtggatgtattttaataatacactttcctttrtaagataaaatacactggatgcatacagtggaaaccccaatgtacttacgctccaacaactcagagaaaactactgttaacattttgatgtggatccttctgatcacttttctatttatgtgtctgatatatgtaaatatctatatgcacatatatgtatttagaaatagttacatgtcatacttgctactcaataacctgctgttttacttagcagtaggtgtgttttgaacattgtcatatcaattcttttctgcaagatgatttttaataactatgcagtatttcatcatgtggaaatataccaattgagaaacaattgttggacatttatattatttccatatgttttggtattataaataatgctcc

SEQ ID NO: 299916 - DNA, 604 bp, Homo sapiens
ggctcagcaattgcaaagtgacagccggtgagagaggaagcaggtctgagagtacaatagaggggagtgaatggaacgggcctaggccttgaggatgcaggggctaggcagaagctaagctctactctcaggtgtcatgttcaggacttcgattttaatgtagtggggatctcctgaggaacttacaaaatcagatttgtgtggatgtattttaataatacactttcctttataagataaaatacactggatgcatacagtggaaaccccaatgtacttacgctccaacaactcagagaaaactactgttaacattttgatgtggatccttctgatcacttttctatttatgtgtctgatatatgtaaatatctatawgcacatatatgtatttagaaatagttacatgtcatacttgctactcaataacctgctgttttacttagcagtaggtgtgttttgaacattgtcatatcaattcttttctgcaagatgatttttaataactatgcagtatttcatcatgtggaaatataccaattgagaaacaattgttggacatttatattatttccatatgttttggtattataaataatgctcc

SEQ ID NO: 299917 - DNA, 514 bp, Homo sapiens
ggagtcagtctttcctttagcaaagctcaagcgctttgctgggatatctcttcagagcaggcaggcaggaacatttaagtctgctcaaacttcacccacagcctacccttcccccaggtgttctgtcccagggagatgggagttttatctataagcccctgactggggctgctgcctttctctcagagatgccctgcccaagaggaggaatctcgagaattagtctggctacagcagctttgctgagctgtggtttgctgcccagtttgaacttctatgtgkctttgtttacactgtgaggggaaaaccgcctactcaagcctcagtaatggcagatgcccctccccccaccaaggttgagcatcccagggtgacttcagattgctgagctggcagcgagaatttcaagcccgtagatgttagcttgttgagctctgtgggggtgggatccactgagctagaccacttggctccctggcttcagcccccttcataggaaagtgaacggttctgt

SEQ ID NO: 299918 - DNA, 514 bp, Homo sapiens
ggagtcagtctttcctttagcaaagctcaagcgctttgctgggatatctcttcagagcaggcaggcaggaacatttaagtctgctcaaacttcacccacagcctacccttcccccaggtgttctgtcccagggagatgggagttttatctataagcccctgactggggctgctgcctttctctcagagatgccctgcccaagaggaggaatctcgagaattagtctggctacagcagctttgctgagctgtggtttgctgcccagtttgaacttctatgtggctttgtttacactgtgaggggaaaaccgcctactcaagcctcagtaatggcagatgcccctccccccaccaaggttgagcatcccaggktgacttcagattgctgagctggcagcgagaatttcaagcccgtagatgttagcttgttgagctctgtgggggtgggatccactgagctagaccacttggctccctggcttcagcccccttcataggaaagtgaacggttctgt

SEQ ID NO: 299919 - DNA, 561 bp, Homo sapiens
cccagggtgacttcagattgctgagctggcagcgagaatttcaagcccgtagatgttagcttgttgagctctgtgggggtgggatccactgagctagaccacttggctccctggcttcagcccccttcataggaaagtgaacggttctgtctcactggcactccaagtgccactggggtatgaaaataaaaactgcagctagctcggtatctgctcagttggttgaccagttttgtgcttgaaacccagtgccctggtggcataggcatctgagggaatctcctggtctgcgggttgcgaagaccatgaggaaagcatagtatcttggccggaatgcactgttcctcatggcacagtccctcagggattcccttggccaggggagggattttcctgacgccttgcgcttcccaggtcaggtgatgccttagtctgctttggcttgccctctgtgggctgcacccactgtstaaccagtcccaatgagatgagccgggtacctcagttggaaatgcagaaatcacccaccttcttcgttgatcttgctgggggttacagact

SEQ ID NO: 299920 - DNA, 555 bp, Homo sapiens
tatatataacatctatatgtatatatagatatatatataacatctatatgtatatatagatatacataacatatctacatatagatatacataatatatataactgtatagatatataacagctataatatatagttgtatataacacataaatgcacacatatagacatatatatatatatatatatatgatttgcaaatgtcttctcccattctatggcttttttttttactttcttgatcacattctttgtagtataaaaaattttaatattgatggagtccacttacctatttttattaggttgtttgttcttttggtgtcatatcaaatacactattgcctaagccaagatcacaaagatttactcctgtgctttcttctaagagttttatagctttatttcctatatttataagaaatataaagttctatgatgtatactgagttaatwtttatatctggtgtgaagtaggaacaatttttatcatactttaactctttagataaattttaaaaaattattttaacataatagctgatttaaaatctgt

SEQ ID NO: 299921 - DNA, 360 bp, Homo sapiens
ttagctatttttgaaatcctttctgtgtacttgagcaaatatttatgataaaatcacaatctttgctactmatctttaaattgccacgtgcaaaatttgggtggagtaggatacacagagaatatctatttttaaagaaagtaagaaagtgtgtggattttgttagtctaaatgttatttttcttcccaatgatgagggcatctccttagtctagccctgtgggttctggtgatgatcattcatgttatatatatatgtgtgatttgattccttggtccagtggccatttttagaagttatcaatttccctgtgttcttactttactccccatctccatttagttagtgatttaaagaaa

SEQ ID NO: 299922 - DNA, 360 bp, Homo sapiens
ttagctatttttgaaatcctttctgtgtacttgagcaaatatttatgataaaatcacaatctttgctactcatctttaaattgccacgtgcaaaatttgggtggagtaggatacayagagaatatctatttttaaagaaagtaagaaagtgtgtggattttgttagtctaaatgttatttttcttcccaatgatgagggcatctccttagtctagccctgtgggttctggtgatgatcattcatgttatatatatatgtgtgatttgattccttggtccagtggccatttttagaagttatcaatttccctgtgttcttactttactccccatctccatttagttagtgatttaaagaaa

SEQ ID NO: 299923 - DNA, 610 bp, Homo sapiens
ttatcgtcttccaggctgtttgttttgcggctagcgagttatacatttgtttcaaatgcataatgagtattttggtgtctgatctcatttcttagaaatattaaattatcttatttttgtactccatatactctatctgtgggttctctctgtggtggcattaaaacaaatgttcttaaattttgtgtgaactctgtgcgctccaaaaaggggtagtgtctccctgggcattcaaggagtttttaaggagccagttttctcagtcaagagtagttggttgtgatctaaaacatatccccacagtcaaatgtgatagtactcttgcttttcaaatgctagcattattttagaagttctaagcattagtgtttcayatgcaaatgaagattacattttatgaacgagaactcctgtgttttgaatgcctactgttgctcacatattggcacttcccctgtgtttcttgatcttcctcaaaattatatgagataggtagagaaatctaaggttgacatgtaaagtgactagcccaaatttacataacttaggaacagaggtaacgttgaacccacccctatcagactttaaacacaaggcattttcaactata

SEQ ID NO: 299924 - DNA, 475 bp, Homo sapiens
gtacaattatactttccattttaaaagaaaatagattttattaatactctgaatacaaatatcttgaaaattaaaatattattttgaaagggttaaagattgacatatgctaccatattaaaaagattttaatcagattgccaataaaaatttaaaagtttagtttgtaaatacaaacataaacgcattttcaccaattcttttttctagtagatctttgatttctgtccttcctgatgtcagtttctttttcagaaaaaytctcttcaattttcttaatattcaaatagtattttaaaatgtttacgacagatggaactgcccctcgactttaattttagttatgaccatttactgcagttgttcccaaacttgtatttaaattgtgataagttttaatataaaactttaattattaacatggaagtgtaatcaaaacataatgtggcacaggaaagcagtttgtaggtattat

SEQ ID NO: 299925 - DNA, 608 bp, Homo sapiens
tccccttctaaacagtaacttaaacacagtaatttaaattattgcttcccagtagaaagtcatttcttgattttttttcttcttttttcctcaatgcctgaccagatcttctaagttcatagcttataatggaaagaagatagaagcaaagactaaaatatattaacattctcagaataagtacgtgtccaattattagtgttcttgagcaggaaagccaaacactggcttacaacaagattaacccaatcctaggaaacatggtgagaccttgttgctacaaaaaaaaaatttttttcttttaattagccaggcacagtggtgctcgcctgwagtcccagctacttaagaggctgaggtaagaggattgcttgagccatgatagtgccactgcactgcactccaacctgagcaatggaatgagacttaacccaagtctgtcaattatgcagtataatacacaattgttcaattgaaataaaaattaatgtgataaaacattgggcttctaactttatgcaatcctgggaaagccgttcaatcattctctttccaaatatctcttggagctcactgcagaggcacacacctgtaatcctcagctgtgg

SEQ ID NO: 299926 - DNA, 610 bp, Homo sapiens
tcctccttcttttttctttttagtctcttttgctcacaatccttctatggatgaagcttacggtaaatgttgacatatttgagaggttcattatataacattctgcccaccaaaagatcagaagcatttccttttttttatgttcttccatcataaatatctatggcatcacctgaagtgaattcattagtatgcaaatctccacactttactattctctcagctcatcttccaaagttaatgaagcataagtaaatgtgtttgattaaatcatccagacttcttcccaaggctgctaagattgggcattcaccccaaggttgggaaagtggggaagggggacattcaagtatccctcaagcaaaggcagacaagttaaaaaatattgtactgacatgtaaagtagtcatggtcccsttttgggcccagacacactataatttgtaccttctccctatcctttttctcatccttattccttcctgaaataattttgccttcctaataagattgtttattcaagagaaccttactagtatgttttcagattgtgcacaggatatatatctaagagaatatagcattaagaaatttcctttcaattagtata

SEQ ID NO: 299927 - DNA, 610 bp, Homo sapiens
tcctccttcttttttctttttagtctcttttgctcacaatccttctatggatgaagcttacggtaaatgttgacatatttgagaggttcattatataacattctgcccaccaaaagatcagaagcatttccttttttttatgttcttccatcataaatatctatggcatcacctgaagtgaattcattagtatgcaaatctccacactttactattctctcagctcatcttccaaagttaatgaagcataagtaaatgtgtttgattaaatcatccagacttcttcccaaggctgctaagattgggcattcaccccaaggttgggaaagtggggaagggggacattcaagtatccctcaagcaaaggcagacaagttaaaaaatattgtactgacatgtaaagtagtcatggtccccttttgggcccagacacactataatttgtaccttctccctatcctttttctcatccttattccttcctraaataattttgccttcctaataagattgtttattcaagagaaccttactagtatgttttcagattgtgcacaggatatatatctaagagaatatagcattaagaaatttcctttcaattagtata

SEQ ID NO: 299928 - DNA, 536 bp, Homo sapiens
gtaattggatagtatcaccttaaatatttgtctttatgctagaaacatttcaattactctcttctagctgttttgaaatatacaatagattactgtaaactatgcttatcctactgatctatcaaatactgtcttatttcttctatcaaactatatgtttgtacctattaatcaacctctcctcacccctcctctcctctaccctttctaacctctgataaccaccaatttactcctatcttcatgagatttgatattttagctttcctgtatcattgggaatgtgcaatatttgtctttctgtgyctggcttatttcgctttacaaccaccatttccttccatgttactgtcagtgacagaattccatactttttatggctaaataatattccgttgtgtacatataccacatattctttatccattagtccatcaatggacacttaggttgattctatattttgactgttgtgaataattctgcattaactgtgggagtgcagatatctcttagatacactgatttcctttctt

SEQ ID NO: 299929 - DNA, 580 bp, Homo sapiens
tccgcggcttcattcttgaagtcagcaagaccaagaacccaccggaaggaaccaattccagacacatttcggtgccccagatgggatacttgattatcaccaagtgttgagtaccattggacccctttcgcttgctattctgtcctatttttccttagaattcaggggccaaataccgggcacctgttggccagttaaaagcaactagcacagccactggactaaagactcgggtgtcaggctttctgggaaagggctaacaacccccaactctttggasttgggagcgttggtttgcctggaaccagcttctgcttttcctgtaaatccaggccgagcttaggatcgacagagaggaaagccattcagatacggggtcccgacaacaagttggttgaccctgtggccatgagcagaactctcaacgtcatgttacccaagcaagactcgcccatctatcctatccatcctgacctttgcctcctgggttcgaatgcctgtcatacaaacttcctctcacctctcttctccaaggctagtcccgcttctaaaaaccactccttgtctctggtgcttttct

SEQ ID NO: 299930 - DNA, 573 bp, Homo sapiens
aaatcaaatgaaaatagtttaaagacttaaatctaagatctctaactatgaaactactacatgaaaacataagggaaaatctcaaggacattggtctgggcaaatatttctcaaggaataccccacaagcacatgcaaccaaagcaaaaatggaaaataggatcacatcaaattgaaaagcttctgcacagcaaaggaaacaatcaacaatttgaagagacaacccacagaatgggagacaatatttgcaaactatccwtctgacaagggcttaatagcccatatataaggagcttaaacaactttataggaaaaaatctaataatccagtcaaaaatgggaaaaagatttgaatggatatttctcaaaagaagacatacaaatggcaaacaggcatgttaaaggtgctcaatatcattgatcatcagagaaatgcagatcaaaattacagtgagatatcatctcaccccagttaaaatggcttatatccaaaacacaggcactaatgaatgctggtgaggatgtggagaaaagggaaccctttttccacaactcattgttggtgaaaatgta

SEQ ID NO: 299931 - DNA, 573 bp, Homo sapiens
aaatcaaatgaaaatagtttaaagacttaaatctaagatctctaactatgaaactactacatgaaaacataagggaaaatctcaaggacattggtctgggcaaatatttctcaaggaataccccacaagcacatgcaaccaaagcaaaaatggaaaataggatcacatcaaattgaaaagcttctgcacagcaaaggaaacaatcaacaatttgaagagacaacccacagaatgggagacaatatttgcaaactatccatctgacaagggcttaatagcccatatataaggagcttaaacaactttataggaaaaaatctaataatccagtcaaaaatgggaaaaagatttgaatggatatttctcaaaagaagacatacaaatggcaaacaggcatgttaaaggtgctcaatatcattgatcatcagagaaatgcagatcaaaattacagtgagatatcatctcaccccagttaaaatggcttatatccaaaacacaggcamtaatgaatgctggtgaggatgtggagaaaagggaaccctttttccacaactcattgttggtgaaaatgta

SEQ ID NO: 299932 - DNA, 584 bp, Homo sapiens
cctctgaagagggcccagcttttatattaaaaaatagattggttattttaaatacagaatattataaaaaatattcagcaatcatcaggtggatattcagcaaattattaacttccaagtatagcatttcaaatgttttattggttaaatgattataataatatcatctttttaatttaacttcaagtttattatgagggtaaacatatctgtaaatatttctgatgttaaatgtgtaatgtaagcacagtatactgttttagggattacaacctaggaagaaaataatacaacaaactacaaagcaaaaatgtttggctaccrgctaaattttcagaattctagaggaaaagaaatggaactcaaaataaaaaagttaccctgcacaagaaagtatacaacagtttgaatgatctaacagacaaacgccgcttcccctaaacaataaaaaagcaacctaggtgttaacgaagttctggcagcttgtctgtgcaggctactcaacaaggcagacaaccttcagaaggaagatactcgctgtcaggttcatccagctataattggagtatatattgactttggtc

SEQ ID NO: 299933 - DNA, 594 bp, Homo sapiens
aaaataaaaaagttaccctgcacaagaaagtatacaacagtttgaatgatctaacagacaaacgccgcttcccctaaacaataaaaaagcaacctaggtgttaacgaagttctggcagcttgtctgtgcaggctactcaacaaggcagacaaccttcagaaggaagatactcgctgtcaggttcatccagctataattggagtatatattgactttggtcagtttrgcaaagagaatatcaacttacaaagtgctagctacgatggagatgcgataactggagatcattgttaagatgtctgccactttcaaaaagatttgtctttagaagctaataggaattttaaattgctacagcaattgcatgtcaacatgagctatttattggctgttaaccataaatgtataatatattaatgtgtttgaatatactctttctgtcattaaattcaattaaaattgaataattataaacatataagtccctagagcctaaaatcaccaattttcaaggaaaaaaaagaagataagaaattattcatattcaatcacattttgccatcaaatttatttttcagatgaaatatttgcaac

SEQ ID NO: 299934 - DNA, 594 bp, Homo sapiens
aaaataaaaaagttaccctgcacaagaaagtatacaacagtttgaatgatctaacagacaaacgccgcttcccctaaacaataaaaaagcaacctaggtgttaacgaagttctggcagcttgtctgtgcaggctactcaacaaggcagacaaccttcagaaggaagatactcgctgtcaggttcatccagctataattggagtatatattgactttggtcagtttggcaaagagaatatcaacttacaaagtgctagctacgatggagatgcgataactggagatcattgttaagatgtctgccactttcaaaaagatttgtctttagaagctaataggaattttaaattgctacagcaattgcatgtcaacatgagctatttattggctgttaaccataaatgtataatatattaatgtgtttgaatatrctctttctgtcattaaattcaattaaaattgaataattataaacatataagtccctagagcctaaaatcaccaattttcaaggaaaaaaaagaagataagaaattattcatattcaatcacattttgccatcaaatttatttttcagatgaaatatttgcaac

SEQ ID NO: 299935 - DNA, 601 bp, Homo sapiens
ctaataatggcttaaaaaagtgattgaaatgcagcagctttggtgtcctgttktaactttagtgaaaatactaattctggatgtttataaacaatttctacttctactttctctagagaatttcaccccctgacacccacatcacaggagataacacaagaatttatttacaataaattcaagtttccctgaaaaatatggtacggtaacctgagagaagattaacagattattttctcatcctaagtgtctgctattttagatattgaccatatgagagaatgagttttaaaaaaacttttaatttttaatttttgtaggtacatagtaggtgtatatatttatgggatacatgaaatgttgtgatacaggcatgcaatgtgaaataaacacatcatggagaatgggatattaattccctcaagcgtttatcctttgtgttacaaacaatccaataacagtcctgtagttatttttaaatgtacaattattattaactatagtcaccgtgttgtgctatcaaataataggtgttatttattatattttattttcgtacctagagtattttcttacatgaataaaagataatgatattcca

SEQ ID NO: 299936 - DNA, 601 bp, Homo sapiens
ctaataatggcttaaaaaagtgattgaaatgcagcagctttggtgtcctgttgtaactttagtgaaaatactaattctggatgtttataaacaatttctacttctactttctctagagaatttcaccccctgacacccacatcacaggagataacacaagaatttatttacaataaattcaagtttccctgaaaaatatggtacggtaacctgagagaagattaacagattattttctcatcctaagtgtctgctattttagatattgaccatatgagagaatgagttttaaaaaaacttttaatttttaatttttgtaggtacatagtaggtgtatatatttatgggatacatgaaatgttgtgatacaggcatgcaatgtgaaataaacacatcatggagaatgggatattaatyccctcaagcgtttatcctttgtgttacaaacaatccaataacagtcctgtagttatttttaaatgtacaattattattaactatagtcaccgtgttgtgctatcaaataataggtgttatttattatattttattttcgtacctagagtattttcttacatgaataaaagataatgatattcca

SEQ ID NO: 299937 - DNA, 601 bp, Homo sapiens
ctaataatggcttaaaaaagtgattgaaatgcagcagctttggtgtcctgttgtaactttagtgaaaatactaattctggatgtttataaacaatttctacttctactttctctagagaatttcaccccctgacacccacatcacaggagataacacaagaatttatttacaataaattcaagtttccctgaaaaatatggtacggtaacctgagagaagattaacagattattttctcatcctaagtgtctgctattttagatattgaccatatgagagaatgagttttaaaaaaacttttaatttttaatttttgtaggtacatagtaggtgtatatatttatgggatacatgaaatgttgtgatacaggcatgcaatgtgaaataaacacatcatggagaatgggatattaattccctcaagcgtttatcctttgtgttacaaacaatccaataacagtcctktagttatttttaaatgtacaattattattaactatagtcaccgtgttgtgctatcaaataataggtgttatttattatattttattttcgtacctagagtattttcttacatgaataaaagataatgatattcca

SEQ ID NO: 299938 - DNA, 496 bp, Homo sapiens
gtcttgaactattttaactcagatgaactttagtccatgttaaaatctggaaagagtatctgcaaagatataataaatataaataaattacattaaggatatacgagtggaaaagrgagaaagaaaaaatttgcaaacacttaaaaaaaaactgcttgatttaatgtctgtagatggaagctgtggatcagtacttcccatgagactccatagtggattgtcgctgatggcaactaacagaaaactaacgaaaaacttgcacctggggcccttgctggattcgcctctaacagcccttctcagtgggatggcaggatcagggttaaggctgataagataatggaatctgtgcgtgcccggcctgattgctcccctgatctgatcactagtatcggggtgacagctgcttttccaaccctctgggcagcaagtggcagagcagcatgtcaattgcatgtgcatatttagcagtcatatattgacaattaaagagaaa

SEQ ID NO: 299939 - DNA, 551 bp, Homo sapiens
ggattgatttcttgatttatttttccaattttttactrttagcatatagaaatgctactgattttttgttgattttgtatcctgtaaatttaccaaattcactgatcaattctaagagttttttggtagagtcttcaagtttttctaaatataagatcatatcatctgtgagcaaggctaatttgactcatacctttccaatttgcatgccctttatttccttctcttgtctgactgctctggctgggacttccaggattttgttgaataaaagtggtgaacgtgggcatccttgtcttgttccagatcttagacaaaagactttcaattatttttccatttagtattctgttagttgtggttttgttgtatatggcctttattgttttgaggtctgtttcttgtttgctttgtttgtttgtttttgtgtatgcatgtgtattagtccattctcacacttctaataaagacataccacagatggggtaatttacaaagaaaaagaggtttaatgaactcacatttccatatggctggggaggcctcacaat

SEQ ID NO: 299940 - DNA, 551 bp, Homo sapiens
ggattgatttcttgatttatttttccaattttttactattagcatatagaaatgctactgattttttgttgattttgtatcctgtaaatttaccaaattcactgatcaattctaagagttttttggtagagtcttcaagtttttctaaatataagatcatatcatctgtgagcaaggctaatttgactcatacctttccaatttgcatgccctttatttccttctcttgtctgactgctctggctgggacttccaggattttgttgaataaaagtggtgaacgtgggcatccttgtcttgttccagatcttagacaaaagactttcaattatttttccatttagtattctgttagttgtggttttgttgtatatggcctttattgttttgaggtctgtttcttgtttgctttgtttgtttgtttttgtgtatgcrtgtgtattagtccattctcacacttctaataaagacataccacagatggggtaatttacaaagaaaaagaggtttaatgaactcacatttccatatggctggggaggcctcacaat

SEQ ID NO: 299941 - DNA, 568 bp, Homo sapiens
gctgcagtgacctatgatgatgccattgatgctaccatattacagcctgggtgacagagcaagaacccatctctattaaaatatttacataggccgggtgctgtggctcatgcctataatcccakcgctttgggaggccaaggtgggtggatcacttgtggtcaggagtttgagtacagcctggccaacatggtaaaacccgatctctactaataatacaaaaattagccaggcatggtggtactcgcctgtgatcccagctactcaggaggctaaagttggagaattgcttgaacctgggaggcagaggtcgcagtgagccaagatcatgccactgcactctagactaggcaacacagcaaagctccatctcccccacccccgcaaaaatatatatacatatatatatttgtatatataatggttttactgtgtattttaagacattaacaactcagcatcatttgcatataaaaactgtacatttttgcctcttcaccttgatggctcattgtgtactattaatgtcacaatttacgtctatttatattgtgtatccattcatata

SEQ ID NO: 299942 - DNA, 551 bp, Homo sapiens
actattcccaacttcaggagtaaccagtattatgacctctatcaaagcagattagttttacctgttttggaaattgtatataaattaaattatatagtatataattttgcatctgtcttgattcgctcaacattatgtttatgagactcactcagctgtagtttgttcattctgttgtagtatagtattcaattgaatatatagaccaccgttkatccattttaaatctgttgaacatttggattatttcctgtctttggtattagaaattgtgctgccgttaacattcttgtgtgtgtctttggtgaaaatatgtatgcatttctggtctgtattcatttgctaaagtagcttacagcaagttccagacattgttattttattcttacacatgagcatattttagtatgcatccaagaagtatgacatcttctcacataaccataattgcttgttaccatctgatgccttgtcctttattatttaaaatgcactattaaatggggaaatctcttttcttcagcatagcttttgaatatagcaagctgaaa

SEQ ID NO: 299943 - DNA, 661 bp, Homo sapiens
tttttacaaggtaatagctttaaaatatagctacaaaataattggtttaatattaactaacttgattcatcttttgtgatacattggggcattaattagatgcacagaaggcgtcaagaaccttgactaactgctatgccacattttatatggagttatcaatgtacaggatcttagcattcattttaaagaaaagtatcattaaaggctctgttgcaaaatgtctgcttacgtaatgaggagtcatgtgatctgcctattcagaaatcacattgttatttatctatattctcatcagtctaatatcaaattatatttcatccttcccactttcttagatgcattcaatataaagaatgatggaacaactcawaatgcttgaaaacagttgccactttgccttatacattataattatagctctagtctcttttctgattaaatattgagtttatagctaaacacagtggcaccagtatctaatcccagctactcaggaggctgagatgggaagttcaagaccagcctgggcaacatagcaaaagtccctcaacaaagaaaaaaacaataaactgaaaattacttacttctcatgtgttcaataaaatattagtattctaaacttaataaagattaccatgtggaaaccatattatttctt

SEQ ID NO: 299944 - DNA, 495 bp, Homo sapiens
gaaatttgtaataatttattattacaaacagtgatacaatgagtattttgttattttgttcatttgtgcaagtatttctgcagaatagtattatatgtaaatattatctcaagaaatatgcctattttaaagtttatagatrttgaaaaattgctttctaaagagctgtgtgaatttttatgctccttaacagcacctcttccccatatcttaactaacactggatattgtaaagatttttcatttcaggccaatctggtatgtaaaatgtgatactgcattactattttaattttttcattgaatatatatgactggacatatttgcttaggtgtggtggtcatttgtattcctttttctgtaaattaccattcatatcattactcctcaaaaatgttgaattgtcctttgttaaaattgatttttatgagttctttaaaaaattttgacattatttctttttaatctcatgtatgttttaaatatttcccatt

SEQ ID NO: 299945 - DNA, 495 bp, Homo sapiens
gaaatttgtaataatttattattacaaacagtgatacaatgagtattttgttattttgttcatttgtgcaagtatttctgcagaatagtattatatgtaaatattatctcaagaaatatgcctattttaaagtttatagatgttgaaaaattgctttctaaagagctgtrtgaatttttatgctccttaacagcacctcttccccatatcttaactaacactggatattgtaaagatttttcatttcaggccaatctggtatgtaaaatgtgatactgcattactattttaattttttcattgaatatatatgactggacatatttgcttaggtgtggtggtcatttgtattcctttttctgtaaattaccattcatatcattactcctcaaaaatgttgaattgtcctttgttaaaattgatttttatgagttctttaaaaaattttgacattatttctttttaatctcatgtatgttttaaatatttcccatt

SEQ ID NO: 299946 - DNA, 525 bp, Homo sapiens
agagaattgactacaaatttgaaaaaagttatatgagtgaaatgctatcaaacagcatcgcaggcttcttgtattaaatgcttggtttatttattttcaactctttcttttcagttaatacctgtatttaagttgatttttttgctaagtgcttstttgctcatcacatagactttgtcagtaattccttaataattctaatttcctttttgatttcctctttaatgtaagtaatttaggagggtatttttaatctttaaagagacagattttcatttgatgtattgagtaacttgttatttgatttataatatgattctatttttctcccaagtcagtacattaagttctgcctcgttttcttaaaagttgcattgcattaagttttatagatgtatcgtaatttattaaaccagtatcatataggtagagatttagagcctttagaattttagcttgtacaaagagtgctacaaaatatttttatcaacgcttatgtgcaggtatttcttcaggaaagcaccc

SEQ ID NO: 299947 - DNA, 247 bp, Homo sapiens
cagcctccactggtgatgcccatgtaaacagggtctggaatcaacctccagcaaactccaccagacctgcaacagaggggcctgactgttagaaggaaaactaacaaacagaaaggaatagcatcaacatcaacaaaaaggatgyccacacagaaaccgcattcgaaggtcaccaacatcaaagaccaaaggtagataaatccatgaagatgaggaaaaccagcataaaaagattgaaaattccaaa

SEQ ID NO: 299948 - DNA, 515 bp, Homo sapiens
gtgatgtggcctgtgggcccagttacttgggaggtgggaggattgcttaagtcggggagatagaggttgcagtgagccaagactgtgccactgcactctagcctgggcaacagagtgagactctgtctcaaaaaaaaaaaactaaactaaattaaattaatatgtgcattaacagcttattacaggaatttatttagtgcaaagaaacaaacttgggtsatttaaaaatcagttgtcaaaaccacagttctgcttacccttcccccaatctcccatgcacaattctccccacctaatctgcatgtcacatatgctaattattgtatagactgaaggagttgggaatatttgctggctgtttcacacttataactcactaaacttcattactctaccaaactgtgcatgccaagaagccagttacacagcccaccttctcagacactctgtatatgggactggacatatataacttaagatggaatagaaataaagactgttccttgttgttttaa

SEQ ID NO: 299949 - DNA, 632 bp, Homo sapiens
tgatttctagtgtcacaatgaaactattccaaaactcaaactccctcaaactggtatgatgcctactatgctggacacatagttcatattattatagagttactggatgattgatgtaatttatttcaatagcatttgcacgatatttatttattagactcctcaaataatgtctaagaagaatagtgatgaaatataaataaagacatttaaaatcacatccatctacaaagcaataatatctagttggagagagaaaattaacaaagatgaaagaaaaagagaataattgatttatggtatgatcttggctctgaatatatgtcagtattagataaaaattgtattaaactgtatagattatccactgacctatygtgaattacccaacaggggtttatattccttatataaaaaggaacgtatggctatacataagcagaacagggctgggacagtagctccatgatgttatcaacatctccgattccttccctctttccattttgtcatggttagcacttagctttcattcctttgtttattttgcaaacataaaatgacagctccatctgcaacttcaggtttagatgctagaaagaatataaaggaagtaccaaggaggaaaagtg

SEQ ID NO: 299950 - DNA, 632 bp, Homo sapiens
tgatttctagtgtcacaatgaaactattccaaaactcaaactccctcaaactggtatgatgcctactatgctggacacatagttcatattattatagagttactggatgattgatgtaatttatttcaatagcatttgcacgatatttatttattagactcctcaaataatgtctaagaagaatagtgatgaaatataaataaagacatttaaaatcacatccatctacaaagcaataatatctagttggagagagaaaattaacaaagatgaaagaaaaagagaataattgatttatggtatgatcttggctctgaatatatgtcagtattagataaaaattgtattaaactgtatagattatccactgacctatcgtgaattacccaacaggggtttatattccttatataaaaaggaacgtatggctatacataagcagaacagggctgggacagtagctccatgatgttatcaacatctccgattccttccctctttccattttgtcatggttagcayttagctttcattcctttgtttattttgcaaacataaaatgacagctccatctgcaacttcaggtttagatgctagaaagaatataaaggaagtaccaaggaggaaaagtg

SEQ ID NO: 299951 - DNA, 547 bp, Homo sapiens
ggtatatgaccttctgggggcattccaccaggacagggaagtacacctcaggtgagcatacagacaactccagtaacactgagcatgctcacctcccaggtgctagcaggccactgtgcatgcaggcggctcaccctaagggaataatcaagggaaactggattcaagaygctggaagcaggcccacatataaaaccctaagtctaaggtcaaatggaccttgaacaagatgtccacttgttcctctcccaagtatactttactttctttgccttcctactctaaagctttttaataaactttcactcctgctctaaaacttgcctcggtctcatcttctgccttatgaccctcagccgaattctttcttgtgaggaaacaagaattgaggttgctgcagacccatatggattttctgcaacactcttagaaaatatagtcacagtattcacaaagttaaaaattaaattagcactatcttgatacaaagcacaacagttaatccacaaagttgaagaaatagtgttatcactcatgattacaaccc

SEQ ID NO: 299952 - DNA, 572 bp, Homo sapiens
tttcctgcatgccacaggatgaataggaagctctcctacaagggaggtcctaagtgggaattgcagtgagtcctggagtcacttaatacaaaacaatggaaataaaagtcatctcccttctattgtgccatttctccttttgcatgagcaaatgggaatcatctttagggcattatgtattcattgaggggctgtgaccttaatccataaagccctatacagtttatgctttgattaccttaaagcctgcctcccgctatacttgtcccagacaatcaaaatcgccccacaatgtgcctgctaacagttcagttgcagtgggcccaagatcgagccatctggtaaatagcgtttggcacagggcttctttccttaaggtgatctgaccacaccacatcttttgcctggaaatcttctctcttcttgccataatgctgggccagttttcagaactcatattattggataatacaataattaacaaaaataaactgtaataattaatccgatgaaacaaartctccatgaggaagttacacatgcttctaaatgatgaagatgaaatttataag

SEQ ID NO: 299953 - DNA, 429 bp, Homo sapiens
gactgaggaatcttataaactgcagatacattcattggccacttgcttggggcaggaaaggagaactgatccctccacattgaatgatctctgggagggaaggtgaaatggaggctaggttacacaacaggaaaaatgcaagaaatcttgccatcgatgctcctattggcagtttattttggtttctggttttgaaactgctgtgtgaagtcagctacyggaagtttttgttgctgttttctgatgcaggaggattataaatccaaccaagtttccctcaaacttcttctctgggattatttcaaagaaaaaaaaagagagagagaaaatgttgcttgtaccttctccctctgaagctatggtagcttccccaacgatcattctggagagagttctgactcaagattccataagaaaacccaaatgaag

SEQ ID NO: 299954 - DNA, 471 bp, Homo sapiens
aagtgacatgctgggatttgaacctaaatactgtatctctgatcctaacatctgtgccctgctgtaataccatgctgcctctctgtagatttcaccagccctgtgatgttggcacttttccttgttaaatcctaatttcttttcttttctttattacttttcattacaggatgtgatgggaaatgaaagttaagaagtccgattttccaacttgcaatgatgttcagaaaagaaaggtcatcgctggttgaagtgacggtactggatgagccatgggaattttgtatccatactattctgctctctgtgtcaccataagtgactggatgtagtayaggaagaaaaatagaatgtggctaacagccctgttgagaaaaactcactggcaaatatcaagacattctcttctcccatcagtccttcagatgactcacttcttccttgtttcctgagaatagaagttaccaatta

SEQ ID NO: 299955 - DNA, 471 bp, Homo sapiens
aagtgacatgctgggatttgaacctaaatactgtatctctgatcctaacatctgtgccctgctgtaataccatgctgcctctctgtagatttcaccagccctgtgatgttggcacttttccttgttaaatcctaatttcttttcttttctttattacttttcattacaggatgtgatgggaaatgaaagttaagaagtccgattttccaacttgcaatgatgttcagaaaagaaaggtcatcgctggttgaagtgacggtactggatgagccatgggaattttgtatccatactattctgctctctgtgtcaccataagtgactggatgtagtacaggaagaaaaatagaatgtggctaacagccctrttgagaaaaactcactggcaaatatcaagacattctcttctcccatcagtccttcagatgactcacttcttccttgtttcctgagaatagaagttaccaatta

SEQ ID NO: 299956 - DNA, 599 bp, Homo sapiens
tttttcatcaattatgcctcaaagaaaaaactcaaaaaaaaattaaagtatctatccacatcgtaaaggcttcataccattttttaaagcatccaagcaaaactgatattctgatctccagcagaccaaaaagaaaatttaaatgtactccacaaaagtaagatatatcaggataatttccaaattaaaagcaatgaatttacaaattaataatagaaatgtaaacagaaaacctcaacagcttcaaaattaagagtgcttctcttattagatcaaagtttatggaatatagtcagttatccaaagggacaaattcataatctttattattttttaaaagatcaataaaagtaaatgaactaatattcaattcaagaagccataaaaataagctgttttcttcactatcaaactattaaatgtttctcagggctagactctcttctcagtctgttgctaggcaatttcatccactcatccttccagtttcacttaccatttatttggcaagtgaaataatttaaaaaaaaaagyaaaagcaaacagacaacaaaaacaacaaaacagaagaatggaaaccaccctcctaaaaagagaga

SEQ ID NO: 299957 - DNA, 563 bp, Homo sapiens
aaataagatttctttagaactcagaaaacggcatccaagttaaacagagctttctcatttctttactaaaactataccttatttggaatccatcttcaatttcacaagttaaaattacctctattctttaaaaatcattttttcccaataaaagaggtttaacttatgatgatgtccaatgtgcttaagaatatttaaaattgatggataatttagacatggatgacctacataattaacttctagatgcaaaaaaactgactgataagcagctgttctaccaaaacaagtctgtagacacaaaatgaatagacaaagctgaaaagtctaaaaacctgttgttggtagtgagtgaaatcccaaggtattcaatgctaaaattattttgttgagaagatatttagatcaatgtcatcacagtagcttgacaccacaaatcagtrtaatgtgggcttgataagggcagaggtgcaaggcaaagcgaattttgcatttgactgttattcactcttaccactacataaaagaataaaagcttaattagtttaattagatcccacttg

SEQ ID NO: 299958 - DNA, 500 bp, Homo sapiens
tcactctcaactcttgtcctgcactgagacgcagtgttacaagccacatgttttcatgcatgcatgctgtgacttatagtagaaacacttcctatcaaaatgagaaaacaagaggactgggtggccattttcattcaacccattttactcattgaggtcactttaggaatttgacttggtaatgtccatcataggttctctctgtctctctctctctctctctctctatatatatatatatatatacatatatatatatatatttttagagacaggtctcactgtgttgcccaggctggagtgcagtggcgctgtcacagctcactgaagcctcagcctccaaggctgaagcgatcctctcacctcagcctcccaagtaggtgggaccaggtgtgaaccaccaaatccrggtaatttttttttttgtagtgccagggtctcactatattgcccaggttggtctcaaattcctgggctcaagtaatcctcccacctcagcc

SEQ ID NO: 299959 - DNA, 489 bp, Homo sapiens
atttttcataattaaaatcaaggcaggtggagctacaactaggaaaaaaataaaataaaatgaasgcaatcctctttcatcatctcatatatttctcaaaaatgttcttttcttcttgtctactgaaatatagtttctgggcccaagaaataagaggtttctcttcacacccttggggataattctgagacgaaacctgtccagggaccattgctgaccagtgctgattcacatgactgtgtcacgaaaatagaagatgtcattgggtttgggttcctcttggaacaccaaaataaacacagattgaaactctcccaaaactactccccaaccattttagcacagagaaaggctgttctccatgtggacatgttgaacatattctgattgttcaagccaggatctcaaaggatttggcaggtggagacagcagagcaggttatgacaccagctttgtcttcccacgtgtggatcaccattcttttcctc

SEQ ID NO: 299960 - DNA, 489 bp, Homo sapiens
atttttcataattaaaatcaaggcaggtggagctacaactaggaaaaaaataaaataaaatgaaggcaatcctctttcatcatctcatatatttctcaaaaatgttcttttcttcttgtctactgaaatatagtttctgggcccaagaaataagaggtttctcttcacacccttggggataattctgagacgaaacctgtccagggaccattgctgaccagtgctgattcacatgactgtgtcacgaaaatagaagatgtcattgggtttgggttcctcttggaacaccaaaataaacacagattgaaaytctcccaaaactactccccaaccattttagcacagagaaaggctgttctccatgtggacatgttgaacatattctgattgttcaagccaggatctcaaaggatttggcaggtggagacagcagagcaggttatgacaccagctttgtcttcccacgtgtggatcaccattcttttcctc

SEQ ID NO: 299961 - DNA, 607 bp, Homo sapiens
ggctgttctccatgtggacatgttgaacatattctgattgttcaagccaggatctcaaaggatttggcaggtggagacagcagagcaggttatgacaccagctttgtcttcccacgtgtggatcaccattcttttcctcgctctctcccagccctttgcccccatttccactgtttccccaaatcccagatcatccatttaacatgcattcactgrgcacctacatcagtaagaatgtttgtcactgaagggaaaatacacttattcatcttctgttccccttatccagggcatctgctgttttatgtgtgaggagttaggggagtgtaggcatgacacagagtctagcggggacctgtgagcttatccatcattgtgcatcaggagagtgctaaaaggccacaagaaaagtaaagcaactgaacaaactgtcccttctctattcttcataagttgccacatcacagtgctttgaggtgccagatcatgccttttattaattttgtcaacaagactcaatcccttcagagcaagagctaaatcccaccccagttgtgacacaatagaattctcagaagctaaaacttcttagggaaagagcaataaa

SEQ ID NO: 299962 - DNA, 607 bp, Homo sapiens
ggctgttctccatgtggacatgttgaacatattctgattgttcaagccaggatctcaaaggatttggcaggtggagacagcagagcaggttatgacaccagctttgtcttcccacgtgtggatcaccattcttttcctcgctctctcccagccctttgcccccatttccactgtttccccaaatcccagatcatccatttaacatgcattcactgggcacctacatcagtaagaatgtttgtcactgaagggaaaatacacttattcatcttctgttccccttatccagggcatctgctgttttatgtgtgaggagttaggggagtgtaggcatgacacagagtctagcggggacctgtgagcttatccatcattgtgcatcaggagagtgctaaaaggccacaagaaaagtaaagcaactgaacaaactgtcccttctctattcttcataagttgccacatcacagtgctttgaggtgccagatcatgccttttattaatttygtcaacaagactcaatcccttcagagcaagagctaaatcccaccccagttgtgacacaatagaattctcagaagctaaaacttcttagggaaagagcaataaa

SEQ ID NO: 299963 - DNA, 252 bp, Homo sapiens
aaattgatctgtcttaaatttggttggacagagaagagagataagccagggaagtaaaacaraagagcacattggtcattggtaggctaactgttaaaatatatacctgtggttttggtcatgtttgaagtaagtttttaattgctgatccttcaagaatgtgaattgagataacaaaataatcacctctaatctccactcctattccttcctctccttatctatatatagatgcatacacacctaaatgtt

SEQ ID NO: 299964 - DNA, 495 bp, Homo sapiens
acaaaagcacacaaatgtaaaaaggctggcgctaaatagattgcaaaaaggacacttgtttgcagtatgaaagctgaaacgagaaggcagcacagcatcttatcaacacactggaaatgtgcacactgaaagtctcaaatttttcaacactctgtgaatgtccatgactccctgtgaaagtgccacaaatattaattttrgggttacatgtacagaggacctgtacagcagagccattaatggacctcagatacctttgctgttccaagtgagaaggcaaatttgcaaatatggaatctgaataatgagtatcaactgtatatacagaaatacatacatacatatgaaactaaaccagtgcaatgttagtggaaatgaaaaggaaggaagatgaccggttcaatatgggagtaggagaggtagaaaacaaagatgatgctgaagtttctattttggaagactgggtaaatgttgatgttattaccaaaaaaacac

SEQ ID NO: 299965 - DNA, 386 bp, Homo sapiens
aaatggagagatctgccttgttactgccaagcagagatacaaatccaggttccccttggcctccatggacatgtgaaggaggttcctcctttttactgcygggcaatggggaaagttcctgttccccacgtgtctccactgtcaccattgtggagtggtcttactactgctgggtgatagtgaaaattgagtttccactaggccacctctgatgccatcccaatggggcagtgtttgggttcctggctacagctttgcaaaaatggaaatgtgggctctttacttctctttgctggcatgagtaggggtgggtgagaggcagtgttttttgtggtgtttggtggtgtagaatggttattgtctaagatttttctgttttgctaggc

SEQ ID NO: 299966 - DNA, 482 bp, Homo sapiens
taaactcatatcacatgaatattattagaactattattagaaaaatttgaggaagctatcactactaagattcaggtatattattataattattttaaatgaaatcaaattggttgcaaacatacttccttcagggcagatatctggttttatttcrtagtgttcttatccatacggtcaaaataactgcaaataataatcatcctactgaatgtattttactaatcattcttctccctaggcaatgcaaactagtgaaataaagccaacttcttccacatggcctaacactggcagatagccctactggccagatagcagatatgcagattgcattacctatgcctgttgagtgaacgaagtggttgtttgcaatttcattgtagcatattaatcaaatagtgggattccggcctctcatttaatatttttctatgtatgatattcattttcaaatatctaagatagggctgatgaaagat

SEQ ID NO: 299967 - DNA, 593 bp, Homo sapiens
ggactaaggaatgggtgctactgattggttggggataaaatcatgtgtgtgaaaaatggtccttgtgctttgagtgaggctctggatgggggccacaggaccagctgagtcatgagtcatgggcctgggaggagtcagttggttgccagaatgcaaaagtctggaaaacatctcagatgaccaatctcagattctacaatagtgatattatccataggagcaattggggaagttactaatcttgtkagctttgatgcagtaaatgattatggaaagtcaagctatacccatagcttagcagaattcaggccagttccataatcttaatcttgtgggctttcttcagtcttacagaagcagtttcagtctctgaaaaaggagggggtcagttttatggagggactattattatccttgattcaaagttaaaccataaactaaattcctcccatggttagcttggcttatgcccaagaatgagccaggacagctagcctataaggctaaaagcaggatggattcagcgatgctagagttctctcactatcacaatctttacaaaggtagtttcacactaaactttaaagttcact

SEQ ID NO: 299968 - DNA, 593 bp, Homo sapiens
ggactaaggaatgggtgctactgattggttggggataaaatcatgtgtgtgaaaaatggtccttgtgctttgagtgaggctctggatgggggccacaggaccagctgagtcatgagtcatgggcctgggaggagtcagttggttgccagaatgcaaaagtctggaaaacatctcagatgaccaatctcagattctacaatagtgatattatccataggagcaattggggaagttactaatcttgttasctttgatgcagtaaatgattatggaaagtcaagctatacccatagcttagcagaattcaggccagttccataatcttaatcttgtgggctttcttcagtcttacagaagcagtttcagtctctgaaaaaggagggggtcagttttatggagggactattattatccttgattcaaagttaaaccataaactaaattcctcccatggttagcttggcttatgcccaagaatgagccaggacagctagcctataaggctaaaagcaggatggattcagcgatgctagagttctctcactatcacaatctttacaaaggtagtttcacactaaactttaaagttcact

SEQ ID NO: 299969 - DNA, 489 bp, Homo sapiens
cagaattcaggccagttccataatcttaatcttgtgggctttcttcagtcttacagwagcagtttcagtctctgaaaaaggagggggtcagttttatggagggactattattatccttgattcaaagttaaaccataaactaaattcctcccatggttagcttggcttatgcccaagaatgagccaggacagctagcctataaggctaaaagcaggatggattcagcgatgctagagttctctcactatcacaatctttacaaaggtagtttcacactaaactttaaagttcactgcctttatcttataaaaataggaaaaggaagagagaaataaaggaaaattagttatcacatatgaatgtatgttaaaattagttggcatatattgatacaaatttatggatagctacttcaggtgtctttctgtgactagtcctaaaactataaatagtatttataactttgttgctcaagttccatttaccct

SEQ ID NO: 299970 - DNA, 568 bp, Homo sapiens
aatgccctctctgctattctagagctgcactgtccaaaacaccattagccacatgtgagtgtctaaaatgaaatttcaattcaaatgattaaattaaaaattcttagccacattagcccgatatcaagtgctcaatagtcatgatgacttgtcaccgtattggacaccacagatgtagaacatgttcatcattgcagaaagttctgttggacagtgctgttctagagaatgaaatattctwttcagttggttgtactggttaactgagaaataccacatatcctttgaaaaaagaaaggaaagaaaacaaaaaagaagctgatacagttacctctaaaatagtgctttcataaatctgaaggcatgttatagttttgaaatattttaggggtaggagtatgactttcaatactcactgtactgacagagggccagaatgttggcaaatggaaagctgggttgattgaatgctaaataaatcagcattttctgtctcaactatggcccaaatacaaaatctaaccactctggggaataatttaggaacatttaaagtcattaggatcat

SEQ ID NO: 299971 - DNA, 562 bp, Homo sapiens
ctcctggaaaagcaggctgggactctgtgaaggccttgttaattccctagaaaagcaggccactgggacgcagtgggattctcacctttccaagaccagcaagccactgatatgattggcagattattatgtcaattaagattaaagaggaatagatgaaacaggagagagaaattgaataagagaacattttctatgtagagggtagagatgttttattacattttctagctgcttctcatcctagccagtctgtccttcccttcagtatggaagatacatggcatttcccattttaagaaatcaaaaaacaaaaatctaagccaaaagaccctgagcatttaagaagaatagctagtatgaaaaaactttctaaattaccaaagtataaacatacaagatttctttgagtagtgagatttggccgaaatctktgttcagattttatgcaaatcaattttgtttcttttctatctaggttctggatatctcactattcactgaagctggtttaccatgggctgctctttctgttattatggggtttttattgcaatttata

SEQ ID NO: 299972 - DNA, 498 bp, Homo sapiens
ctattagctatatctgcttggttcatagtggcttccctggagcccagcacagagtttattatggggctcatgctcagaaatgttagggtatactccaatatagtttagagctcttgtcttggagctccactgcctgggtgtggacatccgttgcttactaaccatgtgctctcaggaaaaccatttacttttttgtgcctcaatttcctcagttgtaaaactgggacaataatagtaccaaatattaagtgttatataaattaatataaagtacttaaaaggagttcatggcacatagtragtgctttaaaagtgtgtgctattattattaactgcatgggtgaagcattgtcttctatgtagtagagaaagtgtttttagggaatattcagttaacaaagaactatcttttcacaacaagctgaagaaaactcgctggtgtagtgcgtttcaggaaataggaagtcatccccaataccctagaactgagagctgccc

SEQ ID NO: 299973 - DNA, 581 bp, Homo sapiens
tcttcaattctatgaaagctgagagaggtgaggaaactgtgtaagaaaaattagaagcaagcaaggttgggttcatgaagtttaaagaaagaaaccatctccattgtcgtaaaagtgcaagatgaagcggcaggtgctgatgtagaagctgcagcaagttatccagaagatctagctaagaacattgatgaagttagttaaactaaacaacagattttcagtggagaagaaacagctttctattgggagaagatattattttaggaatttcatagctagagagaagttaatgcctcaattcaaatcttcaaagaaggtgctgactctcttgttagaggccagtgagctgatgacttcaagttgaagcccatgcttgttggccattgtgaaaatcctaggacccttaagaattacgcaaatctatactgcttgtgctctagaaatggaaaaaagcctagatgactgcayatctgttcacagcatggtttactgaatattttaagctcactgttaagacctactgctcagcaaattgatacttttcttttgtctttttaaaaatttttttctgagacagtgtc

SEQ ID NO: 299974 - DNA, 544 bp, Homo sapiens
attctaacccagtcaaatctaacccctttgatccagggaaatctcccttagtctggaaaagtgattttatggtaatgaatcccttgggaaatcagccctcaaccatttggcaacattttctgaatggtcattattttttatctctgcagtttacatatcaatctgcaaacccaaagtggatagtcatatgggggatatattttttaaatagcttccttgccttggagagttacctataaagatgaagctaattttcattacgttccatccctagcacacatgtgggtacagtcaggcacatatgcatggaagtgcacacacacaaacacacacacctctcattgtcaccagtccaatactacagtcagattcaaacatgccccaaggggccaacaaaaaagccaaacccaagagcaaatgattayatactgaaaacattgtagaatgttaccgcttactatgttgagaaaactctatagaatatatacaagaatgtattttaaagtattaaaatattgctttagatcaggcctaaattgatcat

SEQ ID NO: 299975 - DNA, 504 bp, Homo sapiens
aaattgatcattaaggaaactcttcgcataaattctggatttgatgtccctctcaaatagctgagagtgattttaagagtgtccttgctggttcacagaaatcttggctcwgtgttggattacactaagcaaagatgaaataccagaaattcttcagtgtaatgtagtgaatggattctggagactttagtagataagaagactgaagtatgtttatgatgtgaccatccccactcactcccagaccatgtgccccaaagtgctccagaggatactctctgcactacatcctttcagggcagtgccaatatgtacaaaaagttctttagtggctgatctgcataagcaaggtattctattgcacaatactgtattgaaacgggctttctgatttcaattggatctgaaggattctggcaaaggccttaatctccagcagcaaagtagggttgcttttataacagccaaggcaagaaatcaaaatggttcagttttttggcaggg

SEQ ID NO: 299976 - DNA, 504 bp, Homo sapiens
aaattgatcattaaggaaactcttcgcataaattctggatttgatgtccctctcaaatagctgagagtgattttaagagtgtccttgctggttcacagaaatcttggctctgtgttggattacactaagcaaagatgaaataccagaaattcttcagtgtaatgtagtgaatggattctggagactttagtagataagaagactgaagtatgtttatgatgtgaccatccccactcactcccagaccatgtgccccaaagtgctccagaggatactctctgcactacatcctttcagggcagtgccaatatgtacaaaaagttctttagtsgctgatctgcataagcaaggtattctattgcacaatactgtattgaaacgggctttctgatttcaattggatctgaaggattctggcaaaggccttaatctccagcagcaaagtagggttgcttttataacagccaaggcaagaaatcaaaatggttcagttttttggcaggg

SEQ ID NO: 299977 - DNA, 580 bp, Homo sapiens
ttacacaattgagactacaaagcaactaggtaacaacactatgacaggaacaaaacctcacatatcaatattaactgagcatgaatggcctaaatgttccacttaaatgacataaagtggaaaactggatttaaaaaaacaagacccaacattcttccttcaagagccccatctcacatgtaacataactactggtaccacagaaatacaaaagatcctcagagactattgtgaacatctttatgagcaaaaactaaaaaaactagagaaaaytgataaattccgtttatttattgcttacttttccttccctctcaggaatgccaataagtcatagatttgattgctttacataatcccatattccttgaaggctctgttcacaaaaaaaagtcataaaataacaagtcacaaaattgaatccataataaaaaatccagcaacaaaataataatagcccaggaccagacaaatttatagccaaattctaccagatatacaaggaagagctggtaccaatcttactgaaactattccaaacaattgaagaggtaggattcctccctaactcattctacaa

SEQ ID NO: 299978 - DNA, 489 bp, Homo sapiens
aaatgcaatttaacacataacagaattaaaaacaaaaatgaagtgatgatctcaatagacaagggaaaagcattcratacaatccaatatcccttcataataaaagccctcaacaaactaggcattgaaggaaaatacttcaaagtaataagagtgtctgacaaatccacagccaacatcatacagaatgggcaaaagttgagagcattccacctaagaactaaaacaagacaaggatgtccactctcaccattcctatttaacacagtgctgaaagacatagctagagcaatcaggcaagagaaagaaataaaaggcatccaaatagaaaaaggataagtcagattatctctgtctcctgatgacatgatcctatacctatacaaccctaatgattcctccaaaagacttctagacctaatcaaaagacttcattatgaagtttagggatacaaaatcagcatatgaaaatcagtagcatttctatat

SEQ ID NO: 299979 - DNA, 554 bp, Homo sapiens
ggtaatttataaagaaaagaggttcaattggcctgcaggatgcagagtgtacaggaagcatggtgtcaacatctgcttctggttaggcctcaggaagcttataattgcggtggaaggtgaagggggagcagacacatcacatggtgaaagcaggagcaagagagtgatgtggggggagatcccagacttttaaataaccagatcttgtgtgaactgagtaagaactcacttatcataaagcggatggtgctaaacctttcaagaggatttgccctcacgatccaattatctcccaccaggccccacctccactgtgaattgcattttaacatgagatttggaggggacaaacacctaaaccwcatcatttactgtctcatttaaaacatttattccaccagatggtaatgtctttgaggaatacatagtttctgtaattccttgaatcacaaacccagtgccttgctcatttcaagattatttgactcaggttggtctcaccctgatatagtttggatctacatctccacacaaacctcatgttcagttgtaat

SEQ ID NO: 299980 - DNA, 496 bp, Homo sapiens
cagtaatttctttatatagcagtaagtgaatctctgaaaattgacatggccactttctcactctaatcccttaaaggcaacaggaccagatcagaggtcctggcacaccctcatttccatgtaaatagccttgaccacagaaatctgggaaagagacacattgaagaacggcattcactcatctaaccttaccgcatgtcttctctgcttgacttagcgcaggtttggcagtaaactggggaaaaagcaacttgaatggaatccaaggcatcgttctcttccacctgtgaaacggaccaatctctatggtgtggcctgcacagagctgcttcaggactcaccactgttcacagcctcttagaagtttaraagagggaagcctttccttttaaaaattataattaaaagtacatttacccttctctcttttgtctttttccccagttccttttgctaagtcagtctggtgctcctttttgtcaagcagcgtccttcc

SEQ ID NO: 299981 - DNA, 536 bp, Homo sapiens
ctgtatgatgtcaaagtgcaggaaagtaaggctaggtactgttctgagagttaattgggagatggagatgcatagcctaacaataaaggtattagaaaataaatgaggaaatgtaaggaaaaagaagtagtcttcagtagtgttggataaataaatgaagaaatagagaaatgaatgaaaaggttaaaataaaccctgaggtttcttacttgaagcattggtgttaaaattcattagctattaagatagaaatctgggtatgaagtctcatgtaacgataaatgcccatgaccatcctgcatatgtgttttgtttcatctgcacagggtaaaagagtcattttaaaaaaggatatttccaatgcacatacaaatccactggactccgttccaatgcactcaggggtgcaggctgcgcaggctgctcaagcttactacagtccgcaccacactctatagtctcctcatagagcccactttacccaygtggaaagtgatagctctctagcacacatctatttagccaaacaggctgtt

SEQ ID NO: 299982 - DNA, 567 bp, Homo sapiens
tttacctaatgtggaaggccttttccagttttgcccacatcctctgaggccttgcttaggatatctatgtgttttgataatttccttctccaaatccttccaagtttgcctgcagtacccaatcagaatcttaatatatrctatcttgttctctacatgactctgttatgtacttttatacaagcagtagtggatacacacgtactgttgtgtacttctaaaagaagtaatggatattagtttgttcatgacttatttccttaatgtataacttatttttcacataaattatttcctcaattatattataatcctctagagagtaagctgtataactcagtttaattattttgtatttcttcacacctagtggatggctggtgtctgtcagagttgcttaataatttcttgggcattggttgcagtttaatatttttccagaatagcttttaattaatctgtggggagtttcattcataggctaatttagctaatttatttattattttaaaaaacagagacagggtccctgctctgtcactcaggcggaaatgcagtggcatgacc

SEQ ID NO: 299983 - DNA, 548 bp, Homo sapiens
ggatactgactcagatgcaaaatctgacaaagctttgggttaattcccactgaagagggagtgaataccttctttgctgtttgagcaatattccatatattttctttttcagtataagtgtagagaagggatgtgtctcttaagtagtcagagacatagagtccagggaacactggcctttgttcttttcgaactcccagcacccaagccctccttttcatagagtgctcaatgaggaggtacagtgcaacacctcccattctggaacccaaagtcagggagcctctctcttccagccctctggtacctgggaamaaaactcaatcagtagggttcttctacctgggtcttggaaacttaaggaaaggatataaacatgtaggaagagtttagaaagtatacacaacagtaaaatcagtatgtcaaagtcatgtccactgacgagagccagcagcaagactctaaccagactattcatgtaggttctccttgactgtggttctagctcactcccctcctctgcactctttttgccataaatgtttctc

SEQ ID NO: 299984 - DNA, 548 bp, Homo sapiens
ggatactgactcagatgcaaaatctgacaaagctttgggttaattcccactgaagagggagtgaataccttctttgctgtttgagcaatattccatatattttctttttcagtataagtgtagagaagggatgtgtctcttaagtagtcagagacatagagtccagggaacactggcctttgttcttttcgaactcccagcacccaagccctccttttcatagagtgctcaatgaggaggtacagtgcaacacctcccattctggaacccaaagtcagggagcctctctcttccagccctctggtacctgggaacaaaactcaatcagtagggttcttctacctgggtcttggaaacttaaggaaaggatataaacatgtaggaagagtttagaaagtatacacaacagtaaaatcagtatgtcaaagtcatgtccactgacgagagccagcagcaagactctaaccagactattcatgtaggttctccttgactgtggttctagctcrctcccctcctctgcactctttttgccataaatgtttctc

SEQ ID NO: 299985 - DNA, 440 bp, Homo sapiens
caacaagtacacaatattaagagtttktttccccacagcttgccttagaggtacaagttcagtcactgcataatctacttcccaatttgtcacaggtgacaaatttttccaagtgctttgtcactgtataacatgattaccacctttccaagccctgttaacagttttcttgctgtctgccaattgaccactaagcccatgcaacatagtttaagtttttattatggtatcactctatttttgggtactaattcttatatctgtctgaacattcttggttatggtgcagtaaaaaacaaccttaaaatctcaatggcttaagatagggaaaatttagttcttgttcatgatgtccaaagaagcttagttcatcataatgactcagggcctcaggctaatggaagctccatctgagcacatgttttgatggttgaccaggc

SEQ ID NO: 299986 - DNA, 440 bp, Homo sapiens
caacaagtacacaatattaagagtttgtttccccacagcttgccttagaggtacaagttcagtcactgcataatctacttcccaatttgtcacaggtgacaaatttttccaagtgctttgtcactgtataacatgattaccacctttccaagccctgttaacagttttcttgctgyctgccaattgaccactaagcccatgcaacatagtttaagtttttattatggtatcactctatttttgggtactaattcttatatctgtctgaacattcttggttatggtgcagtaaaaaacaaccttaaaatctcaatggcttaagatagggaaaatttagttcttgttcatgatgtccaaagaagcttagttcatcataatgactcagggcctcaggctaatggaagctccatctgagcacatgttttgatggttgaccaggc

SEQ ID NO: 299987 - DNA, 440 bp, Homo sapiens
caacaagtacacaatattaagagtttgtttccccacagcttgccttagaggtacaagttcagtcactgcataatctacttcccaatttgtcacaggtgacaaatttttccaagtgctttgtcactgtataacatgattaccacctttccaagccctgttaacagttttcttgctgtctgccaattgaccactaagcccatgcaacatagtttaagtttttattatggtatcactctattttkgggtactaattcttatatctgtctgaacattcttggttatggtgcagtaaaaaacaaccttaaaatctcaatggcttaagatagggaaaatttagttcttgttcatgatgtccaaagaagcttagttcatcataatgactcagggcctcaggctaatggaagctccatctgagcacatgttttgatggttgaccaggc

SEQ ID NO: 299988 - DNA, 475 bp, Homo sapiens
catctgaacatcagaaggaacaaactccggacacgccgcctttaagaactgtaacactcaccgccagggtccgcggcttcattcttgaagtcagtgaaaccaagaacccaccaattccggacacaatactttatgtgtcagtcttcatgwctatcccattaatatgtgcacacatatatctctccaagctggcaatctgatagtggtttccctgctagtagggactaatatatcccctggtcttaaaggcagggcagagtagagagctattccacctgcagggaactcaagatccaattttcttaatgtcatcaaaacttattactccttccattgccacaaatgatcatttctagaaaagaaaatgtgcaaataagtattcacattgactggccatatgttctatttcttaaaaagcaccattctgggcagctggcatataggttttaggacgtggtatggggtgtagaaaaaa

SEQ ID NO: 299989 - DNA, 595 bp, Homo sapiens
ttatcagcatttacagaattttctacccctttcaggtgctctgtcgaggagaaaagcagagatggcttccttctttctcartaggggtttggcatttttttgaattttttttaattcagctttccaatgggcttccataaactgtgattttgtaggttagaatatttttattatttgggtgggagtgacattctcttgtgactttctgtatcctacagggaaagatgaagctggcagattggaatttttatacaactttgtttactactaattgctttcttacctagtgtatctcacaaagtagaaatagtcatagcaaacatatgtttagtaataataatactaactagctcttcatctatgcaaagctctatcttaagcattttaaatctattaactcatgcattcttcattgcagcacaatcattcaaattccaatattatccttattgtaatgcaaggaatatgagtttctagaagtttgagtaaatgactcaatatgtaaataactcaagtgactcaataagacaaaaaaaagcaaccaaatataaaaatgggaaaaagaaatgagtaacaatgaacattaaaaagtaag

SEQ ID NO: 299990 - DNA, 314 bp, Homo sapiens
cgaaactccgtttcgaaaaaaaaaaaaacataataatattgtttcttccaggtgagcatatatcaaaaagccaggcaatgacaagtgttgacaaagatatgggacaggccgggtgtggtgtctcatgcctgtaatcccaccactttgagaggccaaggcaagaggactacttgggtctaggagtttgagaacagcctgsgtaacatagtgagactctatgtctactaaaaatgaacaaattagccaggcatggtggtgtatgcctgtattccctgctagtcaggagactgtggtagaaacattgtttgtgccca

SEQ ID NO: 299991 - DNA, 314 bp, Homo sapiens
cgaaactccgtttcgaaaaaaaaaaaaacataataatattgtttcttccaggtgagcatatatcaaaaagccaggcaatgacaagtgttgacaaagatatgggacaggccgggtgtggtgtctcatgcctgtaatcccaccactttgagaggccaaggcaagaggactacttgggtctaggagtttgagaacagcctgcgyaacatagtgagactctatgtctactaaaaatgaacaaattagccaggcatggtggtgtatgcctgtattccctgctagtcaggagactgtggtagaaacattgtttgtgccca

SEQ ID NO: 299992 - DNA, 662 bp, Homo sapiens
aaagatatgggacaggccgggtgtggtgtctcatgcctgtaatcccaccactttgagaggccaaggcaagaggactacttgggtctaggagtttgagaacagcctgcgtaacatagtgagactctatgtctactaaaaatgaacaaattagccaggcatggtggtgtatgcctgtattccctgctagtcaggagactgtggtagaaacattgtttgtgcccaagaattcaaagctgtagtgagccacaatcatgcaactgcactccaaactccagcctgaatgaaagagtgagatcttttctcacaaaaaaaaaaaggaattaaaaaagatgtgggacaatgaatacttgcatctgataatggtggacatatctattgatgcaccacctggaaattagcatgatagctccaattaatcaagytgaatatttacatatccttagccaaacagtgctactacttggtatatacttttgagaaactgttgcataaatacaacaaagacttacacataaagactttttcagaaccaggattcaaacctagacattctgaccttctaaatttttgctcacagctattatattatgctaaaagtagtcataagttcagttgtaagatttcttacacaagtgagattcctaccacacagaaatccaatc

SEQ ID NO: 299993 - DNA, 632 bp, Homo sapiens
ttcacaggtgttcatgtgtatgtgtttcgctgtgtgaatgcacatgcttatatttgtgtgtgtgtgggttttctgaaggggaaaattcagaaaaagaggagaacatgaatttttaaaattaaaatggtgttagaggcattaagggttgaagacagaaggcaaaaataaatagtgtaggtaaaatgcgtgacttggttaggcagaagagggaagatctgttataaagagaaacagaggttgggagaccttgtaaaagtaggagcttctgcagartgggaatatggaagacctccatattctacagcttttatatcactattattaatgttattttgagtacatgattaccctctgataataacaatgtttaaaatatcttcaccaagaagtcttattttagaaaaaaatatatgtaatttttaccctttgtgttttcagaggaagaggagctattttttgagaagtatcattgaatgtaaaagcagatttgtttaagtcattttaaatgttaaaaagcaataaatgccataaattaatctttgtggggaagacagttcgtaaaaacagaaatgatcgtggacaaaataacaccaaaatcttcaggaatcctggaaactatcttggtacttggt

SEQ ID NO: 299994 - DNA, 632 bp, Homo sapiens
ttcacaggtgttcatgtgtatgtgtttcgctgtgtgaatgcacatgcttatatttgtgtgtgtgtgggttttctgaaggggaaaattcagaaaaagaggagaacatgaatttttaaaattaaaatggtgttagaggcattaagggttgaagacagaaggcaaaaataaatagtgtaggtaaaatgcgtgacttggttaggcagaagagggaagatctgttataaagagaaacagaggttgggagaccttgtaaaagtaggagcttctgcagagtgggaatatggaagacctccatattctacagcttttatatcactattattaatgttattttgagtacatgattaccctctgataataacaatgtttaaaatatcttcaccaagaagtcttattttagaaaaaaatrtatgtaatttttaccctttgtgttttcagaggaagaggagctattttttgagaagtatcattgaatgtaaaagcagatttgtttaagtcattttaaatgttaaaaagcaataaatgccataaattaatctttgtggggaagacagttcgtaaaaacagaaatgatcgtggacaaaataacaccaaaatcttcaggaatcctggaaactatcttggtacttggt

SEQ ID NO: 299995 - DNA, 511 bp, Homo sapiens
agttctactaaatattggcaattatatttcagtgatatataaacattgtgtcacttaattcttttagtaagtccatgacataggcaccgttggtttccttattaagtaggtaaagaaactgaagcttgggaaaggtcaattaactcctaaggtcatacatcctagtaagatccactcagagcacttgagagatgctgtgttagttcattctgcattgctataaaggaatacctgagaccaggtaattyataacaaaaagagatttctttggcccatgattctgcaggctgtacaagaaacacaatgctggcatctgcttcttgtgagaacctcaggaagcttaaaatcatggcagaagtccatgtaggtaacatggtgagaaagggcatgagagagggggagagggtgccagactcttttaaaccaccaggtcttgtgtgatcttatagagtgagaagtcactcattaccgtgaggacagcattaagccattcatgagggatccatcccca

SEQ ID NO: 299996 - DNA, 511 bp, Homo sapiens
agttctactaaatattggcaattatatttcagtgatatataaacattgtgtcacttaattcttttagtaagtccatgacataggcaccgttggtttccttattaagtaggtaaagaaactgaagcttgggaaaggtcaattaactcctaaggtcatacatcctagtaagatccactcagagcacttgagagatgctgtgttagttcattctgcattgctataaaggaatacctgagaccaggtaatttataacaaaaagagatttctttggcccatgattctgcaggctgtacaagaaacacaatgctggcatctgcttcttgtgagaacctcaggaagcttaaaatcatggsagaagtccatgtaggtaacatggtgagaaagggcatgagagagggggagagggtgccagactcttttaaaccaccaggtcttgtgtgatcttatagagtgagaagtcactcattaccgtgaggacagcattaagccattcatgagggatccatcccca

SEQ ID NO: 299997 - DNA, 591 bp, Homo sapiens
agatgatatctcattctagttttggtttgcattcctctgatgatcaataatgttgagcaccttttcatatgcctgttaggcaaaagcatcttaactgatattccattgatgctttaggtgtatctgtacgtgtgtttgagggtgtctggctctgaaaatttagctgaaagcagttgagattctcaaattagcaacttaaagttgactccaataattcctactttaaagaccaataattatgagctcctgttaagaaaaaatatagtctttgctcaactaattatttattggttataaaacatggttatgaaaaaatctaaaaacctaaatctcataaaaaaagaagcaatgagaaaaatatggtttacaggtattattcaacaataacagatgctcatttttgttcaaggttcttctactgggagtgagagtaaattgagagaagttgtatttcagtattaattaaaaatgaaaagtgggggtttttwaattgaattctctttggaaactaataatttacctatacccttaagatacacagtaatttgttggaagaaagtcaaataatttaaacacatttcatataatgtg

SEQ ID NO: 299998 - DNA, 613 bp, Homo sapiens
tggcaaggagacctatatagattatatctatgtaatctatatatttctttctgtaactgccagaactccctagaaacccaaagttcagttaactttctgaagttcactaagtagagaaacatcctgctgtggtgatctgttcacttggcaaaaaggaagtcaggagctgtgattaaagctctgctagtattcagcagcaagagcttaatttcctgctttccctggtatatatacagtgtttggccaggcagtgatgtttccctgtgaactctatctccaaccccctctcttcttccctttttgaatggcatgctctgtcttgaaatgtcaagtctcactatgcaattatgtaattcaacctctacaggactcggrtgattatgcaattaggaaaaccctaaggttttagctgcttgttccttaatctttcttggatggccctggctgtataactctgcaaaaagctctcttttcagaactggacagcatctcatggacatccttttctccagtccatcacctctgaaatcttttttggatgctgtttctttggactgagaatattaacaaaccattattacaataggaggtaggcttaatcatgttcaataca
